United States Patent Application Publication US 2017/0114356 A1 - sequence listing, part 33

SEQ ID NO: 43858 - DNA, 2528 bp, Zea Mays
cccggcttcttcctgccagtttagccgaccactacttctccactgctgctcgccgtctcctcaaccaccgctgcgccacacaatcctcccgcggcgtgtctgactcaagtcaggatgtctcacaggagcagaagcagaagcccgaaccgaatccaaccgagtcatctcaacgactccgccagtttccaattgcccccttttttaggcgttcaagttccttcgagatggcgacaagtagaggagagagatagtgtttccttcaatccctctggcaccaccgacaacgtatccccgtggccatcctcgattctccttgccaaaggaggcgtcagccaagtcgtcgcgtcgcggccggcgatccactcgaggatgttcctggtgagtagcaccaccgcggtggggatcagggatgggggaggtgacaatggcgatggtggggtgcagctcgccgacaaccttaagatcttcaagactgacaacttcgatctcgacgtctacgtgcagtccaagtgccagactatgaacgagaagcactgccactatgatgtgtatgcttgcgtcaggacaggagacccaaaagtacttcacagatgaatgtgacattttccacaagaacgagatacgaaatggccaaggactactgacgatgatgacgacatggccaccatcgccgccctcaggttggtgttaccattggtcagtatgttgaaggggcacgacattcttgtattagggctacttagcttgtattatgagcacttttggctgtcctgggtaacttctgcggacctggtagttgtttctccacatggttctgctgtcctgggtagcaaaaaacattgcttctggtcttgttcttgttgcaaagtccagtagcaatgatgcttcgaggctgacattctggctctccaacacagttgtcctcagggagataattgtacaaagttttggcatctcacatcaatttactccatccatgacgaatatgagcatgaatggtggtgccaaaaaacttgatgggaaatctatgacaatgctgtggagaaacaactacaatggcatgcaaggcagatgccagatgattggcacgaaacaagtacacttttgtctacattagagaagattgagtcttggatattttctcgcattgttgagacaatatggtggcaggtagaaggatcatcaactccaaagattggtagagtgctaggtcctactttgggtgatcagtagtagggcaccttttctgttaacctgtggaaggttgcgttttacgacgcattcaacagaatgtgccccctcagtattggcagacatgagtgtggtgatggagcagtgtgtagcccgtttggatgttgccatgtttaatgccatccttcatgaatcagcaagtgagataccaacagaccctatatctgacccaattgttgacccaaaagtcctaccaattccagctggtgatctaagctttgggtcacgcgcgcagctgaataactctattggaaactggtccagatggctgacagataagcttggcatagatcatgatgactttgaggacataggagatgttgaagacgaaagaagagctgcagctgaaacgaaatcatttcaacttctcaatgagctaagtgatcatctattttttagtttttcataattttcctttcatggcctccttacatgtttgatttcctatgatccatgagttgccaatcatgataacgcggtttcactatgtaggagatgaacaaggatgctgtcacaactgatgctatcggcagtatcagaacttgatgatgcttgtagactgttcatggtgcttgtagactgttcatggtgcttgtagggatgatgtatgtctatggcttactgagctccaaccaactatggaaggagcgttagctaggacagcagttagtctaacagttgtggacaaagttcagtataccatacactgaagcgcacccttgttgctaaaggtgtcaacagctttgctcagcagaatggaggatcattgtcactagcagcaagacctcaagcccaggcagagagcaaagaaggatgatgcactttccaacctatgtagcacgttgggacaactcaagaaaatggcagtggatatggacatagaaattgacaggcaaaacaaagtgctggttcctttcagcgacgacgtcgatgaactgaattttagactgaaaggcgtgaatcagtgtggacgccagttgctgggcaagtgatatggagccagaattcgggcagtttggagactatcgcctcgattgcagaatttaagaacattgttgttttacatgttttttgcagtgaatcaggccacacatgttgtattagtgagagaatgatgatttattttgtattattaaggatttcatagattattttagttttccctgaactgcaatcgtttcaataacatagaggggactaccttgaatgacatttaggtgaatttttaaggtatgtccattattccattatagagcacaaagcctacttcgtacaac

SEQ ID NO: 43859 - DNA, 2569 bp, Zea Mays
cgcatctgcgatgaccggtatccatgaccgatacccccaccccggcttcttcctgccagtttagccgaccactacttctccactgctgctcgccgtctcctcaaccaccgctgcgccacacaatcctcccgcggcgtgtctgactcaagtcaggatgtctcacaggagcagaagcagaagcccgaaccgaatccaaccgagtcatctcaacgactccgccagtttccaattgcccccttttttaggcgttcaagttccttcgagatggcgacaagtagaggagagagatagtgtttccttcaatccctctggcaccaccgacaacgtatccccgtggccatcctcgattctccttgccaaaggaggcgtcagccaagtcgtcgcgtcgcggccggcgatccactcgaggatgttcctggtgagtagcaccaccgcggtggggatcagggatgggggaggtgacaatggcgatggtggggtgcagctcgccgacaaccttaagatcttcaagactgacaacttcgatctcgacgtctacgtgcagtccaagtgccagactatgaacgagaagcactgccactatgatgtgtatgcttgcgtcaggacaggagacccaaaagtacttcacagatgaatgtgacattttccacaagaacgagctgtagatctaatttgattcttccgttcctcctgtggtgggatcaatcagatacgaaatggccaaggactactgacgatgatgacgacatggccaccatcgccgccctcagttgtcctcagggagataattgtacaaagttttggcatctcacatcaatttactccatccatgacgaatatgagcatgaatggtggtgccaaaaaacttgatgggaaatctatgacaatgctgtggagaaacaactacaatggcatgcaaggcagatgccagatgattggcacgaaacaagtacacttttgtctacattagagaagattgagtcttggatattttctcgcattgttgagacaatatggtggcaggcactaactcctcacatgcaaaaacaggtagaaggatcatcaactccaaagattggtagagtgctaggtcctactttgggtgatcagtagtagggcaccttttctgttaacctgtggaaggttgcgttttacgacgcattcaacagaatgtgccccctcagtattggcagacatgagtgtggttgtttaccaatattagcaaaactagtattttttaacatccttagtttcaaagaataacctgttctttttgttactacaaatatatttccgaactttgcgagttcttcattattaggtgatggagcagtgtgtagcccgtttggatgttgccatgtttaatgccatccttcatgaatcagcaagtgagataccaacagaccctatatctgacccaattgttgacccaaaagtcctaccaattccagctggtgatctaagctttgggtcacgcgcgcagctgaataactctattggaaactggtccagatggctgacagataagcttggcatagatcatgatgactttgaggacataggagatgttgaagacgaaagaagagctgcagctgaaacgaaatcatttcaacttctcaatgagctaagtgatcatctattttttagtttttcataattttcctttcatggcctccttacatgtttgatttcctatgatccatgagttgccaatcatgataacgcggtttcactatgtaggagatgaacaaggatgctgtcacaactgatgctatcggcagtatcagaacttgatgatgcttgtagactgttcatggtgcttgtagactgttcatggtgcttgtagggatgatgtatgtctatggcttactgagctccaaccaactatggaaggagcgttagctaggacagcagttagtctaacagttgtggacaaagttcagtataccatacactgaagcgcacccttgttgctaaagctgcaggtgtcaacagctttgctcagcagaatggaggatcattgtcactagcagcaagacctcaagcccaggcagttaaacatcggtttctttccttctttctttgggcctagagagcaaagaaggatgatgcactttccaacctatgtagcacgttgggacaactcaagaaaatggcagtggatatggacatagaaattgacaggcaaaacaaagtgctggttcctttcagcgacgacgtcgatgaactgaattttagactgaaaggcgtgaatcagtgtggacgccagttgctgggcaagtgatatggagccagaattcgggcagtttggagactatcgcctcgattgcagaatttaagaacattgttgttttacatgttttttgcagtgaatcaggccacacatgttgtattagtgagagaatgatgatttattttgtattattaaggatttcatagattattttagttttccctgaactgcaatcgtttcaataacatagaggggactaccttgaatgacatttaggtgaatttttaaggtatgtccattattccattatagagcacaaagcctacttcgtacaac

SEQ ID NO: 43860 - DNA, 2602 bp, Zea Mays
agtcgtcctgctcgccccgtgctgtgttcgcatctgcgatgaccggtatccatgaccgatacccccaccccggcttcttcctgccagtttagccgaccactacttctccactgctgctcgccgtctcctcaaccaccgctgcgccacacaatcctcccgcggcgtgtctgactcaagtcaggatgtctcacaggagcagaagcagaagcccgaaccgaatccaaccgagtcatctcaacgactccgccagtttccaattgcccccttttttaggcgttcaagttccttcgagatggcgacaagtagaggagagagatagtgtttccttcaatccctctggcaccaccgacaacgtatccccgtggccatcctcgattctccttgccaaaggaggcgtcagccaagtcgtcgcgtcgcggccggcgatccactcgaggatgttcctggtgagtagcaccaccgcggtggggatcagggatgggggaggtgacaatggcgatggtggggtgcagctcgccgacaaccttaagatcttcaagactgacaacttcgatctcgacgtctacgtgcagtccaagtgccagactatgaacgagaagcactgccactatgatgtgtatgcttgcgtcaggacaggagacccaaaagtacttcacagatgaatgtgacattttccacaagaacgagatacgaaatggccaaggactactgacgatgatgacgacatggccaccatcgccgccctcaggttggtgttaccattggtcagtatgttgaaggggcacgacattcttgtattagggctacttagcttgtattatgagcacttttggctgtcctgggtaacttctgcggacctggtagttgtttctccacatggttctgctgtcctgggtagcaaaaaacattgcttctggtcttgttcttgttgcaaagtccagtagcaatgatgcttcgaggctgacattctggctctccaacacagttgtcctcagggagataattgtacaaagttttggcatctcacatcaatttactccatccatgacgaatatgagcatgaatggtggtgccaaaaaacttgatgggaaatctatgacaatgctgtggagaaacaactacaatggcatgcaaggcagatgccagatgattggcacgaaacaagtacacttttgtctacattagagaagattgagtcttggatattttctcgcattgttgagacaatatggtggcaggtagaaggatcatcaactccaaagattggtagagtgctaggtcctactttgggtgatcagtagtagggcaccttttctgttaacctgtggaaggttgcgttttacgacgcattcaacagaatgtgccccctcagtattggcagacatgagtgtggtgatggagcagtgtgtagcccgtttggatgttgccatgtttaatgccatccttcatgaatcagcaagtgagataccaacagaccctatatctgacccaattgttgacccaaaagtcctaccaattccagctggtgatctaagctttgggtcacgcgcgcagctgaataactctattggaaactggtccagatggctgacagataagcttggcatagatcatgatgactttgaggacataggagatgttgaagacgaaagaagagctgcagctgaaacgaaatcatttcaacttctcaatgagctaagtgatcatctattttttagtttttcataattttcctttcatggcctccttacatgtttgatttcctatgatccatgagttgccaatcatgataacgcggtttcactatgtaggagatgaacaaggatgctgtcacaactgatgctatcggcagtatcagaacttgatgatgcttgtagactgttcatggtgcttgtagactgttcatggtgcttgtagggatgatgtatgtctatggcttactgagctccaaccaactatggaaggagcgttagctaggacagcagttagtctaacagttgtggacaaagttcagtataccatacactgaagcgcacccttgttgctaaagctgcaggtgtcaacagctttgctcagcagaatggaggatcattgtcactagcagcaagacctcaagcccaggcagagagcaaagaaggatgatgcactttccaacctatgtagcacgttgggacaactcaagaaaatggcagtggatatggacatagaaattgacaggcaaaacaaagtgctggttcctttcagcgacgacgtcgatgaactgaattttagactgaaaggcgtgaatcagtgtggacgccagttgctgggcaagtgatatggagccagaattcgggcagtttggagactatcgcctcgattgcagaatttaagaacattgttgttttacatgttttttgcagtgaatcaggccacacatgttgtattagtgagagaatgatgatttattttgtattattaaggatttcatagattattttagttttccctgaactgcaatcgtttcaataacatagaggggactaccttgaatgacatttaggtgaatttttaaggtatgtccattattccattatagagcacaaagcctacttcgtacaac

SEQ ID NO: 43861 - DNA, 2542 bp, Zea Mays
ccacacgcaaaagtcgtcctgctcgccccgtgctgtgttcgcatctgcgatgaccggtatccatgaccgatacccccaccccggcttcttcctgccagtttagccgaccactacttctccactgctgctcgccgtctcctcaaccaccgctgcgccacacaatcctcccgcggcgtgtctgactcaagtcaggatgtctcacaggagcagaagcagaagcccgaaccgaatccaaccgagtcatctcaacgactccgccagtttccaattgcccccttttttaggcgttcaagttccttcgagatggcgacaagtagaggagagagatagtgtttccttcaatccctctggcaccaccgacaacgtatccccgtggccatcctcgattctccttgccaaaggaggcgtcagccaagtcgtcgcgtcgcggccggcgatccactcgaggatgttcctggtgagtagcaccaccgcggtggggatcagggatgggggaggtgacaatggcgatggtggggtgcagctcgccgacaaccttaagatcttcaagactgacaacttcgatctcgacgtctacgtgcagtccaagtgccagactatgaacgagaagcactgccactatgatgtgtatgcttgcgtcaggacaggagacccaaaagtacttcacagatgaatgtgacattttccacaagaacgagatacgaaatggccaaggactactgacgatgatgacgacatggccaccatcgccgccctcaggctgacattctggctctccaacacagttgtcctcagggagataattgtacaaagttttggcatctcacatcaatttactccatccatgacgaatatgagcatgaatggtggtgccaaaaaacttgatgggaaatctatgacaatgctgtggagaaacaactacaatggcatgcaaggcagatgccagatgattggcacgaaacaagtacacttttgtctacattagagaagattgagtcttggatattttctcgcattgttgagacaatatggtggcaggcactaactcctcacatgcaaaaacaggtagaaggatcatcaactccaaagattggtagagtgctaggtcctactttgggtgatcagtagtagggcaccttttctgttaacctgtggaaggttgcgttttacgacgcattcaacagaatgtgccccctcagtattggcagacatgagtgtggttgtttaccaatattagcaaaactagtattttttaacatccttagtttcaaagaataacctgttctttttgttactacaaatatatttccgaactttgcgagttcttcattattaggtgatggagcagtgtgtagcccgtttggatgttgccatgtttaatgccatccttcatgaatcagcaagtgagataccaacagaccctatatctgacccaattgttgacccaaaagtcctaccaattccagctggtgatctaagctttgggtcacgcgcgcagctgaataactctattggaaactggtccagatggctgacagataagcttggcatagatcatgatgactttgaggacataggagatgttgaagacgaaagaagagctgcagctgaaacgaaatcatttcaacttctcaatgagctaagtgatcatctattttttagtttttcataattttcctttcatggcctccttacatgtttgatttcctatgatccatgagttgccaatcatgataacgcggtttcactatgtaggagatgaacaaggatgctgtcacaactgatgctatcggcagtatcagaacttgatgatgcttgtagactgttcatggtgcttgtagactgttcatggtgcttgtagggatgatgtatgtctatggcttactgagctccaaccaactatggaaggagcgttagctaggacagcagttagtctaacagttgtggacaaagttcagtataccatacactgaagcgcacccttgttgctaaagctgcaggtgtcaacagctttgctcagcagaatggaggatcattgtcactagcagcaagacctcaagcccagagagcaaagaaggatgatgcactttccaacctatgtagcacgttgggacaactcaagaaaatggcagtggatatggacatagaaattgacaggcaaaacaaagtgctggttcctttcagcgacgacgtcgatgaactgaattttagactgaaaggcgtgaatcagtgtggacgccagttgctgggcaagtgatatggagccagaattcgggcagtttggagactatcgcctcgattgcagaatttaagaacattgttgttttacatgttttttgcagtgaatcaggccacacatgttgtattagtgagagaatgatgatttattttgtattattaaggatttcatagattattttagttttccctgaactgcaatcgtttcaataacatagaggggactaccttgaatgacatttaggtgaatttttaaggtatgtccattattccattatagagcacaaagcctacttcgtacaac

SEQ ID NO: 43862 - DNA, 1018 bp, Zea Mays
cccggcttcttcctgccagtttagccgaccactacttctccactgctgctcgccgtctcctcaaccaccgctgcgccacacaatcctcccgcggcgtgtctgactcaagtcaggatgtctcacaggagcagaagcagaagcccgaaccgaatccaaccgagtcatctcaacgactccgccagtttccaattgcccccttttttaggcgttcaagttccttcgagatggcgacaagtagaggagagagatagtgtttccttcaatccctctggcaccaccgacaacgtatccccgtggccatcctcgattctccttgccaaaggaggcgtcagccaagtcgtcgcgtcgcggccggcgatccactcgaggatgttcctggtgagtagcaccaccgcggtggggatcagggatgggggaggtgacaatggcgatggtggggtgcagctcgccgacaaccttaagatcttcaagactgacaacttcgatctcgacgtctacgtgcagtccaagtgccagactatgaacgagaagcactgccactatgatgtgtatgcttgcgtcaggacaggagacccaaaagtacttcacagatgaatgtgacattttccacaagaacgagctgtagatctaatttgattcttccgttcctcctgtggtgggatcaatcagatacgaaatggccaaggactactgacgatgatgacgacatggccaccatcgccgccctcaggtaggccatcctccaagagctcaacctccacgcctctgttctaaaggtcctttcctccccacctatatgttttctattgaatccacaatgactagattaggcaaagcttcaccgatgagcttagcatcctactataacatgatgaatgtacacatagatcagtttaggaaactactgaaacttatctgttctattttcaataaagataaatcaacttccccacatcactcatgttcttcttgtagttttgctgcttgctattgtcttagattaattaagccatatttg

SEQ ID NO: 43863 - DNA, 1019 bp, Zea Mays
cgtgctgtgttcgcatctgcgatgaccggtatccatgaccgatacccccaccccggcttcttcctgccagtttagccgaccactacttctccactgctgctcgccgtctcctcaaccaccgctgcgccacacaatcctcccgcggcgtgtctgactcaagtcaggatgtctcacaggagcagaagcagaagcccgaaccgaatccaaccgagtcatctcaacgactccgccagtttccaattgcccccttttttaggcgttcaagttccttcgagatggcgacaagtagaggagagagatagtgtttccttcaatccctctggcaccaccgacaacgtatccccgtggccatcctcgattctccttgccaaaggaggcgtcagccaagtcgtcgcgtcgcggccggcgatccactcgaggatgttcctggtgagtagcaccaccgcggtggggatcagggatgggggaggtgacaatggcgatggtggggtgcagctcgccgacaaccttaagatcttcaagactgacaacttcgatctcgacgtctacgtgcagtccaagtgccagactatgaacgagaagcactgccactatgatgtgtatgcttgcgtcaggacaggagacccaaaagtacttcacagatgaatgtgacattttccacaagaacgagatacgaaatggccaaggactactgacgatgatgacgacatggccaccatcgccgccctcaggtaggccatcctccaagagctcaacctccacgcctctgttctaaaggtcctttcctccccacctatatgttttctattgaatccacaatgactagattaggcaaagcttcaccgatgagcttagcatcctactataacatgatgaatgtacacatagatcagtttaggaaactactgaaacttatctgttctattttcaataaagataaatcaacttccccacatcactcatgttcttcttgtagttttgctgcttgctattgtcttagattaattaagccatatttg

SEQ ID NO: 43864 - DNA, 1439 bp, Zea Mays
gtcaaggacgccaagaagttactgcctttctccctctcagcgcctcagcggcgttcccgtctcctcgttctctcgctcacccggctccgtcggccatgaacacacgagccagcgcgccaagcaccggccaccgtctccggccttacctgacctgacctgaccggctgcatcgatggttccgcaaatacccgacccctgcgacgacgatggccaagatcaccggtgcccgcctgctgcggctctacctcccccgtggccttaccctcctcttcctccccccgcctcccacggccgcagcaccttcgtcacggctctcatcatcgccacctcggtgcttgtcttcctcgctctctgcctctccatacttgtcttcgtccggcgcaggcggctgcggcgtcgtcgagaggcgctccttgaagccgccttggcaccggcggcggccgccaccttccccgacgaaggcgaaggcgacggcggtcccggcggagaggtcgtgcaccacgtgtggcacatccggaccgtcgggctcgacaacgcggcgatcgagtccatcgcgcttacgcggtactgcgccggcggcgtgctcggcgcttccgactgcaccgtctgcctcggcgagttccaggacggcgagctcctccggctgctccccaagtgcgcccacgcgttccacgttgagtgcatagacacctggctccgggcccacgtcagctgcccgctctgccgcgccgacgtgatggacccaggcgccgcggccgccgacgccgacgccgagcaacccccggggaccgacgccgccgacgcctcggccgagcgatccgcaagcaataccccaaccacggaactggagcggctcgatcagcaggccaacgagcaccaccaagagctgcgagtccaaatcgatcagcccgaccactccagctcgctggaactggaacggcgagccggccggccgcgaggagcaggggacatgcggtgctgtttgctgcgaggtgtcaccagagcctgctgagctgaagaggtcatggtccgccagcagccggtggacgctcctctagcggcattgccgcgcacgcagctcgctcctgccgctgtgatgggacggaagatctgtatcttgttttttgcctgccactgatcacgcttgtttctgctgatactctgtacagttttcaatttcagcgcggaggttcgctgaacagtcacacctgcattgtggtgttcagcttgcttgttctttgcaagattcagaggaatgcttcggctgctgtataaaaactcaaatatgtccttcctgtaactgaaactccatctgttttatatttctttttttctttatccgagctcagcgtatctctaactggaacttgaaactgtttcgatacgaaagtgatctgtaaatattgatatgatttttaccattcggcatgatgagaaca

SEQ ID NO: 43865 - DNA, 2038 bp, Zea Mays
tcgtctcccaccccacccgcaccaaacccctaatcaccacacaaccaaaacccaaacaacacgtgtcctcctacaattgccgacgtcgccgtcgtcttcgccagagcagcgccagcggttgttttgtatctcctcgtcggacccagcgttccagtcgagcatggcttcgattccgcctccgtcttcctccgtcgctgccctcacccgccaaccggcccagttcttgaaatggtgcagtgtatccaaggagacaaaggcatcggtctgcagtttcttggctacaaattcaaacagcactagggtgaaatcagtgggcttgagagtagcattatccttcaaaaatgatggtggttatccagctgacggtttctctgggaatggcaacacgctattgccaaaaagcacatccgttcgtggcgaggaccatccggttgctgatcctgtactcccaatggattcaatgatgacgccagaaatcctctctgctaatttggcacttgttatggacaagttctcagatgatgacacagatactgaacttgatttggatagcccgacagagggcttcgcgtcgattccagatgccattgaggacgtacggcaaggaaaacttgtgattgttgttgatgacgaatcaagggaaaatgaaggagatctgataatggctgcctccttggttaccccagaggcgatggcttttatagtaaggcatggaacaggaattgtttgtgtcagcatgaaagaagatgatctggaaagactgagccttcctttgatggttaccacaaaagaaaacgaggagaagctatgcactgcttttactgttacagtggatgcaaaagagggcacaactactggagtatctgccaaagacagggcaaaaacagttatgactcttgcatctcctgactctaggcctgaggacttcaaccgccctggtcatattttccctttgaaatacagagaagggggtgttctgaaacgagctggacacacagaggcatcggttgaccttgccatgctggctggattacctcctgttgctgtcctttgtgagattgtggatgatgcagatggttccatggctcgcctgccaaagttgcgtgtctttgctgaaagggaaaatttgaagattatatctattgctgacttgattaggtataggaggaaaagagacaggctagttgaacgtgcttctgttgcacgcttgccttcgcaatggggcaatggccatggatattgctacagatctgctattgatggcatcgagcatcttgccatggtgaaaggtgatattggtgacggccaagacattttggtgagggtgcactctgagtgcctcacaggcgacatttttagatccgcaagatgcgattgcggtgaccagcttgcaatggcaattgagatgattgagaaggccggaagaggcgtaatagtttatctccgtggacacgaaggacggggtatcggtctgggccacaagcttcgtgcttataacttgcaggatgatgggcgtgatactgtggaagctaatgaagaacttggtcttcctgtggactcacgagaatatgggattggcgcacagatactacgggacctaggagtccgttcgatgaagctgatgactaatagccctgcgaaatatagtggtctgaaaggttatggactgagcattgcgggcagggtgcccttggttacgccaattaccagcgagaacccccaaatactgtgtcccatccgtgaacatggaagagccaccgaagacggagaggaacttgtcaagcaaggatacatacccgacttgggcattttggtcttcagttgcggtcgttgcacgagctgctagaggtgtttgtcatcgttgtaacatcagcgtggtccaacatcttccgtatgttcgcaaacattcctccaagccatgaagaggtgctttgttgatcaatctagatgaggaggacgaggtcaactttgtgaaggtgaagagtctgtaaagttttgctgcttctgttccaagatcgtccctaacgaggaggatgaa

SEQ ID NO: 43866 - DNA, 2042 bp, Zea Mays
cttcccgttgtctcgtaagctgcgaggaatccccagctcgtcttgccccggttgttttgtatctcctcgtcggacccagcgttccagtcgagcatggcttcgattccgcctccgtcttcctccgtcgctgccctcacccgccaaccggcccagttcttgaaatggtgcagtgtatccaaggagacaaaggcatcggtctgcagtttcttggctacaaattcaaacagcactagggtgaaatcagtgggcttgagagtagcattatccttcaaaaatgatggtggttatccagctgacggtttctctgggaatggcaacacgctattgccaaaaagcacatccgttcgtggcgaggaccatccggttgctgatcctgtactcccaatggattcaatgatgacgccagaaatcctctctgctaatttggcacttgttatggacaagttctcagatgatgacacagatactgaacttgatttggatagcccgacagagggcttcgcgtcgattccagatgccattgaggacgtacggcaaggaaaacttgtgattgttgttgatgacgaatcaagggaaaatgaaggagatctgataatggctgcctccttggttaccccagaggcgatggcttttatagtaaggcatggaacaggaattgtttgtgtcagcatgaaagaagatgatctggaaagactgagccttcctttgatggttaccacaaaagaaaacgaggagaagctatgcactgcttttactgttacagtggatgcaaaagagggcacaactactggagtatctgccaaagacagggcaaaaacagttatgactcttgcatctcctgactctaggcctgaggacttcaaccgccctggtcatattttccctttgaaatacagagaagggggtgttctgaaacgagctggacacacagaggcatcggttgaccttgccatgctggctggattacctcctgttgctgtcctttgtgagattgtggatgatgcagatggttccatggctcgcctgccaaagttgcgtgtctttgctgaaagggaaaatttgaagattatatctattgctgacttgattaggtataggaggaaaagagacaggctagttgaacgtgcttctgttgcacgcttgccttcgcaatggggcaatggccatggatattgctacagatctgctattgatggcatcgagcatcttgccatggtgaaaggtgatattggtgacggccaagacattttggtgagggtgcactctgagtgcctcacaggcgacatttttagatccgcaagatgcgattgcggtgaccagcttgcaatggcaattgagatgattgagaaggccggaagaggcgtaatagtttatctccgtggacacgaaggacggggtatcggtctgggccacaagcttcgtgcttataacttgcaggatgatgggcgtgatactgtggaagctaatgaagaacttggtcttcctgtggactcacgagaatatgggattggcgcacagatactacgggacctaggagtccgttcgatgaagctgatgactaatagccctgcgaaatatagtggtctgaaaggttatggactgagcattgcgggcagggtgcccttggttacgccaattaccagcgagaacccccaaatactgtgtcccatccgtgaacatggaagagccaccgaagacggagaggaacttgtcaagcaaggatacatacccgacttgggcattttggtcttcagttgcggtcgttgcacgagctgctagaggtgtttgtcatcgttgtaacatcagcgtggtccaacatcttccgtatgttcgcaaacattcctccaagccatgaagaggtgctttgttgatcaatctagatgaggaggacgaggtcaactttgtgaaggtacaaatggagaatgtaacacccctggtgttatgtgaactaaaacattggcatgccatcatatgtactggcattatattgctcgtgttacacttagaatgcatccactagactaaaatttcaaaaaaatatg

SEQ ID NO: 43867 - DNA, 1937 bp, Zea Mays
tcgtctcccaccccacccgcaccaaacccctaatcaccacacaaccaaaacccaaacaacacgtgtcctcctacaattgccgacgtcgccgtcgtcttcgccagagcagcgccagcgggcccagttcttgaaatggtgcagtgtatccaaggagacaaaggcatcggtctgcagtttcttggctacaaattcaaacagcactagggtgaaatcagtgggcttgagagtagcattatccttcaaaaatgatggtggttatccagctgacggtttctctgggaatggcaacacgctattgccaaaaagcacatccgttcgtggcgaggaccatccggttgctgatcctgtactcccaatggattcaatgatgacgccagaaatcctctctgctaatttggcacttgttatggacaagttctcagatgatgacacagatactgaacttgatttggatagcccgacagagggcttcgcgtcgattccagatgccattgaggacgtacggcaaggaaaaaggcgatggcttttatagtaaggcatggaacaggaattgtttgtgtcagcatgaaagaagatgatctggaaagactgagccttcctttgatggttaccacaaaagaaaacgaggagaagctatgcactgcttttactgttacagtggatgcaaaagagggcacaactactggagtatctgccaaagacagggcaaaaacagttatgactcttgcatctcctgactctaggcctgaggacttcaaccgccctggtcatattttccctttgaaatacagagaagggggtgttctgaaacgagctggacacacagaggcatcggttgaccttgccatgctggctggattacctcctgttgctgtcctttgtgagattgtggatgatgcagatggttccatggctcgcctgccaaagttgcgtgtctttgctgaaagggaaaatttgaagattatatctattgctgacttgattaggtataggaggaaaagagacaggctagttgaacgtgcttctgttgcacgcttgccttcgcaatggggcaatggccatggatattgctacagatctgctattgatggcatcgagcatcttgccatggtgaaaggtgatattggtgacggccaagacattttggtgagggtgcactctgagtgcctcacaggcgacatttttagatccgcaagatgcgattgcggtgaccagcttgcaatggcaattgagatgattgagaaggccggaagaggcgtaatagtttatctccgtggacacgaaggacggggtatcggtctgggccacaagcttcgtgcttataacttgcaggatgatgggcgtgatactgtggaagctaatgaagaacttggtcttcctgtggactcacgagaatatgggattggcgcacagatactacgggacctaggagtccgttcgatgaagctgatgactaatagccctgcgaaatatagtggtctgaaaggttatggactgagcattgcgggcagggtgcccttggttacgccaattaccagcgagaacccccaaatactgtgtcccatccgtgaacatggaagagccaccgaagacggagaggaacttgtcaagcaaggatacatacccgacttgggcattttggtcttcagttgcggtcgttgcacgagctgctagaggtgtttgtcatcgttgtaacatcagcgtggtccaacatcttccgtatgttcgcaaacattcctccaagccatgaagaggtgctttgttgatcaatctagatgaggaggacgaggtcaactttgtgaaggtacaaatggagaatgtaacacccctggtgttatgtgaactaaaacattggcatgccatcatatgtactggcattatattgctcgtgttacacttagaatgcatccactagactaaaatttcaaaaaaatatg

SEQ ID NO: 43868 - DNA, 2033 bp, Zea Mays
tcgtctcccaccccacccgcaccaaacccctaatcaccacacaaccaaaacccaaacaacacgtgtcctcctacaattgccgacgtcgccgtcgtcttcgccagagcagcgccagcggttgttttgtatctcctcgtcggacccagcgttccagtcgagcatggcttcgattccgcctccgtcttcctccgtcgctgccctcacccgccaaccggcccagttcttgaaatggtgcagtgtatccaaggagacaaaggcatcggtctgcagtttcttggctacaaattcaaacagcactagggtgaaatcagtgggcttgagagtagcattatccttcaaaaatgatggtggttatccagctgacggtttctctgggaatggcaacacgctattgccaaaaagcacatccgttcgtggcgaggaccatccggttgctgatcctgtactcccaatggattcaatgatgacgccagaaatcctctctgctaatttggcacttgttatggacaagttctcagatgatgacacagatactgaacttgatttggatagcccgacagagggcttcgcgtcgattccagatgccattgaggacgtacggcaaggaaaaaggcgatggcttttatagtaaggcatggaacaggaattgtttgtgtcagcatgaaagaagatgatctggaaagactgagccttcctttgatggttaccacaaaagaaaacgaggagaagctatgcactgcttttactgttacagtggatgcaaaagagggcacaactactggagtatctgccaaagacagggcaaaaacagttatgactcttgcatctcctgactctaggcctgaggacttcaaccgccctggtcatattttccctttgaaatacagagaagggggtgttctgaaacgagctggacacacagaggcatcggttgaccttgccatgctggctggattacctcctgttgctgtcctttgtgagattgtggatgatgcagatggttccatggctcgcctgccaaagttgcgtgtctttgctgaaagggaaaatttgaagattatatctattgctgacttgattaggtataggaggaaaagagacaggctagttgaacgtgcttctgttgcacgcttgccttcgcaatggggcaatggccatggatattgctacagatctgctattgatggcatcgagcatcttgccatggtgaaaggtgatattggtgacggccaagacattttggtgagggtgcactctgagtgcctcacaggcgacatttttagatccgcaagatgcgattgcggtgaccagcttgcaatggcaattgagatgattgagaaggccggaagaggcgtaatagtttatctccgtggacacgaaggacggggtatcggtctgggccacaagcttcgtgcttataacttgcaggatgatgggcgtgatactgtggaagctaatgaagaacttggtcttcctgtggactcacgagaatatgggattggcgcacagatactacgggacctaggagtccgttcgatgaagctgatgactaatagccctgcgaaatatagtggtctgaaaggttatggactgagcattgcgggcagggtgcccttggttacgccaattaccagcgagaacccccaaatactgtgtcccatccgtgaacatggaagagccaccgaagacggagaggaacttgtcaagcaaggatacatacccgacttgggcattttggtcttcagttgcggtcgttgcacgagctgctagaggtgtttgtcatcgttgtaacatcagcgtggtccaacatcttccgtatgttcgcaaacattcctccaagccatgaagaggtgctttgttgatcaatctagatgaggaggacgaggtcaactttgtgaaggtacaaatggagaatgtaacacccctggtgttatgtgaactaaaacattggcatgccatcatatgtactggcattatattgctcgtgttacacttagaatgcatccactagactaaaatttcaaaaaaatatg

SEQ ID NO: 43869 - DNA, 2013 bp, Zea Mays
tcgtctcccaccccacccgcaccaaacccctaatcaccacacaaccaaaacccaaacaacacgtgtcctcctacaattgccgacgtcgccgtcgtcttcgccagagcagcgccagcgggcccagttcttgaaatggtgcagtgtatccaaggagacaaaggcatcggtctgcagtttcttggctacaaattcaaacagcactagggtgaaatcagtgggcttgagagtagcattatccttcaaaaatgatggtggttatccagctgacggtttctctgggaatggcaacacgctattgccaaaaagcacatccgttcgtggcgaggaccatccggttgctgatcctgtactcccaatggattcaatgatgacgccagaaatcctctctgctaatttggcacttgttatggacaagttctcagatgatgacacagatactgaacttgatttggatagcccgacagagggcttcgcgtcgattccagatgccattgaggacgtacggcaaggaaaacttgtgattgttgttgatgacgaatcaagggaaaatgaaggagatctgataatggctgcctccttggttaccccagaggcgatggcttttatagtaaggcatggaacaggaattgtttgtgtcagcatgaaagaagatgatctggaaagactgagccttcctttgatggttaccacaaaagaaaacgaggagaagctatgcactgcttttactgttacagtggatgcaaaagagggcacaactactggagtatctgccaaagacagggcaaaaacagttatgactcttgcatctcctgactctaggcctgaggacttcaaccgccctggtcatattttccctttgaaatacagagaagggggtgttctgaaacgagctggacacacagaggcatcggttgaccttgccatgctggctggattacctcctgttgctgtcctttgtgagattgtggatgatgcagatggttccatggctcgcctgccaaagttgcgtgtctttgctgaaagggaaaatttgaagattatatctattgctgacttgattaggtataggaggaaaagagacaggctagttgaacgtgcttctgttgcacgcttgccttcgcaatggggcaatggccatggatattgctacagatctgctattgatggcatcgagcatcttgccatggtgaaaggtgatattggtgacggccaagacattttggtgagggtgcactctgagtgcctcacaggcgacatttttagatccgcaagatgcgattgcggtgaccagcttgcaatggcaattgagatgattgagaaggccggaagaggcgtaatagtttatctccgtggacacgaaggacggggtatcggtctgggccacaagcttcgtgcttataacttgcaggatgatgggcgtgatactgtggaagctaatgaagaacttggtcttcctgtggactcacgagaatatgggattggcgcacagatactacgggacctaggagtccgttcgatgaagctgatgactaatagccctgcgaaatatagtggtctgaaaggttatggactgagcattgcgggcagggtgcccttggttacgccaattaccagcgagaacccccaaatactgtgtcccatccgtgaacatggaagagccaccgaagacggagaggaacttgtcaagcaaggatacatacccgacttgggcattttggtcttcagttgcggtcgttgcacgagctgctagaggtgtttgtcatcgttgtaacatcagcgtggtccaacatcttccgtatgttcgcaaacattcctccaagccatgaagaggtgctttgttgatcaatctagatgaggaggacgaggtcaactttgtgaaggtacaaatggagaatgtaacacccctggtgttatgtgaactaaaacattggcatgccatcatatgtactggcattatattgctcgtgttacacttagaatgcatccactagactaaaatttcaaaaaaatatg

SEQ ID NO: 43870 - DNA, 2226 bp, Zea Mays
tcgtctcccaccccacccgcaccaaacccctaatcaccacacaaccaaaacccaaacaacacgtgtcctcctacaattgccgacgtcgccgtcgtcttcgccagagcagcgccagcggttgttttgtatctcctcgtcggacccagcgttccagtcgagcatggcttcgattccgcctccgtcttcctccgtcgctgccctcacccgccaaccggcccagttcttgaaatggtgcagtgtatccaaggagacaaaggcatcggtctgcagtttcttggctacaaattcaaacagcactagggtgaaatcagtgggcttgagagtagcattatccttcaaaaatgatggtggttatccagctgacggtttctctgggaatggcaacacgctattgccaaaaagcacatccgttcgtggcgaggaccatccggttgctgatcctgtactcccaatggattcaatgatgacgccagaaatcctctctgctaatttggcacttgttatggacaagttctcagatgatgacacagatactgaacttgatttggatagcccgacagagggcttcgcgtcgattccagatgccattgaggacgtacggcaaggaaaacttgtgattgttgttgatgacgaatcaagggaaaatgaaggagatctgataatggctgcctccttggttaccccagaggcgatggcttttatagtaaggcatggaacaggaattgtttgtgtcagcatgaaagaagatgatctggaaagactgagccttcctttgatggttaccacaaaagaaaacgaggagaagctatgcactgcttttactgttacagtggatgcaaaagagggcacaactactggagtatctgccaaagacagggcaaaaacagttatgactcttgcatctcctgactctaggcctgaggacttcaaccgccctggtcatattttccctttgaaatacagagaagggggtgttctgaaacgagctggacacacagaggcatcggttgaccttgccatgctggctggattacctcctgttgctgtcctttgtgagattgtggatgatgcagatggttccatggctcgcctgccaaagttgcgtgtctttgctgaaagggaaaatttgaagattatatctattgctgacttgattaggtataggaggaaaagagacaggctagttgaacgtgcttctgttgcacgcttgccttcgcaatggggcaatggccatggatattgctacagatctgctattgatggcatcgagcatcttgccatggtgaaaggtgatattggtgacggccaagacattttggtgagggtgcactctgagtgcctcacaggcgacatttttagatccgcaagatgcgattgcggtgaccagcttgcaatggcaattgagatgattgagaaggccggaagaggcgtaatagtttatctccgtggacacgaaggacggggtatcggtctgggccacaagcttcgtgcttataacttgcaggatgatgggcgtgatactgtggaagctaatgaagaacttggtcttcctgtggactcacgagaatatgggattggcgcacagatactacgggacctaggagtccgttcgatgaagctgatgactaatagccctgcgaaatatagtggtctgaaaggttatggactgagcattgcgggcagggtgcccttggttacgccaattaccagcgagaaccgtaagtacctcgagaccaaaagaacaaagatggggcatgtatatggattggctaatgcgcaggttaaccagccaagtggtagccagagcacagaagagaagcattgagcccaaaaaacccaaatactgtgtcccatccgtgaacatggaagagccaccgaagacggagaggaacttgtcaagcaaggatacatacccgacttgggcattttggtcttcagttgcggtcgttgcacgagctgctagaggtgtttgtcatcgttgtaacatcagcgtggtccaacatcttccgtatgttcgcaaacattcctccaagccatgaagaggtgctttgttgatcaatctagatgaggaggacgaggtcaactttgtgaaggtacaaatggagaatgtaacacccctggtgttatgtgaactaaaacattggcatgccatcatatgtactggcattatattgctcgtgttacacttagaatgcatccactagactaaaatttcaaaaaaatatg

SEQ ID NO: 43871 - DNA, 1870 bp, Zea Mays
tcgtctcccaccccacccgcaccaaacccctaatcaccacacaaccaaaacccaaacaacacgtgtcctcctacaattgccgacgtcgccgtcgtcttcgccagagcagcgccagcggttgttttgtatctcctcgtcggacccagcgttccagtcgagcatggcttcgattccgcctccgtcttcctccgtcgctgccctcacccgccaaccggcccagttcttgaaatggtgcagtgtatccaaggagacaaaggcatcggtctgcagtttcttggctacaaattcaaacagcactagggtgaaatcagtgggcttgagagtagcattatccttcaaaaatgatggtggttatccagctgacggtttctctgggaatggcaacacgctattgccaaaaagcacatccgttcgtggcgaggaccatccggttgctgatcctgtactcccaatggattcaatgatgacgccagaaatcctctctgctaatttggcacttgttatggacaagttctcagatgatgacacagatactgaacttgatttggatagcccgacagagggcttcgcgtcgattccagatgccattgaggacgtacggcaaggaaaacttgtgattgttgttgatgacgaatcaagggaaaatgaaggagatctgataatggctgcctccttggttaccccagaggcgatggcttttatagtaaggcatggaacaggaattgtttgtgtcagcatgaaagaagatgatctggaaagactgagccttcctttgatggttaccacaaaagaaaacgaggagaagctatgcactgcttttactgttacagtggatgcaaaagagggcacaactactggagtatctgccaaagacagggcaaaaacagttatgactcttgcatctcctgactctaggcctgaggacttcaaccgccctggtcatattttccctttgaaatacagagaagggggtgttctgaaacgagctggacacacagaggcatcggttgaccttgccatgctggctggattacctcctgttgctgtcctttgtgagattgtggatgatgcagatggttccatggctcgcctgccaaagttgcgtgtctttgctgaaagggaaaatttgaagattatatctattgctgacttgattaggtataggaggaaaagagacaggctagttgaacgtgcttctgttgcacgcttgccttcgcaatggggcaatggccatggatattgctacagatctgctattgatggcatcgagcatcttgccatggtgaaaggtgatattggtgacggccaagacattttggtgagggtgcactctgagtgcctcacaggcgacatttttagatccgcaagatgcgattgcggtgaccagcttgcaatggcaattgagatgattgagaaggccggaagaggcgtaatagtttatctccgtggacacgaaggacggggtatcggtctgggccacaagcttcgtgcttataacttgcaggatgatgggcgtgatactgtggaagctaatgaagaacttggtcttcctgtggactcacgagaatatgggattggcgcacagatactacgggacctaggagtccgttcgatgaagctgatgactaatagccctgcgaaatatagtggtctgaaaggttatggactgagcattgcgggcagggtgcccttggttacgccaattaccagcgagaaccgtaagtacctcgagaccaaaagaacaaagatggggcatgtatatggattggctaatgcgcaggttaaccagccaagtggtagccagagcacagaagagaagcattgagcccaaaaaagattacataattcggcctatggattatataagcac

SEQ ID NO: 43872 - DNA, 2029 bp, Zea Mays
ggaatccccagctcgtcttgccccggttgttttgtatctcctcgtcggacccagcgttccagtcgagcatggcttcgattccgcctccgtcttcctccgtcgctgccctcacccgccaaccggcccagttcttgaaatggtgcagtgtatccaaggagacaaaggcatcggtctgcagtttcttggctacaaattcaaacagcactagggtgaaatcagtgggcttgagagtagcattatccttcaaaaatgatggtggttatccagctgacggtttctctgggaatggcaacacgctattgccaaaaagcacatccgttcgtggcgaggaccatccggttgctgatcctgtactcccaatggattcaatgatgacgccagaaatcctctctgctaatttggcacttgttatggacaagttctcagatgatgacacagatactgaacttgatttggatagcccgacagagggcttcgcgtcgattccagatgccattgaggacgtacggcaaggaaaacttgtgattgttgttgatgacgaatcaagggaaaatgaaggagatctgataatggctgcctccttggttaccccagaggcgatggcttttatagtaaggcatggaacaggaattgtttgtgtcagcatgaaagaagatgatctggaaagactgagccttcctttgatggttaccacaaaagaaaacgaggagaagctatgcactgcttttactgttacagtggatgcaaaagagggcacaactactggagtatctgccaaagacagggcaaaaacagttatgactcttgcatctcctgactctaggcctgaggacttcaaccgccctggtcatattttccctttgaaatacagagaagggggtgttctgaaacgagctggacacacagaggcatcggttgaccttgccatgctggctggattacctcctgttgctgtcctttgtgagattgtggatgatgcagatggttccatggctcgcctgccaaagttgcgtgtctttgctgaaagggaaaatttgaagattatatctattgctgacttgattaggtataggaggaaaagagacaggctagttgaacgtgcttctgttgcacgcttgccttcgcaatggggcaatggccatggatattgctacagatctgctattgatggcatcgagcatcttgccatggtgaaaggtgatattggtgacggccaagacattttggtgagggtgcactctgagtgcctcacaggcgacatttttagatccgcaagatgcgattgcggtgaccagcttgcaatggcaattgagatgattgagaaggccggaagaggcgtaatagtttatctccgtggacacgaaggacggggtatcggtctgggccacaagcttcgtgcttataacttgcaggatgatgggcgtgatactgtggaagctaatgaagaacttggtcttcctgtggactcacgagaatatgggattggcgcacagatactacgggacctaggagtccgttcgatgaagctgatgactaatagccctgcgaaatatagtggtctgaaaggttatggactgagcattgcgggcagggtgcccttggttacgccaattaccagcgagaaccgtaagtacctcgagaccaaaagaacaaagatggggcatgtatatggattggctaatgcgcaggttaaccagccaagtggtagccagagcacagaagagaagcattgagcccaaaaaagtgatgcattcttctttttgggagttcctgaaatcttctccctcgatatttccatatattcttttttttctatatttccatatattctttctttcacatagaaggccgttttgttcttcaactgtagctgtaggtttcaagatggttaatgagcttaataaaagcaagtttaataatataagcaactgttcttgtaatgagctttacagtctgtcttagccgatatgtataatggttagcctttacaatgaatatatggtcaactgtttttctcacaaaatttaaa

SEQ ID NO: 43873 - DNA, 2025 bp, Zea Mays
tcgtctcccaccccacccgcaccaaacccctaatcaccacacaaccaaaacccaaacaacacgtgtcctcctacaattgccgacgtcgccgtcgtcttcgccagagcagcgccagcgggcccagttcttgaaatggtgcagtgtatccaaggagacaaaggcatcggtctgcagtttcttggctacaaattcaaacagcactagggtgaaatcagtgggcttgagagtagcattatccttcaaaaatgatggtggttatccagctgacggtttctctgggaatggcaacacgctattgccaaaaagcacatccgttcgtggcgaggaccatccggttgctgatcctgtactcccaatggattcaatgatgacgccagaaatcctctctgctaatttggcacttgttatggacaagttctcagatgatgacacagatactgaacttgatttggatagcccgacagagggcttcgcgtcgattccagatgccattgaggacgtacggcaaggaaaacttgtgattgttgttgatgacgaatcaagggaaaatgaaggagatctgataatggctgcctccttggttaccccagaggcgatggcttttatagtaaggcatggaacaggaattgtttgtgtcagcatgaaagaagatgatctggaaagactgagccttcctttgatggttaccacaaaagaaaacgaggagaagctatgcactgcttttactgttacagtggatgcaaaagagggcacaactactggagtatctgccaaagacagggcaaaaacagttatgactcttgcatctcctgactctaggcctgaggacttcaaccgccctggtcatattttccctttgaaatacagagaagggggtgttctgaaacgagctggacacacagaggcatcggttgaccttgccatgctggctggattacctcctgttgctgtcctttgtgagattgtggatgatgcagatggttccatggctcgcctgccaaagttgcgtgtctttgctgaaagggaaaatttgaagattatatctattgctgacttgattaggtataggaggaaaagagacaggctagttgaacgtgcttctgttgcacgcttgccttcgcaatggggcaatggccatggatattgctacagatctgctattgatggcatcgagcatcttgccatggtgaaaggtgatattggtgacggccaagacattttggtgagggtgcactctgagtgcctcacaggcgacatttttagatccgcaagatgcgattgcggtgaccagcttgcaatggcaattgagatgattgagaaggccggaagaggcgtaatagtttatctccgtggacacgaaggacggggtatcggtctgggccacaagcttcgtgcttataacttgcaggatgatgggcgtgatactgtggaagctaatgaagaacttggtcttcctgtggactcacgagaatatgggattggcgcacagatactacgggacctaggagtccgttcgatgaagctgatgactaatagccctgcgaaatatagtggtctgaaaggttatggactgagcattgcgggcagggtgcccttggttacgccaattaccagcgagaaccgtaagtacctcgagaccaaaagaacaaagatggggcatgtatatggattggctaatgcgcaggttaaccagccaagtggtagccagagcacagaagagaagcattgagcccaaaaaagtgatgcattcttctttttgggagttcctgaaatcttctccctcgatatttccatatattcttttttttctatatttccatatattctttctttcacatagaaggccgttttgttcttcaactgtagctgtaggtttcaagatggttaatgagcttaataaaagcaagtttaataatataagcaactgttcttgtaatgagctttacagtctgtcttagccgatatgtataatggttagcctttacaatgaatatatggtcaactgtttttctcacaaaatttaaa

SEQ ID NO: 43874 - DNA, 1870 bp, Zea Mays
ctccagccagcaggtagcagccagcaggttcctgctgtactttttactgaattactgcaaccaagatactatagtgacttcactcgttcttgcaacggaagcagcaaaggttatttgtgcaatcattttattgattgcagacggtagtctgaaaaaacagttcagtaattggaccctcattggatcactgactgcgtctggactgcctgctgctatctatgcccttcagaatagtctgctgcaagtatcattcaagaatctggattccttgaccttttcaatccttaaccagactaagcttttgtggacatcatttttcacatttcttattttggggcaaaagcaatcatccaagcaaattttagcattggccctcttaattagtgccgctgttcttttaagtgttggggagagtactagcaaaggttcaaatggtggtggctctgactatatcttgctatatgggatcattccggttacagtcgcttctatgctgtctggtttggcctcttcattatgtcagtgggcatctcaggttaaaaagcatacctcttacatgatgactatagaaatgtcatttattggaagtgtgtgcttgttagcaagtacctatcggtcaccagatggagaagccataaggaaatatggggttttccatgaatggactttctggaccatggtaccggtattaatgaatgccgtgggtggaattcttgttggtcttgtcacaacttacgcaggtggtattagaaagggttttgttatagtctcagctctccttgtaactgcactgctacaattcgtgtatgatgggaagccaccatcactctactgcctgatggcattaccacttgttgcgacaagcatattcatctaccagaagtatccatatgtggataagaagaagaaagtctgatgcacataattgtcagagatgggaagtatcatcagcaggatgtaatgctaaccttattttgtccacaaggctggaatttgcaccgtcaagtgggccagatgtgactcttgaagagttgcctgttcgtgaatctattttcaattatctactgatctagatatataattaaattagcagtacagtagcctggaatcagtttcagcaggcagttgacatgcttgcatgtaacatctggaaggaggtttcatattaatggtgtttacttgcacagcatgatgaacctactgtgtctgcctttcatggattgttatttatagactgatttgtgaattttgaatatgttatttatgatgacagaaactaagaactaattattttgcgtcaatccttctcattcggaatctgcactatgttagttgtcatattttatcctgcaatgactcgtctaattcagatggttttgcttctcaattgtgattgctgtggttcccactaggccagggcaaagcaacatgtgcagtgctcgctgtcccagcccagcttatggtgtagagagtcgccatgcgattgcttaattatctatgttgtcttcggttatatgtctggtagtttttctacgtatcataagatggggaatccttgtaaatcatttatgttacctctagtaaatctcattgtttgccatcctaaacgtccattgtctttcatatctcctgattaattcaccatggtgcattgtgaaaaagtttcaggtaacttctttattgaggcaaaggagcagaaggtaagagtggcacacaatctcactgccaagatgttccctttgagtcctcgttgtcacagataaaaggttaccgtgcaactgaactcacaatgactgagagagttgactccagttcatcatcgtatttgattgctgatgcctgtccaaataactcctactcgaaatgtcag

SEQ ID NO: 43875 - DNA, 2035 bp, Zea Mays
attaaattcctctacaatacccagttatcccgatagggcgtccgtatgggcgccccatgttctagtcaaatcaagaccaaactcacgggttttttttgtttcgcgagtagcgcgtgctcgatcaacgaaaggaaaatttccgaaacagaggcggcccgccgggcgagcgcgccggagcccgcatgggtgcctcgtccactccggcggccgcggccgcggccgcgccgagccggcgcaagccaagatactatagtgacttcactcgttcttgcaacggaagcagcaaaggttatttgtgcaatcattttattgattgcagacggtagtctgaaaaaacagttcagtaattggaccctcattggatcactgactgcgtctggactgcctgctgctatctatgcccttcagaatagtctgctgcaagtatcattcaagaatctggattccttgaccttttcaatccttaaccagactaagcttttgtggacatcatttttcacatttcttattttggggcaaaagcaatcatccaagcaaattttagcattggccctcttaattagtgccgctgttcttttaagtgttggggagagtactagcaaaggttcaaatggtggtggctctgactatatcttgctatatgggatcattccggttacagtcgcttctatgctgtctggtttggcctcttcattatgtcagtgggcatctcaggttaaaaagcatacctcttacatgatgactatagaaatgtcatttattggaagtgtgtgcttgttagcaagtacctatcggtcaccagatggagaagccataaggaaatatggggttttccatgaatggactttctggaccatggtaccggtattaatgaatgccgtgggtggaattcttgttggtcttgtcacaacttacgcagggttttgttatagtctcagctctccttgtaactgcactgctacaattcgtgtatgatgggaagccaccatcactctactgcctgatggcattaccacttgttgcgacaagcatattcatctaccagaagtatccatatgtggataagaagaagaaagtctgatgcacataattgtcagagatgggaagtatcatcagcaggatgtaatgctaaccttattttgtccacaaggctggaatttgcaccgtcaagtgggccagatgtgactcttgaagagttgcctgttcgtgaatctattttcaattatctactgatctagatatataattaaattagcagtacagtagcctggaatcagtttcagcaggcagttgacatgcttgcatgtaacatctggaaggaggtttcatattaatggtgtttacttgcacagcatgatgaacctactgtgtctgcctttcatggattgttatttatagactgatttgtgaattttgaatatgttatttatgatgacagaaactaagaactaattattttgcgtcaatccttctcattcggaatctgcactatgttagttgtcatattttatcctgcaatgactcgtctaattcagatggttttgcttctcaattgtgattgctgtggttcccactaggccagggcaaagcaacatgtgcagtgctcgctgtcccagcccagcttatggtgtagagagtcgccatgcgattgcttaattatctatgttgtcttcggttatatgtctggtagtttttctacgtatcataagatggggaatccttgtaaatcatttatgttacctctagtaaatctcattgtttgccatcctaaacgtccattgtctttcatatctcctgattaattcaccatggtgcattgtgaaaaagtttcaggtaacttctttattgaggcaaaggagcagaaggtaagagtggcacacaatctcactgccaagatgttccctttgagtcctcgttgtcacagataaaaggttaccgtgcaactgaactcacaatgactgagagagttgactccagttcatcatcgtatttgattgctgatgcctgtccaaataactcctactcgaaatgtcag

SEQ ID NO: 43876 - DNA, 1574 bp, Zea Mays
ccttcccagccgccaaaaaccctactcctctcctctgtcctctctggtttctgccaacgtctctgctccagcctccaagtgctccagccagcaggtagcagccagcaggttcctgctgtactttttactgaattactgcaaccaagatactatagtgacttcactcgttcttgcaacggaagcagcaaaggttatttgtgcaatcattttattgattgcagacggtagtctgaaaaaacagttcagtaattggaccctcattggatcactgactgcgtctggactgcctgctgctatctatgcccttcagaatagtctgctgcaagtatcattcaagaatctggattccttgaccttttcaatccttaaccagactaagcttttgtggacatcatttttcacatttcttattttggggcaaaagcaatcatccaagcaaattttagcattggccctcttaattagtgccgctgttcttttaagtgttggggagagtactagcaaaggttcaaatggtggtggctctgactatatcttgctatatgggatcattccggttacagtcgcttctatgctgtctggtttggcctcttcattatgtcagtgggcatctcaggttaaaaagcatacctcttacatgatgactatagaaatgtcatttattggaagtgtgtgcttgttagcaagtacctatcggtcaccagatggagaagccataaggaaatatggggttttccatgaatggactttctggaccatggtaccggtattaatgaatgccgtgggtggaattcttgttggtcttgtcacaacttacgcaggtggtattagaaaggggttttgttatagtctcagctctccttgtaactgcactgctacaattcgtgtatgatgggaagccaccatcactctactgcctgatggcattaccacttgttgcgacaagcatattcatctaccagaagtatccatatgtggataagaagaagaaagtctgatgcacataattgtcagagatgggaagtatcatcagcaggatgtaatgctaaccttattttgtccacaaggctggaatttgcaccgtcaagtgggccagatgtgactcttgaagagttgcctgttcgtgaatctattttcaattatctactgatctagatatataattaaattagcagtacagtagcctggaatcagtttcagcaggcagttgacatgcttgcatgtaacatctggaaggaggtttcatattaatggtgtttacttgcacagcatgatgaacctactgtgtctgcctttcatggattgttatttatagactgatttgtgaattttgaatatgttatttatgatgacagaaactaagaactaattattttgcgtcaatccttctcattcggaatctgcactatgttagttgtcatattttatcctgcaatgactcgtctaattcagatggttttgcttctcaattgtgattgctgtggttcccactaggccagggcaaagcaacatgtgcagtgctcgctgtcccagcccagcttatggtgtagagagtcgccatgcgattgcttaat

SEQ ID NO: 43877 - DNA, 1588 bp, Zea Mays
aacgaaaggaaaatttccgaaacagaggcggcccgccgggcgagcgcgccggagcccgcatgggtgcctcgtccactccggcggccgcggccgcggccgcgccgagccggcgcaaggtgacgctctatctggtgctcctcaccttgcagtacggcgcccagcccctcatctccaagcgctttgtccgccaagatactatagtgacttcactcgttcttgcaacggaagcagcaaagacggtagtctgaaaaaacagttcagtaattggaccctcattggatcactgactgcgtctggactgcctgctgctatctatgcccttcagaatagtctgctgcaagtatcattcaagaatctggattccttgaccttttcaatccttaaccagactaagcttttgtggacatcatttttcacatttcttattttggggcaaaagcaatcatccaagcaaattttagcattggccctcttaattagtgccgctgttcttttaagtgttggggagagtactagcaaaggttcaaatggtggtggctctgactatatcttgctatatgggatcattccggttacagtcgcttctatgctgtctggtttggcctcttcattatgtcagtgggcatctcaggttaaaaagcatacctcttacatgatgactatagaaatgtcatttattggaagtgtgtgcttgttagcaagtacctatcggtcaccagatggagaagccataaggaaatatggggttttccatgaatggactttctggaccatggtaccggtattaatgaatgccgtgggtggaattcttgttggtcttgtcacaacttacgcaggtggtattagaaagggttttgttatagtctcagctctccttgtaactgcactgctacaattcgtgtatgatgggaagccaccatcactctactgcctgatggcattaccacttgttgcgacaagcatattcatctaccagaagtatccatatgtggataagaagaagaaagtctgatgcacataattgtcagagatgggaagtatcatcagcaggatgtaatgctaaccttattttgtccacaaggctggaatttgcaccgtcaagtgggccagatgtgactcttgaagagttgcctgttcgtgaatctattttcaattatctactgatctagatatataattaaattagcagtacagtagcctggaatcagtttcagcaggcagttgacatgcttgcatgtaacatctggaaggaggtttcatattaatggtgtttacttgcacagcatgatgaacctactgtgtctgcctttcatggattgttatttatagactgatttgtgaattttgaatatgttatttatgatgacagaaactaagaactaattattttgcgtcaatccttctcattcggaatctgcactatgttagttgtcatattttatcctgcaatgactcgtctaattcagatggttttgcttctcaattgtgattgctgtggttcccactaggccagggcaaagcaacatgtgcagtgctcgctgtcccagcccagcttatggtgtagagagtcgccatgcgattgcttaat

SEQ ID NO: 43878 - DNA, 1619 bp, Zea Mays
aacgaaaggaaaatttccgaaacagaggcggcccgccgggcgagcgcgccggagcccgcatgggtgcctcgtccactccggcggccgcggccgcggccgcgccgagccggcgcaaggtgacgctctatctggtgctcctcaccttgcagtacggcgcccagcccctcatctccaagcgctttgtccgccaagatactatagtgacttcactcgttcttgcaacggaagcagcaaaggttatttgtgcaatcattttattgattgcagacggtagtctgaaaaaacagttcagtaattggaccctcattggatcactgactgcgtctggactgcctgctgctatctatgcccttcagaatagtctgctgcaagtatcattcaagaatctggattccttgaccttttcaatccttaaccagactaagcttttgtggacatcatttttcacatttcttattttggggcaaaagcaatcatccaagcaaattttagcattggccctcttaattagtgccgctgttcttttaagtgttggggagagtactagcaaaggttcaaatggtggtggctctgactatatcttgctatatgggatcattccggttacagtcgcttctatgctgtctggtttggcctcttcattatgtcagtgggcatctcaggttaaaaagcatacctcttacatgatgactatagaaatgtcatttattggaagtgtgtgcttgttagcaagtacctatcggtcaccagatggagaagccataaggaaatatggggttttccatgaatggactttctggaccatggtaccggtattaatgaatgccgtgggtggaattcttgttggtcttgtcacaacttacgcaggtggtattagaaagggttttgttatagtctcagctctccttgtaactgcactgctacaattcgtgtatgatgggaagccaccatcactctactgcctgatggcattaccacttgttgcgacaagcatattcatctaccagaagtatccatatgtggataagaagaagaaagtctgatgcacataattgtcagagatgggaagtatcatcagcaggatgtaatgctaaccttattttgtccacaaggctggaatttgcaccgtcaagtgggccagatgtgactcttgaagagttgcctgttcgtgaatctattttcaattatctactgatctagatatataattaaattagcagtacagtagcctggaatcagtttcagcaggcagttgacatgcttgcatgtaacatctggaaggaggtttcatattaatggtgtttacttgcacagcatgatgaacctactgtgtctgcctttcatggattgttatttatagactgatttgtgaattttgaatatgttatttatgatgacagaaactaagaactaattattttgcgtcaatccttctcattcggaatctgcactatgttagttgtcatattttatcctgcaatgactcgtctaattcagatggttttgcttctcaattgtgattgctgtggttcccactaggccagggcaaagcaacatgtgcagtgctcgctgtcccagcccagcttatggtgtagagagtcgccatgcgattgcttaat

SEQ ID NO: 43879 - DNA, 1709 bp, Zea Mays
cccatgtgccgtcaggccgttgtaccaaagtcgccagcgccctgcactagtcgttgtcaaccgctcgtgtgccattttcctccttgcttgctcgtccttcccaactgcgccgagcgccgagcttctccctcgctctcggatcgaggtcgcccgacaccagcacgctcgccccggtgcccaacacctcttcaatcccgacgcattcccaactgaactcgtcggactcgccttggttttggacttcgccaagttggtcagcagctgtgatctgcaccatgctcagagctcactaaagaggtggacatcgaatagaaatttgctccagtacctaaatacccattggtggggttccatctaactagtcatctggtagaaggattttggatcttctctgcaacaaaggcaagccccggtgcatttgtcactttccttgtatttacaaaattttatcacttatatgctgcattaggtgataggagttgattgttaaactcttgatgcactaccatccttgaaagcttgattatcataccttgttacctgtttaataaaagctagtgatgcttagtcacgctgatagattaagaaaaatgtttttgatctatgactcatgtttttataaataaaatgggcttgggataatgaaggcatcaagacgttgataaattcattatccaggcatggcccctctgttaggcgccaaagtttttgaaatagtttaaaatgagaccagacactgagccagaaaagtcgcccgtctgtgtcaattaaggaccgtaccgattgttggcctgctgatctaggaccttttatctggccacatacctcgtcatgggtaagcctgaacccggctattctatacatgaaaagacaatcgcgcactgggagtggagagatggtaagagtggcacgtaccctcctggcaaaggactgcctaaaaggggtggtgtgctctcgggtggcgcggacctgttcatgtgatggaggatccgtgggaatggtagacatgtgcaaaagagttaagagaagcatatgtcgtgtgattggagatccccagctgggtattaatcgattcggatcaccgaacttctcggatatgaagactagatcttcgacctgcagcgtagttaacaagtacaacaaagttttgattaaaagcaacctagtgtaggtcaagtgaatgatctagattagacaaatgctagattcaggctagaagattcaggtaataaactaacgtgtgaaataaaacttggcttaaggacccacttctagtaagcttttctgcaaaataagtccttgaactttgatgagcttcaccttgattcccaaaacccagcatacccttgagagtcttttccttagtagggtaagtcttgctgagtaattacctactcagggttttatcccttgttgtttttgtagaagaagttgtattcccttatctttgggttagttacttcatgtggaggacttgaagcttagaaggtttttatatatctcttatggaaaggcttcacccttccaattattgtagttaagttattcccttcgaggactatcaggacttgtaataaatacatctctttctaccatgtaaaacttgagttctggaatgtaaagtgtactttgtaaaagtctttcgctctatctccaatgtgtgtgtatcaaatgtgattactgtaatatacctgttatgtgggagatcc

SEQ ID NO: 43880 - DNA, 3414 bp, Zea Mays
atcaaagtcacccaccccactccccggaagcacgccgaccatcacccgcgcctgcaccttccgtcacaaccactctctcgcttccaggcgggcccagggtttctctggtcccgcacgtctgtcacctgctgtggaggtcaccgcggtggagcgcccccttcttccgtgagcgtaggcgatggtcccaccgcgtagtagaaaaacaatttaggtcgggacatgcacacatacacacgcgcacagccgcactcggttccagctacagagaattcgtccaggaaagtaaaaaaactcccccattcgcgagggacaggagggaggagtcaccgcgtgagctcaggaggaagagggagaaggagaggccgccggcggcggcgcggcagaccgggaaccgccgtgtagcactggggtggtggacccgcgcgcccatgcgtcggtgaggtggtggggcccgcttggcgctcgagttggaatggcggcggcagggaggtggtgggcggtggtccttgcggtcgcggtgctgctctggccgggccgggtcgtcgccaacaccgagggcgatgctctatacagcctgcggcagagcttgatagatacgaacaatgtcttgcagagttgggattccactcttgttaatccatgtacatggtttcacgttacgtgtaacagcgataacagtgttatcagagttgaccttggaaatgcacaattatctggcgtcctagtgccacagcttggtcagctgaaaaatctccaatatttggagctttacagcaacaaaataagtggggcaataccccctgaactggggaacctgactaaccttgtcagtttggatctgtatatgaacaacttctctggcaatatccctgaccgcctagggaatctattgaagctgcgtttcctgtaagattcattttgtttaccagttactagcaccctcatatattgttttactagctgtttttaatgcttagacagttttcagtttttttttaaatttgtttgtttttttacttttgatatctatgtcaagaatggtctatgtactttgtaaccagaaaaataagaggaacttgtgatgctgcatttgttaatttctgtgacacgttggtatttgattaagtttgttgttttcctttttgatagatggagttgggtgtttgtttggcctcctttctcttactcttaccttgcttattctatatttttggcagttgtagtgttgaattgtaatttatcagcaaaactcatggtgtctgtggaaaaagaaaatcattgccatttttctttttattagtgtcttctgtgcccttatattttggtaaagtcacaaatatctatttgttctgtgcctatttgcaatgatagacgtcttaacaacaacagcttggttggtcccattcctgtagccttgaccaatatctccactctccaagtactggatctctcgagtaacaacctctcaggaccagtctcatccaatggctccttttcactcttcacccctataagttttaacaataatccaaatctttgtggccctgttactacgaagccctgccctggggatcctcccttttccccaccgcctccattcaatcctccgtctcctccaacccaatcaactggtgcttctggccctggagcaatcgctggaggtgttgctgctggtgctgcattggtttttgctgttccagcaattgcatttgcaatgtggcgccgtcgtaaacctgaagagcatttcttcgatgttcctgccgaggaggatccagaagttcatcttggtcagctcaaaaagttttcgttgcgggagcttcaagttgctactgatacttttagtaacaagcacattttaggaagaggtggttttggaaaagtgtacaagggaaggcttgctgatggctcattggtagcagtgaaaagactaaaagaggagcgcacacctggtggtgagcttcagtttcaaacagaggttgagatgattagcatggcagtgcacaggaaccttctccgacttcgtggtttctgcatgacacctactgaacggttgctggtctacccatacatggctaatggcagtgtggcatcacgtttacgagagcgccaggcatctgaaccacctcttaaatgggaaacaagaagacggattgcactgggatctgcaagaggtctttcttacttgcatgatcactgcgatcctaagatcatccatcgggatgtcaaagctgcaaatattcttttggatgaggagtttgaggcagtcgtaggtgatttcgggcttgccaagcttatggactacaaggatacccatgtcacaactgctgttcgtggaacaattggacacattgctcccgagtacctatccactggcaagtcctctgaaaagaccgatgtttttggatatgggatcatgcttctggagcttattactggacagagggcatttgatctagctcgtcttgcaaatgatgatgatgttatgcttcttgactgggtgaaaggactgctgaaggagaagaaggtggagatgttggtggacccagacctacagaatgcctacgaggagatcgaggtggagaaccttatccaggtggcactcctctgcacgcagggctccccgttggagcgtccaaagatgtcggaggtggtgaggatgctggaaggtgacggcctggcagagcgttgggacgaatggcagaaagtagaggtggtgaggcaggaggctgagtcggcaccgctccgcaatgactggatcgtcgattccacgtacaaccttcgtgctgtggagctgtccggtccaaggtagtagccactccatgactccgatgaaagaattcaacactgaattgcctagattcagtctaattgctgcttgtgtatatgaaaggtagcttttggaattgttagcggcagtcaatatgaagggatggtttttttttttataattcctcgctagcctcagaagtcggggggtaggctgcagttgtgttaaggtgaaaattcgtatacccgagggtgaatttttaaagcattgttgtagtggttcggggaatgtagcagcgatcgtccaattgtactacgtgctatgaagaacagtgctaccttttggccatagttttgcgttttgaaaaatctatttaggttttctttgtgtaaaaatacaattgtcattgaattgacgatacacaactaattatgagactaaagaatttgtggaagttttactttagcttagggttccatctatcctggcggtgccatcggagtccaccaaaaagccatggagggaacaaatcgtttctggattaatttctgaatataaatcatcactagaagcacagtagctagcatgcaaacatctatcataaaaaaattagtatgcctagtacgattgtctcattaaataaaaat

SEQ ID NO: 43881 - DNA, 981 bp, Zea Mays
cgacaagtcaacattggggcacaagattaatcttcgggtaaatgaggaagcaagtgacaaggttatggaggtggagcagaaatacagtgagatccgcagacctgtctatctcaagaggggtgacattatcaagaccatcccggacttttggctcacagcgtttatgagccatcctctattaagtgagcttctgactgaagaggaccagaagatattcaagtacttagactccattgatgtggatgattctgatgttaaggcaggatactccattcatcttaacttctctgagaacccgtactttgaggacacaaagcttgcaaagacctatatctttgctgatgatggaacaaccacaataaaagcttccgaaattaagtggaaggaaggaatgggacctgcaaatggaaatggtattaacaagaaggggagtaagcggccattagtagaggaaagctggtttggtgatacagagctcaagagtcttgctgatggtgtgcaagatgaggtggcggagatcataaaggaagatttgtggcctaatcctttgaagtacttcaacaatgaggttgacgatgaatttgaaggagatgaagatgatgatgatttggatggtgatgatgacgatgaaggcgatgatttggagaactgagcccttgcgcttggttcagaatgttgtccgtggatgatgtggctgggcggaactgtgacccttttgggagattttttgttgttgttgtttgacttagctggaactcaacgtagggaactgtttaatgccttatgaagtcaaccaacttgaaaggagactgcttatatcataatctcggtatatctagcaacgcaatttgacctcagtgtcctgtttgtgattcagtttttgcttcggtcggttgcctaaagatgacgtattgccttcagtttgtgctcaacagcattgttaacccccttattcccaacaagggcttgttcggttgtgag

SEQ ID NO: 43882 - DNA, 1011 bp, Zea Mays
agcaactcggggcaggctagagttgaaacctaatcggaacgacaagtcaacattggggcacaagattaatcttcgggtaaatgaggaagcaagtgacaaggttatggaggtggagcagaaatacagtgagatccgcagacctgtctatctcaagaggggtgacattatcaagaccatcccggacttttggctcacagcgtttatgagccatcctctattaagtgagcttctgactgaagaggaccagaagatattcaagtacttagactccattgatgtggatgattctgatgttaaggcaggatactccattcatcttaacttctctgagaacccgtactttgaggacacaaagcttgcaaagacctatatctttgctgatgatggaacaaccacaataaaagcttccgaaattaagtggaaggaaggaatgggacctgcaaatggaaatggtattaacaagaaggggagtaagcggccattagtagaggaaagtttttttagctggtttggtgatacagagctcaagagtcttgctgatggtgtgcaagatgaggaagatttgtggcctaatcctttgaagtacttcaacaatgaggttgacgatgaatttgaaggagatgaagatgatgatgatttggatggtgatgatgacgatgaaggcgatgatttggagaactgagcccttgcgcttggttcagaatgttgtccgtggatgatgtggctgggcggaactgtgacccttttgggagattttttgttgttgttgtttgacttagctggaactcaacgtagggaactgtttaatgccttatgaagtcaaccaacttgaaaggagactgcttatatcataatctcggtatatctagcaacgcaatttgacctcagtgtcctgtttgtgattcagtttttgcttcggtcggttgcctaaagatgacgtattgccttcagtttgtgctcaacagcattgttaacccccttattcccaacaagggcttgttcggttgtgag

SEQ ID NO: 43883 - DNA, 1082 bp, Zea Mays
agggcaatagggcatacatcatcatcaacagcaacaaagccttttagtccctaagcaactcggggcaggctagagttgaaacctaatcggaacgacaagtcaacattggggcacaagattaatcttcgggtaaatgaggaagcaagtgacaaggttatggaggtggagcagaaatacagtgagatccgcagacctgtctatctcaagaggggtgacattatcaagaccatcccggacttttggctcacagcgtttatgagccatcctctattaagtgagcttctgactgaagaggaccagaagatattcaagtacttagactccattgatgtggatgattctgatgttaaggcaggatactccattcatcttaacttctctgagaacccgtactttgaggacacaaagcttgcaaagacctatatctttgctgatgatggaacaaccacaataaaagcttccgaaattaagtggaaggaaggaatgggacctgcaaatggaaatggtattaacaagaaggggagtaagcggccattagtagaggaaagtttttttagctggtttggtgatacagagctcaagagtcttgctgatggtgtgcaagatgaggtggcggagatcataaaggaagatttgtggcctaatcctttgaagtacttcaacaatgaggttgacgatgaatttgaaggagatgaagatgatgatgatttggatggtgatgatgacgatgaaggcgatgatttggagaactgagcccttgcgcttggttcagaatgttgtccgtggatgatgtggctgggcggaactgtgacccttttgggagattttttgttgttgttgtttgacttagctggaactcaacgtagggaactgtttaatgccttatgaagtcaaccaacttgaaaggagactgcttatatcataatctcggtatatctagcaacgcaatttgacctcagtgtcctgtttgtgattcagtttttgcttcggtcggttgcctaaagatgacgtattgccttcagtttgtgctcaacagcattgttaacccccttattcccaacaagggcttgttcggttgtgag

SEQ ID NO: 43884 - DNA, 1305 bp, Zea Mays
cgatccttagggttagggttttagaaaaaccccagcgagtggacagtcccgcgtatccgacggctcgacacatccgaagccgacacaacacttcacgagcgcgaatctcagcactgccctctataatagagctcgcgcgggcatcgcggccatcttcccagctccgcctccttttcctgccttcctcctcactagtcgctcccccgcggctcgcgcaggcgggcgacacaacgaggctaaatccctatcgcgaggaggcgtgtgaggccagcggctttgcgatgacagcaccagcggacaaggggaagaaggccaagactgatgccgacggcggcgaggagaacgaacagatcgacggcgtcctcgtcctctccatcgagaagctccaggagatacaggacgagctcgagaaggtaaatgaggaagcaagtgacaaggttatggaggtggagcagaaatacagtgagatccgcagacctgtctatctcaagaggggtgacattatcaagaccatcccggacttttggctcacagcgtttatgagccatcctctattaagtgagcttctgactgaagaggaccagaagatattcaagtacttagactccattgatgtggatgattctgatgttaaggcaggatactccattcatcttaacttctctgagaacccgtactttgaggacacaaagcttgcaaagacctatatctttgctgatgatggaacaaccacaataaaagcttccgaaattaagtggaaggaaggaatgggacctgcaaatggaaatggtattaacaagaaggggagtaagcggccattagtagaggaaaggtggcggagatcataaaggaagatttgtggcctaatcctttgaagtacttcaacaatgaggttgacgatgaatttgaaggagatgaagatgatgatgatttggatggtgatgatgacgatgaaggcgatgatttggagaactgagcccttgcgcttggttcagaatgttgtccgtggatgatgtggctgggcggaactgtgacccttttgggagattttttgttgttgttgtttgacttagctggaactcaacgtagggaactgtttaatgccttatgaagtcaaccaacttgaaaggagactgcttatatcataatctcggtatatctagcaacgcaatttgacctcagtgtcctgtttgtgattcagtttttgcttcggtcggttgcctaaagatgacgtattgccttcagtttgtgctcaacagcattgttaacccccttattcccaacaagggcttgttcggttgtgag

SEQ ID NO: 43885 - DNA, 2208 bp, Zea Mays
ctcgccccgatccaaaattttggatataaataacgggcgcaaattcatttgattacaaagtattcaccaaatcaaaatcgtgtcacaattactgtctaccctatatacatcgctaaaaaaatcggatctaaaatatctatgtttttcggtaaaaaaaagaaagaaaataaaaaacaatggaaaatagaaaaatatctatttaggctaatcctccaccgtactctctcttattctttatccactagctaccgctcaaggatcatttaatcgctggtccttatctccagcagtccagcacgaacaggtctccggttcttatctgaatctccagcacgacaacgtctccgctcagctgcgctcatctctcatcttctcagcctggaaaaaaatcagccgccgcccctgcgcagattttttttcagcgtctatatcactttgcgcgtgtccaagccaccgttcagctcgagaagaaaatcctaccgtgctcgattcttccctgcgcgtctcctccgcttggagcttcctgcgctccctgcgtccctctgtggccggaactcccttcatggccggagctcggccggcgctcggtcctgccactcccatggccgcgccccccccctgcttctctctctcagcgctcgcggctctttctctcctgctccgtccatggctgtttgcctctgctcgcggcgtccctgctcgcccagccgagctctccactgcccagctccatctcacggcgctctatctgctcggttccatggccgcggtactccagctcgtcgtgccctgctccctctgtttccatggcaggctctctgctcgtcgcgcgcgcttggacgctctccctggtggccgcctgttctccctgtgtaccgcgcgagttctttggtagacgcccgctgaccgtgctccacttcgcccatcgcgacgctccagttccaactcgctgcgcgccgagctcttcgctgttgtccgtgcgcgcgcgccgctcgtcgacctctctgctcacgcatagctcgctcttttcttatttgccgcgcgcacgaatttcatctgctcccacagcatgtcgagttcccgcaccatcatcgcttctgtcacaagctcgttgaccacagttatcttgaccgtgtcagctcgcgactgtggtcatgttcatcgaattcgccaacactttgttgccgattcgactgtcgtcgtttcgcgtattgtcgagcccatcgttttccctgtcttgtactcgcatggttttctgctcgccggtgcgccctcttggctcgctcggctttaattcccaatcgcgtcgtctattccaccggttagcgtctcgcgtcgcgggtgcagctctatatacatcactctcctgtgtcgtcgtcgttccgcgcgtcagcaaaaaaaccaagaatcgggtgaagacgaagctagcagcgcgatattccctaagcgctcgataaattgcctgaatcggaaaagcgctaccgatctcgtggattcgtgtcagctgtggaaacggtaagctgataaattgtttagaatggttcgatcgttaaataaattaatgtactagtgtgatgctcattagggtgctcgataaattgcgtaagtcacgaaactctcgtcgacttcgcagttcttgcgattatcgagccatgttcagttatagcgagttatctcgctattccgatcaattagttaaattagtataccgggtagaatattagtaggcctgtggggtgatggaatatttttatcacttataaagatgtagtataatttataaagcaagggattagttcagaatttaattaattaactgatatgttgtgattaggctaattgtatttcatgtgtatagtttgttgttcgtgatgtttgcgataggttcgagaagcgtaattattgcacttaattgtacgtcgataattagtatctttgtatgaaattgttcaacgcctcgccgctaggtgttaattcgctatcgcgtagtactatttaggtttgaaatattccggtctatatgcattcatgtgcataatgcatttcattcaggtacgtgaattaaccacgcgatgcggagaaccagaattgagtcaaccacaagacggtgctgatgaacgaaactggagatggacagacgaagcgagtatcggaataaaggctgatcgtcaagtggacgtcatctaacaacactaacctagtgttact

SEQ ID NO: 43886 - DNA, 4119 bp, Zea Mays
  misc_feature (1)..(2): n is a, c, g, or t
nnaaatgctgctacaactattgcacattcataggtacaaaaacaattagcaagagccaaattatcatgtgaaaggctagacagtagacaccaaaatatttcatacgagataagttgagcaagtggaagttattctatggccaacaataaaacaaaaacagggctatcacagctaaactacttcccctgcttcattttagaggtgcattaggattcaaataaggctttaagtgtactttgaccataaatttctcttaggccccgtttgtttcgttggaattgaattccattttaataattataatttagacaaaactaattaagtttatatatttatatatgtaatatatttgtatattatcctaaatcatatgagagagatagttatatactacatttatgttatagcgaaacaagtataagagtatgctataagttgtacatcggaaaaataacatgtaaatctatagaatcaatttctatctcccactccatgaatttgagatagacttatatgataactttggaaagtggtagaatgtcacattctaaaaaaaatagactgttctattagtaagattctaattcctcaaaatgaaaggaaacaaacgggacattacaataaacgaaacccagaaaaatcaatgttgttttcaaagctttgtgagatatgaatatgatagatttttcatacactaagcctgcgtataattttattaactgtcagtcaaattttgtaaaacagccttttcccataaaaaaaagagtatatcaaaacatattctgatgatgctctagatatatatacacaaaacactgatgccaaaccacatatatcaaaaattgacaaacatcatggctagtctctgtagaattgtataaaacactacattaattggtactgcatattaattggttattacaggcagttgatgggagaggatctttctgggctgaatgttaaagaactgcagtccctagagaatcagttggagacaagcctgcgtggtgtccgcacaaagaaggaccatctcttgatagatgagatccacgaattgaatcgaaaggcaagtttatttcaccaagaaaacacagacttgtacaataagatcaacctgattcaccaagaaaatgctgaattacataaaaagatctatgagactgaaggaccaagtggagttaatcgggagccaccaactccattcaactttgcagtagtagaaaccagagatgttcctgtgcaacttggactcagcacactgccccaacagaacaacattgagccatcaactgctcctaagctaggattgcaattaagcccatgaataagagtaaaactggcgtcttatgatcccgaaggaaactatttattgtaaagagatgatactcagagtaagacatatttgtggcagggagatttgaaatatgaacttgtaaatgtaatgcaaataatttccagactggaattgggccgtggaattcagaggatgattgcattctagaaatgtttcaataggggacaatgatgctacctcagagtacaaacagagtctagtctccactcaattgagttttatattcctctcaagtgttatcaagggttttagtaggacacagggtattggtcatttgtcgagcctgtgcttatttgaggtactgggcagctttatacaattacaaatcagggctaaaggaaactaccgtgaaagggatgggcgtcattccacaggcaaccatcaggatcatgacatcgcaggtgcaggtacaggtgcatgacattgaatctgatctccttaagtgctagaaagcaagctacagtgtccaggttgagcgtgaagcaggatacaaagctctagccattgccaagatcatgtggatacagaaattgttgactgcattgggcatagaacatccacagatggctcgtctatggagtgataacctgggggctaggtatttgttgtcaaatcctatcttccatgctcgggctgggcagatcgagccctcagggtggagctgtagagagtggtagcagcgccaaagcgaggagacaccaccttagtgagctcctcgaggatgaggtaatcgcggaccttatggaaacacggaaacgggactgagctagtgataagtccaaaggtaatcatagcactcgttgaggctgtagaaaaggttgagaacgagcgtgcgatcggagactggctccccgagatcacagacggaggcagtcatgcctttcatctggcggcaatactcagtgacagagaggtccccctggaccaaagtctaaaaggagacgtcgagttggagtgcacgagcctcacggttatcgaggaattgttcctcgacatcaacctaggtctggcagacagtgccgccaccctcacgaatgacatcttgtagctcaagagtgactgtcctgaggatccaagagaggatcacactatccatccatcgagtgtttacaagtcgtccgactaatcgtgattaatcgcgattagtcgggctggtctcctagaagagggcgattaggtggacgacgtgattaggatttcaagtcgtccgactagtcgtcgacctgggcgattagtcgtccggtcgaacgcttcctggtcgtttcttgtcgtcgcaattttggtactgggcttcactctagtttttggtccatctacagtagcccgaaaacatggtgctgctgctgatgcattttgtttggatgctgatctgctctaggtagcagccaacaggtaatgcagtactttttactgaattactgctagtaattatacctatattactttcagtttggactttggatggattcagttttacactttgaattactgctagtcttctactaattatgtctatattattgcagaaatgcagtgcttatatagttatatacatatacatatgtccataaatctataggacgactaacggacgaccagaggtcgactagaaccgattagtcgacctaatcgtcgccctaatcgcgattaggcgtctggtcgctgctctaactcgaccagctggtcgcccgacttgtaaacattgcatccatcaccaggcggggatagtgatggtcgctatgatggtgaggacgtggtcgtctaggacgtatccctacatggtgaggaggacaaggtcgtgccaatgagtataggtggaggaagccacgtcaaggatgatggggaccatagagcggatgttctagatacatgccgccagggcatggtggttgtaatgacggcagcctcgtacgccaaaagggagtcgaccactaggggctccaagagagggtcaaggtagggagagccgagcaaatggcgctcagcctcgacaagctgtctggcaagggtatcagcagtggtgtgctcgtgttcctatgtgagagcagcatcgcgttcgcgctcccgggtagcagcgacaacagccttagcagtcgtgagagccgtaaccaggttggagtgagcagtcatgacgtcgggtgcgaaataggatggggcgattaggctatccgcaactgttacccctaaatttttcccactatatcactttttcccctattttttcatctccttaagcggttccccctaaatactccccctataccccactacaactataaaatatcattttctatatcaactatcaattttttatctactaacaattactcgtggacccacagcacagtgtttgggggatgaacagtgacacgctatatctggggggagagagaagggggccggcgcgtagggggcgctgtaggaggcagcgctgcggctgtagagtgccccctacaggcgccatgcaaggggagggggctgcccagggggcagcgttgcagttagccttagatacaggtcagtggcgccgaggccgaggccatccaggcccatgcctaggctagaggcggccaggccggctgggaccagacaagaggtgactaggctagttgtacctaggacgggggaggcctggccggcagcgcccacgacgagggcggcaaggcaggtagcgctagcggccacgtcaagggtggccaagcctgcaacacccaggccagggccagccgaggggtaggcagctgctgagggtcggggaagggaag

SEQ ID NO: 43887 - DNA, 511 bp, Zea Mays
ggggtgtggagttctttttttcccaactctgaattctcatggtcgttgtgatcggctgatccccattctccgctcgcggcggcggttctttcggcttcggaagcggcggcggagcagagaattccattgggttttattttacgccgacgcaagtgcccttgcttggatggacatggcattataccgggcttctgaatgcgcaggttgcagggggaatggacgggcagccccgtgaggatggccaaggcagagcggaggcacagcggacggcgccgccgccgccgtgcctggaggaaagggatcgtctgctgtaaattctgatcggagaatgtgcttgccaagttttccatttgtttattataaaataatactagtagtattgatcacctaaaccctaacccccctgatccccaaccgtccgtccagcccacggcaaattgcccccgtacgtgtatgtacggtgtacgtgtcctccctacgaacgtactgccgctgtcccattgccatcgag

SEQ ID NO: 43888 - DNA, 3674 bp, Zea Mays
ctttttttcccaactctgaattctcatggtcgttgtgatcggctgatccccattctccgctcgcggcggcggttctttcggcttcggaagcggcggcggagcagagaattccattgggttttattttacgccgacgcaagtgagttcttgatccttctcctcggttctgttcctccccctggctctcttttccttctggatttccgccgagagttccattccacgctagggctaggctctgtatggcgttcatgattcgtttggaaagggctttgctgctttccgtgccctcgtctaatctcgtcgacttacctcgacctgctcctttctgtttggcacgcatgctttctcaactctaagattagaacagaacagaacaggtagagatggcaatgggtaaatacccatcggttattactaccccataatcatactcacgacaaaaaaataaccccatcgggtcacccatttacaccggtgggtatggatttacccccatacctatacccacgtgggtatggttcacccatcgggtcagccgtacccacaaaaattaaacatctatcaaaatattatattacacaaatgtcaaatatattcatctaaaataccattacaaaatttatagcatcatttaacccatccattcaacacaacaaagataattggataaaatagtaacactaggacaatactacatagcacattacatggtcattaaattgtcattaagccttctatgacattatgtcctaaaaggttgttaaatagtaaaaatgatggatgactaaagtccaagttcatgcttgggctaagtttatattgggtattttatacccacgggttaacgggtatgggtgaaggtggaacgttctaataccatttacccattgggtgaagatttttgcccaataacatacccacgggtggaatatttagctcacatacataccctaatgaagtaaatacccatcgggtatcgggtcgcgggtacccattgccatctctaagaacaggtcatgggttgtacgtctggtacccatgagacagggaaggggaaaaatgcaacgactgctatgcaagcagtgcagcaaatcatcttatttattagattacgatccaaccacagatacaaccatgatttgttagggatttttttataaagattattgagttagtggtggaagggtttaagtgttaaatgtgatctacggttggatcatgatctaatagattaaatgatttgtttgtatgcttgcacacaaagactgcttgcatagtagttgttgccggggaaaaaaatgtttctttaatactaatttagaccttgatgtggctgtatcgtacgtgctggagtgtacagtgtatgggatgtgcgtgcctccctgttctggtacaagacaaaaacccatcacaagacacggtacagaaaggtggacatactgctgtacttgagaatgtctcttatgacaaggatgtcgtggagatagaaccggcagatgctatcgattccgctcattacggcggcagtttcgtcaaggacgtctacgtcgacgaaggagcgctgcttcgtcggactcggacggcatcagaagaaaacccactggacagaaggtcgtccccaaatttcagtcgccaagtgatcggtgcagacagcgacataggatacgagaagaaaggctgttctagagtgtctgtacacggactgaaaccagaagtagtttcacctgttggcttcgctcctcactgcaatggcaaagagtgtggtcttgaagatgggatcgatgttgcagcaggagaatctagcgagaagaaggtcagcttgcaagagttacttctgcttcaaagtgctgagccagggcggtcctgagggcgggcaaccggagcgatcgcaccggccccaaaattccaggggccccaacccagatatacatacagtgtatatacgtattatggtcaggtccaggtaaaactaatccaattaggcccatgtcgattcaactgtctggacaccacagtgattggaataaaaaaatccttaatcaccgccggccgccgcaaacgcacgcgaaaaccttgcccttgcgcgattgtgccctgcgcttgccgcccttgccatctgatcacctcacattgcagtaccatgtcaacaagaaaatatgtatcaggtagtgaaaaaagaaaaaagaagcgagttgatgaattgatagagtcgcaaagaggaagcatacactgatttttttctcaaaaaatgcacagagcacttcgaggaatcaaatttgcaaaaatattctcttcacatgatacttctgatgttgagctaagagaagcttttcaaagttgaaattgttaaagaactatttaaggtcaacaatgtctcaagaacggctcaacggattggccactttatgtattgagaagaaattattggacaaggttgatatcaacattattatcaacgacttcgcataagaaatgttagaagaaaattttgaggaccggccctgagccaggcgatgcatatgagaggaagaaccaagaaccacatggtcacacggaccaggagctcagcataggaagaagcacggacgatgaaagctcaaaaccagcagcagctcgcgtcggcgatgtggacacctacgaccacgaaccggacatctctggacgcggtataatgccaggcccagtgtcggtgtctggccgccatccagtgtgttctggcagcgtctctctccggtctgacagcagcgcccggtcctttgcgtttccagttagggttgaaaacgggcggatacggacggatattagctcatcctgtatcctaccctaatatatttaaaacggattcgggatcggatacggatagttagaaacgggacggatacggatacaggaccggatatttatccgggcggataagtgacggatacggatattatttgatcggatatcggatacttgtcggataatacattaattggttataaaaaatattcttgttcgaccacgaaattgcaagtaaattaataatttaatagaagataatctcaagtttccacataaaaatggtaaagtgaagtattgattatgttgaaacttggatacttagagtgatttcacgtgtaactcacgcaataagtggaaataaaatagaagaaacgttgacatcctgtggattttatggtcccattattttttatgactatatgtggccatatgttgtaccttcgtataatttcatagattcatgaggctatctatacattattaatttctttctacataaaatcatcaaaatataattaaaattcataaatacactagttttgatccaaaattgcaaaaagcttaccaaaacaaataaacattccattcaaataaaacctcaagtcgccgcgtgaaaatgataagtgaaatattaattatgttgaaactttgatacataaaatgatttcacgtgtaactcacgcaataaatgggagcggaatggaagaaacaccaacatcttgtggattttatagtccaaatatttttgagaactatatgtggatatatgttgtgtccccgtaaaaattcatgaattttttagactatttggtgtattattaatttcttgttgtagaaaatcatcaaaatataattaaattcataaaaatagtgtaagtcaaacgact

SEQ ID NO: 43889 - DNA, 2625 bp, Zea Mays
tgtggagttctttttttcccaactctgaattctcatggtcgttgtgatcggctgatccccattctccgctcgcggcggcggttctttcggcttcggaagcggcggcggagcagagaattccattgggttttattttacgccgacgcaatgtatgggatgtgcgtgcctccctgttctggtacaagacaaaaacccatcacaagacacggtacagaaaggtggacatactgctgtacttgagaatgtctcttatgacaaggatgtcgtggagatagaaccggcagatgctatcgattccgctcattacggcggcagtttcgtcaaggacgtctacgtcgacgaaggagcgctgcttcgtcggactcggacggcatcagaagaaaacccactggacagaaggtcgtccccaaatttcagtcgccaagtgatcggtgcagacagcgacataggatacgagaagaaaggctgttctagagtgtctgtacacggactgaaaccagaagtagtttcacctgttggcttcgctcctcactgcaatggcaaagagtgtggtcttgaagatgggatcgatgttgcagcaggagaatctagcgagaagaaggtcagcttgcaagagttacttctgcttcaaagtgctgagccagggcggtcctgagggcgggcaaccggagcgatcgcaccggccccaaaattccaggggccccaacccagatatacatacagtgtatatacgtattatggtcaggtccaggtaaaactaatccaattaggcccatgtcgattcaactgtctggacaccacagtgattggaataaaaaaatccttaatcaccgccggccgccgcaaacgcacgcgaaaaccttgcccttgcgcgattgtgccctgcgcttgccgcccttgccatctgatcacctcacattgcagcagtaccatgtcaacaagaaaatatgtatcaggtagtgaaaaaagaaaaaagaagcgagttgatgaattgatagagtcgcaaagaggaagcatacactgatttttttctcaaaaaatgcacagagcacttcgaggaatcaaatttgcaaaaatattctcttcacatgatacttctgatgttgaggtaaatgacctactatccgagttgaaggtcttgaagctaagtttacctgaaagaccaatgtcttctatggagatctttgagtatgttaggcaaatggattcgtatccaaatatttcaatcgcttaccggatattatttactgtgcatgtaactgttgcatcagctaagagaagcttttcaaagttgaaattgttaaagaactatttaaggtcaacaatgtctcaagaacggctcaacggattggccactttatgtattgagaagaaattattggacaaggttgatatcaacattattatcaacgacttcgcataagaaatgttagaagaaaattttgaggaccggccctgagccaggcgatgcatatgagaggaagaaccaagaaccacatggtcacacggaccaggagctcagcataggaagaagcacggacgatgaaagctcaaaaccagcagcagctcgcgtcggcgatgtggacacctacgaccacgaaccggacatctctggacgcggtataatgccaggcccagtgtcggtgtctggccgccatccagtgtgttctggcagcgtctctctccggtctgacagcagcgcccggtcctttgcgtttccagttagggttgaaaacgggcggatacggacggatattagctcatcctgtatcctaccctaatatatttaaaacggattcgggatcggatacggatagttagaaacgggacggatacggatacaggaccggatatttatccgggcggataagtgacggatacggatattatttgatcggatatcggatacttgtcggataatacattaattggttataaaaaatattcttgttcgaccacgaaattgcaagtaaattaataatttaatagaagataatctcaagtttccacataaaaatggtaaagtgaagtattgattatgttgaaacttggatacttagagtgatttcacgtgtaactcacgcaataagtggaaataaaatagaagaaacgttgacatcctgtggattttatggtcccattattttttatgactatatgtggccatatgttgtaccttcgtataatttcatagattcatgaggctatctatacattattaatttctttctacataaaatcatcaaaatataattaaaattcataaatacactagttttgatccaaaattgcaaaaagcttaccaaaacaaataaacattccattcaaataaaacctcaagtcgccgcgtgaaaatgataagtgaaatattaattatgttgaaactttgatacataaaatgatttcacgtgtaactcacgcaataaatgggagcggaatggaagaaacaccaacatcttgtggattttatagtccaaatatttttgagaactatatgtggatatatgttgtgtccccgtaaaaattcatgaattttttagactatttggtgtattattaatttcttgttgtagaaaatcatcaaaatataattaaattcataaaaatagtgtaagtcaaacgact

SEQ ID NO: 43890 - DNA, 2488 bp, Zea Mays
gccttttatttaagaggccaccccgggggtgtggagttctttttttcccaactctgaattctcatggtcgttgtgatcggctgatccccattctccgctcgcggcggcggttctttcggcttcggaagcggcggcggagcagagaattccattgggttttattttacgccgacgcaatgtatgggatgtgcgtgcctccctgttctggtacaagacaaaaacccatcacaagacacggtacagaaaggtggacatactgctgtacttgagaatgtctcttatgacaaggatgtcgtggagatagaaccggcagatgctatcgattccgctcattacggcggcagtttcgtcaaggacgtctacgtcgacgaaggagcgctgcttcgtcggactcggacggcatcagaagaaaacccactggacagaaggtcgtccccaaatttcagtcgccaagtgatcggtgcagacagcgacataggatacgagaagaaaggctgttctagagtgtctgtacacggactgaaaccagaagtagtttcacctgttggcttcgctcctcactgcaatggcaaagagtgtggtcttgaagatgggatcgatgttgcagcaggagaatctagcgagaagaaggtcagcttgcaagagttacttctgcttcaaagtgctgagccagggcggtcctgagggcgggcaaccggagcgatcgcaccggccccaaaattccaggggccccaacccagatatacatacagtgtatatacgtattatggtcaggtccaggtaaaactaatccaattaggcccatgtcgattcaactgtctggacaccacagtgattggaataaaaaaatccttaatcaccgccggccgccgcaaacgcacgcgaaaaccttgcccttgcgcgattgtgccctgcgcttgccgcccttgccatctgatcacctcacattgcagtaccatgtcaacaagaaaatatgtatcaggtagtgaaaaaagaaaaaagaagcgagttgatgaattgatagagtcgcaaagaggaagcatacactgatttttttctcaaaaaatgcacagagcacttcgaggaatcaaatttgcaaaaatattctcttcacatgatacttctgatgttgagctaagagaagcttttcaaagttgaaattgttaaagaactatttaaggtcaacaatgtctcaagaacggctcaacggattggccactttatgtattgagaagaaattattggacaaggttgatatcaacattattatcaacgacttcgcataagaaatgttagaagaaaattttgaggaccggccctgagccaggcgatgcatatgagaggaagaaccaagaaccacatggtcacacggaccaggagctcagcataggaagaagcacggacgatgaaagctcaaaaccagcagcagctcgcgtcggcgatgtggacacctacgaccacgaaccggacatctctggacgcggtataatgccaggcccagtgtcggtgtctggccgccatccagtgtgttctggcagcgtctctctccggtctgacagcagcgcccggtcctttgcgtttccagttagggttgaaaacgggcggatacggacggatattagctcatcctgtatcctaccctaatatatttaaaacggattcgggatcggatacggatagttagaaacgggacggatacggatacaggaccggatatttatccgggcggataagtgacggatacggatattatttgatcggatatcggatacttgtcggataatacattaattggttataaaaaatattcttgttcgaccacgaaattgcaagtaaattaataatttaatagaagataatctcaagtttccacataaaaatggtaaagtgaagtattgattatgttgaaacttggatacttagagtgatttcacgtgtaactcacgcaataagtggaaataaaatagaagaaacgttgacatcctgtggattttatggtcccattattttttatgactatatgtggccatatgttgtaccttcgtataatttcatagattcatgaggctatctatacattattaatttctttctacataaaatcatcaaaatataattaaaattcataaatacactagttttgatccaaaattgcaaaaagcttaccaaaacaaataaacattccattcaaataaaacctcaagtcgccgcgtgaaaatgataagtgaaatattaattatgttgaaactttgatacataaaatgatttcacgtgtaactcacgcaataaatgggagcggaatggaagaaacaccaacatcttgtggattttatagtccaaatatttttgagaactatatgtggatatatgttgtgtccccgtaaaaattcatgaattttttagactatttggtgtattattaatttcttgttgtagaaaatcatcaaaatataattaaattcataaaaatagtgtaagtcaaacgact

SEQ ID NO: 43891 - DNA, 3606 bp, Zea Mays
ccaccaccagctcatccatctccggcattccccgcaacgtctccaccccccccatggcatcccctccgccctctccatctcccgccgcgctcatcgcgcatctcgccgctgtgctctcctccccggactggcgcttccacccctcgctcccgcaactccctgccctcctcgcgccgtccctaccccgcacactcctcgtcccgttgccgctccgcctcgcggccgcagtcgcccgcgccgccgcgccgtcccgccacctcctcgacatctcactcccggtcgtgctccgcctccacgccctctccccgccgccgctccgtccattcttcgaccgtcccttccgctccctcctcacccacttctcccgctacgcgctgacgccgctcatgctccggctgttcgcccacatgtaccgccacgccccgcctgcacccacgggtgctacctacaatgcactcatccgtgccctctgccgccgcgccgatctccgccacgcccaacggtacctcagcctcatggtccgctccggttggcgccccgacgctttcacgttcaactctttgatattgggttactgtcgcacgcagcagctggaagtggcccatgacttgttctgcaaaatgccgttcagaggattctcacaagatgcggtttcttacgctgctctgatcgaaggattttgtgaggcaggcaggatcgatgaggcactggagttgttcagggaaatgacgcaaccagacatgtacacacacgcggccttggtaaaggggctgtgtgatgccggaagaggagaggagggtctatgtatgctgcagaagatgaaggagctgggatggaggccaaccactcgtgcatatgcagcactggtcgatttatggtgtagggagcagaaggctgaagaggctgagaaaatactgaatgagatgtttgacagtgggttgatgccttgtgttgtaacatgcacaattgtcgtgaatgcctactgcagggaggggaggatgagtggtgcagtgagggtgtttgaatccatgaggtttaaagggtgtgaaccaaatgtctggacatacaatgcaattgtgcaaggtttctgtaatgctgggaaagtgtacaaagcaatggctttgttggaccagatgagagaatgtggagtagagccagatgttgtgacatacaatttgttgattcgaggccagtgcattgatggtcatataggaagcgctttcagattactccgtttgatggaaggaaatggtttagctgctgatcagtacacttacaatgtgttgattgatgctctgtgtaagactgggaaagttgatgaagcttgctctctttttgatggcctagaatatagaggcataagacctaattctgtgacattcaatacggtgataaatgggttatgcaaggctggtaaattcgatgttgcgtgcacatttttggaaaatatgatttcagctggttatgcaccagatacctatacatatagcccattcattgaaaatctatgcaagacgaagggatcacaagaaggattattctttatagatgagatgctacaaaaagatgtcaagccttcaacggtgaattatacaattgtaatcaacagacttttcaacgagaggaactatgggttagccacaaggatttgggggcaaatggtgtcacaggggtgtagtcctgatgttgtcacttatactacttctgtgcgggcatactgcaatgaaggcaggcttgatgaagcagaaaatgttgtgacggagatgaaaaaatgtaggaccattgtagatgcaatggcatataacactttgattgatggccatacaagtattggacagacagatcgtgcagttacaatcttgaagcacatgacgggtgttgcttctatgccaaatcattttaccttttttatcttgcttagacatcttttacagaggaggctagcagaacatgtacctttgaaagcaacttctgtgtggaagactatagagcttgctgatgtctttgaattatttgagctaatgaagaagaacagcgtcccttctagtgcaagaacttatttgtccattctggaggggttttctgaagaaagaagattggatgaggtgacttccttggtttctcttatgaaagaagagaatctacctctgaatgaagatatatacaatgctcttgttaattgcttttgcaaattaaggatgtattctgatgcttgggcattgctttgttccatgattggacatggttttttaccaaacttaatattttaccagtatctgctttctgggcttactgctgagggacaagcagatagggctaaagaaattttcagaagttcgagatggaaagagtacaataccgatgaaattgtatggaaagttataattgatggcttcataaggaagggtcatgcagatatgtgccatgacatgatatccatgttagaacagatgaaatgcaaaccaagtgatgaaacatatgcaatgctgacagaggaattgcccaccagggaataggttgtcaactaacactttcataactcacagcaaagtctccataagtcaatctgtgctcatcaggtgcttgtttttcaagcacagcctgtgccaagcaatgcacgccagaattgcatagatcatggatcgttggatgcacagtcacactgtgttcatgccctcaaaggtaccagatgatgaccaactgaggaatgaacgcctaaagaagaaaaaaaaagttcaaacaagaagttcactcaggccaagaacatggctagacaaggaaaaaaggaaggagcagagcacaaaaaaaacaaagttgcaagagagccatggctcgcaagcacaggtagcagaagacagcactttcgagcacaacatgcgggacttccaacagtatgagattacaaatagcttcactcaactgttgcaggagaccgactgctcgcctaccagtcgaggggccgactgccgatggtcccaacaactgcattcagcaacagcaatggtccaaaacaggactacaggagtaccctgtacccgtagcagattggcagtagtgtctgcgggctgcggcccctcctccacacgtgacgtgacacgttggtggggtcaccgtccggaacgtgccaaacagctacaggcatcagggctcggtcgcggtcggcgtcggcccgacggccccaagcagaacaaacaagggtcgcctactgccgaggcgtgccctcgtatatggcctgtcgccttctactggtcctcgtctggactcccactgctgcggaggcaaatgtatcagatgaagtgaatgcatcatcatggacctgtgtggtccccgccggccgtgtgaggccagggcccaggccgactggccgtggtggttattgaggacgtgcaaattgaggcctgattgcacgccatgatgtgtcacacccgggttccgtgggtagtaacgcgaaaataaatcatcaagtatgttgcgatcaagtctcacacatatattgactcattatatagaaacgaatgtcatatcatttatatataacagagtgttgtataaaatagttaactaattacatcatatgaagacaacgatccagcaaccacagttgac

SEQ ID NO: 43892 - DNA, 3620 bp, Zea Mays
cggcgtcgctaattctcgacgtgcaaacgaatccccccggtggcccggtcgtcatcgtcaccgccgcttccaccaccagctcatccatctccggcattccccgcaacgtctccaccccccccatggcatcccctccgccctctccatctcccgccgcgctcatcgcgcatctcgccgctgtgctctcctccccggactggcgcttccacccctcgctcccgcaactccctgccctcctcgcgccgtccctaccccgcacactcctcgtcccgttgccgctccgcctcgcggccgcagtcgcccgcgccgccgcgccgtcccgccacctcctcgacatctcactcccggtcgtgctccgcctccacgccctctccccgccgccgctccgtccattcttcgaccgtcccttccgctccctcctcacccacttctcccgctacgcgctgacgccgctcatgctccggctgttcgcccacatgtaccgccacgccccgcctgcacccacgggtgctacctacaatgcactcatccgtgccctctgccgccgcgccgatctccgccacgcccaacggtacctcagcctcatggtccgctccggttggcgccccgacgctttcacgttcaactctttgatattgggttactgtcgcacgcagcagctggaagtggcccatgacttgttctgcaaaatgccgttcagaggattctcacaagatgcggtttcttacgctgctctgatcgaaggattttgtgaggcaggcaggatcgatgaggcactggagttgttcagggaaatgacgcaaccagacatgtacacacacgcggccttggtaaaggggctgtgtgatgccggaagaggagaggagggtctatgtatgctgcagaagatgaaggagctgggatggaggccaaccactcgtgcatatgcagcactggtcgatttatggtgtagggagcagaaggctgaagaggctgagaaaatactgaatgagatgtttgacagtgggttgatgccttgtgttgtaacatgcacaattgtcgtgaatgcctactgcagggaggggaggatgagtggtgcagtgagggtgtttgaatccatgaggtttaaagggtgtgaaccaaatgtctggacatacaatgcaattgtgcaaggtttctgtaatgctgggaaagtgtacaaagcaatggctttgttggaccagatgagagaatgtggagtagagccagatgttgtgacatacaatttgttgattcgaggccagtgcattgatggtcatataggaagcgctttcagattactccgtttgatggaaggaaatggtttagctgctgatcagtacacttacaatgtgttgattgatgctctgtgtaagactgggaaagttgatgaagcttgctctctttttgatggcctagaatatagaggcataagacctaattctgtgacattcaatacggtgataaatgggttatgcaaggctggtaaattcgatgttgcgtgcacatttttggaaaatatgatttcagctggttatgcaccagatacctatacatatagcccattcattgaaaatctatgcaagacgaagggatcacaagaaggattattctttatagatgagatgctacaaaaagatgtcaagccttcaacggtgaattatacaattgtaatcaacagacttttcaacgagaggaactatgggttagccacaaggatttgggggcaaatggtgtcacaggggtgtagtcctgatgttgtcacttatactacttctgtgcgggcatactgcaatgaaggcaggcttgatgaagcagaaaatgttgtgacggagatgaaaaaatgtaggaccattgtagatgcaatggcatataacactttgattgatggccatacaagtattggacagacagatcgtgcagttacaatcttgaagcacatgacgggtgttgcttctatgccaaatcattttaccttttttatcttgcttagacatcttttacagaggaggctagcagaacatgtacctttgaaagcaacttctgtgtggaagactatagagcttgctgatgtctttgaattatttgagctaatgaagaagaacagcgtcccttctagtgcaagaacttatttgtccattctggaggggttttctgaagaaagaagattggatgaggtgacttccttggtttctcttatgaaagaagagaatctacctctgaatgaagatatatacaatgctcttgttaattgcttttgcaaattaaggatgtattctgatgcttgggcattgctttgttccatgattggacatggttttttaccaaacttaatattttaccagtatctgctttctgggcttactgctgagggacaagcagatagggctaaagaaattttcagaagttcgagatggaaagagtacaataccgatgaaattgtatggaaagttataattgatggcttcataaggaagggtcatgcagatatgtgccatgacatgatatccatgttagaacagatgaaatgcaaaccaagtgatgaaacatatgcaatgctgacagaggaattgcccaccagggaatagcctgtgccaagcaatgcacgccagaattgcatagatcatggatcgttggatgcacagtcacactgtgttcatgccctcaaaggtccttgtgcagctcctgtggatgttcaggtaccagatgatgaccaactgaggaatgaacgcctaaagaagaaaaaaaaagttcaaacaagaagttcactcaggccaagaacatggctagacaaggaaaaaaggaaggagcagagcacaaaaaaaacaaagttgcaagagagccatggctcgcaagcacaggtagcagaagacagcactttcgagcacaacatgcgggacttccaacagtatgagattacaaatagcttcactcaactgttgcaggagaccgactgctcgcctaccagtcgaggggccgactgccgatggtcccaacaactgcattcagcaacagcaatggtccaaaacaggactacaggagtaccctgtacccgtagcagattggcagtagtgtctgcgggctgcggcccctcctccacacgtgacgtgacacgttggtggggtcaccgtccggaacgtgccaaacagctacaggcatcagggctcggtcgcggtcggcgtcggcccgacggccccaagcagaacaaacaagggtcgcctactgccgaggcgtgccctcgtatatggcctgtcgccttctactggtcctcgtctggactcccactgctgcggaggcaaatgtatcagatgaagtgaatgcatcatcatggacctgtgtggtccccgccggccgtgtgaggccagggcccaggccgactggccgtggtggttattgaggacgtgcaaattgaggcctgattgcacgccatgatgtgtcacacccgggttccgtgggtagtaacgcgaaaataaatcatcaagtatgttgcgatcaagtctcacacatatattgactcattatatagaaacgaatgtcatatcatttatatataacagagtgttgtataaaatagttaactaattacatcatatgaagacaacgatccagcaaccacagttgac

SEQ ID NO: 43893 - DNA, 10895 bp, Zea Mays
cggcgtcgctaattctcgacgtgcaaacgaatccccccggtggcccggtcgtcatcgtcaccgccgcttccaccaccagctcatccatctccggcattccccgcaacgtctccaccccccccatggcatcccctccgccctctccatctcccgccgcgctcatcgcgcatctcgccgctgtgctctcctccccggactggcgcttccacccctcgctcccgcaactccctgccctcctcgcgccgtccctaccccgcacactcctcgtcccgttgccgctccgcctcgcggccgcagtcgcccgcgccgccgcgccgtcccgccacctcctcgacatctcactcccggtcgtgctccgcctccacgccctctccccgccgccgctccgtccattcttcgaccgtcccttccgctccctcctcacccacttctcccgctacgcgctgacgccgctcatgctccggctgttcgcccacatgtaccgccacgccccgcctgcacccacgggtgctacctacaatgcactcatccgtgccctctgccgccgcgccgatctccgccacgcccaacggtacctcagcctcatggtccgctccggttggcgccccgacgctttcacgttcaactctttgatattgggttactgtcgcacgcagcagctggaagtggcccatgacttgttctgcaaaatgccgttcagaggattctcacaagatgcggtttcttacgctgctctgatcgaaggattttgtgaggcaggcaggatcgatgaggcactggagttgttcagggaaatgacgcaaccagacatgtacacacacgcggccttggtaaaggggctgtgtgatgccggaagaggagaggagggtctatgtatgctgcagaagatgaaggagctgggatggaggccaaccactcgtgcatatgcagcactggtcgatttatggtgtagggagcagaaggctgaagaggctgagaaaatactgaatgagatgtttgacagtgggttgatgccttgtgttgtaacatgcacaattgtcgtgaatgcctactgcagggaggggaggatgagtggtgcagtgagggtgtttgaatccatgaggtttaaagggtgtgaaccaaatgtctggacatacaatgcaattgtgcaaggtttctgtaatgctgggaaagtgtacaaagcaatggctttgttggaccagatgagagaatgtggagtagagccagatgttgtgacatacaatttgttgattcgaggccagtgcattgatggtcatataggaagcgctttcagattactccgtttgatggaaggaaatggtttagctgctgatcagtacacttacaatgtgttgattgatgctctgtgtaagactgggaaagttgatgaagcttgctctctttttgatggcctagaatatagaggcataagacctaattctgtgacattcaatacggtgataaatgggttatgcaaggctggtaaattcgatgttgcgtgcacatttttggaaaatatgatttcagctggttatgcaccagatacctatacatatagcccattcattgaaaatctatgcaagacgaagggatcacaagaaggattattctttatagatgagatgctacaaaaagatgtcaagccttcaacggtgaattatacaattgtaatcaacagacttttcaacgagaggaactatgggttagccacaaggatttgggggcaaatggtgtcacaggggtgtagtcctgatgttgtcacttatactacttctgtgcgggcatactgcaatgaaggcaggcttgatgaagcagaaaatgttgtgacggagatgaaaaaatgtaggaccattgtagatgcaatggcatataacactttgattgatggccatacaagtattggacagacagatcgtgcagttacaatcttgaagcacatgacgggtgttgcttctatgccaaatcattttaccttttttatcttgcttagacatcttttacagaggaggctagcagaacatgtacctttgaaagcaacttctgtgtggaagactatagagcttgctgatgtctttgaattatttgagctaatgaagaagaacagcgtcccttctagtgcaagaacttatttgtccattctggaggggttttctgaagaaagaagattggatgaggtgacttccttggtttctcttatgaaagaagagaatctacctctgaatgaagatatatacaatgctcttgttaattgcttttgcaaattaaggatgtattctgatgcttgggcattgctttgttccatgattggacatggttttttaccaaacttaatattttaccagtatctgctttctgggcttactgctgagggacaagcagatagggctaaagaaattttcagaagttcgagatggaaagagtacaataccgatgaaattgtatggaaagttataattgatggcttcataaggaagggtcatgcagatatgtgccatgacatgatatccatgttagaacagatgaaatgcaaaccaagtgatgaaacatatgcaatgctgacagaggaattgcccaccagggaatagcctgtgccaagcaatgcacgccagaattgcatagatcatggatcgttggatgcacagtcacactgtgttcatgccctcaaaggtaattatttgactcttatattgttgtgtactagtgttgtgatgtttcattgtgtgttttataatgccctgccgaaagcttttgaagtagatatttcatatcaaatttgttttgctccacacatgaccacgagtaacctttaactttatgttgactgagcaatacaaaagtaaaagcccaacactatggagaaatagttcagtaatggtgcatgaattctgacaattcttaaaagacaacataactgcttgacacatgtttcatgagctttccggatttgtccttgtacattttttgttcaatatggtacagatttttaaagtcaaagcgttagttcaataaacttaactattaactttgtttttttaatttaaaatgcaaagaataatatttcctatggaatcacaatcatcaatctggacaggatagacccacactgctggcggcttgcacatgagtagggtttggcgatggaataaccgagacagatttaatccctgcattttaaagagaggctacgtcgaacctagaacctttgggcttagtggaaagacttctcaccattacgctgagccgttccttcacaatcatcaatatggaattatgtttaatttttctagaactgtgcatcattggagttctgtagaatggtgctgctgacttgcctgagaagctaaacgtgggacttctgactgtttatttatgcatttcgagttttgacaactcgagggagttgatttctgctggagccacaagtgcatatcaggttttcacttcctacaagattttatcaaaagaaaaagattggtaggtatttatggtttttgaacatcccttatcttagtaccatgtgtaatcgagccagtccaagagaattgtagatggacacgttcattgcacggtttaggaaaatagtttgtagttgtgctaaaaaaagtatcagttttgtagagcattagaataacaagagagccaataagccatcttcagcatttacaattttatggggaaacattcttaagattttcttcttattcaattctaagatcaatataggttgatttgagtacataattcgtgagagaaaataaatactaattgttcatttggtttgaggcatatgatgggtgtaaaagtaatggctgatcttatatattgaaagcatatatacacttgttgtcttttgcttaatatttatgaccggattccctattataataagggagtgtttggatgtcttcagctaaaagcaggtaatagctaaactgttagctagacagtttaaatgtctccaactaattttagtaggtagctatagtgtactcaaacatgacctactatatgctggaagctagaagagtggaagtggccattagccgggttctcttacctttccttttgctttttgctgctgctgcaccaggataaaaaaaatatcagtttggatttagtgcaggatgactctatcgacgcagcgcatgactcctgaatcacgattgaaaatctcgttcggtttctggcgttatcgctatgatcttgtgcaccgacacatgagacccgcaagatagggtttcccgctcgtgcgcttgtgacactgtgtcgtttacctgtgtccgctttggaccttggtcagcagcgctcggctggactcctttttcgcctagccatgtccccccacgctgtctagaccctttttcacctagtcacgatcgggttggtggcgaggccttggggcgagtaagggagcatcgcaagatcaagtggaatgtgcacgagtgcgtagatgggcatgagatcttttggagcacaagaaagtcgagcaaaggagccgagcgtcatggtggagcctccgttcgccatggtcagcacttgtcgtcgcctcaaccattggtatgtctccttgaatgtgttcgctaaggtttttgcatgatgtcgcagtaggtagcatggtaaatcatgcactaggggcgatggcacatcatgtcggcgagctcgccgccgtaggggcgggtgctccgtcgcactgagcgttgttaggggacaaagacacatcgtgatcattgattcgacaacgagcggatatgattataacgaggataacagttcggtgtgattaggtcggaaccgtagatcgttagatgaatggtccagagcgcgcacgagtagccggccgagctgttttgctagacataccctgatgtttataacaaataactcgtagtccgcctgaatttaaatatcattacacaggtccctgtctttcatagattagaccctgaacttcataaacatggaacccgccatcctagcagagaaggtttacaccaaagccctcaactttgtatatataattatgtgtaggtccatggaattcacaaataagtccctaaaaataacccatacacttgtttatttcatatttttgcgttttaactccgattttggtggttcttgaacctacgaattcatctcaatgcatgtattagtcttacatagtttgtttcattgtttggtgtaatcctatttttatttattgtttgcctatttatttgtattgctgcgagtagaagagtgagtttacaaggaaccttgatgagcacaaaaatgtgcagctggatggtccggcctgcatgccggacgggccgtgggagcggtgcagacggtccgcgtgtggatagaatcaattagggttcctgatttgttgcgggatttgttagcaaattccatgggatttgtttggaaaccgacttgtaacgggttgagacctcacccttatataaacgaaggggtacgaccgattgacacgccataattgatccaatcaaatctatttatcaaatctaccttatttgcattgtttttttcttttcattaggagtaggagtaacctagccttagtttagccctagtattacttttcctccacctttttcttcacctctcttcggctcgacgtcatctagaggcgtcttgggtggcctatcgaccccaagacaaccctatgatctctcctcctcgacgaggtccctcccgggaggcaagattcaggttcctgcgaagaagaccctgcgccgtcgcggaccgtcctgcccagagagcaaaccgtcctgcacgcgaccagaggagactcgctcctgtagcgaggtcgcggacctctcgtgctcctacagagagcaccgtcaggttattttatctagtgtttggtaccacatcggagccagtacactttttggtgattccgctaggggcgaagattgcaaatctacaaaaatcggtttctatgtccgattctaaaggtctcaacgatgtttctctagacagcgacacaaggctaactaatttatcggccattgagcatgaggaattaaaagagtacataaagaagtgggacgaggagttctagcgacaacaagcttagaagcatgaggggatggagaagcggtacctctcgcgcttcagcatagattgccaccagaaggtcgtccgggagaatgaaataaactgcgattcactgtcagcttgttgcagcaactccccattgtaagtgacaccgcatcattcgatgatattcaatctattaaaatttcttttgataaccggattgaaagtatgacataggatatagagaaaatgacgcatgcatttgtaaaatctcatacgcctaattttttgtcacatgaattgggcaccgaaacaattgtgccaaacacatcgacaacaaatgtgttttctcagtcccaactatattatgatatgtcgatgaacttgtatccggggaaactgtagttgtcttcttcattatacggtggatcggctctgagcacgaccagacagtctacgcacgatctcagaccgtttggcccttcatcggaccgttcgacaccttatgccggacagtccgaagtcacacggagcccaccacaatgctcgaaggtgaagcctggtcacacaggtcggaccatccggaatatcgaagtcacctgtgaccgttctagacttctagtgcagaagaccgacaaaaagatagttggccacctgagccctaggatgaatatcacgacaatggtagttcaggggatggaaaaagttacatgtcgctaagcttgtttggcctactaagactaaatcttctgctcactctcacctgcacttggcacaaaaggggaaagttaagttcacatttagtgttgctaagtgtgataaaatatttgatgagttacttaagaatgacaacattaaatgtcgcatacaattccctcgatagaagaatggaaaagatgtgcgtattgtaaaatgaggccttgactctgtcccctagtatttaccatctggagggttagaaaatgaggccttagaaaagatgcaaatggtaaggattttggtaaaactatcttgaacacagtatcattctgagttcaaatagattataaaagctcttgtggtcatcaatccacaagacctaaacactcaatcaaagatccaactcattcatttattcaaacatcaaaccattacatcatttaataatagcaacattgttctaatacacttttattccttagccctgctcctattacatctcaagggaaacctagatgggtacagacatcgaagtgatggtatgggagagctgggtgctctggtgagtttgctggatccatatctggttggtgttgtcctccgttatccagctaagtctatagtctggcatacttcctccttatgtagtcaagctctattagggcagcatcatgctctgtgttcaaagttgtagtgtactctagcaaagtctctaagcgaatgttgccctctgttgtgcccgagtggattcgggtgagaacctatctagaccgacgctgtgggtagtacctgaaagcagtctggcttagagcattgcggttccggtaacagaaagatgacatggccaacagagctatgtcattgatccctacgccaaagttggctcgagcggggatggcatagtggtgtcctctcacgagttgacctccaaagtgtcacactcggatttaagggcaaacccgggcgggtctcaaatgtgtgctaggatcaagtctcacacatgatggctcatgatacagaaatcaatgtcacatctttatcacatatggggggtttgtacaaaataactaaataaatacttcatatgacgacaacgatcctccacaacaccatagttgactgggaaacgacgacctagacctctccgaaactcattgtagcatccttcatctttctccatcggtacttgttcatgacctggtgtgagtttagcaagagtgagctcacatacgttcatcgctcaacaagttgtgggggataatgtgcatgagctcacttacgatggggctcatgtgaagtgtaaggcttaccaaggagaaagtggttaaggctgaacattgcttttaataagttggttaaaattttattagcaattagataattgagcacaattgataataaatcccaacccaattagataattgatcacaattgataataaatcccacaatgcaatgcaaatgacagattaagtttaatttcataagttactcatgtgagggtccgagccgctcttgaccgtgagcacgactgatataccagttttacactctgcagaggttgcacatctttatccacaagccgtgatacctatctgccacggggttgtacggacctcatacacctctaccgaggaggcgaggcagggtagcattacgaggtctttccaaagttccactagcatgagagaactcgctacggaatcaggcaggagggggcaatataggaatccctcatttgaaaagctatcacacacagatcgacccgagaaccttcctataccggcagctccccacaccccgcttgcccctttcgggaaaggattaactcacactagctttcctaattaatcaaccaagggcgttcctgttggggacttgttctcaaatgctatgaatcaagaacaaggcaacacaaagtattaaatgttaaagtcctttgtccatcgaaacattatttcccttaggatataacgatcttcggacgaaggtcatgaaggacataccttcatcatcacggttataagataataaaaggtgaaacatatgaaacatgaaagatagcacgaacaaacacattatgtcattcatatgtttcattatacaaacttgaatatttaaacacgatgtttaatcatatttatacatttggcttgacagaaggcaaaaatccaagtgttgcgcgcgagtgattacatgatagcgtgaacagtacaggggtactgttcatctatttataggcacaggacgcagcctgttgggaattacattcatgccctttacaaaggtttacaatcataatacaaattatcatgggccgattggtcatttcatctttaagtcggtgcctttggaaatgtactccgaagccttctgattgatagcttcggctttgtgtcaatcttccgaaggtgtttcttctcatgggaccttcggcgacgaagcagacccccaacagttccattccacccttgtggtagcaatgttttctcggttggtcgctctatgttctaattaacacaataatcttatcatggacaataattaaaccaacaataataatggaatatgatcatcattcagatataatattaatcccaaaactaggtagagcaataccaagattacccaatagttcatttgtttgcaaggtgtagggtgaacaaaactagggtaacctattaggtcccatcaagttaagctgagcatgtcacgatgattattgagaacattattaggtaaagaaagtgattaagggcgcaacttgcctttttggtgcaactccagttacttctccaatgttggtcttcaaattcccgtcacctcgtttctatacgtagcaatacatatagatagacaacgagtacataaaaataacattacaccaaacatgaaaataatacggtcatgctttgaaagttcttgatttgatgaacatcaagacactaccaccacaatatatattgaagcgatggacatgagaagcatactatggagatgtataggataaccatggaagaagcgtaattgaaaatccgaagttggatgctatgcatcgtaaaaattatctcactcaaaaaattctcagtttcatagggcaagtagcaagttcattggaatggtgtttgttgatagataacaaacttgacatcctcattaaggatgttttggagcaattcgatgcttctggatgtaggtccttgtgcagctcctgtggatgttcaggtaccagatgatgaccaactgaggaatgaacgcctaaagaagaaaaaaaaagttcaaacaagaagttcactcaggccaagaacatggctagacaaggaaaaaaggaaggagcagagcacaaaaaaaacaaagttgcaagagagccatggctcgcaagcacaggtagcagaagacagcactttcgagcacaacatgcgggacttccaacagtatgagattacaaatagcttcactcaactgttgcaggagaccgactgctcgcctaccagtcgaggggccgactgccgatggtcccaacaactgcattcagcaacagcaatggtccaaaacaggactacaggagtaccctgtacccgtagcagattggcagtagtgtctgcgggctgcggcccctcctccacacgtgacgtgacacgttggtggggtcaccgtccggaacgtgccaaacagctacaggcatcagggctcggtcgcggtcggcgtcggcccgacggccccaagcagaacaaacaagggtcgcctactgccgaggcgtgccctcgtatatggcctgtcgccttctactggtcctcgtctggactcccactgctgcggaggcaaatgtatcagatgaagtgaatgcatcatcatggacctgtgtggtccccgccggccgtgtgaggccagggcccaggccgactggccgtggtggttattgaggacgtgcaaattgaggcctgattgcacgccatgatgtgtcacacccgggttccgtgggtagtaacgcgaaaataaatcatcaagtatgttgcgatcaagtctcacacatatattgactcattatatagaaacgaatgtcatatcatttatatataacagagtgttgtataaaatagttaactaattacatcatatgaagacaacgatccagcaaccacagttgac

SEQ ID NO: 43894 - DNA, 404 bp, Zea Mays
attgggtaatgagcctgaatgggacccgaaatcactattaacctcaatggggcacctaaatccgcagacccttggggaggctgtcttgaaggttaaggtaccgtctttgtagacttggctggagaaattggttgtttctatgatgaagactaagacgagtaggagcttacagaagtctgggagaggtaatcaggtccaaggagaagggccaaactgggttcttgttgctgggggttttttgcttagcgcgctttcagtcaagattgggtgcaaactaaagcagtggttcaatgggaagcagcaaaataatacttccaaagctaaaagaagacctgaagcatgcgagctgcactcagacctctaccggttcagtgaccaaactggctgttgctactctgtttctt

SEQ ID NO: 43895 - DNA, 737 bp, Zea Mays
gggccgacgagctcgaggacagtggccaaggccgccggtgcgacacgttgccgtcaggcgtcagcgaaagcgaatcctccacctccccatcggacttgagggatatcaaatagactttttcctttcgaagacccatcgtaggcccagctacagcccatttagcccatctcgcgactacagtgtacagccgcaaatcgggagaaggggtttttatgtctcctcgcccgctccgaatcagctcgaggtagcagctccccccgcaaaaaccctagctttacctccccacaagcgcctccaagatgaagctcgtcaggttcttgatgaagctgaacaacgaaacggtgaccatcgagcttaagaacggcaccgtcgtacacggaaccattaccggtgttgacatcagcatgaatactcatctgaagactgtgaagctgacactaaaagggaaaaatcctgttacccttgatcaccttagtgtgaggggaaacaacatccgctattatatccttcctgacagcctaaacctggagactttgctggttgaggaaacaccaagggtcaagcctaagaagcctacttctgggaagcccttgggccgtgggcgtggccgtggtcgtgggcgcggtcggggtcggggacgttgagcatgctagctgcttttggaaattgcattgcgtgcatctgcagtgtaatctacattcctatcaattccagaccattggagcaattaccgaaga

SEQ ID NO: 43896 - DNA, 829 bp, Zea Mays
gggccgacgagctcgaggacagtggccaaggccgccggtgcgacacgttgccgtcaggcgtcagcgaaagcgaatcctccacctccccatcggacttgagggatatcaaatagactttttcctttcgaagacccatcgtaggcccagctacagcccatttagcccatctcgcgactacagtgtacagccgcaaatcgggagaaggggtttttatgtctcctcgcccgctccgaatcagctcgaggtagcagctccccccgcaaaaaccctagctttacctccccacaagcgcctccaagatgaagctcgtcaggttcttgatgaagctgaacaacgaaacggtgaccatcgagcttaagaacggcaccgtcgtacacggaaccattaccggttatccggtcgattatggtttacatatacggacagctatcttcagatagtgttgacatcagcatgaatactcatctgaagactgtgaagctgacactaaaagggaaaaatcctgttacccttgatcaccttagtgtgaggggaaacaacatccgctattatatccttcctgacagcctaaacctggagactttgctggttgaggaaacaccaagggtcaagcctaagaagcctacttctgcccttgggccgtgggcgtggccgtggtcgtgggcgcggtcggggtcggggacgttgagcatgctagctgcttttggaaattgcattgcgtgcatctgcagtgtaatctacattcctatcaattgtacgaagtatgcctttgattatgcaaccatgtatcaattgtttttttttgccagaaataaaaaacaaatcttat

SEQ ID NO: 43897 - DNA, 891 bp, Zea Mays
gggagcgctccctcctcccttgtttccctggcgcatggacttctattttccccagctctgtctccatggtcggcttcttctgctcggcctttgctcctccctgcgtgcgtctccctgcgcacgcaccgccgtcgagttccctgctgcgcactgagctttctgtcgcaccctggccccaacttcctctctatttcccagccgaagcgcgtccctggtcccagtgtggagctcgcgagcgcttctttgggctccatgtgtcgcgatcacctttggtccctgttaccctctaaaccactatcgcgtcgggttatgccccgatgcgcgcgtcatcagtcttcgtcgtgccactgttccctgatccgcgctactccctggtcggtctcacgctcgcctttagcgtcgtgccgcacccaggttctttggccccgttctagctgcaacgacctctcctacggggcatctcgtcgtcggctggccatcagccttgatgtccattacactctccagtaaacctatggcagtagatgagagacctcggaagttggttagatgaagaaaagaaaagtaaagtttgtacagcgcccgtctggtgttcggcaaaatgagtggaccagtgctcgtcgcgtgttgggaagatcggcaccgaggttcttgccgaatattgcttgatttgttttgaggacaatgacgcacacatgatgttcaatgaatggttcaaaccggatagcctcgtcaaaatcttggctccgagccaattcgaacatggtacgttaaataattgtgtgatgtggaggacggcccaagtcgacgccgggaaaatgcggagattggacatctccgcaagacgtcgtcatcagtcggaccaacctgaagatggacagacgaagcaag

SEQ ID NO: 43898 - DNA, 1012 bp, Zea Mays
cttctactctgcttccaccccgcacgtgcagaaaacagaaggatctttacctttggatggtgaagtctcctggaggaccatcagtaaaatttctagttaatgctgttcacaccatggaggagttgaagcttaccggtaaccatctgaaagggtcacgcccacttcttacattttctacaaattttgatgagcaacctcattggaagcttgtgaaggaaatgataactcagatatttgctactcctaaagatcaccgtaaagcaaaacctttccatgaccatgtgtttgtcttctccattgtggatggccatgtttggtttcgaaactaccagatttcggttccccacaatgagattgataaagttgataaaggtggtctggataaaatgacacttattgaggttggccccaggttctgtttgaatccaatcaaaatatttggtggtagttttggtggtcctacatggtatgagaacccatactacatttcccccaatcagatccgtgcactagagaagaggcagaaggcaggcaaatatgccaagaaggtgaaggccaaggtgaggcggaagatgcacgagatggagaacacgctggagcctgatgagtttgctgagctctggaaaggggagtaactggtctttgatcgaccctgtcaaagtcgtgaagcaccagcaactccttccacttccaccaagcgcaggtcttgtttaccattgtggcagtgccgactgtcgaggttgtggaagttttgtatcacaaagcatacttttatttatataaaatcggattttagtgataagataacttctgcctatatgacattcttctcgtgtttgcttctagtggatgtggtgccaagtggagtatatctctcttggatccaacggtcattaccgttctccgtgtcagccgcggaattttaaactatttttttataagaaaatgtttaatagtttcattgttctacataggtgaaaatataagagacaatgatgttaagtagttgctt

SEQ ID NO: 43899 - DNA, 1498 bp, Zea Mays
cctggcccatcaggcctacttgatgcgcgcctctctccctcccaacaaccaggccacaagcgcccgagcggcttaaaccctagctcgccgtcgtgctcggctcgccaccccgcgcctgctcctttcaggccctaaccgttcgccgccgcgcattcgagcacacgcggaagcgcacctagtgccatggcgaagaagcggaagcgcaccgacgcgcccgcagaggcggccggcgcagagaagcctgacgactccgcgccggcgcgcccggagcgcacgctcttcggcttcaaggacctggtccccgacgccgagcccgcctccgcgggcgccgaggccgcggtggcgccgttccggaacagggagaaggtactcatcacctgctcccgccgaatcacgtataggtatcggcacctgatgcaggacgtgctgtcgctgctcccgcatgcgaagaaggacagcaaggtcgagtcgaagcagagcaaggggaacgcgctgaacgagctccttgagctcaggagctgctccagctgccttttcttcgagtgcagaaaacagaaggatctttacctttggatggtgaagtctcctggaggaccatcagtaaaatttctagttaatgctgttcacaccatggaggagttgaagcttaccggtaaccatctgaaagggtcacgcccacttcttacattttctacaaattttgatgagcaacctcattggaagcttgtgaaggaaatgataactcagatatttgctactcctaaagatcaccgtaaagcaaaacctttccatgaccatgtgtttgtcttctccattgtggatggccatgtttggtttcgaaactaccagttgataaaggtggtctggataaaatgacacttattgaggttggccccaggttctgtttgaatccaatcaaaatatttggtggtagttttggtggtcctacatggtatgagaacccatactacatttcccccaatcagatccgtgcactagagaagaggcagaaggcaggcaaatatgccaagaaggtgaaggccaaggtgaggcggaagatgcacgagatggagaacacgctggagcctgatgagtttgctgagctctggaaaggggagtaactggtctttgatcgaccctgtcaaagtcgtgaagcaccagcaactccttccacttccaccaagcgcaggtcttgtttaccattgtggcagtgccgactgtcgaggttgtggaagttttgtatcacaaagcatacttttatttatataaaatcggattttagtgataagataacttctgcctatatgacattcttctcgtgtttgcttctagtggatgtggtgccaagtggagtatatctctcttggatccaacggtcattaccgttctccgtgtcagccgcggaattttaaactatttttttataagaaaatgtttaatagtttcattgttctacataggtgaaaatataagagacaatgatgttaagtagttgctt

SEQ ID NO: 43900 - DNA, 1866 bp, Zea Mays
  misc_feature (1865)..(1866): n is a, c, g, or t
tctccaccggaggcgggaggcgtagggtttaggcgcggaatggcgggaggaggaggggggcgcggcgaatcctcgccggcgatcaagccaattagtaaggcggtagtgcaccgcatctgctctggccaggtcatcttcgacctttcctccgccgtcaaggagctcgtcgagaacagcctcgacgctggcgctacctccgtcgaggtcagcctcaaggcctacggcgaggagtggttcaaggtcgccgacaacggatgcggtatatctccctccaacttccgggctcttgctcttaagcaccacacgtccaagatatcagatttctctgaccttggatccctggttaccttcgggttccggggcgaagctctgagctcgctctgcgcgcttgggaaactgacggttgagacgaggagcaaggatgagctagttgggacgcatttggagtttgagcactctggcgtggtggttagtgaaaggaagaccgcacggcaggttggaaccacggtgacagtagaaaagttgttctccaccttgccggtccggagcaaggaatttagcaggaacattcggaaggaatacgggaaagtgatctcgctgctgaacgatcaacagtgtggtcgatgccattcagcttctggtgctcccaacaaatattcagaatcacgacatcagaatgcattggctgatagtcctttgcctgatgctcaggattatggtgatggtgctgcagtatgttatgcatctgtacaatatcccattattcaatttacggttgccgagcttaggagaagaagaaagaattgttttatgatatctcatataaataaatcatattgtctcgagaaaacaacaaggtgctataaagctgcaacactggacatcactgtacccttagctgacgaggcaaaatcaaactcattagctgcagccaccaatgagttggacaggcttttcagtaaacatgattttcgagaaatggaggttgttggacaatttaatcttggttttatcattggaaagcttggccaggatctgtttattgtagatcagcatgcttctgatgagaagtacaactttgagtgcctttcgcagtctacaattttaaacgtacagcctcttctcgagccactgagacttgatctatcaccagaggaagaagtaattgtttctatgaacatgagcaccatcagaaaaaatggtttcgttttggcagaagatttgcatgcttctcccggtaaccattatcttctgaaagctgtacctttcagcaaaaatattacatttggtgttcaagatgtaaaggagttgatctccatgcttgccgatagtcaaggagactgttcaataatcagtagctacaagctggatacagccgactctgtttgcccttcgagggttcgtgctatgttggcttctagggcttgccgaatgtctactatgataggcgatccactaacaaaagctgagatgaagaagatacttaaaaacatggctggattgaggtccccttggaactgcccacacgggaggccaacaatgcggcacctagctgacctgcgtactatgaaggcgaaagatatcgcgtttaaacgctaggccctgttggctgccggcctgccgcgcgtggggggcctacgctcaacggaaggatgtttctatgctcttccgctttatgttgaagaatacaagaagtgcatatgtgccccgcccccgcttgtaaattacggcgtacgcacgtcgcgccgcccccgcatgcaaggtccatttgtttgtttgttttttgtcagaaggaatacctgtggtgatatttatgtccagtctccagggatgtatggtgttctgttttggcaaatagaagcttnn

SEQ ID NO: 43901 - DNA, 3087 bp, Zea Mays
  misc_feature (3086)..(3087): n is a, c, g, or t
tctccaccggaggcgggaggcgtagggtttaggcgcggaatggcgggaggaggaggggggcgcggcgaatcctcgccggcgatcaagccaattagtaaggcggtagtgcaccgcatctgctctggccaggtcatcttcgacctttcctccgccgtcaaggagctcgtcgagaacagcctcgacgctggcgctacctccgtcgaggtcagcctcaaggcctacggcgaggagtggttcaaggtcgccgacaacggatgcggtatatctccctccaacttccgggctcttgctcttaagcaccacacgtccaagatatcagatttctctgaccttggatccctggttaccttcgggttccggggcgaagctctgagctcgctctgcgcgcttgggaaactgacggttgagacgaggagcaaggatgagctagttgggacgcatttggagtttgagcactctggcgtggtggttagtgaaaggaagaccgcacggcaggttggaaccacggtgacagtagaaaagttgttctccaccttgccggtccggagcaaggaatttagcaggaacattcggaaggaatacgggaaagtgatctcgctgctgaacgcttatgcattgattgccaaaggggtcagattactctgcactaatactgttggaaaaaattctaaaatggttgtgcttagaactcaaggaagcagttcgatgaaagacactatcattactgtatttggtccaaacacttttaaatgtcttgagcccttcagtgttaccacctcggatggctgccagatagagggctttctttcaaaacctggacctggtactggtcgcagttcaggagatagacaatttttctatgtgaatggcagacctattgatatgccaaaggtcacaaaacttgtcaacgagctatacagaagctcaaatgccaaacaatatcctgtggtaattctagattttcatattccaactacatcctatgatgtgaatattgcacctgataagagaaaagttttcttctcatctgaaagcatgattctgcaatctttgcgggaaactgttgaaaacctgtactcccctcaacaatgcagtttctcagtcaatcacatcaaagatcctgaaaaggaaggggatgctgttactgataggcataatgaagacacaaatgcaatcgtaatggtgaatgttccatcttactacaacaatgatgacaatgaagaaacagacaatgaggatcaggtttctccagagaaccagaaattgccttcagtggctagagatgcgagccccctgtcaggaggcacaaccactcaggctgatagatctgcttggcttccatcctttgcatatgaccagccaaaaagatcgcctaaagaaggaagaagtttggtattgggtagaaattgttttagaactgggcttgctgcaaagccaactcattcaagtactgttcagtcttctctcctgaactttgtatcactaaacaagcggaaacacgaagatgattgcactcttatttctgaagctgcagtgctgagaagagagacatgctctgaacatatgaggagatcaagtttagaagcaaactttgttacaccaaacaagcagaaccatgaggatgattgcattatttctgagtctccagtgctgagaagtgggacatgctcagaactatacaagaggacaagtttagaagtcaattttccatcaccaaataagcagaagcatgatgacaattgcactcttatttctgaaatccctgtgttgagaagaaggacaaattcagaacaagcgagaggaacaagtttagaagcaaattcagcacctgagttcaatttacctctggaaacaaactctttaaaacagcactcctcacaatattttggatctgtgaggacagatgtttcaccacagcattctaaacaacctaatattgtgaccattggggcaggggtaacaggtccatgtgatgttgacactacagaatctgatatggatcaacagtgtggtcgatgccattcagcttctggtgctcccaacaaatattcagaatcacgacatcagaatgcattggctgatagtcctttgcctgatgctcaggattatggtgatggtgctgcagtatgttatgcatctgtacaatatcccattattcaatttacggttgccgagcttaggagaagaagaaagaattgttttatggttgttggacaatttaatcttggttttatcattggaaagcttggccaggatctgtttattgtagatcagcatgcttctgatgagaagtacaactttgagtgcctttcgcagtctacaattttaaacgtacagcctcttctcgagccactgagacttgatctatcaccagaggaagaagtaattgtttctatgaacatgagcaccatcagaaaaaatggtttcgttttggcagaagatttgcatgcttctcccggtaaccattatcttctgaaagctgtacctttcagcaaaaatattacatttggtgttcaagatgtaaaggagttgatctccatgcttgccgatagtcaaggagactgttcaataatcagtagctacaagctggatacagccgactctgtttgcccttcgagggttcgtgctatgttggcttctagggcttgccgaatgtctactatgataggcgatccactaacaaaagctgagatgaagaagatacttaaaaacatggctggattgaggtccccttggaactgcccacacgggaggccaacaatgcggcacctagctgacctgcgtactatgaaggcgaaagatatcgcgtttaaacgctaggccctgttggctgccggcctgccgcgcgtggggggcctacgctcaacggaaggatgtttctatgctcttccgctttatgttgaagaatacaagaagtgcatatgtgccccgcccccgcttgtaaattacggcgtacgcacgtcgcgccgcccccgcatgcaaggtccatttgtttgtttgttttttgtcagaaggaatacctgtggtgatatttatgtccagtctccagggatgtatggtgttctgttttggcaaatagaagcttnn

SEQ ID NO: 43902 - DNA, 3292 bp, Zea Mays
  misc_feature (3291)..(3292): n is a, c, g, or t
aaagagggcgacgccgaaaacggttcttctccagtctccaccggaggcgggaggcgtagggtttaggcgcggaatggcgggaggaggaggggggcgcggcgaatcctcgccggcgatcaagccaattagtaaggcggtagtgcaccgcatctgctctggccaggtcatcttcgacctttcctccgccgtcaaggagctcgtcgagaacagcctcgacgctggcgctacctccgtcgaggtcagcctcaaggcctacggcgaggagtggttcaaggtcgccgacaacggatgcggtatatctccctccaacttccgggctcttgctcttaagcaccacacgtccaagatatcagatttctctgaccttggatccctggttaccttcgggttccggggcgaagctctgagctcgctctgcgcgcttgggaaactgacggttgagacgaggagcaaggatgagctagttgggacgcatttggagtttgagcactctggcgtggtggttagtgaaaggaagaccgcacggcaggttggaaccacggtgacagtagaaaagttgttctccaccttgccggtccggagcaaggaatttagcaggaacattcggaaggaatacgggaaagtgatctcgctgctgaacgcttatgcattgattgccaaaggggtcagattactctgcactaatactgttggaaaaaattctaaaatggttgtgcttagaactcaaggaagcagttcgatgaaagacactatcattactgtatttggtccaaacacttttaaatgtcttgagcccttcagtgttaccacctcggatggctgccagatagagggctttctttcaaaacctggacctggtactggtcgcagttcaggagatagacaatttttctatgtgaatggcagacctattgatatgccaaaggtcacaaaacttgtcaacgagctatacagaagctcaaatgccaaacaatatcctgtggtaattctagattttcatattccaactacatcctatgatgtgaatattgcacctgataagagaaaagttttcttctcatctgaaagcatgattctgcaatctttgcgggaaactgttgaaaacctgtactcccctcaacaatgcagtttctcagtcaatcacatcaaagatcctgaaaaggaaggggatgctgttactgataggcataatgaagacacaaatgcaatcgtaatggtgaatgttccatcttactacaacaatgatgacaatgaagaaacagacaatgaggatcaggtttctccagagaaccagaaattgccttcagtggctagagatgcgagccccctgtcaggaggcacaaccactcaggctgatagatctgcttggcttccatcctttgcatatgaccagccaaaaagatcgcctaaagaaggaagaagtttggtattgggtagaaattgttttagaactgggcttgctgcaaagccaactcattcaagtactgttcagtcttctctcctgaactttgtatcactaaacaagcggaaacacgaagatgattgcactcttatttctgaagctgcagtgctgagaagagagacatgctctgaacatatgaggagatcaagtttagaagcaaactttgttacaccaaacaagcagaaccatgaggatgattgcattatttctgagtctccagtgctgagaagtgggacatgctcagaactatacaagaggacaagtttagaagtcaattttccatcaccaaataagcagaagcatgatgacaattgcactcttatttctgaaatccctgtgttgagaagaaggacaaattcagaacaagcgagaggaacaagtttagaagcaaattcagcacctgagttcaatttacctctggaaacaaactctttaaaacagcactcctcacaatattttggatctgtgaggacagatgtttcaccacagcattctaaacaacctaatattgtgaccattggggcaggggtaacaggtccatgtgatgttgacactacagaatctgatatggatcaacagtgtggtcgatgccattcagcttctggtgctcccaacaaatattcagaatcacgacatcagaatgcattggctgatagtcctttgcctgatgctcaggattatggtgatggtgctgcagtatgttatgcatctgtacaatatcccattattcaatttacggttgccgagcttaggagaagaagaaagaattgttttatgatatctcatataaataaatcatattgtctcgagaaaacaacaaggtgctataaagctgcaacactggacatcactgtacccttagctgacgaggcaaaatcaaactcattagctgcagccaccaatgagttggacaggcttttcagtaaacatgattttcgagaaatggaggttgttggacaatttaatcttggttttatcattggaaagcttggccaggatctgtttattgtagatcagcatgcttctgatgagaagtacaactttgagtgcctttcgcagtctacaattttaaacgtacagcctcttctcgagccactgagacttgatctatcaccagaggaagaagtaattgtttctatgaacatgagcaccatcagaaaaaatggtttcgttttggcagaagatttgcatgcttctcccggtaaccattatcttctgaaagctgtacctttcagcaaaaatattacatttggtgttcaagatgtaaaggagttgatctccatgcttgccgatagtcaaggagactgttcaataatcagtagctacaagctggatacagccgactctgtttgcccttcgagggttcgtgctatgttggcttctagggcttgccgaatgtctactatgataggcgatccactaacaaaagctgagatgaagaagatacttaaaaacatggctggattgaggtccccttggaactgcccacacgggaggccaacaatgcggcacctagctgacctgcgtactatgaaggcgaaagatatcgcgtttaaacgctaggccctgttggctgccggcctgccgcgcgtggggggcctacgctcaacggaaggatgtttctatgctcttccgctttatgttgaagaatacaagaagtgcatatgtgccccgcccccgcttgtaaattacggcgtacgcacgtcgcgccgcccccgcatgcaaggtccatttgtttgtttgttttttgtcagaaggaatacctgtggtgatatttatgtccagtctccagggatgtatggtgttctgttttggcaaatagaagcttnn

SEQ ID NO: 43903 - DNA, 1136 bp, Zea Mays
gaatacgcaggaggtctgcgtatttttatattaagaagaaaaaaggggggaaccccaaaacagaaacaacagttttacaaactcacaccaccattaacgcctaagacagctcctctaaatggatcttttatcacttcataagattgactgccgaatccttgcaggatcaacagtgtggtcgatgccattcagcttctggtgctcccaacaaatattcagaatcacgacatcagaatgcattggctgatagtcctttgcctgatgctcaggattatggtgatggtgctgcagtatgttatgcatctgtacaatatcccattattcaatttacggttgccgagcttaggagaagaagaaagaattgttttatgatatctcatataaataaatcatattgtctcgagaaaacaacaaggtgctataaagctgcaacactggacatcactgtacccttagctgacgaggcaaaatcaaactcattagctgcagccaccaatgagttggacaggcttttcagtaaacatgattttcgagaaatggaggttgttggacaatttaatcttggttttatcattggaaagcttggccaggatctgtttattgtagatcagcatgcttctgatgagaagtacaactttgagtgcctttcgcagtctacaattttaaacgtacagcctcttctcgagccactgagacttgatctatcaccagaggaagaagtaattgtttctatgaacatgagcaccatcagaaaaaatggtttcgttttggcagaagatttgcatgcttctcccggtaaccattatcttctgaaagctgtacctttcagcaaaaatattacatttggtgttcaagatgtaaaggagttgatctccatgcttgccgatagtcaaggagactgttcaataatcagtagctacaagctggatacagccgactctgtttgcccttcgagggttcgtgctatgttggcttctagggcttgccgaatgtctactatgataggcgatccactaacaaaagctgagatgaagaagatgctcgtaaaggactcggtgcaccggcttcctctcccgtggattgcgcagaaggccagtgtccagaatgccgacccttcctccttgtacagagagtag

SEQ ID NO: 43904 - DNA, 1738 bp, Zea Mays
ggccgttttttttatgttgggcttccggtcgcattcggcccattcgctcgaaccgggggagcctgttgacttctacggtctatctcgaagtcacagacgccgcgtcgccgcgaagcgcatccattcgtcgccgcagcacgccggcggccggcgggcaggttgcttcgatgggctctcctacgcgggttcggaggacgaccggtttcactctcctcctggtgcttctgttcctctcgccgcccgtgtcagctggacaaccaaaaggtgtgtgtgtttcaccaggtggacggttccctgccttttcatctgaaggcaagcctcctggaagagcacccaaggggcgcagagatctagcactgtgtaggatattccgtcagaaaacatgttgcgatgtgatgcagacatttcctgctctggtctcagtaagaaaccttgcattggctggtgaaggcagtcaagaatgtattcatttgtgggaattgcttgagtgctcaatatgcgatccacgagtgggtatcaggcctggacctcctgttgtatgtgcatcattctgtgatatggtcttcaaagcttgttcagagtcgtacttctctatagatacgaaaacacaggccttgtctccttgtggtttagatgacatcctttgtggcaaaacacataaatgggtctctaacggcacagagttgtgccgtcttgctggtttctctgttcaaatttctgagaccagctctggtggagttggtcacactttctgctatggtgggaaagcaagtttggattccatctctgattcatggacttcttcaaaagaccgtccaacattaagtggtgtggcttcatgggacgttcaagattttcagagatgggcacgagaaatgcctatcggtgaaagagtttcgtgggcgattggaggaatggttctcacagctggccttatttttatcaggtattgcatattgcttttctctttcactttatatatgcatagataggtaaaaccctaactcaatcaggtactaaagtatcagcataaataattcttgtagatctgagtatgttttatacatttggaatagatactgcataggctatttacagatgatggatctacaagaaaaggagcaaaaaaaaaactttgattctgtccttttttttcagtgtaatcttgcaactatctggcatgatgtcttaaattcttgctgagatggcacattggaagcttgcacttcataccccttcttttcaattgaacttcaaactatcgtttatctatgcagcaaaagaaagagctacagccatcaccagaagcaagctgctattgctcgcaatatgagattgagaaggctggattctagagccaacccacaacaaacaaagcggagctaggaaggcataggcaacttagtgttactcatagaggattcttggacttgtgcttctacttttgtggatcggtataatcaacaactgtgaacaatagattgtactgtgtgtgagtccatcttgttgcttagatgcaccagctacgacctccgtgtcatccttgtgtggaagaagagttctataagttgtcactgagtattcctggaatgcagaacttatgggctgtgacgagatcatgtacatattatttggaaatgacttttttgatgccatcgatatccggcgacatgcctacatgatttgtgatctgtgagttcatctaaggcagtagagcatatgtatatgtatatctatg

SEQ ID NO: 43905 - DNA, 1717 bp, Zea Mays
ggccgttttttttatgttgggcttccggtcgcattcggcccattcgctcgaaccgggggagcctgttgacttctacggtctatctcgaagtcacagacgccgcgtcgccgcgaagcgcatccattcgtcgccgcagcacgccggcggccggcgggcaggttgcttcgatgggctctcctacgcgggttcggaggacgaccggtttcactctcctcctggtgcttctgttcctctcgccgcccgtgtcagctggacaaccaaaaggtgtgtgtgtttcaccaggtggacggttccctgccttttcatctgaaggcaagcctcctggaagagcacccaaggggcgcagagatctagcactgtgtaggatattccgtcagaaaacatgttgcgatgtgatgcagacatttcctgctctggtctcagtaagaaaccttgcattggctggtgaaggcagtcaagaatgtattcatttgtgggaattgcttgagtgctcaatatgcgatccacgagtgggtatcaggcctggacctcctgttgtatgtgcatcattctgtgatatggtcttcaaagcttgttcagagtcgtacttctctatagatacgaaaacacaggtaaaccctctgattaatggacataattgagattgagacaagcgggtactgatacctcaaacatgtactggcacacaagtacatgtgctgctgctagattaagcttgatagttccatggttagattataattatacactaaacagtcatgttctagcccatgtctgttgtgtacattctggatagctgttgattctgctgaagttcctttgtgctaagagatttttagcttcatctactgatttttgttttgttgattacgatttcacgttttggttctgatctgaatatgctccttactggtttgtcaggccttgtctccttgtggtttagatgacatcctttgtggcaaaacacataaatgggtctctaacggcacagagttgtgccgtcttgctggtttctctgttcaaatttctgagaccagctctggtggagttggtcacactttctgctatggtgggaaagcaagtttggattccatctctgattcatggacttcttcaaaagaccgtccaacattaagtggtgtggcttcatgggacgttcaagattttcagagatgggcacgagaaatgcctatcggtgaaagagtttcgtgggcgattggaggaatggttctcacagctggccttatttttatcagcaaaagaaagagctacagccatcaccagaagcaagctgctattgctcgcaatatgagattgagaaggctggattctagagccaacccacaacaaacaaagcggagctaggaaggcataggcaacttagtgttactcatagaggattcttggacttgtgcttctacttttgtggatcggtataatcaacaactgtgaacaatagattgtactgtgtgtgagtccatcttgttgcttagatgcaccagctacgacctccgtgtcatccttgtgtggaagaagagttctataagttgtcactgagtattcctggaatgcagaacttatgggctgtgacgagatcatgtacatattatttggaaatgacttttttgatgccatcgatatccggcgacatgcctacatgatttgtgatctgtgagttcatctaaggcagtagagcatatgtatatgtatatctatg

SEQ ID NO: 43906 - DNA, 2770 bp, Zea Mays
ccaccatcggccatcgcgccctccccaaatcgcctcgtccgcccaattatgctcctcaaaccgcacgcgcgcgcgcgactcaccgccgttgtcgtcgtcgtgttcgcggagatccgcggggctcgcccatccccctcctccctgctctcctccccagcacccacggcccgctgctgcccctccgcgcgccccctcgccaaaccctagcttggccatctccccccactgccccggcgccaccacctgccctgccctgcgcgtggccggcggcgccgaccgccgccattgtcttacggaggcgtccgagtcccgacgcgttggaatgcgctggaggcgaaccctagtaaacgaagagcaagtgtgttaaagtactttagggaacttccttcccaagacgatgatggtcaagttctccctattagtggtctctggaacacagcaatggctcacccaaatgatcccgagttcatcaacttgggcatatttgaatgcatggcatctcttatatggaaagggttgaaaaacaggcgttggcttgcacatgatcagaatatttacatcccatattatgcagctcacataattggatcatacacaatgaatatggaggagtttgcagagcgtgctgttcgtgctggtgtaatacctccattagttgaattattaagaggtaggttgacatgggtcgagcaaagagttgctgttagagctttgggtcatttggctacatatcctagtacatttcctgcagttgccgatcatggggaagtacttgaacttgccattcaacttgcttcgagctcgctagaaattgtgtactctcacttttaccagtttgtggatcgaagacttggctaccattgcgaccttcttactcgtggcatgggtggtgtggaaatggagtcccgcaaagctgaggaatgggcaagtcaactgcagtgctggtctttgcaactcattaactgctttgcatttaagcctgaattcctccatgatatttgcaagcctgattttctagtcaagttacctggaatgtggggtggacttgtaaatgagaactcacctgctggtgttggtttgctaagaacaatctgccagagcaaggttggccgaggtcatgttgctaacattcctgctactattgatgctttatgcaacattgctcgttcttcagatgactggcaatacatggcagttgattgtctgatctggttaatgcaggatgcaagtacttgtcataaggttaaagatatagttgcgccaacactgatagatttatcagatatttcggcactgggtgattataaaaagcttggtgacacaattgtcacagtcctccaagaatgtatgcaacagagtgggaactcacgtggtgcaattggtgttcagaccaaatcagaaattgatgagcttttgagatccaagcaaagtctgaaattggaaaagagtatgccaaaggaggatcttcatataaaacaagctgcggcattggttgtcaagttggaaggcaattcactgttctcctcagggaacatcgcaggagctgcagagaaatactctgaagcgcttgcgttatgtccgatgaaatccaagaaagagcgggtggttctctacagcaatcgagctcagtgttaccttctcttgcagcagccattggctgccataagcgatgctactcgagcattgtgccttcacagccccgtgaaccgtcatgccaagagtttgtggcgaagagctcaagcgtatgatatgcttggtcttgcaaaagagagcttgttggacgcaatccttttcataaacgagtgctctcagtcgaacgatcccgacttatccctgaagcaaaacaaagtccctgactatgccgagcggttggtgaagaagcagatgcgctccgcttggctattcagggaagcagctctgaagcacgggggcgtacactgtgaaggagatgctagcgacgcgtttggccaggatgctgacgactctgagtgggaaacggctagcgaaagcgacgccgagaatgatgacacgggagaagcggatgatggaactgaatggaagaacgatggacaccgggaagatatctgtgagaaaagctgaggagcagggcaagctgaacctattcagagggagtcaaactgagcagtgacagaagcagctgctgggccttatgaagtctgctgcgctatcagcctatcaagcatcagatctttctaatgcagcgatctgctagaagcgtactctcatttcaaaagatgccagggaactcgccctgattgagagtttcccgtggcccatggccgtggccgaagcgttgaaacaaacagcgaggacaggggtgcacggctggccacagcacatcagcgcaagcgacgagtcctgtcacctacacatagattgacgaaagagttaacgcagggcagcggccagccccatgcgtcgatcattgccttggttcatcactgcttgccaatggatggacgatgcgaacgcttggagcaaacatggtcttagttcgtagccatgataagctgttgagattactatctaatgggcataggccctgtttgtttatcctctagattatataatctagcttaaataaattaagagacacacaaacaacatagattatgatctagatatctagattatgatagtccataaaaacaagtacaataaaagactataagctgaccaaatggtgaggtggagaagagagaggagaaatgagctgtaaacttatagccgcttcgacataaaaaccatg

SEQ ID NO: 43907 - DNA, 2890 bp, Zea Mays
ccaccatcggccatcgcgccctccccaaatcgcctcgtccgcccaattatgctcctcaaaccgcacgcgcgcgcgcgactcaccgccgttgtcgtcgtcgtgttcgcggagatccgcggggctcgcccatccccctcctccctgctctcctccccagcacccacggcccgctgctgcccctccgcgcgccccctcgccaaaccctagcttggccatctccccccactgccccggcgccaccacctgccctgccctgcgcgtggccggcggcgccgaccgccgccattgtcttacggaggcgtccgagtcccgacgcgttggaatgcgctgactgaagtgtgatcattgaggttctggttaaagaaacttctagtatcgattggcttccctcccatggacaagatacaatctgattgcccttatcctggatgtttcttttgtgtcatgaaggaggcgaaccctagtaaacgaagagcaagtgtgttaaagtactttagggaacttccttcccaagacgatgatggtcaagttctccctattagtggtctctggaacacagcaatggctcacccaaatgatcccgagttcatcaacttgggcatatttgaatgcatggcatctcttatatggaaagggttgaaaaacaggcgttggcttgcacatgatcagaatatttacatcccatattatgcagctcacataattggatcatacacaatgaatatggaggagtttgcagagcgtgctgttcgtgctggtgtaatacctccattagttgaattattaagaggtaggttgacatgggtcgagcaaagagttgctgttagagctttgggtcatttggctacatatcctagtacatttcctgcagttgccgatcatggggaagtacttgaacttgccattcaacttgcttcgagctcgctagaaattgtgtactctcacttttaccagtttgtggatcgaagacttggctaccattgcgaccttcttactcgtggcatgggtggtgtggaaatggagtcccgcaaagctgaggaatgggcaagtcaactgcagtgctggtctttgcaactcattaactgctttgcatttaagcctgaattcctccatgatatttgcaagcctgattttctagtcaagttacctggaatgtggggtggacttgtaaatgagaactcacctgctggtgttggtttgctaagaacaatctgccagagcaaggttggccgaggtcatgttgctaacattcctgctactattgatgctttatgcaacattgctcgttcttcagatgactggcaatacatggcagttgattgtctgatctggttaatgcaggatgcaagtacttgtcataaggttaaagatatagttgcgccaacactgatagatttatcagatatttcggcactgggtgattataaaaagcttggtgacacaattgtcacagtcctccaagaatgtatgcaacagagtgggaactcacgtggtgcaattggtgttcagaccaaatcagaaattgatgagcttttgagatccaagcaaagtctgaaattggaaaagagtatgccaaaggaggatcttcatataaaacaagctgcggcattggttgtcaagttggaaggcaattcactgttctcctcagggaacatcgcaggagctgcagagaaatactctgaagcgcttgcgttatgtccgatgaaatccaagaaagagcgggtggttctctacagcaatcgagctcagtgttaccttctcttgcagcagccattggctgccataagcgatgctactcgagcattgtgccttcacagccccgtgaaccgtcatgccaagagtttgtggcgaagagctcaagcgtatgatatgcttggtcttgcaaaagagagcttgttggacgcaatccttttcataaacgagtgctctcagtcgaacgatcccgacttatccctgaagcaaaacaaagtccctgactatgccgagcggttggtgaagaagcagatgcgctccgcttggctattcagggaagcagctctgaagcacgggggcgtacactgtgaaggagatgctagcgacgcgtttggccaggatgctgacgactctgagtgggaaacggctagcgaaagcgacgccgagaatgatgacacgggagaagcggatgatggaactgaatggaagaacgatggacaccgggaagatatctgtgagaaaagctgaggagcagggcaagctgaacctattcagagggagtcaaactgagcagtgacagaagcagctgctgggccttatgaagtctgctgcgctatcagcctatcaagcatcagatctttctaatgcagcgatctgctagaagcgtactctcatttcaaaagatgccagggaactcgccctgattgagagtttcccgtggcccatggccgtggccgaagcgttgaaacaaacagcgaggacaggggtgcacggctggccacagcacatcagcgcaagcgacgagtcctgtcacctacacatagattgacgaaagagttaacgcagggcagcggccagccccatgcgtcgatcattgccttggttcatcactgcttgccaatggatggacgatgcgaacgcttggagcaaacatggtcttagttcgtagccatgataagctgttgagattactatctaatgggcataggccctgtttgtttatcctctagattatataatctagcttaaataaattaagagacacacaaacaacatagattatgatctagatatctagattatgatagtccataaaaacaagtacaataaaagactataagctgaccaaatggtgaggtggagaagagagaggagaaatgagctgtaaacttatagccgcttcgacataaaaaccatg

SEQ ID NO: 43908 - DNA, 2940 bp, Zea Mays
ccaccatcggccatcgcgccctccccaaatcgcctcgtccgcccaattatgctcctcaaaccgcacgcgcgcgcgcgactcaccgccgttgtcgtcgtcgtgttcgcggagatccgcggggctcgcccatccccctcctccctgctctcctccccagcacccacggcccgctgctgcccctccgcgcgccccctcgccaaaccctagcttggccatctccccccactgccccggcgccaccacctgccctgccctgcgcgtggccggcggcgccgaccgccgccattgtcttacggaggcgtccgagtcccgacgcgttggaatgcgctgactgaagtgtgatcattgaggttctggttaaagaaacttctagtatcgattggcttccctcccatggacaagatacaatctgattgcccttatcctggatgtttcttttgtgtcatgaaggaggcgaaccctagtaaacgaagagcaagtgtgttaaagtactttagggaacttccttcccaagacgatgatggtcaagttctccctattagtggtctctggaacacagcaatggctcacccaaatgatcccgagttcatcaacttgggcatatttgaatgcatggcatctcttatatggaaagggttgaaaaacaggcgttggcttgcacatgatcagaatatttacatcccatattatgcagctcacataattggatcatacacaatgaatatggaggagtttgcagagcgtgctgttcgtgctggtgtaatacctccattagttgaattattaagaggtaggttgacatgggtcgagcaaagagttgctgttagagctttgggtcatttggctacatatcctagtacatttcctgcagttgccgatcatggggaagtacttgaacttgccattcaacttgcttcgagctcgctagaaattgtgtactctcacttttaccagtttgtggatcgaagacttggctaccattgcgaccttcttactcgtggcatgggtggtgtggaaatggagtcccgcaaagctgaggaatgggcaagtcaactgcagtgctggtctttgcaactcattaactgctttgcatttaagcctgaattcctccatgatatttgcaagcctgattttctagtcaagttacctggaatgtggggtggacttgtaaatgagaactcacctgctggtgttggtttgctaagaacaatctgccagagcaaggttggccgaggtcatgttgctaacattcctgctactattgatgctttatgcaacattgctcgttcttcagatgactggcaatacatggcagttgattgtctgatctggttaatgcaggatgcaagtacttgtcataaggttaaagatatagttgcgccaacactgatagatttatcagatatttcggcactgggtgattataaaaagcttggtgacacaattgtcacagtcctccaagaatgtatgcaacagagtgggaactcacgtggtgcaattggtgttcagaccaaatcagaaattgatgagcttttgagatccaagcaaagtctgaaattggaaaagagtatgccaaaggaggatcttcatataaaacaagctgcggcattggttgtcaagttggaaggcaattcactgttctcctcagggaacatcgcaggagctgcagagaaatactctgaagcgcttgcgttatgtccgatgaaatccaagaaagagcgggtggttctctacagcaatcgagctcagtgttaccttctcttgcagcagccattggctgccataagcgatgctactcgagcattgtgccttcacagccccgtgaaccgtcatgccaagagtttgtggcgaagagctcaagcgtatgatatgcttggtcttgcaaaagagagcttgttggacgcaatccttttcataaacgagtgctctcagtcgaacgatcccgacttatccctgaagcaaaacaaagtccctgactatgccgagcggttggtgaagaagcagatgcgctccgcttggctattcagggaagcagctctgaagcacgggggcgtacactgtgaaggagatgctagcgacgcgtttggccaggatgctgacgactctgagtgggaaacggctagcgaaagcgacgccgagaatgatgacacgggagaagcggatgatggaactgaatggaagaacgatggacaccgggaagatatctgtgagaaaagctgaggagcagagggagtcaaactgagcagtgacagaagcagctgctgggccttatgaagtctgctgcgctatcagcctatcaagcatcagatctttctaatgcagcgatctggtaacatttctactgtcctcgtcaaagcaaagccccagttaaactaattccccacgtcttgttgtttggtcagttgagttattgcgcctgcgaccattcaatgtttccccttagatgttggttctggtttggtgtttgtagcatgctctttctttcaccagtttctcaactctttgaatgaacaaaactgtgcattatttgttcttttttttactattatttctgtagtctggcgaagaggccataatactggcacccttccctttccactggacttatctggaacgagaagagcacgtttccgtctacctgctttttttggctataccatgtcaactagcaagtaggggttgttaggttgggtcatgctcttacaatgaaactggcgtgctgggcacttgctctgctagtctgcttgcctgaagcttcttgagagcgttgctgggggcaaaaatgccgacagacgtgttagtgtgtgccagtgcgtgcgtgttacttcttgtgcttgcacagatgctttcagtaagcacatcaatgtttgtgtgtacaaatgtagcatgaatgagtaattggagcgtgaatgatttgtaccgcgactgtacctcctttgc

SEQ ID NO: 43909 - DNA, 2067 bp, Zea Mays
ggaatacctcatcatgtaatacatacttttaaaaaagtttatacctataatatagaagtaattttttagataatggaaagatttattccggcttcaatcatcccctgtcatggatgcatcagaccacagaagttacaaaaaaacacccatcgctacaaagataggcatacgacctaaagacttatagccaatacatctccaaaagataaaacctataatgataataacagcaataataatagtaatagtagtagtaataataatcttcaacgtgctcagtctgtagtcaaactttagcagttttttcatggtgtttcctccacaagaacaaatctcacaataaaatgggtgaaagcagaatctaaacttgagccaaatccaacataggtgaagaacaactccagatgctgactgagctctgaccacaaagcggaaaaaaaccaacatcacaccacccccacaaaaggcactacaaatctaacaaagacactgaccgtgattggagacaccacatactcagaacctggcaacagcatgtccccaaggtgcaagacaaccacttttgaacaacggcaaatgtcacacctctatcaccttatgaggaacctcctaatgtgaggtctccaaggagagagacatctgaagactccatcgccgcgcgaccggatataccagtactaggttttcactcagatgaatccacaacgagaagtgagtaaaggcctcaacagcgcgtccagagacagtggcgccgacaggtggggtatacaccagcatcatacatggcacccacattgctatgccgttcgaccgtcattgaagcaccaaaggtagatgcccaacaccggaactggactgtagggccaccataccgcagattgggtcacaaccaccccacccccaatgttaacatccaaccaggagatcaaggtcgcctactcgccttcacctgagatcgtcatcagtcgcacgaaacaggaaggagataagaggcaagtggatacagtgaagaagtgtgtgaacatccttttagacgccacaaagggtcgctattgccatacgccaactggtgaccagggaaagacaccgatctagatttgttaggggcagtggcggaagtacctcctgcgctgtgtgtttctccttgtagaagttatttgggggtgttcataatacatcggtacgtttggatatttccaaaaggtagaattcagcaaatatatggggtttttctaggttgaacattattacctgtgcccaagtaatggtgtgtacatgaggcccaggtatacctttatagtttgaagcagcgattgaataccatccaaaaatagcatttgtcgaatacacaatagcttagtacacgttaacaaaacctagcaggaaatggctgtgtgctagaaggtcctttgtatttgacaaaatctactctggaagcattcacaagttcagtagaaaagacacagcacatcaacggaaatgaatgcaacagaatgatcatgcacattagactaaattccacatcaggctaccatgatagtacctctgaccacctagagaagaactagaatgttactcgagcagaagtaaaaaaaaaagaatgaagtactagaagcctaataaattccataaacactgcaaatgcaagggtacctaaacttaaccagtgggtggcctgaacgcggtccagcaaaactacagcaatttttttcatgtcaaccaactatcacgaaaaaaaaacagcgcacgccattgcatcacgacccggtattactcatgatggtgatagacatgcttggcccgcgcgatccttccagaagggccacctttttatgcgcggcttctacaataagcacgcagcttaatttaggacgcatacccagtatacattcaatacttctttgcaaagaggagacggaaaatcgaggttgtaggcacagtacgtgtaaactacacttgtaattggatcagatcagatccgaatataaatagcttgggtttgggtgctccgtctcgcacagcaggaacagaagactagagctcgtcgcccgcgagggtctcaaagat

SEQ ID NO: 43910 - DNA, 2621 bp, Zea Mays
tcgtgcggcagctgcatatagctgaaaccgccgcagtccaacgccaagcaagcgtgcctcccgtgaaccgagagcggtccacccgccgtgtccgtcaagtgaaaccatggacgtgccgctcccgctgctgctgggctccctggccgtttccgtcatggtatggtgccttgtgctccgccgcggcggggacgggaaggggaagcggccgctgccgcccgggccccggggctggccggtgctgggcaacctgccgcaggtcggcgccaagccgcaccacaccatgtgcgcgctggcgcgggagtacggcccgctgttccggctccggttcggcagcgccgaggtggtggtggccgcgtcggcgcgggtggcggcgcagttcctgcgcgcccacgacgccaacttcagcaaccgcccgcccaactccggagccgagcacgtggcgtacaactaccgggacctggtgttcgcgccctacggctcccggtggcgcgcgctgcggaagctgtgcgcgctccacctcttctccgccaaggcgctggacgacctgcgcggcgtcagggagggcgaggtggcgctgatggtgagggagctcgcccggccgcggcggggagagggagggcgggccgccgccgtggcgctcggccaggtggccaacgtgtgcgcgaccaacacgctggcccgggcgacggtgggccggcgcgtgttcgcggtcgacggaggggagggcgcccgggagttcaaggagatggtggttgagctgatgcagctcgccggggtcttcaacgtcggggacttcgtgccggcgctcgcctggctcgacccgcagggcgtggtcggcaggatgaagcggctgcaccgcaggtacgaccacatgatgaacgggatcatcagggagcggaaggccgccgaggaaggcaaggacctgctcagcgtgctgctggccaggatgcgggaccagcagcagcagccgctcgcggagggcgaggacaacaggatcaacgagactgacgtcaaagcgctcctcctcgaggagggagccgccattgccgtagatctccaggagcttcttgagggttagagacgggaggatgacagttagagtagtgatgaggtaccttgttaacaagctgggccttgaggacgattcacaggttaatgatactattgagatgcttgagagaatggctcaccgtggtgcctgcggctgcgagaagaatacaggagatggtgccggcatcatggtcgctctaccacatgacttcttcaaagaggtcgcaaaggatgctgggattgagctacccccactaggcgagtatgctgttgcaatgttttttatgccaacagatgaaaagcgtcgtaagaaaggcaaagctgagtttaagaaggttgcagaatcactgggacatgtaatactcgggtggcgtctggttccgactgacaactcagacttgggtgaatctgcactcgagactgagccagtcattgagcagcgtaggaggcttacctgctctataagcttcattgtattgttctacaaaggctttaatacaatcagggcgacagtgggcatgctgctcgggcgtcgaggacatgcacaggttcccggtgcgctccccgtggatggaccgcggcgacctcatccgcagtcccgccgcgcgacagatcgtgtccaactacttcaggacgtgcgcatcccgtatcagcagaagcgcatgttcggcttcgtcaccttcgtgtacgctgagacggtgaaggtcatcctgagcaagggcaacccgcactttgtgtgcgacgctcgcgtgctcgtcaagccctacaaggagaagggcaaggtccccggtaggtttaggaagctgcagcacacgcaccatggcggagccgagttcgtcggttgcgcgtcgcccactggattgctggattccagggacccctacgccctcctgcttctttcaggtgcccagaacctcttcacggctgggacggacacgacatccagcacggtggagtgggcgctggccgagctgatccggcatccggacgtgctcaggaaggcgcagcaggagctcgacgccgtcgtcggccgcgaccgcctggtgtccgagtcggacctcccgcgcctcacgtacctcacggcggtgatcaaggagacgttccggctgcacccgtccacgccgctgtcgctgccccgcgtcgccgccgaggagtgcgaggtggacgggttccgcatccccgccggcaccacgctgctggtgaacgtgtgggcgatcgcccgcgacccggaggcgtggcccgagccgctccagttccggcccgcgcgcttcctcccgggcggctcgcacgcgggcgtcgacgtcaaaggcagcgacttcgagctcatcccgttcggcgccggccggaggatctgcgcgggcctcagctggggcctgcgcatggtcacgctcatgacggccacgctggtgcacgcgctcgaatgggatctcgccgatggcgtcaccgccgaaaagctggacatggaggaggcctacgggctcaccctgcagcgcgccgtgccgttgatggtccggcccgcgcccagactgctgccgtctgcctacgcagcgcagtagaaaaaggattctctt

SEQ ID NO: 43911 - DNA, 1683 bp, Zea Mays
aacaccttcgtctccccgtgcacaacgagagatccccacggccgccgaggaacccctcctcatcctccttgcacaccccctcggcccctctcatgcccgcagggtcagaggccgtgggcgagcccggcggctgcggacacgtcgaggaggagtacgagattcgcaacgacgagggctttgtctacaaggttcaccgagggctctaccccgacgccgcgccctccaccacccagacggcggcgggccccgaccccaaggctgccggcctccgccgccgccgccgcgcgctcctccgcctccgcgccaagcgcctccgcgacctctcccgctgggaggccctcgcctccgaacttctcgccccgcttcccgctcccccgccaccggctccgacatcccaatcccctcccgtcgctgcctcctcctcctccttggtctctgtcctcgacgagctcctcgcacaggctgacattcaagttgagctgatgaagaaggtgtgccagtggtgcgacgaggccaactctatctgcgacgcaggagaggctgccattgtcgattcgatagttgcgctgcctatgtggggcgccaactcgtcggagctagtggcagcgctatgcagcccagataaaaatacccctggtaagttggatgaaccgaatgggtgccaagaagcttctggagtgtcttcagcggcagctgaaatgataaaaaatagtgtcgagaaacagacaatgggtcatgaccttcctcccattctcactgagagcaggacgaggaaaagagtagctaatctttcaggcacaaagagaaggcatcaggcactccacgatcaataacgagaagaaaggcagcgtccagtccagcaagagttccagacatatttggtagcccggggccactaaccaggagaagggcagcagctcaaaatgtaccaacagggaactcgtaataggtggctcttatctacaagccaaaacgccttataatttggttggaacagagagagccatgtgtttgtacacaagtgttgtttgttgttgatgtagctagaaaatccaaaataactactcactccgttcttttttatttgtcgcatattagtaaaaaataaactagccgacgacaaatattcaagaacggaggtagtagttcataattgggggagtgacttttttttggctagtgatgtcaccactttagccatcaattgaacatcttgtgtatttgtgaagttccagccgcagatggtatttagtgtgcaatcaagtattgctgtattggtagtgagttgttcacgtaagtgcatggctgctctttggaaacattgatcatgtaatggctgttggttctctggtttttgtaggacatgctgcttttgaagtgcaagcttctcgtgctgttctatttctcattccaatcgggaggcgtttcagagcacaaggcctaccgttggaagcttgggcattccaggccgaggtccagtacagtgctgatctgtagactacgaaaagttagacatgatctcgtagcatattttttaatctcacctccttaactggatgtgtgcgtgtgtcatgtataaggagacaatcaggctttttaacactgaggatgtgttttctattttaacttggactgtttgtaagcagacctaaccctgaaactagtctactctagatttcgtag

SEQ ID NO: 43912 - DNA, 1279 bp, Zea Mays
ctcaacaccttcgtctccccgtgcacaacgagagatccccacggccgccgaggaacccctcctcatcctccttgcacaccccctcggcccctctcatgcccgcagggtcagaggccgtgggcgagcccggcggctgcggacacgtcgaggaggagtacgagattcgcaacgacgagggctttgtctacaaggttcaccgagggctctaccccgacgccgcgccctccaccacccagacggcggcgggccccgaccccaaggctgccggcctccgccgccgccgccgcgcgctcctccgcctccgcgccaagcgcctccgcgacctctcccgctgggaggccctcgcctccgaacttctcgccccgcttcccgctcccccgccaccggctccgacatcccaatcccctcccgtcgctgcctcctcctcctccttggtctctgtcctcgacgagctcctcgcacaggctgacattcaagttgagctgatgaagaaggtgtgccagtggtgcgacgaggccaactctatctgcgacgcaggagaggctgccattgtcgattcgatagttgcgctgcctatgtggggcgccaactcgtcggagctagtggcagcgctatgcagcccagataaaaatacccctggtaagttggatgaaccgaatgggtgccaagaagcttctggagtgtcttcagcggcagctgaaatgataaaaaatagtgtcgagaaacagacaatgggtcatgaccttcctcccattctcactgagagcaggacgaggaaaagagtagctaatctttcaggcacaaagaggaagaaggcatcaggcactccacgatcaataacgagaagaaaggcagcgtccagtccagcaagagttccagacatatttggtagcccggggccactaaccaggagaagggcagcagctcaaaatgtaccaacagggaactcgtaataggacatgctgcttttgaagtgcaagcttctcgtgctgttctatttctcattccaatcgggaggcgtttcagagcacaaggcctaccgttggaagcttgggcattccaggccgaggtccagtacagtgctgatctgtagactacgaaaagttagacatgatctcgtagcatattttttaatctcacctccttaactggatgtgtgcgtgtgtcatgtataaggagacaatcaggctttttaacactgaggatgtgttttctattttaacttggactgtttgtaagcagacctaaccctgaaactagtctactctagatttcgtag

SEQ ID NO: 43913 - DNA, 3252 bp, Zea Mays
aagtttttgtattcgcccaagcccggcccatccaccatccgctgctactcttcatcacaaaccctaataaatccatctccgcctctggttcgtcctccatctcctcccaaatcgcggcaccaagcacccgaccgctttccgcatggcttcccacatcgacttccgctgcttggatgagggcctcggcggcgagcgcggcaagcgcaagcgtcgcgaggatgccgaggcggcggccgcggattccatggacctcgatgccgacgcgcaccggccgtctaagctccgcgccatgccttccctctccgacccctcgaagccggcctccttcggccagcccacctacgacggcgtcatcgcagggcggttgtcgggacggcggtggaaggaggcccgcacccggcgagcgtcggccgtggcggtgtcgcggaagccgaccccgctggagcagcgcgtccgggagaagtcgctgaagcgcgcgtaccaggcccgcaaggcggagctcaaggaagagatccggcagaacaaggtggccaagcggaaggcccgcgaggagcgtgagaagcggaagcaggagaacgtgctccgcacgggcaccaaactgcagagggtcaccaacccaaagacgatccagaagatcgccaagtccaagaagcgcaagcagctcaaggtcgtccccgacgagttcctcggcggcaagaagtcggtggccaaccggcgcatgcaggtgcctggactcgaaaattgaatctgacaggcctcgatctctctgtatctgttctgtggcggcgttgagttggcaaggttagttcgacgacgattttgtacttgcttctggttatgtagtttgaagcgtgattaaattaagcgattaaaatggcgtgcaatagaagttatcaagttctgatatgagattttactgccgcatagtcaattttgttgggattatgggctttcgatatgaggttgccaatacatctatccatcagtgacctttgtattaactgcctgtggtttgttgcacttgatcgtcaatcgacgtcactcgattgtaggttcataggttgcagactattgtccagaggctggtggatttcagagtcggaatccaatatggttaaaggctctgatctgcaaagtcaaattctgcaaacaccatagtatagtttccattctcaagtccaacaggcaagacactgtagttgcaaaacattggcattttgtatcaaaacatgagctctgagcacaaatagatgcgttcgaggaactattgtaacatgaactgacctatcattatatttgtttatcacaaaattgcttgccaccaaattcctattaaaagaaacttgagaaacatcagtgtaatatggaatagtttctttactcgcaaaaaggtacatcagggacaaatgaactcaggtagatggtttctacttcttgaatgattttgaaacataggtagacctttaaaaggagatataagctatatgcagcataggtggcttttttagatgcatgaaattttgaaatgatagcttaataaaagtgtatactacaggcctaatatccatgctggactgaattatcattaaaggatagcaataaaaatggtgttatagaagtcaatcacttacaattgcaactcctgaaaggctattattattcccgagaaacctggattgaacaacttcgctagcattagcaaatgactagtgcccaaaacatagaaacaagtattgggaagcactaagaaccacacaagaacttgagtaaatttagattcaccaggtcttgtggtacatcacctatgatattataaaaactcaaatccctgtgatggaaaataggatgagcgtaggatggaaaggaatcatcaaacgatgcataaaccatagcagttcatcaaaccatattacacagaaatacacttgactagagtttgaagaaataaattccttagagtgtgtttaattttgcaagatttgaaaagtttaccgatcccagactatcaaatgtcttacaattcctcaaaaaatctcaagagttttaggacttatcaacttgattgcactacatagtttgagtcaattagtggatgaaacgttatgcatatgtcatgttactaatgaatgccagtgaagaacttccatttactatgtcgccaatttgcctgcatgatggaacaagtaattcattctcccattttacaacacttagctacttcagttggacgagattagacagagaagttggaattggaccttgaaaagaatttccttggaaccgcctgcaaaattataattcaccttactagtttttatcgtttataaaattagattgagctactacctagtatagaaacaaggaagatgacatttctttacattgaaaaagggtgaaaatatttatgtagatctgagtataacatgttcaaaaaagatatacattaggaagggtgaagcaattcataaattgctaaggccagtaattcgttaaattactatttgcaacgtgtccaaattccatttactatttctagatagggtttagaagtgggggatgaaggtttttatagcccccacaaatcaaatctggctgattctggaagactgcgcaaattctggttgaacaggccctaatactggttgaagtggtattcaatagagaactctctgtaaattcctggtagaacctgaatttaaaattccggttgaacctaaaattttcacagagaagaacctaatgaaacccggttgaaccaaccctgatcccggttgaaccggtatgaacagggaaacaaattttgaaaagatagagggagaaaccaaacggtgactttgcaacttttcaaaaacagaactttgaagcggatagaactagttggtacataccatccttgcctcgcgaaggaactaagcatacggggatcttcgccagaaaccacctttagatctttatctttcattacttggtttcctgttagttcatttatttcattcatgtgcatccctttttgatttaaaacaaacatacactaggagcaaacttattagtacatttttatttgttttgttcattaatcaccaaatccctcaagaggttgattgcacttgcatcggccatttgagatgtgtcgaagctgagaaacatatcaagagagttgaggctcatctttagtagctatagacacataagtgcttaaataattacttgttgactagtgtatgctttgtgaagtgattaagttggttagac

SEQ ID NO: 43914 - DNA, 1647 bp, Zea Mays
gtcacatgtaagagatgcagcagcatatgtatgttgggcatttggtcgagcttataccaattatgatatgaaggctgttttggaacaacttgctccccaccttctaaccgttgcttgttatgatcgagaggttaattgtagaagagctgcttctgctgcctttcaagagaatgttggaagacagggaactttcccacatggcattgatattgtgaatacgacagattactttgcactggcttcccgatcaaactcttatctgaatgttgctgtttctgttgctcagtgcaaggagtatctttatccctttgcagatgagctgctttgcaataaaataactcactgggagaaaagcttaagagagctggcagctcaggcccttgctttgcttgtacaatatgatatgaattactttggtggacatgcccttgaaaagttagttccgtgcactctatcaacggacttgtgtactcgacatggagccactttagctgctggtgaggttgctttaaagttgtaccagcttggttttacttttactacagacatgcagaaaactttgtcaggtattgttcccgcaatcgaaaaggcgcgtctttatcggggcaaaggaggagagatcatgcgctccgctgtttctcgattcatttcatgcatttctatagctgggatatccttgaatgacaggacaaagaaatgtttgttggaaacccttaatgagaatttgcgtcatcccaattctcaaatacagtgtgctgctgttgaggcattaaagcattttattccaacatacctggtatcttctggtgaaaagattgctagtgatattatctcaaaatatgtggcacttctagatgacccaaatgtggctgcaagacgaggagctgcactggcccttggaatattaccattcaaattcttgatgttgaaatggatgcctgtcatgagtaaactctgtagctcatgcaccattgaggataagcctgatgaccctgatgctgaagcacgtgtgaactctgttagggggctaatttcggtttgcgaaacactaacagcatcttttgatcagctctcaaatggagattctctatatgcatacataaaagattatgtcatgcgagctttatttagagcactcgatgattatgctgtggacaacagaggagatgtgggttcttgggtacgtgaagcagcaatggatgcgctagtacgatgcatgttcatcctctgcaagagagatattgttgctttgagagcagtgtcagccactggccatgactctgaactgggtgatatggaagtaaatgcaagtagtactgcataccggctatttgattctggtattgcacaggatctggtagcaggcattgcaaaacaagcagttgagaaaatagataagataagagaaatagctatcaaaaccctgcagagaattctgtaccaccaggaacacctcatcccatttatacctcacagggagttgcttgaagaaattattcccaacagcagagatttggagtgggcggtggtttgcaggagtctttgaagaaagcttcaatgtcagctttggtagggtatctccaagattcagacgtttttctattgcgaagggaaaagtagagagtatgtactgagttgtgacgtcta

SEQ ID NO: 43915 - DNA, 2001 bp, Zea Mays
ccttgttgtacacgactacactatctctatcctatatcggtgtatatatttggacctaatgctctcatattgaatatagtgcaattcataacagatttcaatcccaaatatcttatgtggtcataactatatttgataacacattctaatacaattaaatatttatgtttagtgctggttcagtaagatgagtttactgtctcaattgatttcatgacgcaggctttacactatgatgtaagaagaggtccacatagcattgggtcacatgtaagagatgcagcagcatatgtatgttgggcatttggtcgagcttataccaattatgatatgaaggctgttttggaacaacttgctccccaccttctaaccgttgcttgttatgatcgagaggttaattgtagaagagctgcttctgctgcctttcaagagaatgttggaagacagggaactttcccacatggcattgatattgtgaatacgacagattactttgcactggcttcccgatcaaactcttatctgaatgttgctgtttctgttgctcagtgcaaggagtatctttatccctttgcagatgagctgctttgcaataaaataactcactgggagaaaagcttaagagagctggcagctcaggcccttgctttgcttgtacaatatgatatgaattactttggtggacatgcccttgaaaagttagttccgtgcactctatcaacggacttgtgtactcgacatggagccactttagctgctggtgaggttgctttaaagttgtaccagcttggttttacttttactacagacatgcagaaaactttgtcaggtattgttcccgcaatcgaaaaggcgcgtctttatcggggcaaaggaggagagatcatgcgctccgctgtttctcgattcatttcatgcatttctatagctgggatatccttgaatgacaggacaaagaaatgtttgttggaaacccttaatgagaatttgcgtcatcccaattctcaaatacagtgtgctgctgttgaggcattaaagcattttattccaacatacctggtatcttctggtgaaaagattgctagtgatattatctcaaaatatgtggcacttctagatgacccaaatgtggctgcaagacgaggagctgcactggcccttggaatattaccattcaaattcttgatgttgaaatggatgcctgtcatgagtaaactctgtagctcatgcaccattgaggataagcctgatgaccctgatgctgaagcacgtgtgaactctgttagggggctaatttcggtttgcgaaacactaacagcatcttttgatcagctctcaaatggagattctctatatgcatacataaaagattatgtcatgcgagctttatttagagcactcgatgattatgctgtggacaacagaggagatgtgggttcttgggtacgtgaagcagcaatggatgcgctagtacgatgcatgttcatcctctgcaagagagatattgttgctttgagagcagtgtcagccactggccatgactctgaactgggtgatatggaagtaaatgcaagtagtactgcataccggctatttgattctggtattgcacaggatctggtagcaggcattgcaaaacaagcagttgagaaaatagataagataagagaaatagctatcaaaaccctgcagagaattctgtaccaccaggaacacctcatcccatttatacctcacagggagttgcttgaagaaattattcccaacagcagagatttggagtgggcggttcctactgtgtcatatccacgattggtgaaacttcttcaggttagctattatagcaagtctgtgctctcagggctcgtgatttctacaggtggtttgcaggagtctttgaagaaagcttcaatgtcagctttggtagggtatctccaagattcagacgtttttctattgcgaagggaaaagtagagagtatgtactgagttgtgacgtcta

SEQ ID NO: 43916 - DNA, 1871 bp, Zea Mays
ccaccctctcgcctcgccataaagggcgggggccgctagggttagcgcatcggaatcaatcgtgtttctcgcctccacgccgagaccaatccagccaccgccaactctttgcctcgcctctccgattcgagggaacgatggagtgcgtcaccgatatgcccctcgcgacgctggacagccgaccgcgcaagcggcagcggctcgggtgggacgtcgttcccgccgagatgtatcaggttacgcggccgcggcttggttgggacgtcggccccgccgagatgaatcagtgttgggcctatcttcaggttgtgtttcttctcaagtcaaccaagagcagcctcatgatggttcccctcctctgagagaagatgacaagaatgggcattatgtttttgctgttggagataatctcacatctcgctataagatcaatgcaaaaatgggagaaggtacctttggtcaggtgttggagtgttgggataaggaaacaaaagaaatggtggccataaagatcatcaggggcattaagaagtacagggatgctgcaatgatcgaaattggcatgcttgagaagcttggtaaatatggtgaaagcagatccaggtgagtttgctggttcagttagcacctatatgcgtgcttacgttcataagattgcttgtatataagctggtctattttgcagttgtgttcaaattcggaactggtttgactatcgtaaccatatctgtattgtaagtacattgttagattatgacaattatgcactgacccaaaaatataaccatatggtgcttaaacgttggtgaatttggattaatggtgagcaggtctttgagaggcttggaccaagcttatatgattttctgaggaaaaacaattaccgctcattcccaattgccctagttcgggagtttgccaaacaactgttggaatgtatagcatttatgcatgaattgcgcctcatacacactgatttaaagcctgagaacattctccttgtttctccggagtacattaaagtgcctgattacaaagtctcatcccaatccccaaaggaggggtcctattacaagcagttgcccaagtctagtgctatcaaggtgattgatttcggtagcactacttatgatcaacatgatcagagttatgtggtatcgacgaggcactatcgggctccagaagttatattgggacatggatggagttacccatgtgatatctggagtgttggttgtattcttgttgagctttgcacgggtgaggcgttattccagactcacgaaaacttggaacatctggctatgatggagagagttcttggacctttgccgtaccatatgcttaagagggcagatcggcactctgacaaatacatcagaaaaggacgcctgaattggcctgagggttgcacctcgcgggagagcatgaaagctgtgatgaaattgtccaggcttcagaatctggtgatgcaaaatgtggaccaggctgcgggagatttcattggtcttttgcaagggctcctgaagtatgacccagcaagccgtttaacagcacgagaagcactgaggcatcctttcttcaccgaagggtttgggcgaagaagatgatacgtccttgaagcagaccttgtttgtcctctgtctctgaccaaactgtatataaagctgaaatggagctgtttcaatcttgtttgaaacgtcgtgtaactatagttgtatcacaagggaagtcagacggatactttttactaatcctgacttgtttgagttttgcaagccaattcaatgaaagtttgggttgaacagaatgtgttgcttgaaatattaaaactcgcatctatctggttttaaaataaaccagggtccatt

SEQ ID NO: 43917 - DNA, 2187 bp, Zea Mays
atcgccaccaccctctcgcctcgccataaagggcgggggccgctagggttagcgcatcggaatcaatcgtgtttctcgcctccacgccgagaccaatccagccaccgccaactctttgcctcgcctctccgattcgagggaacgatggagtgcgtcaccgatatgcccctcgcgacgctggacagccgaccgcgcaagcggcagcggctcgggtgggacgtcgttcccgccgagatgtatcaggttacgcggccgcggcttggttgggacgtcggccccgccgagatgaatcaggttgtgtttcttctcaagtcaaccaagagcagcctcatgatggttcccctcctctgagagaagatgacaagaatgggcattatgtttttgctgttggagataatctcacatctcgctataagatcaatgcaaaaatgggagaaggtcagtttggatgaccatgtattctgaaatagttgatttaactcgcattgggcatgccaatacattcagcaaattttgtctataactgaatgtgtctggactctggaatacaccaggtacctttggtcaggtgttggagtgttgggataaggaaacaaaagaaatggtggccataaagatcatcaggggcattaagaagtacagggatgctgcaatgatcgaaattggcatgcttgagaagcttggtaaatatggtgaaagcagatccaggtgagtttgctggttcagttagcacctatatgcgtgcttacgttcataagattgcttgtatataagctggtctattttgcagttgtgttcaaattcggaactggtttgactatcgtaaccatatctgtattgtctttgagaggcttggaccaagcttatatgattttctgaggaaaaacaattaccgctcattcccaattgccctagttcgggagtttgccaaacaactgttggaatgtatagcatgtgtgtgcacagttctttctattacccctcctgcactataatgcatatacattagttttgtgcattatctgtgctgcattgcagcctgtcattaatccattactcatgcttgtactccagggagtatctaacatcatgtgatgtttttgtatttaccctctctctgtaatgtgttgcagttatgcatgaattgcgcctcatacacactgatttaaagcctgagaacattctccttgtttctccggagtacattaaagtgcctgattacaaagtatatcttgttcttttatatttaattcacctacccaagatttaccttgtgctatgcttgttcttttattgtgtattggtagcgggggtagaaaaatatggtactgatcctcttttttcatttgccaggtctcatcccaatccccaaaggaggggtcctattacaagcagttgcccaagtctagtgctatcaaggtgattgatttcggtagcactacttatgatcaacatgatcagagttatgtggtatcgacgaggcactatcgggctccagaagttatattgggacatggatggagttacccatgtgatatctggagtgttggttgtattcttgttgagctttgcacgggtgaggcgttattccagactcacgaaaacttggaacatctggctatgatggagagagttcttggacctttgccgtaccatatgcttaagagggcagatcggcactctgacaaatacatcagaaaaggacgcctgaattggcctgagggttgcacctcgcgggagagcatgaaagctgtgatgaaattgtccaggcttcagaatctggtgatgcaaaatgtggaccaggctgcgggagatttcattggtcttttgcaagggctcctgaagtatgacccagcaagccgtttaacagcacgagaagcactgaggcatcctttcttcaccgaagggtttgggcgaagaagatgatacgtccttgaagcagaccttgtttgtcctctgtctctgaccaaactgtatataaagctgaaatggagctgtttcaatcttgtttgaaacgtcgtgtaactatagttgtatcacaagggaagtcagacggatactttttactaatcctgacttgtttgagttttgcaagccaattcaatgaaagtttgggttgaacagaatgtgttgcttgaaatattaaaactcgcatctatctggttttaaaataaaccagggtccatt

SEQ ID NO: 43918 - DNA, 2000 bp, Zea Mays
aaccactaccaccgaaagcgtcagcgacacagctagtttttgggtatacacgagcaccgtatgctcgtgtccgatcctatcgccaccaccctctcgcctcgccataaagggcgggggccgctagggttagcgcatcggaatcaatcgtgtttctcgcctccacgccgagaccaatccagccaccgccaactctttgcctcgcctctccgattcgagggaacgatggagtgcgtcaccgatatgcccctcgcgacgctggacagccgaccgcgcaagcggcagcggctcgggtgggacgtcgttcccgccgagatgtatcaggttacgcggccgcggcttggttgggacgtcggccccgccgagatgaatcagataagatcaatgcaaaaatgggagaaggtacctttggtcaggtgttggagtgttgggataaggaaacaaaagaaatggtggccataaagatcatcaggggcattaagaagtacagggatgctgcaatgatcgaaattggcatgcttgagaagcttggtaaatatggtgaaagcagatccaggtgagtttgctggttcagttagcacctatatgcgtgcttacgttcataagattgcttgtatataagctggtctattttgcagttgtgttcaaattcggaactggtttgactatcgtaaccatatctgtattgtaagtacattgttagattatgacaattatgcactgacccaaaaatataaccatatggtgcttaaacgttggtgaatttggattaatggtgagcaggtctttgagaggcttggaccaagcttatatgattttctgaggaaaaacaattaccgctcattcccaattgccctagttcgggagtttgccaaacaactgttggaatgtatagcatgtgtgtgcacagttctttctattacccctcctgcactataatgcatatacattagttttgtgcattatctgtgctgcattgcagcctgtcattaatccattactcatgcttgtactccagggagtatctaacatcatgtgatgtttttgtatttaccctctctctgtaatgtgttgcagttatgcatgaattgcgcctcatacacactgatttaaagcctgagaacattctccttgtttctccggagtacattaaagtgcctgattacaaagtctcatcccaatccccaaaggaggggtcctattacaagcagttgcccaagtctagtgctatcaaggtgattgatttcggtagcactacttatgatcaacatgatcagagttatgtggtatcgacgaggcactatcgggctccagaagttatattgggacatggatggagttacccatgtgatatctggagtgttggttgtattcttgttgagctttgcacgggtgaggcgttattccagactcacgaaaacttggaacatctggctatgatggagagagttcttggacctttgccgtaccatatgcttaagagggcagatcggcactctgacaaatacatcagaaaaggacgcctgaattggcctgagggttgcacctcgcgggagagcatgaaagctgtgatgaaattgtccaggcttcagaatctggtgatgcaaaatgtggaccaggctgcgggagatttcattggtcttttgcaagggctcctgaagtatgacccagcaagccgtttaacagcacgagaagcactgaggcatcctttcttcaccgaagggtttgggcgaagaagatgatacgtccttgaagcagaccttgtttgtcctctgtctctgaccaaactgtatataaagctgaaatggagctgtttcaatcttgtttgaaacgtcgtgtaactatagttgtatcacaagggaagtcagacggatactttttactaatcctgacttgtttgagttttgcaagccaattcaatgaaagtttgggttgaacagaatgtgttgcttgaaatattaaaactcgcatctatctggttttaaaataaaccagggtccatt

SEQ ID NO: 43919 - DNA, 1571 bp, Zea Mays
cccaaccactaccaccgaaagcgtcagcgacacagctagtttttgggtatacacgagcaccgtatgctcgtgtccgatcctatcgccaccaccctctcgcctcgccataaagggcgggggccgctagggttagcgcatcggaatcaatcgtgtttctcgcctccacgccgagaccaatccagccaccgccaactctttgcctcgcctctccgattcgagggaacgatggagtgcgtcaccgatatgcccctcgcgacgctggacagccgaccgcgcaagcggcagcggctcgggtgggacgtcgttcccgccgagatgtatcaggttacgcggccgcggcttggttgggacgtcggccccgccgagatgaatcagtttgcactttgtggacaagaagttgtgaatgccttcagtgctgcagtgttgggcctatcttcaggttgtgtttcttctcaagtcaaccaagagcagcctcatgatggttcccctcctctgagagaagatgacaagaatgggcattatgtttttgctgttggagataatctcacatctcgctataagatcaatgcaaaaatgggagaaggtacctttggtcaggtgttggagtgttgggataaggaaacaaaagaaatggtggccataaagatcatcaggggcattaagaagtacagggatgctgcaatgatcgaaattggcatgcttgagaagcttggtaaatatggtgaaagcagatccaggtctcatcccaatccccaaaggaggggtcctattacaagcagttgcccaagtctagtgctatcaaggtgattgatttcggtagcactacttatgatcaacatgatcagagttatgtggtatcgacgaggcactatcgggctccagaagttatattgggacatggatggagttacccatgtgatatctggagtgttggttgtattcttgttgagctttgcacgggtgaggcgttattccagactcacgaaaacttggaacatctggctatgatggagagagttcttggacctttgccgtaccatatgcttaagagggcagatcggcactctgacaaatacatcagaaaaggacgcctgaattggcctgagggttgcacctcgcgggagagcatgaaagctgtgatgaaattgtccaggcttcagaatctggtgatgcaaaatgtggaccaggctgcgggagatttcattggtcttttgcaagggctcctgaagtatgacccagcaagccgtttaacagcacgagaagcactgaggcatcctttcttcaccgaagggtttgggcgaagaagatgatacgtccttgaagcagaccttgtttgtcctctgtctctgaccaaactgtatataaagctgaaatggagctgtttcaatcttgtttgaaacgtcgtgtaactatagttgtatcacaagggaagtcagacggatactttttactaatcctgacttgtttgagttttgcaagccaattcaatgaaagtttgggttgaacagaatgtgttgcttgaaatattaaaactcgcatctatctggttttaaaataaaccagggtccatt

SEQ ID NO: 43920 - DNA, 1950 bp, Zea Mays
aatggatacacaacgagcggtccactccccgcgagagacgcaacctctgtcaccgatgcgcttgccaacgctctcataaatatccactgacatgtaggccaatgcttttcaatggggcctggacccaaccactaccaccgaaagcgtcagcgacacagctagtttttgggtatacacgagcaccgtatgctcgtgtccgatcctatcgccaccaccctctcgcctcgccataaagggcgggggccgctagggttagcgcatcggaatcaatcgtgtttctcgcctccacgccgagaccaatccagccaccgccaactctttgcctcgcctctccgattcgagggaacgatggagtgcgtcaccgatatgcccctcgcgacgctggacagccgaccgcgcaagcggcagcggctcgggtgggacgtcgttcccgccgagatgtatcaggttacgcggccgcggcttggttgggacgtcggccccgccgagatgaatcagtttgcactttgtggacaagaagttgtgaatgccttcagtgctgcagtgttgggcctatcttcaggttgtgtttcttctcaagtcaaccaagagcagcctcatgatggttcccctcctctgagagaagatgacaagaatgggcattatgtttttgctgttggagataatctcacatctcgctataagatcaatgcaaaaatgggagaaggtacctttggtcaggtgttggagtgttgggataaggaaacaaaagaaatggtggccataaagatcatcaggggcattaagaagtacagggatgctgcaatgatcgaaattggcatgcttgagaagcttggtaaatatggtgaaagcagatccagttgtgttcaaattcggaactggtttgactatcgtaaccatatctgtattgtctttgagaggcttggaccaagcttatatgattttctgaggaaaaacaattaccgctcattcccaattgccctagttcgggagtttgccaaacaactgttggaatgtatagcatttatgcatgaattgcgcctcatacacactgatttaaagcctgagaacattctccttgtttctccggagtacattaaagtgcctgattacaaagtctcatcccaatccccaaaggaggggtcctattacaagcagttgcccaagtctagtgctatcaaggtgattgatttcggtagcactacttatgatcaacatgatcagagttatgtggtatcgacgaggcactatcgggctccagaagttatattgggacatggatggagttacccatgtgatatctggagtgttggttgtattcttgttgagctttgcacgggtgaggcgttattccagactcacgaaaacttggaacatctggctatgatggagagagttcttggacctttgccgtaccatatgcttaagagggcagatcggcactctgacaaatacatcagaaaaggacgcctgaattggcctgagggttgcacctcgcgggagagcatgaaagctgtgatgaaattgtccaggcttcagaatctggtgatgcaaaatgtggaccaggctgcgggagatttcattggtcttttgcaagggctcctgaagtatgacccagcaagccgtttaacagcacgagaagcactgaggcatcctttcttcaccgaagggtttgggcgaagaagatgatacgtccttgaagcagaccttgtttgtcctctgtctctgaccaaactgtatataaagctgaaatggagctgtttcaatcttgtttgaaacgtcgtgtaactatagttgtatcacaagggaagtcagacggatactttttactaatcctgacttgtttgagttttgcaagccaattcaatgaaagtttgggttgaacagaatgtgttgcttgaaatattaaaactcgcatctatctggttttaaaataaaccagggtccatt

SEQ ID NO: 43921 - DNA, 2067 bp, Zea Mays
cgtcatcttcgcacacagcttcagctagctagctcatcatctttgcacgcgtacgtacgtcgatctactaccaagtcacggccagcacactgatcacctgctgacagagtgatcgatcgagcgatgacgacgcgcgcgctcgtggccatggcgctgcgcttcctccgcgagtacgtgcgggcgtcggacctggccgtggccgccgcggtgctcttcgcgtgcagcgcagccaggagccggctgtcgtcccgcccgggcgagccgatgctgtggccggtggtcggcatcatcccgacgctcttcgcgcacctcgcggccggcgacgtctacgactggggcgcggcggtgctgctgggccggtcgcggggcacgttcgcgtaccgcgggacgtggggcgggggctcctcgggcgtcgtcacctccgtgccggccaacgtggagcacgtcctcaaggccaacttcgacaactaccccaaagggccctactaccgggagcggttcgcggagctgctcggcggtggcatcttcaacgccgacggcgactcgtggcgcgcgcagcggaaggccgccagcgccgagatgcactccgcgcggttcgtccagttctcggcgggcaccgtcgagcgcctggtgcgccgcgagctgctgccgctgctggaggcgctcagcggacgaggggggccagagagcgcggcggcggcggtggacctgcaggacgtgctgcttcgctttgcgttcgacaacatctgcgccgccgccttcggggtggaggccgggtgcctggccgacgggctccgcgacgtgccgttcgcgcgcgcgttcgagcgggccacggagctctcgctcacccgcttctacacgccgcccttcgtctggaagtccaagcggctcctcggcgtcggcagcgagcgcgcgctcgtggaggccgcccgcgccgtgcggaagttcgccgagcggaccgtcgccgaccgccgcgccgagctgcgcaaggtgggggacctggccggccgcttcgacctcctctcgcggctcatgtcgtcgccccctcccgccggctactccgacgagttcctgcgtgacttctgcatcagcttcatcctcgcgggccgcgacaccagctccgtcgcgctcacctggttcttctggctcctcgcctcccacccgcacgtggaggcccgcgtcctcgacgacgtcgcccgcggcggcggcgacgtcagcgccatggactacctccacgcggccctgaccgagtccatgcgcctgtacccgccggtgcccgtcgacttcaaggaggccctggaggacgacgtgctcccggacggcacgctggtgcgcgcgcggcagcgggtgatctactacacgtacgccatgggacgggacaaggccacctggggccccgactgcctggagttccgcccggagcgctggctgagcaagagcggcgcgttcgcgggcggcgccgagagcccctacaagtacgtggtgttcaatgcggggccgaggctgtgcgtcggcaagcgcttcgcgtacacgcagatgaagatggcggcggcggcggtgctggcgcggttccgggtggaggtgctgccggggcaggagggagcagcggcacgagctcggccaccctctgcctgctgcagctgcagatgcaggggaagattgaagaagatcagttggaggcccctttttcacgggatgaagcgcaacatcaccattcacccgggaaagaaccaaactccgggcggaagacgtccaatgcgcaaatattaatatgaatatatgaatgggtgaatgagcccatgcatggatatatattgtggcatacttgtgctatgtacttcctgttcctctgtgtgtacgtgtatcgtggtaatgccgtccagatcccgatgaaaaatcactttgtcgtgtgttccaagaaacgagtgtacatttgctccgtctgtttgaaattacaaacgttatttaatacttactccgttttaatttaagatttgtttaactttttttatcaaaattgatcaactcgttttattcaaaaaaaattgctaaaaacaaaaaatgaaa

SEQ ID NO: 43922 - DNA, 1509 bp, Zea Mays
acggaacaaccaacttgccagaggacgacacgacccaggccacagaccctgccccgccggcaccgaacggctactgtaaatgtcgtgaccgtctcgtccccgtccagtccaccttttcctcctctccgactccaccgccgtcacgccatctcgccgggggcggaaccccgaccgcgagtatggggaacatcttcgtgaagaagcccaagatcactgacgtcgatagggccatcctcaccctcaagacgcagcgccgcaagctcgcccagtttcaacagcaggtctgcctccccctcccctcgcctccccttccgtggcacccttccctgccgtgagctacggatgcttgagaaggtaatcgaagcagaaaaggaagctgcacggcagttggttcaacagaagaagagagacagagctttgattgctctgaagaagaagaaagctcaggaagagctgttgaaacaagttgacacatggcaaatgaatgttgaacaacagctggcagatattgaactagcaagtaaacaaaaggctgtatttgaaagcctgaaggctggaaatgctgccctgaagtctatacagaatgagataaacattgatgatgtccaaaagctgatggatgacacagccgaggctaaggcttatcaagatgaaataaatgctgttctgggcgagcagctttcagctgaggatgaagaagctgtcatggccgagtttgaaaatttggaagctcagcttgccgttgagtctttgccagacgctcctgctaccgaagtaaggcctgaagagaaaacgaaagctccggctgacacagaagctgctcctgaggacatcgatgacgttattgagcttcctgatgtgcctacgaaagtgccagagaggcctgaagctccagaaaaaaacaaagttttggaggagccgctacctgcataagtggatggagctgagatgaatacggcacacttttagtttgcaggaaattgtaacatacccaccatttcattgtactatctcattctcagaatttcatcgtgtacagcaagaaaaatttgttgtctttgactatcagttgtcaccagtttggatttctcagtgcccgtttattatcctatcctacggggtaaacataatatttttccattgtgtttctttgtaaggcagaaatgctgaagtctgcaagcacataccttgttccgtatgaatatatacgtgtgttttttttgtgccaaagctgtaaaatgtacggcatttgtaggtgccatttgttgcttgaatttaattggtggagcgtgtaagatagaatactcaaatcagagcagtctgtctgtatcgagtacattgaattgcctatataaggtgcctttttttgtttttgcagttctttttctttctccctttgggtcactatatatgcatcctagtgtacaatttcgtttcattataaacaaaaaaaaggaactgttgttttgcaccagatacacaggtcataagcagcaaaaaaaaaaaaga

SEQ ID NO: 43923 - DNA, 2202 bp, Zea Mays
aggagatcaagggcggcagccatgaggtgcagagctcctacaagggatcccccttcaacaccatggccatgctccaggagtccctgcccttcaggtgagagcccatttctccatgaggaaagattcttgatcggccttagccgcttaggctaactgtagcggtcccctcccattccccctccactccattagatgctaccactacactctacactctgcaattgccttccatgtcttttgttcatgtgattagaatgcagatcctgacaggctagcgcgccaatgtgctacagacacttttgcacaatgttaggatgcatgtttgagtttttagagagatccatgttgaccagactgttcccttagtcgcttttggcttccataagaatctgatataaactccttgagctgacatacttattttggcttccacaagtttgagctgacataataaagttaaaattagcaagtctgttacattcaaaattggcgtccgcacctacttggcgtatccgtgctacataggtggtcgatcgccttccatcttataaatagtgtacggtcagggacagcaagtaggagcagagaggttttacggtacatcaaaaaggctgttgggtatttaggtgcgaagaaactaaactgcttggtgaccgcactcgttggtaatctgtcattagaaagcgtgcaggctcactcgccgccatggtgctccagtcgtgaaagcgtgcaggctctccatggaaggcgcccagatccactctctctccttcgtggtcctgtcgctaccgcgccgccccactcgccgccatggcgctccagccgcgaaagtgggcagcctactggatcttggcatctcaccgtcgctgctcacttccactccatctggtatgctcttctccctgcttcccctctcgctagacgactctgctgctcattggattggatctttgcttcctttctctcgtgttgtgatttgattgttaattaccagctaggggaggagcgtgttctccctgcctgaaccttcatgttctatgttcggtgcagctgtcagaggcgcttaggatgccccaacccgctgcttttgtctccgtgcagccgtccgatggtcaacccacaccgagcaacgtctcgaacaagaagatgaagcacggtggcgaggcactaatcttggatggcgtcggggaggtcgccgtcaccatcggtcgcaactcgcaacagcctctctccacaaccctccacccggtacgccctaaaatccctagctaaaatcagttaacacttaataccactaggtaatatctgaaaattgaaaggaaaactgtggaacttcataagtttaacaaggaacacaaaaataacatgaacaatttagttcaaatggatttgagacgcatacctctttcaaaaggcaaagagaatctggagatttttcagccagttgatcacacaaaacttggatctcgttctcagtgtccattgcctagacatgtattcagatgacttgaaatatttttggtaccccataagctccataagtaatcaaataaatgcattgccattactagattcttgctcttagtacttggtgttgttcgttacacctaatcatgcacttatgatgatctaacatagcaggtgaatcttcaagtgaatatgctgcctgtgacttatccgcagagccataattaccaacaagatgatttccataaaattgttgcacgaactttgagccaaggatcaacaccgatgagcatggatttccatccacttcaacaaactcttcttcttgttggtaccaatgttggcgacattggattgtgggatgttggtaccaaagacagactcgttgtaaggaacttcaaagtctgggacctcagtaaatgtataatgattctccaggcatcactggttaaggatccagctgtgtcagttaatcacataatatggagtcttgatggaaccttgtttggtgttgcttattcaaggcatattgtacaaatttattcctataatggtggcgacgatattagacaacactcggagattgatgcacatattggtggtgtaaatgacattgcatttggattctaccttgcttgggcaacacaacattttcactcttcgtgcttcttgaacttcttccttcatcgacatcctaaagagttctgctactatcactggttcactggatattaa

SEQ ID NO: 43924 - DNA, 1526 bp, Zea Mays
atggcggaggcggctgccgactcctccaacgcggccgtcgacggcggtggcggtagcgtccaaaacgactatcccaccattgacccgacctcgttcgacgtggtgctctgcggcacgggcctcccggagtctgtcctcgccgccgcctgcaccaccgctgagaagacgccctcctccctcgcctccttcttatcccctgaggccaccccggccacctcgactgtggcagcaactgcctccgattcgcatatcgtcgtcgatctccaccgacagatcgtgtactctgaggtcgagacctcgggggcggcgccagagccggcgaggcggttccccgttgatctggtggggccccgggtgctgtactgcgccgatgacctggtggggccccgggtgctgtactacgccgatgaggcagtggacctcctcttgcggtcggggggcagccaccatgtggagttcaagagcgtggaggggggcagcctcctctactgggaaggctgcctctacccggtgccagactcgaggcaggccatcaccacactgaagctcaaggagaagaacatcctcttcaggttcttcaagcttgtgcaggcgcacattgctgccgccttagcttctggtgatgagactggacagggggatgcatctgctaggatacttgaagaggacctagatcttccctttgttgagttcctcaggaaacagggagcttcctcccaagatgagagcgtaagagcaactccaagagattagctaaaaagagtagccaaatttactgatttagctactctctaaaatagattttaatgaaaaaatataggctaatacaacagactcggtaaacctatggaatgaacagagagtgaagcaggctatctaaaattggagagcgaagatagagaaatagagagccactaaatttaaagagtcgtttacagagtctattggatacaattttcttttaatattagctaaatttatctttacaaaaccatatacctagtctcttggagttgctctaagggtgttatgaattggtcaagtatatgctatttttagcagcatgactaagattggctctgtgtggtgtttgcagggttgtgctgtatgcgactgccatggcggattacaatcaagatggtgctgacccttgtgagaaattgattacaacgagggagggaatcgagaccattgatttgtactcctcgtccaatgggaggtgaattagcttgtctgaacttttccttgtccgctttggaaaaccatatatatatcatattatataatgctttttttattgatccacctttcatttatctagagaagatatatgtaatcgaacatgtaaaatcttaaaatgacatagctgtggtggtataattttacatgttatttttcaccacatcaggttcgctaatgcagaaggcgctttcatttatcctatgtatgggcatggtgagctgcctcaagctttctgtcgttgtgctgcggttaaggatgccatctctatctctactaactattaa

SEQ ID NO: 43925 - DNA, 1281 bp, Zea Mays
aaagaaggttcaaacatggatggatctttgattttggctagaaagattagaagaatatgaatagttcactacaactaatgctatggaagcttctaactttgatggaccttgaatgtgatgtggttgctattgttgagaggttggctactgtgaaacacaaattattagttttgtctggaaagggaggtgttggaaagagcacattctcagcccaactctcctttgccttagctgaaatggaccatcaggttggccttcttgacatagatatatgtggccctagcatcccaaaaatgttaggcctcgagggacaagatattcatcagagcaaccttggttggtcacctgtgtatgtcgagtccaaccttggcgtgatgtcgattggtttcatgctgcctaatccagatgacgctgtcatatggaggggtccccgcaagaatggactgatcaagcagttcttaaaggatgttgactggggggagattgactatcttgtagtggatgctcctccaggaacatctgatgagcacatctcgattgtgcaataccttcaagccacaggaattgatggcgctataatcgtcacaactccgcagcaggtctctcttattgacgtgaggaaggagataaacttctgcaagaaggtcggcgttcctgtcctaggtgttgtggagaacatgagtggcctgaggcagccactttcagatctcagtttcgtcaagcctggtgaggcgggcgagacagacgcgacagagtgggccctgaactacatcaaggagaaagcccctgagcttctgtcagtcatggcctgcagcgaggtatttgatagcagcaagggaggcgccgagaagatgtgccgtgaaatgggggttcctttccttggcaaggtgcccatggatccgcagctgtgcaaggcggctgaggaagggaggtcatgcttcagtgatcagaaatgcggtgccagtgcgccggctcttcagagcattgtaaagaagctgatcaagactgggtgagaaaataatgttggcctgctgggaatctggtagtgagaattgagatgaacaggtgtcagagttgtcatgaccaatatatatgttattgtgttttgaacactgaatctgtgtattagactattagtgccagtactagtattggatctgtaagtttttttttgttcgtgaatcaccagtgggtggactgggtgtacaaactgcggccatatttctgctccacgaagtgaaatatgtttcgaggcactgcctgtatcacgaatcatgctta

SEQ ID NO: 43926 - DNA, 1656 bp, Zea Mays
cgcggcgctggctcgcgaaggacggcaaggatcgcgtcgccgcacagcacggagcggggttgcggggtggggactccatggagcgtccacaccatgcagatcggtcttccagggagatattgggagcggcagatcgggggagggggagtaaatcgcgcatacgtacagagactccatggaaggcgtccacgcgatgcagagattgggagcgacaaatcgggcatcgaacacaaagtagctggcggctcggcgcacctacagcgccgtataccgagtccgagaccacgactccacgagacgacacaaaccccagtttaggaacagttggaaaagagggagaaatggagaacggcggcggcaaaggcgacgttcccaacgatgcgaacgaacattgccctggaacgcagtcggaggaggcggggaaggcggatgcctgcgctgggtgccccaaccagcagatttgcgccaccgcccccaagggccccgatcccgatgtggttgctattgttgagaggttggctactgtgaaacacaaattattagttttgtctggaaagggaggtgttggaaagagcacattctcagcccaactctcctttgccttagctgaaatggaccatcaggttggccttcttgacatagatatatgtggccctagcatcccaaaaatgttaggcctcgagggacaagatattcatcagagcaaccttggttggtcacctgtgtatgtcgagtccaaccttggcgtgatgtcgattggtttcatgctgcctaatccagatgacgctgtcatatggaggggtccccgcaagaatggactgatcaagcagttcttaaaggatgttgactggggggagattgactatcttgtagtggatgctcctccaggaacatctgatgagcacatctcgattgtgcaataccttcaagccacaggaattgatggcgctataatcgtcacaactccgcagcaggtctctcttattgacgtgaggaaggagataaacttctgcaagaaggtcggcgttcctgtcctaggtgttgtggagaacatgagtggcctgaggcagccactttcagatctcagtttcgtcaagcctggtgaggcgggcgagacagacgcgacagagtgggccctgaactacatcaaggagaaagcccctgagcttctgtcagtcatggcctgcagcgaggtatttgatagcagcaagggaggcgccgagaagatgtgccgtgaaatgggggttcctttccttggcaaggtgcccatggatccgcagctgtgcaaggcggctgaggaagggaggtcatgcttcagtgatcagaaatgcggtgccagtgcgccggctcttcagagcattgtaaagaagctgatcaagactgggtgagaaaataatgttggcctgctgggaatctggtagtgagaattgagatgaacaggtgtcagagttgtcatgaccaatatatatgttattgtgttttgaacactgaatctgtgtattagactattagtgccagtactagtattggatctgtaagtttttttttgttcgtgaatcaccagtgggtggactgggtgtacaaactgcggccatatttctgctccacgaagtgaaatatgtttcgaggcactgcctgtatcacgaatcatgctta

SEQ ID NO: 43927 - DNA, 1233 bp, Zea Mays
acacgactagttgccggcttcagcagatttttttattcggccactttgtgaggaccgtgagggcatagcaaccagccgtcacgcagtcctcgtctcctcgatgctcttgccctggacggctggaccagccgagagagaaagcctccgacgaaagcgtcacctagcggagagagaaagcctccgacgtctacgctgatccgttgaagattcctgcagtcgcctctcgcctaccgccgccggacgagattgccgagtcatgtcgtctagaagatatgcatctggcagtgaaaaaagaaaaagaaaaaaaaggacagaagagtttatagaatcgcagagaggagctatggataggtttttgaccagtaatccaagaacttcaacaaatacatatgaattggctatagtggttgtggaggaacaacctaatattaatctagaagatggtcttccatcagatgaaaatgttgacatcaacatggatgataacaatgtgagtggtcatgagcctatatttaattcatctcctactgaaaatgctaatgttgatgaacaatcggattttattgaggacatctgtgatccgagaaattaagagaccattgtaccaaatttgcaagtactttatctttcgatggctcatgtgatgttgatttaaatgatctagtttcagagcttagtgttctgcggttgactttatcagataaaccaatgtctgctatggagatttttgagcatgtcagagaagtggattgttatcctaatatttctattgcttatcggattttatttaccatgcctgttactgtagcatcagctgaaagaagcttttcaaagttgaagttgttgaagaattatttgaggtctaaaatgtctcaggaaagattaaatggtttggctatcttatgtattgagaaaatattattggatgagattgatattgacaccatcatcaatgactttgcatctaaacatgtcaaaagaattttttaaggatcgaatggccgggattgggcgataactcttcgtcgtggcagatttactaaagagacccggacttattcataatcaacccgcagtccatcacaggtgtagcctgagtcttcgaaattttatgaattagcctcggtagtcttcagtattcttgtgcgcaatccagggagtggttaaaaaggaataaaaaattatagaaatgagttttatattaaaataattctagaaacttgtttcaatcat

SEQ ID NO: 43928 - DNA, 976 bp, Zea Mays
aaacacatgctgtcatcgttacattagcatgttctcttcgtttgcattgtccttgcaattacgctcctgttgcaccaaacaagcagatcagtaagatggtggaagaggccgcgaggctctctaagctgttctgtgatagaaacctaccaatatttgcattcctggatacccattatccagataagccggaaccaccatatccccctcattgtattattggtactggggaggaggactttgttccagatctggagtggttggaaaaggagccaaatgtgactataaagaggaaaagttgtattgatgggtatatcagctgcatagagaaggacgggtctagtgtttttgctgattggattggaaaatatcagataaaaactgtcttggtgctcgggatatgcacggacatctgtgttttggattttgcaagctcaactctggctgctcgaaatattgaccgagtgcctccattacaggatgtcgtgatttattcaggggggtgtgctacatatgaccttcctgttgagattgctactaatatcaaaggagctcttgcccatccacaggatctgatgcatcatattggactctatatggccaaaggaaggggtgcaaagatagttgacagggtggttattgaaccttgaataaaaaaactttccctcgtcacagtgatgttgctagggtttccttccattgtaacaaccagatatatatatgcatcttggcagaaagttgttgagattttttataatgctagcgacaactatatattttttttaaacgggccggcaggagatctacccgttatattaaaaagatgggagcccaaagggggcgaggtttaaaatacaaagacaccccacaaaagcacaccccacaaaagcaggaccaagccgaaaaacacaaacacacaagactaaactgaaaggagattaggagaaaagccaagttcaaacacacaaaactaaagaga

SEQ ID NO: 43929 - DNA, 998 bp, Zea Mays
aaaaactctcgaccagtgtttgggtatgcacagtacaactgtacaagtagtagcagacctgaaatttctgccgatcctatgagagctcctgttgcaccaaacaagcagatcagtaagatggtggaagaggccgcgaggctctctaagctgttctgtgatagaaacctaccaatatttgcattcctggatacccattatccagataagccggaaccaccatatccccctcattgtattattggtactggggaggaggactttgttccagatctggagtggttggaaaaggagccaaatgtgactataaagaggaaaagttgtattgatgggtatatcagctgcatagagaaggacgggtctagtgtttttgctgattggattggaaaatatcagataaaaactgtcttggtgctcgggatatgcacggacatctgtgttttggattttgcaagctcaactctggctgctcgaaatattgaccgagtgcctccattacaggatgtcgtgatttattcaggggggtgtgctacatatgaccttcctgttgagattgctactaatatcaaaggagctcttgcccatccacaggatctgatgcatcatattggactctatatggccaaaggaaggggtgcaaagatagttgacagggtggttattgaaccttgaataaaaaaactttccctcgtcacagtgatgttgctagggtttccttccattgtaacaaccagatatatatatgcatcttggcagaaagttgttgagattttttataatgctagcgacaactatatattttttttaaacgggccggcaggagatctacccgttatattaaaaagatgggagcccaaagggggcgaggtttaaaatacaaagacaccccacaaaagcacaccccacaaaagcaggaccaagccgaaaaacacaaacacacaagactaaactgaaaggagattaggagaaaagccaagttcaaacacacaaaactaaagaga

SEQ ID NO: 43930 - DNA, 1802 bp, Zea Mays
ctctgttccatccccgttcgttccacgaaccaaaccaaacacgctccacaaaaagaggtcagtgtggacgcttgaccgcgaaaattatatagacttctactcggctgcatctttgctccggtcgatgcacgacaagaggagaatggggacggaggccgacgccgcagccgtggacctactccggtcgcagatcccgttccagaccgacggggagttcgttctcccgccgcgcggcgtcgggctcgtcctcgtcgacctctgcaacggcttctgcaccgtcggcgccgggaacctcgctcctgttgcaccaaacaagcagatcagtaagatggtggaagaggccgcgaggctctctaagctgttctgtgatagaaacctaccaatatttgcattcctggatacccattatccagataagccggaaccaccatatccccctcattgtattattggtactggggaggaggactttgttccagatctggagtggttggaaaaggagccaaatgtgactataaagaggaaaagttgtattgatgggtatatcagctgcatagagaaggacgggtctagtgtttttgctgattggattggaaaatatcagataaaaactgtgagttgtcttgatacagaagatttcagagatagactttaccctattgtgtatgacttgggggggatcggctcaatgcaggtcttggtgctcgggatatgcacggacatctgtgttttggattttgcaagctcaactctggctgctcgaaatattgaccgagtgcctccattacaggatgtcgtgatttattcaggggggtgtgctacatatgaccttcctgttgagattgctactaatatcaaaggagctcttgcccatccacaggtaccggatcactgacggccatacattcaaaaaatcaatcgtacactgggaatcttcagatggccacaatcacatttttatatatagatagaagaatgaatgaaaaattatcctcggtgaaaaacttaacctagaaattttcaagatagggtggttgttgtctgaggagttttttttggaaaatacagcacctttacaaaatttatttcatgccagcatcaagaatagtttgcacatacaaaaaagaaagagaaccatttggtttccaaatgaacatataccaccttctttagtttaatttattttaatcagtaggctctgtccctcctatagtcctattatgtgaaactttaggggctaaaagatattgttcttgtgttaagttttcacaatcatcagctgcagataacattcttgtggaaccagtaaaacattactcgacattaactggatgctctctaagagatgctgaagggagaaccttacaatcaacttaccattcaatattgcaggatctgatgcatcatattggactctatatggccaaaggaaggggtgcaaagatagttgacagggtggttattgaaccttgaataaaaaaactttccctcgtcacagtgatgttgctagggtttccttccattgtaacaaccagatatatatatgcatcttggcagaaagttgttgagattttttataatgctagcgacaactatatattttttttaaacgggccggcaggagatctacccgttatattaaaaagatgggagcccaaagggggcgaggtttaaaatacaaagacaccccacaaaagcacaccccacaaaagcaggaccaagccgaaaaacacaaacacacaagactaaactgaaaggagattaggagaaaagccaagttcaaacacacaaaactaaagaga

SEQ ID NO: 43931 - DNA, 2175 bp, Zea Mays
caaaatccgaccgttgccaagagcgctcccctaccctttttcccctcctcgcagtcgcagcagcagcgcacaccagaaaagcttttctgcctcctctccaccttgcttcccgcaactaccacgcacgccgaatacttggcaagaagaaaccctttctcgtcccgttgaactggcgccgtcgactccaccggggcacgctgtcgcgggttgctctccggtcctcgttctccttgctgctgaatccgctagtggagatcgacctgatttctcctgtcctgtcaattggattttagcccggctttcaaggtagagaaagaagctgtctggtccatcatggccttcccaactccagcttctgtttttgttgacgagaaccaacagataaatagaggtaagagggctgctggatcaaggaccaaagggctgaagccgtcggagaatcctgggaatctagagaggagagctcttcaggatttgtccaactttgccaaaggcacaggtttgaagggcacttccaccctgaaagagaggtcccagcgcaaggcttttagtaatgtgaccaacactattaaaggcactgctttgaaggacaggcccatcacgaaagagaaatctacccagaaacagaggtcacagaacccagtgaaaatattatctgatgaagatatcaaactgtgtcatgagtgggctaaggatggggtggaagggtttcactcaacacaaaatgattctcagaaggttgataaggatctgctagccaaacgtgtcaagaagaaagtggcgtcagtaaactcagccttgcgtggttggtcagatacggtatttgattctctgatgtttccagctagggaggttttatatgaaccaaaagtgctggagctggaacctgagattctccgggacatcagttgggatctccctagttcagtagatggtaaagcaaagctggatgaagactgtcttgcctatgatcagcttgaccagtacccatctttggagaacaatccagttacatttgagctgagagacgagccagcgatcccgcagctgggagtgcattgaagaatcccgcagctctgcttgctgctttgctctagaatgctaggtcttgaacccctgatgtttttctccagctatgttctggtggatgtgggtggtataggatttcacagtttgatcactagtacctgatccagcggaagcgacagcgcttcctgtttgttatgcttgctgatgggcgatggttgtggaactgctgatggctcctgttgcaccaaacaagcagatcagtaagatggtggaagaggccgcgaggctctctaagctgttctgtgatagaaacctaccaatatttgcattcctggatacccattatccagataagccggaaccaccatatccccctcattgtattattggtactggggaggaggactttgttccagatctggagtggttggaaaaggagccaaatgtgactataaagaggaaaagttgtattgatgggtatatcagctgcatagagaaggacgggtctagtgtttttgctgattggattggaaaatatcagataaaaactgtcttggtgctcgggatatgcacggacatctgtgttttggattttgcaagctcaactctggctgctcgaaatattgaccgagtgcctccattacaggatgtcgtgatttattcaggggggtgtgctacatatgaccttcctgttgagattgctactaatatcaaaggagctcttgcccatccacaggatctgatgcatcatattggactctatatggccaaaggaaggggtgcaaagatagttgacagggtggttattgaaccttgaataaaaaaactttccctcgtcacagtgatgttgctagggtttccttccattgtaacaaccagatatatatatgcatcttggcagaaagttgttgagattttttataatgctagcgacaactatatattttttttaaacgggccggcaggagatctacccgttatattaaaaagatgggagcccaaagggggcgaggtttaaaatacaaagacaccccacaaaagcacaccccacaaaagcaggaccaagccgaaaaacacaaacacacaagactaaactgaaaggagattaggagaaaagccaagttcaaacacacaaaactaaagaga

SEQ ID NO: 43932 - DNA, 1493 bp, Zea Mays
agagcgctcccctaccctttttcccctcctcgcagtcgcagcagcagcgcacaccagaaaagcttttctgcctcctctccaccttgcttcccgcaactaccacgcacgccgaatacttggcaagaagaaaccctttctcgtcccgttgaactggcgccgtcgactccaccggggcacgctgtcgcgggttgctctccggtcctcgttctccttgctgctgaatccgctagtggagatcgacctgatttctcctgtcctgtcaattggattttagcccggctttcaaggtagagaaagaagctgtctggtccatcatggccttcccaactccagcttctgtttttgttgacgagaaccaacagataaatagaggtaagagggctgctggatcaaggaccaaagggctgaagccgtcggagaatcctgggaatctagagaggagagctcttcaggatttgtccaactttgccaaaggcacaggtttgaagggcacttccaccctgaaagagaggtcccagcgcaaggcttttagtaatgtgaccaacactattaaaggcactgctttgaaggacaggcccatcacgaaagagaaatctacccagaaacagaggtcacagaacccagtgaaaatattatctgatgaagatatcaaactgtgtcatgagtgggctaaggatggggtggaagggtttcactcaacacaaaatgattctcagaaggttgataaggatctgctagccaaacgtgtcaagaagaaagtggcgtcagtaaactcagccttgcgtggttggtcagatacggtatttgattctctgatgtttccagctagggaggttttatatgaaccaaaagtgctggagctggaacctgagattctccgggacatcagttgggatctccctagttcaatggtaaagcaaagctggatgaagactgtcttgcctatgatcagcttgaccagtacccatctttggagaacaatccagttacatttgagctgagagacgagccagcgatcccgcagctgggagtgcattgaagaatcccgcagctctgcttgctgctttgctctagaatgctaggtcttgaacccctgatgtttttctccagctatgttctggtggatgtgggtggtataggatttcacagtttgatcactagtacctgatccagcggaagcgacagcgcttcctgtttgttatgcttgctgatgggcgatggttgtggaactgctgatggtataattctaatgttttcagcaaaacaaacctatatggtctctatatttattctcctgagtcatatgacttggcagtgctttagatagcgacaatggtcctaaatatagcgagattcttgccacgtgctagcaagagacaaaggaggggtcaggttgattgtccagaggtcacatcaggagactacggtccggttggtttcagttttttttttcagactggtcgctaaaaggttttgcgtactataaaaaaaat

SEQ ID NO: 43933 - DNA, 1472 bp, Zea Mays
agagcgctcccctaccctttttcccctcctcgcagtcgcagcagcagcgcacaccagaaaagcttttctgcctcctctccaccttgcttcccgcaactaccacgcacgccgaatacttggcaagaagaaaccctttctcgtcccgttgaactggcgccgtcgactccaccggggcacgctgtcgcgggttgctctccggtcctcgttctccttgctgctgaatccgctagtggagatcgacctgatttctcctgtcctgtcaattggattttagcccggctttcaaggtagagaaagaagctgtctggtccatcatggccttcccaactccagcttctgtttttgttgacgagaaccaacagataaatagaggtaagagggctgctggatcaaggaccaaagggctgaagccgtcggagaatcctgggaatctagagaggagagctcttcaggatttgtccaactttgccaaaggcacaggtttgaagggcacttccaccctgaaagagaggtcccagcgcaaggcttttagtaatgtgaccaacactattaaaggcactgctttgaaggacaggcccatcacgaaagagaaatctacccagaaacagaggtcacagaacccagtgaaaatattatctgatgaagatatcaaactgtgtcatgagtgggctaaggatggggtggaagggtttcactcaacacaaaatgattctcagaaggtgtcaagaagaaagtggcgtcagtaaactcagccttgcgtggttggtcagatacggtatttgattctctgatgtttccagctagggaggttttatatgaaccaaaagtgctggagctggaacctgagattctccgggacatcagttgggatctccctagttcagtagatggtaaagcaaagctggatgaagactgtcttgcctatgatcagcttgaccagtacccatctttggagaacaatccagttacatttgagctgagagacgagccagcgatcccgcagctgggagtgcattgaagaatcccgcagctctgcttgctgctttgctctagaatgctaggtcttgaacccctgatgtttttctccagctatgttctggtggatgtgggtggtataggatttcacagtttgatcactagtacctgatccagcggaagcgacagcgcttcctgtttgttatgcttgctgatgggcgatggttgtggaactgctgatggtataattctaatgttttcagcaaaacaaacctatatggtctctatatttattctcctgagtcatatgacttggcagtgctttagatagcgacaatggtcctaaatatagcgagattcttgccacgtgctagcaagagacaaaggaggggtcaggttgattgtccagaggtcacatcaggagactacggtccggttggtttcagttttttttttcagactggtcgctaaaaggttttgcgtactataaaaaaaat

SEQ ID NO: 43934 - DNA, 1511 bp, Zea Mays
agagcgctcccctaccctttttcccctcctcgcagtcgcagcagcagcgcacaccagaaaagcttttctgcctcctctccaccttgcttcccgcaactaccacgcacgccgaatacttggcaagaagaaaccctttctcgtcccgttgaactggcgccgtcgactccaccggggcacgctgtcgcgggttgctctccggtcctcgttctccttgctgctgaatccgctagtggagatcgacctgatttctcctgtcctgtttctctttatcagtcaattggattttagcccggctttcaaggtagagaaagaagctgtctggtccatcatggccttcccaactccagcttctgtttttgttgacgagaaccaacagataaatagaggtaagagggctgctggatcaaggaccaaagggctgaagccgtcggagaatcctgggaatctagagaggagagctcttcaggatttgtccaactttgccaaaggcacaggtttgaagggcacttccaccctgaaagagaggtcccagcgcaaggcttttagtaatgtgaccaacactattaaaggcactgctttgaaggacaggcccatcacgaaagagaaatctacccagaaacagaggtcacagaacccagtgaaaatattatctgatgaagatatcaaactgtgtcatgagtgggctaaggatggggtggaagggtttcactcaacacaaaatgattctcagaaggttgataaggatctgctagccaaacgtgtcaagaagaaagtggcgtcagtaaactcagccttgcgtggttggtcagatacggtatttgattctctgatgtttccagctagggaggttttatatgaaccaaaagtgctggagctggaacctgagattctccgggacatcagttgggatctccctagttcagtagatggtaaagcaaagctggatgaagactgtcttgcctatgatcagcttgaccagtacccatctttggagaacaatccagttacatttgagctgagagacgagccagcgatcccgcagctgggagtgcattgaagaatcccgcagctctgcttgctgctttgctctagaatgctaggtcttgaacccctgatgtttttctccagctatgttctggtggatgtgggtggtataggatttcacagtttgatcactagtacctgatccagcggaagcgacagcgcttcctgtttgttatgcttgctgatgggcgatggttgtggaactgctgatggtataattctaatgttttcagcaaaacaaacctatatggtctctatatttattctcctgagtcatatgacttggcagtgctttagatagcgacaatggtcctaaatatagcgagattcttgccacgtgctagcaagagacaaaggaggggtcaggttgattgtccagaggtcacatcaggagactacggtccggttggtttcagttttttttttcagactggtcgctaaaaggttttgcgtactataaaaaaaat

SEQ ID NO: 43935 - DNA, 880 bp, Zea Mays
agagcgctcccctaccctttttcccctcctcgcagtcgcagcagcagcgcacaccagaaaagcttttctgcctcctctccaccttgcttcccgcaactaccacgcacgccgaatacttggcaagaagaaaccctttctcgtcccgttgaactggcgccgtcgactccaccggggcacgctgtcgcgggttgctctccggtcctcgttctccttgctgctgaatccgctagtggagatcgacctgatttctcctgtcctgtcaattggattttagcccggctttcaaggtagagaaagaagctgtctggtccatcatggccttcccaactccagcttctgtttttgttgacgagaaccaacagataaatagaggtaagagggctgctggatcaaggaccaaagggctgaagccgtcggagaatcctgggaatctagagaggagagctcttcaggatttgtccaactttgccaaaggcacaggtttgaagggcacttccaccctgaaagagaggtcccagcgcaaggcttttagtaatgtgaccaacactattaaaggcactgctttgaaggacaggcccatcacgaaagagaaatctacccagaaacagaggtcacagaacccagtgaaaatattatctgatgaagatatcaaactgtgtcatgagtgggctaaggatggggtggaagggtttcactcaacacaaaatgattctcagaaggttgataaggatctgctagccaaacgtgtcaagaagaaagtggcgtcagtaaactcagccttgcgtggttggtcagatacggtatttgattctctgatgtttccagctagggccatttctggatattggaaatttctctatgcccaaagtactgaaggaag

SEQ ID NO: 43936 - DNA, 234 bp, Zea Mays
tccaagcctaaaccaaagcagcctggctgtgcctacacgcttgccttatcttctcccgttcaccccgccgtgcgcgcgcgcccccgcggcgacaaccgggcgaccgccgccgacctacgccaggtgccaagccgttcctcagtcccatcacgaggccttcaacgagcccttcgccggcgacgagaaacataatctcggccacacggcaagcattcaagcaaagtaccggagcgg

SEQ ID NO: 43937 - DNA, 1899 bp, Zea Mays
aactacacaactaacattcatatataaaattttgacagcatctcctttgaaaatttgcataaacgtggaagcaacagagtataagcagatatcatgataagaaaacatactagacattaataatcggctagcaatgggaagataaccataacgacatgaattgaattaactagtgtgcatgactagttaaagacaaacatcctttgacaagaagtttctaattaaatcatggctgtgcctgggcagcgttattatgagagtgaaggtggacgtgctgctactcccctcattcccaacatgaatcaagtacctgcattgagtaatgcaagagtgagatgaaacatctcagcaggtgaattgtttcgacgagatatttaaaccaaaaaaattgaattaatcaacattttaaagggatcacaattgagatcagaaatacttgtagatatagaactcaatagtcccaaaataaacaatgccatctcatttcctcgaacaaccacaataggttgtataacactttcctgcatcaacaatacctgcaaatatcacttcaatgtatgcatagtaatgcaatgtgtaagtcatctgccttcatacctcttagagtataaaaccacaccatctgcaaataccacttcaatgaatgcatatgaatgcaatgcatatgtcctctgccttcatacctctaagggtatgaagccgcatcgtacccctcctcgggcaacgtacgatgctaagttataccggtacggtcggaccataggtcacgacaaaacttcagatgcaagtgaatcatgcaatgtatatggcatgctacatttatcaatatatttcacttccttcacatacaatacaacctcaaataatacttcatttaccttcagatacaatacaacctcagataatacttcatttaccttcaggggtgtgaattaatctcacgagtcatactcgaatcataatcatcatcaatatatgattgagcatcagtataatgcaagcaagtaaagcatcaccatagagttcaattatgaaagaatccaatacttttgaatattagagtgtaggcaatagaaataacaggtcagaacggaagcaaccactgctacattcacttgccttcatcgaagaagaagaaatgtactaggcatgatctggagtgtagccacctgctagcgggcataaaacttagtacaaatatttcacaaacatttgccatcaatcaacaaaacacccctgcacttgaaaccaagacctagtggaaagactcccaccctgaaccacatgccatacagcagcaacgctgtttgttaattttgtatctttaaaattaaaacagcggtgatatcaaacaaatactctaggagtatctacacaaaatactctacaacttcagtattcaatagataattaaattcttccatctacaagttctaaaacatctgacaagataactgactgaatctgttttagacagcagtatggttaactttaaaattcgatatctcccaaactactgaaccaaaaattatgaaattctgctggaagtaagaacttttatccctctacaaaagtctccatagtttgaagagccaattcgaccatttactagatgaaacccaccagtgaacagacccactcatttttgtcaggttaacaggaacagccacagtaaaacaaacataactggagtttcacaaatcatatgaatgcactctttaacaatctggaaagcttatgaaattatctacaacttcttttaccaactcacagtttaattctgttgataaaattgcctaactcttaagataacagattctgcacagaattatgagactgaaaaactgctataatcaaactgccataactttctgttctgatgtccgattgaggtgttct

SEQ ID NO: 43938 - DNA, 1722 bp, Zea Mays
ctagaaaaatcactcgacttctaccgagatccctaattagtaaagcagctactcgacctatcatactagtatccatttcaaaaaggaatcctgagttcatgcaactagggtttcagtcaactcctacacttaagtgcacagcacaagcctacaaacattaagtgtagtaaaatagcatatataaacggttatgcataaaaccggggcttgcctttaatttaacacttagacagtgtttgctggggaggtactcgcttggcgagcatccactggttaagtccatccttccttgggtcgtccaccaacggcatcttgtggttggcaccatatcacgtgcacgatcaccatctctcgatccaaaaataacttagttgttgctgctgtccgcatggcgcgaagaggctgtgcagacccgacgaagcgagacgcggaggcgtcggggctgcacggattgatgacgcggctgctctcgccgagcaggaacgagtcgtggcgctatggttctcgctgcgcgcgacagcacagcaagcacgaggagaggcgtggttgcaggattttttttttttgatgtggtgcggcatgtgggagcagcaggggtgtggctgcaaggagagcgacgtcgagaccatgccgtggatccacagcgctacaaggcacagcggggcagcatggattgagcagcgcaccggaataaaagtcgacgatgttgtcctcgacacagtgctccacaccgatagtttgacaacaccgaaaagaggcgagcagggctgcgcacaacacaagcaagacaacacgcagtcggctacgcatatcgtcgagcaggtagtgtgtgtggtggagcagcggcatgggaagggacagcgtcgtccagggaaacagggagggcactggttgggagagggactcggcctacagccaccatggctgggcgctgcggcgttgatccgatccctgctgctggatgtttgggacaaagagaaggcagggaagtgccatgagcacatgggctcgccggcgagcaggagcccggcgaggccacgacggcgccctgcaggggatccccggcgagcaacgccatggcaaggtggagatcagcatagggagcagaggctcatccaaagcacagagaaaggaagggctcggcagggggaaacagccatggatggaaaagctcctgcgccgctcctgctgcgtccaagccatagaaaaggggctaggcgtcgagcacagtggaggagaaagggcgtcgttccctgcacgtgagctcaaggaaaaacagagaggagggagggcgctgggcaagggagatgagctgagcgcagggaggtggagctgagctcgcctgctgcaaggacgccaagtgcagggagcagagggtcagccatgggagagaggggagctcgcaggggaaatcgccatggctgctggccttacttcctgcgcgtggctgctgcgcgtggaacaaggagcagggggcggctggagatacgccggcgccatggacgccagggaggagcttcagcgccgaggaagaaggagcaggggcgccagcttgctgctcgccatggaggggagcacggctccctgctgctgctgccgtgggatgcctgctgcgcgatggagaagaagacagggaggctgcggtggcggctggaaaaaaatgaggggtgggaatgcaaaatagcccaagggcaaggggagagagctcctatttatagacat

SEQ ID NO: 43939 - DNA, 347 bp, Zea Mays
ctttaatttaacacttagacagtgtttgctggggaggtactcgcttggcgagcatccactggttaagtccatccttccttgggtcgtccaccaacggcatcttgtggttggcaccatatcacgtgcacgatcaccatctctcgatcctaaatgagatgcaagatgcatatgtatgaatataatgaaaagttatcacaagatatacaatacacggtagcgaactaaacaccaagtagtaagacaccgcaacgactatacacaagcgctagctattcgtacgttatcagcgttcatcattaacaccattaacaagacgaccatatcttatttatttacgcaacacaaat

SEQ ID NO: 43940 - DNA, 3179 bp, Zea Mays
tgttgattgataaaatgtttgataccatgtatgaatagctaggtactcatctagtttaaaaggatcatactaaaacttgaaaagctaaaacttgattttagactcagctagtgcttttggcaaaccaaacccctcagccaaacagctgcatgtctagaggtagaggagtagactcctcacaccgggtaagtctagctgagtattagtatactcagccttgcttgtggcacaatttttgcaggtactccttgattgattgatggtgtgacttggccttcatccctgccaccgggatagatggtcgagtgggttattgcttccgcgggagaggaccaggaggagtactgtggccaggcttcgccatgttactcggttttctccgttagttatttacgctgcattaaaatttatggttattatttctgaaactccgataatgtaatcactaaagatacttattaaatttgtggtattatgttttattgtatttctctgtgcctcaccttcgtgtgagatagtggtattcgatcctggataagtggctttatcggactagatccgagggactgacggattattcctgtttaagtgtgttgctgcccttaagggtgcgacttgggcacttaagctggaataattcgggcggttccgccacagctggtatcggagcgaatactatcacagagaagtcaataagtcatgattaccgaccttttctaaagtaaaacttgctagaaaccaatgttggatagatcgtcaggacgataaggatagacttaggacgtgaagccttaggaaatagatgggtagctaggtggctatatttatataggccataaaggctactactactattaactaggatgctgtagaagcatccgaaaaattagttaggtctgaaaagacgcctagaatgagcatgcatcatgattgttgcattattatcccttgtgcaccaacgtgcttctctcacctttattccaataataagaaattatgaataatgtgttgtattgctatgaactgcaaaaaaaatgccttacctcgtatcaaattggtaagtcttgttaggtcgtgctacgtgtttctcttgccttgctagctaggtggtattgtaattgttcacctctctttgccaataaaaattgttgcctgttttgcccataaaagaccccccttctccaaacaaccttgagtttagcaactaaaacctcttaaaaaaatcatgatggtgttggtgttttctagcccttgtgtgttgcgctattggtaatgcacctgcacagcttatagacccccatagcttaaccactagccaaaccggaacttccttgtgcacgcggttatgtcaaaaaaaaacatcgtttgttgtctagttgcgcaaaccatgaccaagccatgtttctttccataaatccttgcccctaaaacttcatagcgtttctgtcgatcatcctagctgatcctgtttgcctacctctcctttcgcctggatctggtaatccttcttcttgtgaatcatgtttgctttatcgtccgaatctcgggatccccaattgattctgccccgttagctggttatctgctataacccgttctcaagtatcgaatgttgatcttgcctaaatctctcattctaattattctcatactctttctccaaggatcatgacgtcattttatcaacttatctctaatcagtgtatccatttagtcaatggatttcattgttgtccttggttctctcatgtctctaaaagctcaacaatctattttgatctcatggtcggttcatcctcatatcaaatctcatgctaatatctgatctgataatctctatgttgatcataaaatagttctctgagttaaataaaaaaattctcatctgatgctcttttgccaacaatctttgcttcaacttcagtcacattttctgagccatactctcatgggctccatctatttatgctatgtggaattctcgttggttacgtttggtaatggtgtcatgactaacgactgatgatgccgcgacgaaaccgagagcctactatggtgcacacatggttgagctgctcggcacgcgctggtatcatggttaatagtcgtggtccattacgagactatactgctatctttcatggatattctctcaaaagtgatcgctgcattttgtctcgatatgtcgcgatattctaaccaaatctgtcttcagtatcttgtcagataccctctcataaatttgcatctatcttcagtctgggagttacatgcttctccacccttaaatatcctcattcgaatctcgggacgagattctttttaaggggggaaggctgtgacaccccaggtgtcagtttcgtgttatgacgggagattaatcctaatctcggatgctcagtaaaaatttctctttctcactcgcgtatgtctctgattatccagattattcattcacatttcgccgaattcggaattattcgatctcacagaaggccaatttggagcctgttaaaaacttttattctcgacgaatgcaaactcgggaatcattctcgatttataaatcttgtctaaagctcgtttaatcaagcgctcgacagttgctagtcgagctgtgtccgaatccaatttctcgatgttcgatcgatgtccgactattttatccgagtccgtactctcaaacggaatactcagtctgtcgtcctctaattaatttctatccgattcggcttaatatctctgtatccaatccgatttcaaaatcaacatcggcaacgatttttaaatatcacgattcgctttctccgactaaaaatccaaagtcgatcgaatctcaggacgatttattttccaatcacacgtagggaattaattttcgagcaaattcaaaacagactctcggccgagttaatcgcgcaactttccgttcgtccgaactcttttcgctctgtttctcagtagcgacgaattccgcaggaacattttagtccggaaaatatttagcgcgacccaatttagtgttttgggccaaatctagcccggcccaattaggcccatttgaaaccctaaccctagcccatgtctataaataggagctctctccccttgcccttgggctattttgcattcccacccctcatttttttccagccgccaccgcagcctccctgtcttct

SEQ ID NO: 43941 - DNA, 3708 bp, Zea Mays
ctcacacacagcatagcaaagataatttccaaagtgttggctaaccgcctggcaccctgtcttgatcatctagtatccagaagccatagtgctttcatccggaagcggagcatacatgataatttcctgttcacgcaaaatttaattaaagagctgaatagagcaaaaatccctactttgttcctgaaattggatattgctaaggcctttgacagtgtgagatgggactaccttcttgaggtcctgcatcatttggggtttggaaatagatggaaagcttgggtgtccatcctgctcagatcagctagctctgcagtaatgattaatggagtcagagggaatttcttcaaccatggaaggggcttgaggcagggggaccccttgtctcccttgctgttcattcttgccatcgaccctgttcagaggctgtttgacattgcttctcggcttgggctgcctttaacttgccgaccattgcgtcgagtggatttccagccgctgcttgacaaattggctggtaaattatcggcatggaaagggaagctgcttgataaagctggaagactgactctggtaaattcagtgctcacggctgtcccggtgcattttttgacagttttccctttgaagaagtgggccattaagaagatcgataaaattaggaggtctttcctttggagaggtgctgaaaatgctaatggtgggcactgtctagtgaattggaccaattctgccagaccgaaatccttgggtggccttggcatcttggatctagagcgtttcagccgtgctttgcgcctcaggtggctttggctcaactggactgattctaataggccgtgggctggttctcagataccctgtgataaaatagatgcagctttgttccgggcatcaacatctgtaacggttggcaacggactgaagacaaatttttggcttgatgcttggctctcaggcaaagctccgattgacattgcacctagcttgtaccccctggcatggcgcaaaaatagatcggtggctgaacaattggttaacctcaattggacgagaggtctctggagaatggaaaatgttcaacagatggctgaattcatacaattgtggaaccatattgaggggtgcagctcaatgaccaggaagattgcattcggtggatatggaccgagaatggagtgtactcttccaaatcagcttatcttgcacaattcaagggctcttacagtgctttcaaagcaaaatctatctggaaggcgcacgccgaagggaaacataagttctttgtgtggctgctcattcaagcaaagatcctcacagcagataaactaagtcaaagaaattggccatgcaatcctctatgtgtcctttgcgatcaagagccggagactgcgattcacctttgtctcaagtgcccttttgctttggaagtgtgggagttagtcaggtcgtggaccaataatctgatcatgccgcccagctcagatattcagagcttcgattcgtggtgggctgttgtgctccaaaacaaatcgaaagaagatcaactcactgtttcgggtttgcttatgtacttcacctggaatatttggaaggagcggaatcggcgtattttttagggcaagcaagcatcgacacaagtggtctttcatctggccaaacaagaaatggcgttgagacgagctgcagttgggcatccatgtgtagtataatgtcttctcttttttggattgtgtttgagtgtttttcgttatatgtaatagcaactttttaagactcttgtttcccttctctccttaaatgaaatagcagagctcctgcactaagttttcaaaaaaatatataactaccaggaagctacttactgaacttcaatactctacacaaacgcagaacgagggcgctggccacccgaatttcttgactaaaaaccgcatcaaattacaatcctagaagttcggtagaacaataaacgtatggaagtatttctagcctaaagacccttcctacctcacccaaagatggacgctagccttaagtggagatacaagcagggctcctggcgatggggattcttttctgtggaccgcgaccaacggacgaagaggcaagcggcgaggtgggctgctgggcagagcgtgaggtcaaggctggtgacgccaggggctagagcgctagaacaccgaaagttctcacttggagcagggagcacagcaatggaaaaaggaaggagcactttgctgcgttggtgcatatcacgacagagaaaggttttggcatacgatgccagcagctgtgtggcagctcttgtacatggcaacagcagaaactgcacaacacaagcagatacgtggccgcattttgatggctcagggacagctgggttgggataggtggtggttttttttaaccagtgcaaccaaacttgaagtagcaaacaggcttcggctgacttgtagcctgagcatgccggccccctctgcccaatctgaaaccggtccagtctccattcgcccagttaaggatcggcttataatcctcttcaactacctgcttttccaatatcaaacctcagcctcagcttggattgacacattggaacacaacagaggcgggaggatcgttccgctcccaatctgaattttaaactgtgctcaaatcactataccaagcctaaacctagaacttccaatcagattttctctcatttccctatgctggcttgatacactttcttactaggagcttctcttctatgatcactctccaactttactttaacggatactagctaaaactcaacagacttcaggttagagagctccaaagttggaaatccaccaaactacacaattcagctaactgaactaaattcagcaccctctacctaacagagcaacttggaataaccttttctcccaattcaaagcaaggatagggagatccttctcaaaaaaaattgctccccaatattagatcttcaagtttaatgcaatgatcatccaccaaaacttcaagaattgagacttagaatggtccaaaactgagaggaattcacggtttctaaaaattcagcaaactgaattacattttagattctgaaactgaactctacaccaaactgaacccccacctttaactccattactcctcacaattccaaacaataataggccaaccttgactaataaaatttgtttaccaaacatatctgtacaagtttgctgcagcagccttaggtcaaagattcatggatcaagagttatagtgctccaaaaataggtggagaacacataaaattctgtttcagctgactgaaaccatatacctgtcagtgaaagttttgtgacgttttatccaatttttttacacagcagcaataccaatgcttcactgacctttgaggagtagggaacgagcaccacacgaccgagacaacctccgaggaatccgggccacgacgagggtgagaactgctgttgtggtcaccagacagggtgctggcgtgcaagggttcagggcaggccaacagatgaggttggggagagggttagaaccagagtgggcacaaaaactacaacacactcactgtgaaccttgaccagagcttggggcagggagaaaattccactaaagccaagccctaaggcactcaatatgtgagcaagtacccttaacttgttcacaacatagtggagtactccctgg

SEQ ID NO: 43942 - DNA, 1384 bp, Zea Mays
acggtaacctcacggcgacgcgctagcgctaaaggctgagcagagaacccaagttcgacagcgagcagggagacatgtaaacccccggacgcgacggcgatttcacaccgaggcgaccaacttcggatccggaggaggccgaacgcgacagcaaagcacggcacaatcccgagcaagggtaggaagggagagggatccgcgcggcatggcgagggaggagcagtgcgcgaacgacagggatctcggcaggactgcggcggccacggggacgagctgcagcaaaggaccggaccgagctcggcggtgctgtagagttgagggcgagctcgggcatggagtcatcgcatagctccaactctccaagtcgacgaccactagggtgctgctgcaggacggaccttcaccggcggtgactgggacaggagcatggccacacagccgaggcgagcatacacgacgaccggccttggatctgggagcagggacacgcgcgtcggggcttgaagaccacgaccgacgcaggaaagatatggacacagttcggcgagcttccatgggcgacgtccacggatttgaagctgcgacggccaaggcaggagctcagggcgagcagcaccggtatccagacgagagggaggtggagggccgagctgggggtgggcgctggagagagagcgcgcggcataggcgaccgcaccagggaacagcgatggccaacagagaaactcacgcgcgcggtaactctgcggctgggagggcgcggcagccatggcgagcaggagcaggggctgggcgagctggaggatggcagagggagagagaagcaagggagggcgccatggctggagcacgcaggatccagcggaatggcggcgagcagggcaagcatccagggatccggacgctgagcgctagtcaccggagcagggagctgggcgagctcgaccatggggttgagagcggccatgggtggggagctcgagcagggagccgggcgccgagaaacgcgcgcagaaaacaggacgccatggaaaagcttcagcaggggaaaaacgcaggggatgggcaggaggccgagcgccagtagcaggcgcgcgccatggaagaagatcgagcaggagctgaggcgctagctgctggagataaggccgctgcaggccgtcgcgcgaggagaaaggataagggagaatcgtgcgtttttttttcttcaggatgagcggcggctagaacaagatgacgacgcgcacagggaacagataagcacggttgggaaaaaattctggaatattttccatttttttagatttttaatttttttaaccgaaaaatcacagatattttagatcccaaattttcttagggacgtatacagggtagacagtaa

SEQ ID NO: 43943 - DNA, 892 bp, Zea Mays
atcaaaagcgggttgaatccatttggattttggatgatccaaatccattttctggtacaatgtggtctaccggaactagaaaaggaagttgacgaaaagatagaccagttcagtgcatgggtggagaaacacccaaaccgcagaagccagatctgcctctcctttttcgacgagaaacacagacaccctggttggtttgtcaacaaaacagagcgcatctattgggagcaatggttcatcaatttgcaagtcatgttccccaaaagatacagcaagtcaaacagctccaaagggctgacaaacatccaagcaaatgccgtggaggagaccagcacaaggcgtgctgcattggaggcgtcgattaacgaagtgctgttccagatcataaagttcgccaacgagaaaaaggaccacattcctgctatccctgacaggattttcaatcacgagatcatgatcccaagctcggattctgtatttggatggaacacggacgtcattcgcagagttctgaatagcgggcacccatactcgctttaactgaagacgacatctcagtgggcgcccgtattcagtttattagcgtgctgccgccctgtttggaagacggctctgttaaccatcgtggtgaaccatataatatgcctaaggaaaaacctagttctgtgtacatcaccctgctcatctggcatgtacatactgtgttgggatcttgctcatcggtcaaacattcttaagttcgattaagtttataaataacaatattatgattctaaataagtttatcatgtaaaagtatttttcatgattgatacttattgcgaagcatctccgagtgagttaggtggttcgagtaacactccttaagtcttgaattcgaattttagactag

SEQ ID NO: 43944 - DNA, 1024 bp, Zea Mays
tgagtattagtattttgcacaccatattcttccatagaaccctcagcctggttcgccccaaagatgttgactgtgatttcctcgatattacttatgtacaatgtggtctaccggaactagaaaaggaagttgacgaaaagatagaccagttcagtgcatgggtggagaaacacccaaaccgcagaagccagatctgcctctcctttttcgacgagaaacacagacaccctggttggtttgtcaacaaaacagagcgcatctattgggagcaatggttcatcaatttgcaagtcatgttccccaaaagatacagcaagtcaaacagctccaaagggctgacaaacatccaaggtaattttgttaactaaagtttcacagacgtcatgaggctaccataagcatgtagaatgtagcagtaacattttgtgcaatatgctcctagcaaatgccgtggaggagaccagcacaaggcgtgctgcattggaggcgtcgattaacgaagtgctgttccagatcataaagttcgccaacgagaaaaaggaccacattcctgctatccctgacaggattttcaatcacgagatcatgatcccaagctcggattctgtatttggatggaacacggacgtcattcgcagagttctgaatagcgggcacccatactcgctttaactgaagacgacatctcagtgggcgcccgtattcagtttattagcgtgctgccgccctgtttggaagacggctctgttaaccatcgtggtgaaccatataatatgcctaaggaaaaacctagttctgtgtacatcaccctgctcatctggcatgtacatactgtgttgggatcttgctcatcggtcaaacattcttaagttcgattaagtttataaataacaatattatgattctaaataagtttatcatgtaaaagtatttttcatgattgatacttattgcgaagcatctccgagtgagttaggtggttcgagtaacactccttaagtcttgaattcgaattttagactag

SEQ ID NO: 43945 - DNA, 1312 bp, Zea Mays
gattggttggtcttcgagtcggcttggactcttctcttcctcgccaactcctccgtggcgccgccgtcttgcctgcagctttttgagccttcgtcatatccacccttctctctgtctcggcatctgtttgagcagtacaaaccctatttttggaattttatagcattgtttcgtgatcagtcagttatatttaacatatgatctaattatcccaagcacgcttcctcgacttcctatctcgactctcccaagtcacaaccctcgacctcccccctactccaactactggaagcgccgatccatcaggttctgatcgattcttctgccccgatccgcagcggcaagcggagatgaactgcgagacctgtcagctgaaagaactggagctggaactgacggagatcagggatgttctgcgctgtattttgcacaccatattcttccatagaaccctcagcctggttcgccccaaagatgttgactgtgatttcctcgatattacttatgtacaatgtggtctaccggaactagaaaaggaagttgacgaaaagatagaccagttcagtgcatgggtggagaaacacccaaaccgcagaagccagacaccctggttggtttgtcaacaaaacagagcgcatctattgggagcaatggttcatcaatttgcaagtcatgttccccaaaagatacagcaagtcaaacagctccaaagggctgacaaacatccaagcaaatgccgtggaggagaccagcacaaggcgtgctgcattggaggcgtcgattaacgaagtgctgttccagatcataaagttcgccaacgagaaaaaggaccacattcctgctatccctgacaggattttcaatcacgagatcatgatcccaagctcggattctgtatttggatggaacacggacgtcattcgcagagttctgaatagcgggcacccatactcgctttaactgaagacgacatctcagtgggcgcccgtattcagtttattagcgtgctgccgccctgtttggaagacggctctgttaaccatcgtggtgaaccatataatatgcctaaggaaaaacctagttctgtgtacatcaccctgctcatctggcatgtacatactgtgttgggatcttgctcatcggtcaaacattcttaagttcgattaagtttataaataacaatattatgattctaaataagtttatcatgtaaaagtatttttcatgattgatacttattgcgaagcatctccgagtgagttaggtggttcgagtaacactccttaagtcttgaattcgaattttagactag

SEQ ID NO: 43946 - DNA, 1308 bp, Zea Mays
gattggttggtcttcgagtcggcttggactcttctcttcctcgccaactcctccgtggcgccgccgtcttgcctgcagctttttgagccttcgtcatatccacccttctctctgtctcggcatctgtttgagcaatctaattatcccaagcacgcttcctcgacttcctatctcgactctcccaagtcacaaccctcgacctcccccctactccaactactggaagcgccgatccatcaggttctgatcgattcttctgccccgatccgcagcggcaagcggagatgaactgcgagacctgtcagctgaaagaactggagctggaactgacggagatcagggatgttctgcgctgtattttgcacaccatattcttccatagaaccctcagcctggttcgccccaaagatgttgactgtgatttcctcgatattacttatgtacaatgtggtctaccggaactagaaaaggaagttgacgaaaagatagaccagttcagtgcatgggtggagaaacacccaaaccgcagaagccagatctgcctctcctttttcgacgagaaacacagacaccctggttggtttgtcaacaaaacagagcgcatctattgggagcaatggttcatcaatttgcaagtcatgttccccaaaagatacagcaagtcaaacagctccaaagggctgacaaacatccaagcaaatgccgtggaggagaccagcacaaggcgtgctgcattggaggcgtcgattaacgaagtgctgttccagatcataaagttcgccaacgagaaaaaggaccacattcctgctatccctgacaggattttcaatcacgagatcatgatcccaaggtgaccccttttccttggacgtgttgacagctcggattctgtatttggatggaacacggacgtcattcgcagagttctgaatagcgggcacccatactcgctttaactgaagacgacatctcagtgggcgcccgtattcagtttattagcgtgctgccgccctgtttggaagacggctctgttaaccatcgtggtgaaccatataatatgcctaaggaaaaacctagttctgtgtacatcaccctgctcatctggcatgtacatactgtgttgggatcttgctcatcggtcaaacattcttaagttcgattaagtttataaataacaatattatgattctaaataagtttatcatgtaaaagtatttttcatgattgatacttattgcgaagcatctccgagtgagttaggtggttcgagtaacactccttaagtcttgaattcgaattttagactag

SEQ ID NO: 43947 - DNA, 1342 bp, Zea Mays
gattggttggtcttcgagtcggcttggactcttctcttcctcgccaactcctccgtggcgccgccgtcttgcctgcagctttttgagccttcgtcatatccacccttctctctgtctcggcatctgtttgagcagtacaaaccctatttttggaattttatagcattgtttcgtgatcagtcagttatatttaacatatgatctaattatcccaagcacgcttcctcgacttcctatctcgactctcccaagtcacaaccctcgacctcccccctactccaactactggaagcgccgatccatcaggttctgatcgattcttctgccccgatccgcagcggcaagcggagatgaactgcgagacctgtcagctgaaagaactggagctggaactgacggagatcagggatgttctgcgctgtattttgcacaccatattcttccatagaaccctcagcctggttcgccccaaagatgttgactgtgatttcctcgatattacttatgtacaatgtggtctaccggaactagaaaaggaagttgacgaaaagatagaccagttcagtgcatgggtggagaaacacccaaaccgcagaagccagacaccctggttggtttgtcaacaaaacagagcgcatctattgggagcaatggttcatcaatttgcaagtcatgttccccaaaagatacagcaagtcaaacagctccaaagggctgacaaacatccaagcaaatgccgtggaggagaccagcacaaggcgtgctgcattggaggcgtcgattaacgaagtgctgttccagatcataaagttcgccaacgagaaaaaggaccacattcctgctatccctgacaggattttcaatcacgagatcatgatcccaaggtgaccccttttccttggacgtgttgacagctcggattctgtatttggatggaacacggacgtcattcgcagagttctgaatagcgggcacccatactcgctttaactgaagacgacatctcagtgggcgcccgtattcagtttattagcgtgctgccgccctgtttggaagacggctctgttaaccatcgtggtgaaccatataatatgcctaaggaaaaacctagttctgtgtacatcaccctgctcatctggcatgtacatactgtgttgggatcttgctcatcggtcaaacattcttaagttcgattaagtttataaataacaatattatgattctaaataagtttatcatgtaaaagtatttttcatgattgatacttattgcgaagcatctccgagtgagttaggtggttcgagtaacactccttaagtcttgaattcgaattttagactag

SEQ ID NO: 43948 - DNA, 303 bp, Zea Mays
ctttggtcctccatatcacgtagtcaattaacgtacctaattgaaatgcaggatgcacatgaatgcatatagacaggaatagcatatgactaattatcgctataccgaagatgattaaatatttaaccgcaaggcatcacaacttttgtaagtaaatcctatatacctatgactcactggcacaataatcacgttcgcacactaactaattaaagcatcatgctatttgagctagctgataaagtattatcaaatacgaaagtgttctggaataatttaaatatttcatgtattggcgtgcac

SEQ ID NO: 43949 - DNA, 714 bp, Zea Mays
caatttcaaacagccatcgacccttgcataagcgattggtttcacctcatgagcatatcattgactatgttcaggctctagcctgctcagtcattatacatgtcatacctgcacaagattgcagcaacatgcatcaacatccatatagtggggggttagttaagtttccagggtgctgctgtgctgattgatgtttctagcttcaatttatacttattgtcaatttggcatgctcctgtgtatattttgccatggtccttgtacgcatccacttcaggatggatattgaaacatgtgttttatattctcctttcatgtatgattaacctttgttttgtttcccagcaggtgccttctctagagcacaaccaggtcaaaggagagagcttggatttgatcaagtacattgacagcaacttcgaaggtccactgttgccccaagttaagaagcgccttaggagaaatattcaagttattggcaatgaagagattgaaatgcatcccatttctgcttggaaagaagcaaagattttatggtgggtttgatggtgctgcaatgcagagaaggccattagtacatgtaattctccacatatttgcttaatcttgcaacccttcaggggattttgaaatctccttgcttgaagctacaagaacaggctgaaggttgttcccttctgcacaaacagcttttcagtattcctattggtacat

SEQ ID NO: 43950 - DNA, 1792 bp, Zea Mays
ctactttttatgagggactacaaacaatctgatttacagccgggctgcacccaatttttgttcggcctccgtcacaattgacaacagtaccccgtcgtccctctctataatctatctataaaacgctcgctttggctgctggctactcgcccgtgtctcttgcaacagctagctagccacaagctctcgatcgatgtcgtcgtcgtcgtcgtcgatggactgcgtcatctcctcctcaaaggacaacgagaaggagatcacgcctccaccgctcaacagcggggcggcggcgtggtggacgggggacacggtggcggtggtgacgggcgcgaaccgcggcatcgggcacgcgctggcggcgcacctggccgagcagggcctgtgcgtggtggtgacggcgcgggacgaggcgcgggggcaggccgccgcggccgcgctccgccacggcgcgggacccccgcggggcgccgtgcggttccgccgcctcgacgtcgccgacccggcatccatcgccgccttcgcgtcctggctgcgcgacgagctcggcggcctcgacatcctggtgaacaatgccgcggtgtcgttcaacgagatggacaccaactccgtggagcacgcggagacggtcctccggaccaacttctacggggccaagatgctcaccgaggcgctcctgccactgttccgccgctcgccggcgaccagcagccggatcctcaacgttagctcccagcttggtctgctcaacaaggtgaaggacccgcagctgcggagcatgctgctggacgaggcggcgctgacggagggcgacatcgaggggatggcgtcgcggttcctggcgcaggtggcggacggcacctggcgcggccgcgggtggccagaggtgtggacggactacgccgtctccaagctggcactcaacgcctactcccgcctgctggcctccaggctggccggccgcggggtcagcgtcaactgcttctgccccggcttcacgcgcacccacatgacgcggggcctcggcaaccgcaccgccgacgaggccggacgcgtcgccgcgggcctcgcgctgctcccgcccctccacctgcccaccggcaagttcttcaaatggcgcacgccgcagctctactccaagctctgagttgccacgcgcgttcacgtgcgggggtcgctgggttgggggttgctgcagcctgcatacagctgcacccggtcggtgcactgtgatacgcagatcatggtgaataccggcccccttttcttttttttttctttaattaggatgcatatgaacgtcttattcctcgcaaaaaaataataacgtacgtctctctccgcattttgctacatgcacatttttaggcgtaactctctcacaatgtccgacaacaataaatattatattttatattagccaaaagatctaaaaagtaataagttcaaaagaagcacgacatccttttttatagcttgttcgcgcactcgatttccttcagctagagagacggtactatatgggatagctcgctcgatagcccaacctccttcagctgtcgaggtggtactatgtgtgagtgttgtgctacatgcggtttcttgccgtgttggacttgggtcatttctcaaccgatttgtagggcaacgggccactaataggggtttaggtggttttcacggtctatctatgggggacgacccactagtaggggaggagaatagacctatgtgtgaagcgtatgatgcaggatgaccattgaaactggtgttttataataatagagactagtat

SEQ ID NO: 43951 - DNA, 1404 bp, Zea Mays
gtcaattgtaggcaaagcctatatggctttaagaaatggcgactggacttcgctcgcatactctctccatccttgtgaatgactgtcctggtgtcctcaacattgtaacaggagtctttgctcgcaggggctacaatatacagagccttgctgttggcccagctgagaaggaaggcatttcgcggattacaacagttgttcctggtactgttgaatccattgagaagttagttcagcagctttacaagcttattgatgtgcacgaagttcatgacattacccactcaccttttgctgaaagggaacttatgcttattaaggtttctgtcaacactgctgctcggaaggaaatcctagatattgctgaaatcttccgagcaaaacctgttgatgtttctgaccacacagtaacgcttcaggttggcatcctaacagtttgtgtgtttctcccagatttccatcggttcctttgcacactgcacagccacaagttatatcacattgcttaaatgtttattctgcttcatagtacccgtttgtggtaacagtaacaacatcatacccatgaagaaacactgaatgtttgatgccggtaccattttctcatgctgttttatctaactgctccaagctattagctgttgcaaaactcttgcataatggagggatcattgatgattgcagcttactggagatcttgacaagatggttgcactacaaaggttattggagccatatggcatctgtgaggtcgccagaactggacgagtagcactggtccgcgaatcgaaggtggactccaagtacctccgcggctactctcttccactgtagccttgcagtcgtgatgatgatggcaccatgaagagctcggctggttgtttatagagcagaccatctcgcgctgggttgtgttgtgcgattacaggacttgtttctttcatgtcgtgaactcccccggcctgcgtgtccaataacgcgtgttgaggctgcatgtgtattccaacgactgtcagaataagatgcatatcgtatctgtttacttcagtgaagagatgcatggatcgttcgaaatcaggttgcccacgtttcgtagtggaacatgtggagccgtggagaagaggaacacagattgcatataggatattagctgcctctatttcagcctctggttaaatgggacatatcagctgcgcatattaaatcgtatccatttattttatatctaaagcctgttctgtatatttttgcaaagaacaacttggagcaggatgaaagtggtacaggataatgatggaggggattctttgcaaaatatatagcaacagatgttagatccaagatgattgggcatgatttaatatatgcatcaaagtgttatgtgcatctgatatgatacatttt

SEQ ID NO: 43952 - DNA, 1140 bp, Zea Mays
agtcaattgtaggcaaagcctatatggctttaagaaatggcgactggacttcgctcgcatactctctccatccttgtgaatgactgtcctggtgtcctcaacattgtaacaggagtctttgctcgcaggggctacaatatacagagccttgctgttggcccagctgagaaggaaggcatttcgcggattacaacagttgttcctggtactgttgaatccattgagaagttagttcagcagctttacaagcttattgatgtgcacgaagttcatgacattacccactcaccttttgctgaaagggaacttatgcttattaaggtttctgtcaacactgctgctcggaaggaaatcctagatattgctgaaatcttccgagcaaaacctgttgatgtttctgaccacacagtaacgcttcagcttactggagatcttgacaagatggttgcactacaaaggttattggagccatatggcatctgtgaggtcgccagaactggacgagtagcactggtccgcgaatcgaaggtggactccaagtacctccgcggctactctcttccactgtagccttgcagtcgtgatgatgatggcaccatgaagagctcggctggttgtttatagagcagaccatctcgcgctgggttgtgttgtgcgattacaggacttgtttctttcatgtcgtgaactcccccggcctgcgtgtccaataacgcgtgttgaggctgcatgtgtattccaacgactgtcagaataagatgcatatcgtatctgtttacttcagtgaagagatgcatggatcgttcgaaatcaggttgcccacgtttcgtagtggaacatgtggagccgtggagaagaggaacacagattgcatataggatattagctgcctctatttcagcctctggttaaatgggacatatcagctgcgcatattaaatcgtatccatttattttatatctaaagcctgttctgtatatttttgcaaagaacaacttggagcaggatgaaagtggtacaggataatgatggaggggattctttgcaaaatatatagcaacagatgttagatccaagatgattgggcatgatttaatatatgcatcaaagtgttatgtgcatctgatatgatacatttt

SEQ ID NO: 43953 - DNA, 2392 bp, Zea Mays
gtaggcccgtcatttcggctgatggtccctgcataaaccctacggctaaacaatagccagcccaccaaccagcgaagcagcccaccactcctacccctccatccggccaccgagctagcacgacttgacgcccacactgccaaagtgccaagtgccactgcccctgccaccagcccaccaccagacccgccaccttcgcgctccacggcagcggcatgtccgtcgcctcctcccaccgcctgcgaccgtcgccgtcgggcccggcgcggcgcccgggatccgcggcgccgcgcgtagcgttctggccagccggtgcctcgcccccgtatcgcggccgctgcaccgtcgtggcggcggcggctgccgctggcgccggcggcgaggcatcttcggcccccgtggctgtgtcggctgtcgcccccgcgggcgctgccagggacaaggtgcggcgccacacgatttcggtgttcgtcggggacgagagcggcatgatcaaccggatcgcaggggtgttcgccaggagaggctacaacatcgagtcgctcgccgtggggctcaacaaggacaaggccctcttcaccattgtcgtctccgggaccgacagggtgctcaaccaagtcatcgagcagctcaataagcttgtcaacgtcctgagtgtggaagatctatctaaagaacctcaggttgaaagagagctgatgcttataaaactaaatgttgaacctgatcagcgtcctgaggtcatggttttagttgatattttcagagcaaaagttgttgatatatctgagaaaacacttaccatggaggtagctggagatcctggcaaaattgctgcagtgcagaggaatctatggaaatttggaatcaaagaaatttgcaggacaggaaaaattgctttgagacgtgaaaggattggtgcaacagcccgtttctggcgattttctgctgcttcttacccagacctgatagatgcgttgccgaaaaatccacttacatctgtaaataggacagttaatggcagttttggtcaaccatccaatgctgggggtgatgtttatcctgtggaatcttacgagagcttatcagtgaaccatgtacttgatgctcattggggtgttctggatgatgatgatgcgactggacttcgctcgcatactctctccatccttgtgaatgactgtcctggtgtcctcaacattgtaacaggagtctttgctcgcaggggctacaatatacagagccttgctgttggcccagctgagaaggaaggcatttcgcggattacaacagttgttcctggtactgttgaatccattgagaagttagttcagcagctttacaagcttattgatgtgcacgaagttcatgacattacccactcaccttttgctgaaagggaacttatgcttattaaggtttctgtcaacactgctgctcggaaggaaatcctagatattgctgaaatcttccgagcaaaacctgttgatgtttctgaccacacagtaacgcttcagtacccgtttgtggtaacagtaacaacatcatacccatgaagaaacactgaatgtttgatgccggtaccattttctcatgctgttttatctaactgctccaagctattagctgttgcaaaactcttgcataatggagggatcattgatgattgcagcttactggagatcttgacaagatggttgcactacaaaggttattggagccatatggcatctgtgaggtcgccagaactggacgagtagcactggtccgcgaatcgaaggtggactccaagtacctccgcggctactctcttccactgtagccttgcagtcgtgatgatgatggcaccatgaagagctcggctggttgtttatagagcagaccatctcgcgctgggttgtgttgtgcgattacaggacttgtttctttcatgtcgtgaactcccccggcctgcgtgtccaataacgcgtgttgaggctgcatgtgtattccaacgactgtcagaataagatgcatatcgtatctgtttacttcagtgaagagatgcatggatcgttcgaaatcaggttgcccacgtttcgtagtggaacatgtggagccgtggagaagaggaacacagattgcatataggatattagctgcctctatttcagcctctggttaaatgggacatatcagctgcgcatattaaatcgtatccatttattttatatctaaagcctgttctgtatatttttgcaaagaacaacttggagcaggatgaaagtggtacaggataatgatggaggggattctttgcaaaatatatagcaacagatgttagatccaagatgattgggcatgatttaatatatgcatcaaagtgttatgtgcatctgatatgatacatttt

SEQ ID NO: 43954 - DNA, 2707 bp, Zea Mays
atcacaatgccacgccggatgccaagtctctcaaatctggaatcctttcacgccgccactctcccctttttccttctctcttcgtcgttgtggctcctgccttcctgcctcggcgcatcgactcgcggagagggacagcacagcgcctcctccccatcctttctccattcccagatcgaaggtccatgtgagtattgcgtgaatcttgcaagttttggttccgtcgcggtttctggttttcttgctgattggttgcctgaatctttgccaagacctgaaattcgagagatgtaggaagtttagaacacgagtcaggtaccaagcaccgagtatttgcaagatccgcaccggttccaagctagaattgttccacctattgatcctgtataataccgtttcgtagttttttcctccgttgctgaatcttctccattaatttggtgtgcagaaaaaaccatccttttgcatctgattgagcactgtctttgtgcaagagaacaatttagttgtacatacaaacaaaaagaagtgggagtatttttcagagtttattagaagagactgtttcgaggacccaggtcagagaaaggcgagaagctttagcagcggcaatggtctggtcaatggacccgcaggtgaccgtccacggcgactgggtgtcagccgtggtgccgctgatgaagctgctgtgcctggcggtgatcggcctgctcctcgccaacccgcgggtccaggtcgtgcccagggccaccttcaagctcctgagcaagctcgtcttcgcgctcttcctcccctgcctcatcttcgtccacctcggcaagtcggtcaccatagacaacgtcctgcactggtggttcatccccgtcaacgtgctcatcagcactgccatcgggtgcgcccttgggtacatcgtggccctgatctgccgcccgccgccgcacctgttccggtttacggtgatcatgaccgggttcggtaacacggggaacctcccgatcgcgatcatcgggtcagtctgccacaccaacgaccaccccttcggccctgggtgcgacaccatgggcatcgcctatgtctcgttcgcgcagtgggttgcggtcattcttgtgtacactctggtctaccacatgatggagccaccgatgcagttctacgagatcgtcggggaagggaatgagatacagcaggaacccgagctggtcagcaactacagtaggtccctgcttcatgaggcggagtggccagggatggtcgacaaggaaactgagcattcgaagacaccgttcatcgcgagagttttcatgagcatttcaggttcctcacagaacacgttccctgacatcgatttcaccgaagaaggaacttctgcagctggaccaagcagtcctaagtcgctccgatgtctggcagagccaagagtggtcaggaggattagggttgtcgccgagaagactccgatccagcacgtccttcagcccccgacgatcgcctctttgcttgccattaccatcggcatggttcctgtcctgaaagattttgttttcggggctgatgcgccgctctcgttcttcaccgacagtttggagatcctagccgctgctgtggttccgtcggtgatgttgattctcggaggcatgctcgcggaaggcccaaaagacaacgccttgggcatgaggactatcatcggtatcattgtggccaggctcttggttctcccatgcattggcatcggtgttgtgaccctggcagacaggttgcatctgctcgtggaggaaaaccatatgtaccgctttgtgctctccctgcagtactccaccccgagtgctatcctgcttggagcgatcgccagtctcagaggctatggcgtcaaggaagcatccgcccttctgttctggcagcatatttgtgcggtgttctctctttcactctacctggttgtatacttcaagttgttttctttcatatgaagacaatggccatccatccatccatccatccagttctggcatatatacgtagctatcaagtaggatgctagaagaatgggttttcggcatcggctcctatcagtcagaagtgtttataattcggtagttatttaagtttcagttgtgtgtgttgtttgtgaacaggagatacagacagttattgtctgttcatttcggtcgatatattgatgtgtattttcatgatgctattgttgtatgcaaatcattacctggataaaattagtagaccaggatagactgatagtagtgaataacatggttgcctgatggtcaatatatgaagatgatcagtgttcagtcttctcgtggaagacccaaatcaggcgaccttgctacatgacatcaaggatgtgattcatttgtgtcaattgactttcagcattcctcctagactgtgcattcagatggattacccctttgccccgaaggagcaaataaccatttgctttggcatgggaaattctctctgtatgttcttttgattgaaggtttgggctgaggctatctttaaggctgtctcgtcgtcagagtgaagtttgaaataaaagatgagataaaagatagtatgagtaaactgctagagatagcctaacaatttatatggatcttcatgtgctgctaacatatgattttcaaaggttgttatggaacaatgttcttcctttttcgttttgtgaatgcacacatcgaacattgac

SEQ ID NO: 43955 - DNA, 2519 bp, Zea Mays
ctcgagaggaaaaaatgaaggaaaaaaaaaatcctcagatcacatcagacacacctctgcctgggccctacggctccgtctcgatctcgacaagtttatcacaatgccacgccggatgccaagtctctcaaatctggaatcctttcacgccgccactctcccctttttccttctctcttcgtcgttgtggctcctgccttcctgcctcggcgcatcgactcgcggagagggacagcacagcgcctcctccccatcctttctccattcccagatcgaaggtccataaaaaaccatccttttgcatctgattgagcactgtctttgtgcaagagaacaatttagttgtacatacaaacaaaaagaagtgggagtatttttcagagtttattagaagagactgtttcgaggacccaggtcagagaaaggcgagaagctttagcagcggcaatggtctggtcaatggacccgcaggtgaccgtccacggcgactgggtgtcagccgtggtgccgctgatgaagctgctgtgcctggcggtgatcggcctgctcctcgccaacccgcgggtccaggtcgtgcccagggccaccttcaagctcctgagcaagctcgtcttcgcgctcttcctcccctgcctcatcttcgtccacctcggcaagtcggtcaccatagacaacgtcctgcactggtggttcatccccgtcaacgtgctcatcagcactgccatcgggtgcgcccttgggtacatcgtggccctgatctgccgcccgccgccgcacctgttccggtttacggtgatcatgaccgggttcggtaacacggggaacctcccgatcgcgatcatcgggtcagtctgccacaccaacgaccaccccttcggccctgggtgcgacaccatgggcatcgcctatgtctcgttcgcgcagtgggttgcggtcattcttgtgtacactctggtctaccacatgatggagccaccgatgcagttctacgagatcgtcggggaagggaatgagatacagcaggaacccgagctggtcagcaactacagtaggtccctgcttcatgaggcggagtggccagggatggtcgacaaggaaactgagcattcgaagacaccgttcatcgcgagagttttcatgagcatttcaggttcctcacagaacacgttccctgacatcgatttcaccgaagaaggaacttctgcagctggaccaagcagtcctaagtcgctccgatgtctggcagagccaagagtggtcaggaggattagggttgtcgccgagaagactccgatccagcacgtccttcagcccccgacgatcgcctctttgcttgccattaccatcggcatggttcctgtcctgaaagattttgttttcggggctgatgcgccgctctcgttcttcaccgacagtttggagatcctagccgctgctgtggttccgtcggtgatgttgattctcggaggcatgctcgcggaaggcccaaaagacaacgccttgggcatgaggactatcatcggtatcattgtggccaggctcttggttctcccatgcattggcatcggtgttgtgaccctggcagacaggttgcatctgctcgtggaggaaaaccatatgtaccgctttgtgctctccctgcagtactccaccccgagtgctatcctgcttggagcgatcgccagtctcagaggctatggcgtcaaggaagcatccgcccttctgttctggcagcatatttgtgcggtgttctctctttcactctacctggttgtatacttcaagttgttttctttcatatgaagacaatggccatccatccatccatccatccagttctggcatatatacgtagctatcaagtaggatgctagaagaatgggttttcggcatcggctcctatcagtcagaagtgtttataattcggtagttatttaagtttcagttgtgtgtgttgtttgtgaacaggagatacagacagttattgtctgttcatttcggtcgatatattgatgtgtattttcatgatgctattgttgtatgcaaatcattacctggataaaattagtagaccaggatagactgatagtagtgaataacatggttgcctgatggtcaatatatgaagatgatcagtgttcagtcttctcgtggaagacccaaatcaggcgaccttgctacatgacatcaaggatgtgattcatttgtgtcaattgactttcagcattcctcctagactgtgcattcaggagcaaataaccatttgctttggcatgggaaattctctctgtatgttcttttgattgaaggtttgggctgaggctatctttaaggctgtctcgtcgtcagagtgaagtttgaaataaaagatgagataaaagatagtatgagtaaactgctagagatagcctaacaatttatatggatcttcatgtgctgctaacatatgattttcaaaggttgttatggaacaatgttcttcctttttcgttttgtgaatgcacacatcgaacattgac

SEQ ID NO: 43956 - DNA, 1804 bp, Zea Mays
ctcaaagaaaacattgaatagttatggttgtacgaatgaagcaatttaaccagagatataaaatatcaacaatggtaaccataccattttacacccatgatcaatgacccacttgaaggttgtctgctctcctagagcaggtgtggcattaaacttcaagtccatacctggatacataatcggtctgaaaacaatgacacgggcaatattaagaaagaccaaaacaagagaaaaacaagtagtgaaagctcaaacaaaaagacaacaaaaagcgtgggacgaagagaacaaaaacttggactgagaaagtacgtaaaacaaaaaataagcagtcatccgaaggataagattcaccctcctctatctgctggaatatgcttgacaagctttgcaagatcatatgacttgagccgacatacctgaacagcagttgcgctaaggaaggaattcgacagcgctccaggcctaccatccacaagttatacaagcaagattgctgatatgttcaagcaggtagaaaacagaggagggggtaggagcgtcgtttatcttgtgaatgaggcagatgcactcggccctatctggaaagcaaacataaccaaacataagcggaacgcgaagaaaagacatgacagacgggaacaaactgaggctagctagctgtggcttaccgacgaatcgggatgtgcctccagcagcaaacaccattataacatatgatctggcgtgtagcagggtagaagggaagaaaataattggactatagcaatttgtgaaaatcccgtcctcaatatcctaatacgcaatccctagaccactacacaatcctagataaaaggttgagataattcagttcaaaaacagaacagaacatactaagcggtgatcataccatccattagactatgagcaccagagaatgaatacccaagcaatcagaatgtacaacaggtcatcatcattgtatgcatgtatgggagtgtaattgtgttaacttgaacttaactgatgtgcttattagaggacgattagatacacaacactttaagaaatattgacagcaagtggtttagacaacaaaacagtagcaatctttgcaaaggtcgatagagtaggcaacaagtaattatgatacagtagtaggcatattcgtaatttgtccagataatacagcgatcaaataataaaatacagtgatcaaataaccataatacgatcatcaaataatgtagtgtacctggtgaaaataaaacctcctcaaaggagacataatacaagtctcaaaataccaatcgattcatcaacatcagcataaccacttgcatattaggagtacttaccagtgttaggtgttctacgagacctggacgtattattgtgcctagaaaataaaacaatcagtttgctggcatacatacacaaaagaataggcaagcaaaataggggtgcccaaaattcaccagcaagggcgccacttcgctgatgtgttggatctaaatctcccctgttttacatgtgttgatgctaggaaaagaaatccaccgcgcaaactcaacggttggagcaacgattagcaagcagtgacaaatctaggatagatcattcatggctccacctcctggccgtcgacgccgaacatggtgaggggtggcgggccctgtggcttctcctagggcgtggaggaggtagcaacgtgcctgtctacgggggtagcgggcaggggaggagggacaggcgaaggctaggaaggagagacgtccagcggccaagaggaggtagcgaccgtgtcaccagtctggttggc

SEQ ID NO: 43957 - DNA, 1169 bp, Zea Mays
ttatctcctggttgctgttgattaagatgatactaagttaaacatgttcataataaaatttgtttgtctgtcaatcaagaaagtgtatgggttgctaggaaaccaccagggtttgccttcattgacttcgatgaccgcagggatgcacaagatgccattcgcgatttggatggtaagaatggttggagggttgagctgtcaaccaaagatggtggtggccgtggccgagaccgtaatggttctgatatgaagtgctatgagtgtggtgaagttggccactttgcacgtgaatgtcgcttacggattggttcgggagggctgggtagtggaaggcgtcgcagccgaagtcctagatatcgcagccggagccgaagtcgcagccggagcccaagacatcgaaggagcccaagctatggcagaaggagctacagcccacgagatcgttctcctaggaggcgaagttacagcaggtcgccgccactgccaccaccgcctcctagaaataacagcatgtcaccacggggagcccgagaaatgagcagatcgtcaccaccacctcccaaaaataacagcagttcaccacgggaagcccgagaaatgagcagatcgccaccaccacctgccaaaaataaccgcagttcaccacgggaagcccgagaaatgagcagatcgccgccgccaccacctcccagaaataacagcaggtcaccaccgggagctcgagatgtgagcaggtcgccgccaccacctcctgatgccagaagaagctatagcagatccccagaacagcagccccagcacgagtccccatatgccaatgacgcctgagaatatttagctgctcaaagatgctggaaaatgctaaggggcccagcatgttttgcccatgcgcgtcggtacaacttataggatccagtctgagattttgctcgtgttttgggtttcccttggacacaccgctgctgataccattgtagagggaggagcataacgtttccgtttcgagtattgactttgggcacttatagctgtcaagacatgacctggttcttgttagatttatatcactagattgcttttgaattcggacgaagtgttaatcgtgggctatgttgagatatttgtctaccttttcaggacgctttcgaagaaacattttcctacttgct

SEQ ID NO: 43958 - DNA, 1250 bp, Zea Mays
atcccccattgcttctggttcctaggccagcgcgcctcgtttttcttctccgttttggtctaattcgctgaactcatggctcgcgtcttcgttgggaacctggatccgcgtgtcacggcgcgggagattgaggacgagttccgcacgtttggggttctgaagagtgtatgggttgctaggaaaccaccagggtttgccttcattgacttcgatgaccgcagggatgcacaagatgccattcgcgatttggatggtaagaatggttggagggttgagctgtcaaccaaagatggtggtggccgtggccgagaccgtaatggttctgatatgaagtgctatgagtgtggtgaagttggccactttgcacgtgaatgtcgcttacggattggttcgggagggctgggtagtggaaggcgtcgcagccgaagtcctagatatcgcagccggagccgaagtcgcagccggagcccaagacatcgaaggagcccaagctatggcagaaggagctacagcccacgagatcgttctcctaggaggcgaagttacagcaggtcgccgccactgccaccaccgcctcctagaaataacagcatgtcaccacggggagcccgagaaatgagcagatcgtcaccaccacctcccaaaaataacagcagttcaccacgggaagcccgagaaatgagcagatcgccaccaccacctgccaaaaataaccgcagttcaccacgggaagcccgagaaatgagcagatcgccgccgccaccacctcccagaaataacagcaggtcaccaccgggagctcgagatgtgagcaggtcgccgccaccacctcctgatgccagaagaagctatagcagatccccagaacagcagccccagcacgagtccccatatgccaatgacgcctgagaatatttagctgctcaaagatgctggaaaatgctaaggggcccagcatgttttgcccatgcgcgtcggtacaacttataggatccagtctgagattttgctcgtgttttgggtttcccttggacacaccgctgctgataccattgtagagggaggagcataacgtttccgtttcgagtattgactttgggcacttatagctgtcaagacatgacctggttcttgttagatttatatcactagattgcttttgaattcggacgaagtgttaatcgtgggctatgttgagatatttgtctaccttttcaggacgctttcgaagaaacattttcctacttgct

SEQ ID NO: 43959 - DNA, 1321 bp, Zea Mays
ctttccgcccaaaacacttcccagccctccacgcaccccgctgccgcggctcgaacataaaccctagagccgccggcccggtcgcgctagcgacacaaatctcaaatcacccggagagaactcgctcgcgaaggcaagctgaactcatggctcgcgtcttcgttgggaacctggatccgcgtgtcacggcgcgggagattgaggacgagttccgcacgtttggggttctgaagagtgtatgggttgctaggaaaccaccagggtttgccttcattgacttcgatgaccgcagggatgcacaagatgccattcgcgatttggatggtaagaatggttggagggttgagctgtcaaccaaagatggtggtggccgtggccgagaccgtaatggttctgatatgaagtgctatgagtgtggtgaagttggccactttgcacgtgaatgtcgcttacggattggttcgggagggctgggtagtggaaggcgtcgcagccgaagtcctagatatcgcagccggagccgaagtcgcagccggagcccaagacatcgaaggagcccaagctatggcagaaggagctacagcccacgagatcgttctcctaggaggcgaagttacagcaggtcgccgccactgccaccaccgcctcctagaaataacagcatgtcaccacggggagcccgagaaatgagcagatcgtcaccaccacctcccaaaaataacagcagttcaccacgggaagcccgagaaatgagcagatcgccaccaccacctgccaaaaataaccgcagttcaccacgggaagcccgagaaatgagcagatcgccgccgccaccacctcccagaaataacagcaggtcaccaccgggagctcgagatgtgagcaggtcgccgccaccacctcctgatgccagaagaagctatagcagatccccagaacagcagccccagcacgagtccccatatgccaatgacgcctgagaatatttagctgctcaaagatgctggaaaatgctaaggggcccagcatgttttgcccatgcgcgtcggtacaacttataggatccagtctgagattttgctcgtgttttgggtttcccttggacacaccgctgctgataccattgtagagggaggagcataacgtttccgtttcgagtattgactttgggcacttatagctgtcaagacatgacctggttcttgttagatttatatcactagattgcttttgaattcggacgaagtgttaatcgtgggctatgttgagatatttgtctaccttttcaggacgctttcgaagaaacattttcctacttgct

SEQ ID NO: 43960 - DNA, 616 bp, Zea Mays
tctatttttttagggcaccacaaggcaaaagaagctcaggtgagaatgttgtgatggttgatccactggaagctaagcgcctagctgctaaacaaatgcaagaaattagggccaaagaaaagctgaagaggcgccgtcaagcagaagcgatcaacggggcattggcagtgataggactcacggctggattgctagtggaggctcagacaggaaaggacatcttagggcagctagctggatatctgacggctatttctagtttatttgggcaataacactggaccatggttggagatttatttttcacgttccacggccaggagaggtcttatctgaatcttatttgatggatccacccaatttttttgggagctgatcccagatggatgtggaatagcgcacccagacttgtatgttgatcaagcacgatagcatgggctgaacattagtatttctatgtagcacatcaatttctgacgatagcgcctgctaaagagcagttctattcatactcaaatgtgaaatgttgaagtcttcgagaaatcttttccttcttctgcccaaaccattaagctgatggcacattggcacctgcagtggattgatgagtctcgct

SEQ ID NO: 43961 - DNA, 3942 bp, Zea Mays
acctcttaccgctcctccagccgcagcagcagcgacacgcaccgccggctcgacacggcctttacgcccagctcgccgcaggcgcgggcgatggtggtctgcgtctgggaccggacgaagcggacgcgattgggcgtgggcacggaggccagcgtgtcgcggagcgtcacgctgttgatggcgttggcgttgctggggaagtcgggcgtgctggagcgagagcgtggcgtcgcactcgcacaccaggagctcccacaccttcttgccgcgcgcgtccaggatgggccgcgaccgcgagcagaagtccagctcccacttccggatcgacgccgggacagtcaggcagcgggcgggagtgagagcgatggccgtcgcggagtgtggtgtggtgatctcaaatcttccgcttgggccgtgggccggcccaagaccgtcaagaagccctacctaaaacggtgaggcaaacggataacgacgacctgatttgggaaagaaagcaaaagaaacgaaactagagggtagaacacgacggtgtccggcgtccgtaaaaaaggaggagaggaggccagggaggcgggggcagcaagaatggcgtgctccaccggtctctgcttcttggcgtcgattcctcctctctcagcctcttgttcttctggctcctcctgcttcctcatgatcaagcgtgtgtcctctgctccgtccttgtccaggtatggtcttgcttctttgttgccccgcctcctggccaattcgttgaagctttcttgaaatcccaaattaagttgctcgatgatgttaaattttgtttttttccttgttagacgagaattttgcattgttgttcctgaagctagccaacacgaaaactgtttggtgttgatttctgttctctgcagtcttatgaacttaccttaaactgctataagtattaaagattattttgttggaactccacattctggtgtatctggtttcctttcttaccatatgtagactagttactaatttcaagttcaaaccctgttcttcagttacaaacccttggaaaaaaaaattcgtttcgactttttgttcaactgcaaagtgtttccacttcctcatttggggttgcaagcagctaggagacccgtacttttgaattaatatcagttgattttacttagttcttgtttgtttgggattataatccactcagattatataatctaacttattttaaacaaaacatcagttcaaaataagttagattatatttttttaacagaaaggggattccccctatttcattaagaaataggaccacagttttaacaacattcaaacgaaaaaactacttattacaccacttagctcatagaactaaaagagcataagcaagccatccaggcctaaggtggatcactacagtttctgacaaaaaagtcataccgcacaaccactgcaaccactaccaaccagtttttggcaaggccgaccacacacaaagccccagcgaccagacaaaagcaacacattgtgaaacaaataccctagaaccaaaagggccttcgagagccaggcaagccacacatctaaaacaaacagacatcacgctcaacgttagttgcacagtcttttatccatcggcgcccagccaaaattcctgttgaagacctccttaaccattcttctgagaagggagcttccttccagcagcatctttcttgaagtttctttctgaagaatcgcccaagcatccaaccaagagcagcacagaaacacaaggttaacagcatttaaagaggaaatgttgttgaaacagaaatcatttctatgcttccacaacgaccagagaactgcactgcaaccaacagtgatcaaatttttttcatgacctttgaatttgcataaccatctcccaaacatatcattagcatttttgggaagagttagagacggacaggacatctgaataattttccaagaaaaagatgcaacctggcaattataaaagatatggctggttgtttcaagacaaccacaccactcacaatttacattcccttgccagtttttctttctcagattttccttggataagattttatcatttatgaccagtcagaggaaaactttaattctctgaggtatttttgccttccagatgaaccaacaaggatccctgttcatatttactttaaagtttctataagatgatttcactgaaaatcctttcttatcaagcaaccaacatggtttatcatttctgtctataagacagaaatctgcacagttattttttaaatcatccaacagattgaccccagctccaaataatcttcttctaaagattaaggagttacagttgtctcttaaggcccaattcacatttatctctttattaagagataactcaaaaagtcttttgtatctcatggataaaggttcatcaccacaccacttatccaaccaaaaactagtagagacaccatttccaatttccatttttctgtttttacaatattcctgcttacagtccatgaggcctcgccaaaattgagagtctccttgtttttttataatcctaaacaaacatgctcttagtttactaataatagctaattctggttttgattagtgacatcaatagtactcgcattacaactttactgacctctgagttatattacttttctctcatagatggacgatccaatacaagcaattgggacatacaatatatcggagaagccacgttctggcctttgctagtgcagatgcaccacaaggcaaaagaagctcaggtgagaatgttgtgatggttgatccactggaagctaagcgcctagctgctaaacaaatgcaagaaattagggccaaagaaaagctgaaggtgcattgttgctgtattggagtgtatcattccttagactaaatcaaataatcaatcatatatgctaatagatggaaccttcgtagtaaggaaaagtggaaaacatataccttttgtttgggccaattgttggtgctgaatcgttgtttcagaaaactggaaacagaactaggcttttccctgttcatgctgtcctgcaatatgagaacgagaaacaccattgtagtatttgtttggtcgtaattttgtgttccggagctgaatcggaacggttcctaggtgtcaaatgcaccctaaattaaaaaaatctacctgtggtggaaattatagctcataagagagatgctgaaattcatttagtgaaacatatatgtttattttattatttcactaatgtatggtctccactttctgttaacaaatagttatttaatcatccattaattggtgtctgtttgtcctggagaacatcatctgctgcactcccctctgaatcccaatatcagtctatattatatattgatgcttcattgtgttttcttactcttcaaatttgatccgaatcactggtctgttgtgtagaggcgccgtcaagcagaagcgatcaacggggcattggcagtgataggactcacggctggattgctagtggaggctcagacaggaaaggacatcttagggcagctagctggatatctgacggctatttctagtttatttgggcaataacactggaccatggttggagatttatttttcacgttccacggccaggagaggtcttatctgaatcttatttgatggatccacccaatttttttgggagctgatcccagatggatgtggaatagcgcacccagacttgtatgttgatcaagcacgatagcatgggctgaacattagtatttctatgtagcacatcaatttctgacgatagcgcctgctaaagagcagttctattcatactcaaatgtgaaatgttgaagtcttcgagaaatcttttccttcttctgcccaaaccattaagctgatggcacattggcacctgcagtggattgatgagtctcgct

SEQ ID NO: 43962 - DNA, 1063 bp, Zea Mays
gcgcgccctgcgcgcgatataaaattccattctaaattcttaaattttacttagatattatatataatctaattttgtattcttaagacttgtcaattgactaatctaaaatagatcaaaccagtgtggtcggaaggagagctacaatatgtaacccataagacgttttttatttaagaaatactaaagaattacctaattgtaatttacaaaattgataagaggcactactctgtatgcaaacgaacattttggaaaatgatagcttctcatgcacaacaatacgggttattaaacaatcggcatcgcgcaacattattaatagtccacataaggttaagagtcgtctacagagtaaaaatctagactacaaatttaatatgtatggaggagaatttctatttatgacagataagaatggtggtagggatgcatcaatgtgacatggtttaaagtagcagaatacatgccgccaccaacagggaagatgagttattggtgttgcttcatccatccaatgcaaaccataagaagctcccaaccccacctcccaagaggcacctgggaattaacatggttgatgggaggaccaagctagtagtgtacacgctttgctttcgcgaagccgtcgaggcgccggagccggccgttagcggcgacagcgccgcgcaccaggtcctacacagttgtggcacgcgcgacatccaggccgaccactgcctcgaccgtggcgcagcgcgtgcgggcgtagcccgagattgtcaccgggtgcgtctggatccgagactacgctggagcatggatttgagacgagccgcctcggacgaggacgggcaggtcgcgacatcgtcgacgtcgtgggtgagaaaagtaagttggtgacggagggttcacctgttgcttgttttgttggtgtgtggcgctgaagaagcacggcagagggggggcggagttgaaggaggagtaaggcgcggtggagaggtgggtggtgccgaagaagcgtgagggaggaggggaacccggggccggacttggaggaggagcagggcgcgttggaggagtc

SEQ ID NO: 43963 - DNA, 663 bp, Zea Mays
gctgattgtaatttatataatagtcttgtttcatcctaacttcttactgtattatccatttcaccatctagcatctacaaaccttaacaaactcttcagatcgagaaaaaaactaatctttcttactctgccatgattcatgaagtccagtctttgttgtggaaattgagataaaaacagcacctgctgacttccgcttccctacaacaaaccaaacaaggcattgttttactcgctatgtcgagtaccacaggtgtttgaatgccaaaggggatgatgctggtgtttgcgaaaaatttgccaagtactacaggtccctttgccctggagaatgggttgagaaatggaacgagcagagggagcatgggacgtttccaggacctctctgaatgtaccgcccgagacctccagttggaccagtcaacaagttggccaggcagtcctactgttccattctgcattcctacttccagaatcgtaaatgccttttgtcccttgctcttcaaccagtcaccacaaaactgttagtgatgcctctcgtatgcagctctaataatttggctacagttgccccacatgcagccttgttttgtgtgtggactgtggacctcattttgtaaacgtctgaatggacttgcattttctttctatgtataaaaaaaa

SEQ ID NO: 43964 - DNA, 582 bp, Zea Mays
atcaattctgaatcataacaacactgtgttcaaacatttgatcggcatatttccagaaatcagtggaacggaacgcatcgtagattgagataaaaacagcacctgctgacttccgcttccctacaacaaaccaaacaaggcattgttttactcgctatgtcgagtaccacaggtgtttgaatgccaaaggggatgatgctggtgtttgcgaaaaatttgccaagtactacaggtccctttgccctggagaatgggttgagaaatggaacgagcagagggagcatgggacgtttccaggacctctctgaatgtaccgcccgagacctccagttggaccagtcaacaagttggccaggcagtcctactgttccattctgcattcctacttccagaatcgtaaatgccttttgtcccttgctcttcaaccagtcaccacaaaactgttagtgatgcctctcgtatgcagctctaataatttggctacagttgccccacatgcagccttgttttgtgtgtggactgtggacctcattttgtaaacgtctgaatggacttgcattttctttctatgtataaaaaaaa

SEQ ID NO: 43965 - DNA, 575 bp, Zea Mays
gagacccttccgctccgtctgctggttctcgttgcggctggcgctcgttactacggtttaggtttggccttgcgtgcccgacgtcagggcgccgccgattgagataaaaacagcacctgctgacttccgcttccctacaacaaaccaaacaaggcattgttttactcgctatgtcgagtaccacaggtgtttgaatgccaaaggggatgatgctggtgtttgcgaaaaatttgccaagtactacaggtccctttgccctggagaatggagggagcatgggacgtttccaggacctctctgaatgtaccgcccgagacctccagttggaccagtcaacaagttggccaggcagtcctactgttccattctgcattcctacttccagaatcgtaaatgccttttgtcccttgctcttcaaccagtcaccacaaaactgttagtgatgcctctcgtatgcagctctaataatttggctacagttgccccacatgcagccttgttttgtgtgtggactgtggacctcattttgtaaacgtctgaatggacttgcattttctttctatgtataaaaaaaa

SEQ ID NO: 43966 - DNA, 596 bp, Zea Mays
gagacccttccgctccgtctgctggttctcgttgcggctggcgctcgttactacggtttaggtttggccttgcgtgcccgacgtcagggcgccgccgattgagataaaaacagcacctgctgacttccgcttccctacaacaaaccaaacaaggcattgttttactcgctatgtcgagtaccacaggtgtttgaatgccaaaggggatgatgctggtgtttgcgaaaaatttgccaagtactacaggtccctttgccctggagaatgggttgagaaatggaacgagcagagggagcatgggacgtttccaggacctctctgaatgtaccgcccgagacctccagttggaccagtcaacaagttggccaggcagtcctactgttccattctgcattcctacttccagaatcgtaaatgccttttgtcccttgctcttcaaccagtcaccacaaaactgttagtgatgcctctcgtatgcagctctaataatttggctacagttgccccacatgcagccttgttttgtgtgtggactgtggacctcattttgtaaacgtctgaatggacttgcattttctttctatgtataaaaaaaa

SEQ ID NO: 43967 - DNA, 580 bp, Zea Mays
gaccaacagagaactcagttggaccaaagcacctcagcaccctcttaaccaggtcaccataagagaaagagcccgggttaaagcccatgacctcgtagcttgcatagctgaagccgtcctctggggtcacatgaatggtcgacaaagcagggccatgaacagcattcatggagtagccacagggctcgaagtcgaagtcacagatctccatctctgggatgatgtccgagataccagagagcttggtcatctccttggcgcacagcgagtaaccatcagcagtggtcttgaagaagacagaagctttcttcttgtccagcccagtcatgcacatctctagagtaacaacaggctcctcagggtgctcagcggcgtagtagacgtgccacttctgcccgggcttcgcagagtcaccaatcacataagcattgccaccggacttgaggccaccgaagaagcgattcaggaaggcaacctcgtcagcgaagttcttgtgtggggaaggctgtgcttcagggaatatgaacgttccacgggagtatttaactgcagcgagtggcaacaggagctcttcagcaag

SEQ ID NO: 43968 - DNA, 1396 bp, Zea Mays
agcagaccgccctcggccctccacgaactgtggcactgcgcccacagcagaccatattgacaaagcgatgtggatggggtgctgttgcgttggagccattggagagaggtgattttgtaatcgagtatgttggtgaagtcattgatgatgcgacatgtgaacaaaggctttgggatataagacggcgtggtgacaaaaacttctacatgtgtgaaatcagcaaagattttacaatagatgcgacatttaaaggcaatgtgtcacgttttctaaatcacagttgtgagcccaactgtaaactcgaaaaatggcaggttgatggtgagacaagagttggtgtctttgcctctcgttccatcgaagttggagagcccttaacttatgattacaggtttgtgcattttggagagaaagtgaagtgccattgcgaagcagtgaactgccagggatacctgggcagccaaataaagaacccaattcaaagcattcttgccactgtagcaccgcaagtgcagttgcgagagtattcgcccatgcaccacgaagctccaagattgaagccaataaatcacttgttaccctggaccaactgtatagaggtctcttttaacctgagaagcaaaaggaaaattgaccggctatgctgggcccgcaagaagaagagaacatccctcgtgccatcttcaacaagcatgccagcatcgccgagtgaagttcctgccgcggatttctaactgcccttcgttgaagagcaagcctgccctgtataataatttcatggtacattctttacatgcattggttggaaacgattctttcacattgctcatcaatggtgttgtaacctgcaacattctttatttggtttcatagggcattcagtcagtttacgggtggtagtttgtcggaacatgtacccaatttttctgatgaaacaaatgtttgagcttcatgtaatgttggctgctgttttttttatgcgagataatgttatgaaactggatagtccctgtaaacatggcttaaaacatgacagaattattttcttttaggagaatgctaccccttttattttatgtacaaggaattgataaaaagagcagaggtcctagcggcctaggcgtgcgagagcctagagcgcatatctaatcatcagtttaatataaaggcgattaacgaagacacggaacttactgtcctgtcttgattgagttctgaattgcatccctctggtcgccaacaagggcaaagtttatgttggcaggtcgcattcgcatatgctgagctcgttcttcgtcagttttgtccagttcctgacccaagaaaattccactccctaggccggcacggcactagggagcacgaagaaaaaaaatcgtcttgcccagcaggtgat

SEQ ID NO: 43969 - DNA, 1594 bp, Zea Mays
cttaagcatacgttttactaaatgaagatctctatgtttctgcagttgtgtagttagatacaaatgtatatctgataaaaaagaagcgcactggtgttcgcgtggatattgggtgcacaaactgcagggctgattctacttgcaaagaagactgtgaatgcaggggtctttctatgagttgttccaagaattgtcgctgctcagatctatgtacaaacaggccattccgcaaggataagaaaattaaaattgtgaagacaaagcgatgtggatggggtgctgttgcgttggagccattggagagaggtgattttgtaatcgagtatgttggtgaagtcattgatgatgcgacatgtgaacaaaggctttgggatataagacggcgtggtgacaaaaacttctacatgtgtgaaatcagcaaagattttacaatagatgcgacatttaaaggcaatgtgtcacgttttctaaatcacagttgtgagcccaactgtaaactcgaaaaatggcaggttgatggtgagacaagagttggtgtctttgcctctcgttccatcgaagttggagagcccttaacttatgattacaggtttgtgcattttggagagaaagtgaagtgccattgcgaagcagtgaactgccagggatacctgggcagccaaataaagaacccaattcaaagcattcttgccactgtagcaccgcaagtgcagttgcgagagtattcgcccatgcaccacgaagctccaagattgaagccaataaatcacttgttaccctggaccaactgtatagaggtctcttttaacctgagaagcaaaaggaaaattgaccggctatgctgggcccgcaagaagaagagaacatccctcgtgccatcttcaacaagcatgccagcatcgccgagtgaagttcctgccgcggatttctaactgcccttcgttgaagagcaagcctgccctgtataataatttcatggtacattctttacatgcattggttggaaacgattctttcacattgctcatcaatggtgttgtaacctgcaacattctttatttggtttcatagggcattcagtcagtttacgggtggtagtttgtcggaacatgtacccaatttttctgatgaaacaaatgtttgagcttcatgtaatgttggctgctgttttttttatgcgagataatgttatgaaactggatagtccctgtaaacatggcttaaaacatgacagaattattttcttttaggagaatgctaccccttttattttatgtacaaggaattgataaaaagagcagaggtcctagcggcctaggcgtgcgagagcctagagcgcatatctaatcatcagtttaatataaaggcgattaacgaagacacggaacttactgtcctgtcttgattgagttctgaattgcatccctctggtcgccaacaagggcaaagtttatgttggcaggtcgcattcgcatatgctgagctcgttcttcgtcagttttgtccagttcctgacccaagaaaattccactccctaggccggcacggcactagggagcacgaagaaaaaaaatcgtcttgcccagcaggtgat

SEQ ID NO: 43970 - DNA, 1564 bp, Zea Mays
tgacagaatgctgactttaccaacagtgtagagatgtatatctgataaaaaagaagcgcactggtgttcgcgtggatattgggtgcacaaactgcagggctgattctacttgcaaagaagactgtgaatgcaggggtctttctatgagttgttccaagaattgtcgctgctcagatctatgtacaaacaggccattccgcaaggataagaaaattaaaattgtgaagacaaagcgatgtggatggggtgctgttgcgttggagccattggagagaggtgattttgtaatcgagtatgttggtgaagtcattgatgatgcgacatgtgaacaaaggctttgggatataagacggcgtggtgacaaaaacttctacatgtgtgaaatcagcaaagattttacaatagatgcgacatttaaaggcaatgtgtcacgttttctaaatcacagttgtgagcccaactgtaaactcgaaaaatggcaggttgatggtgagacaagagttggtgtctttgcctctcgttccatcgaagttggagagcccttaacttatgattacaggtttgtgcattttggagagaaagtgaagtgccattgcgaagcagtgaactgccagggatacctgggcagccaaataaagaacccaattcaaagcattcttgccactgtagcaccgcaagtgcagttgcgagagtattcgcccatgcaccacgaagctccaagattgaagccaataaatcacttgttaccctggaccaactgtatagaggtctcttttaacctgagaagcaaaaggaaaattgaccggctatgctgggcccgcaagaagaagagaacatccctcgtgccatcttcaacaagcatgccagcatcgccgagtgaagttcctgccgcggatttctaactgcccttcgttgaagagcaagcctgccctgtataataatttcatggtacattctttacatgcattggttggaaacgattctttcacattgctcatcaatggtgttgtaacctgcaacattctttatttggtttcatagggcattcagtcagtttacgggtggtagtttgtcggaacatgtacccaatttttctgatgaaacaaatgtttgagcttcatgtaatgttggctgctgttttttttatgcgagataatgttatgaaactggatagtccctgtaaacatggcttaaaacatgacagaattattttcttttaggagaatgctaccccttttattttatgtacaaggaattgataaaaagagcagaggtcctagcggcctaggcgtgcgagagcctagagcgcatatctaatcatcagtttaatataaaggcgattaacgaagacacggaacttactgtcctgtcttgattgagttctgaattgcatccctctggtcgccaacaagggcaaagtttatgttggcaggtcgcattcgcatatgctgagctcgttcttcgtcagttttgtccagttcctgacccaagaaaattccactccctaggccggcacggcactagggagcacgaagaaaaaaaatcgtcttgcccagcaggtgat

SEQ ID NO: 43971 - DNA, 1671 bp, Zea Mays
aatactttgtttgctggtgacagaatgctgactttaccaacagtgtagaggaagtattttgccggctacctcttccatatgttaatgaagacttaaatattgattcaatcatcagggattatgctgaggctgtttataagccacccccctatacatctatcaggcgcaatgtatatctgataaaaaagaagcgcactggtgttcgcgtggatattgggtgcacaaactgcagggctgattctacttgcaaagaagactgtgaatgcaggggtctttctatgagttgttccaagaattgtcgctgctcagatctatgtacaaacaggccattccgcaaggataagaaaattaaaattgtgaagacaaagcgatgtggatggggtgctgttgcgttggagccattggagagaggtgattttgtaatcgagtatgttggtgaagtcattgatgatgcgacatgtgaacaaaggctttgggatataagacggcgtggtgacaaaaacttctacatgtgtgaaatcagcaaagattttacaatagatgcgacatttaaaggcaatgtgtcacgttttctaaatcacagttgcaggttgatggtgagacaagagttggtgtctttgcctctcgttccatcgaagttggagagcccttaacttatgattacaggtttgtgcattttggagagaaagtgaagtgccattgcgaagcagtgaactgccagggatacctgggcagccaaataaagaacccaattcaaagcattcttgccactgtagcaccgcaagtgcagttgcgagagtattcgcccatgcaccacgaagctccaagattgaagccaataaatcacttgttaccctggaccaactgtatagaggtctcttttaacctgagaagcaaaaggaaaattgaccggctatgctgggcccgcaagaagaagagaacatccctcgtgccatcttcaacaagcatgccagcatcgccgagtgaagttcctgccgcggatttctaactgcccttcgttgaagagcaagcctgccctgtataataatttcatggtacattctttacatgcattggttggaaacgattctttcacattgctcatcaatggtgttgtaacctgcaacattctttatttggtttcatagggcattcagtcagtttacgggtggtagtttgtcggaacatgtacccaatttttctgatgaaacaaatgtttgagcttcatgtaatgttggctgctgttttttttatgcgagataatgttatgaaactggatagtccctgtaaacatggcttaaaacatgacagaattattttcttttaggagaatgctaccccttttattttatgtacaaggaattgataaaaagagcagaggtcctagcggcctaggcgtgcgagagcctagagcgcatatctaatcatcagtttaatataaaggcgattaacgaagacacggaacttactgtcctgtcttgattgagttctgaattgcatccctctggtcgccaacaagggcaaagtttatgttggcaggtcgcattcgcatatgctgagctcgttcttcgtcagttttgtccagttcctgacccaagaaaattccactccctaggccggcacggcactagggagcacgaagaaaaaaaatcgtcttgcccagcaggtgat

SEQ ID NO: 43972 - DNA, 1735 bp, Zea Mays
gttctgctgagaagattttttttggcacctgggaggaatactttgtttgctggtgacagaatgctgactttaccaacagtgtagaggaagtattttgccggctacctcttccatatgttaatgaagacttaaatattgattcaatcatcagggattatgctgaggctgtttataagccacccccctatacatctatcaggcgcaatgtatatctgataaaaaagaagcgcactggtgttcgcgtggatattgggtgcacaaactgcagggctgattctacttgcaaagaagactgtgaatgcaggggtctttctatgagttgttccaagaattgtcgctgctcagatctatgtacaaacaggccattccgcaaggataagaaaattaaaattgtgaagacaaagcgatgtggatggggtgctgttgcgttggagccattggagagaggtgattttgtaatcgagtatgttggtgaagtcattgatgatgcgacatgtgaacaaaggctttgggatataagacggcgtggtgacaaaaacttctacatgtgtgaaatcagcaaagattttacaatagatgcgacatttaaaggcaatgtgtcacgttttctaaatcacagttgtgagcccaactgtaaactcgaaaaatggcaggttgatggtgagacaagagttggtgtctttgcctctcgttccatcgaagttggagagcccttaacttatgattacaggtttgtgcattttggagagaaagtgaagtgccattgcgaagcagtgaactgccagggatacctgggcagccaaataaagaacccaattcaaagcattcttgccactgtagcaccgcaagtgcagttgcgagagtattcgcccatgcaccacgaagctccaagattgaagccaataaatcacttgttaccctggaccaactgtatagaggtctcttttaacctgagaagcaaaaggaaaattgaccggctatgctgggcccgcaagaagaagagaacatccctcgtgccatcttcaacaagcatgccagcatcgccgagtgaagttcctgccgcggatttctaactgcccttcgttgaagagcaagcctgccctgtataataatttcatggtacattctttacatgcattggttggaaacgattctttcacattgctcatcaatggtgttgtaacctgcaacattctttatttggtttcatagggcattcagtcagtttacgggtggtagtttgtcggaacatgtacccaatttttctgatgaaacaaatgtttgagcttcatgtaatgttggctgctgttttttttatgcgagataatgttatgaaactggatagtccctgtaaacatggcttaaaacatgacagaattattttcttttaggagaatgctaccccttttattttatgtacaaggaattgataaaaagagcagaggtcctagcggcctaggcgtgcgagagcctagagcgcatatctaatcatcagtttaatataaaggcgattaacgaagacacggaacttactgtcctgtcttgattgagttctgaattgcatccctctggtcgccaacaagggcaaagtttatgttggcaggtcgcattcgcatatgctgagctcgttcttcgtcagttttgtccagttcctgacccaagaaaattccactccctaggccggcacggcactagggagcacgaagaaaaaaaatcgtcttgcccagcaggtgat

SEQ ID NO: 43973 - DNA, 2049 bp, Zea Mays
ctttagcattgtggcaacaaatactacttgagctacgagatcatgtcgaatgtcgtttgtgctccaagattatttatgttggagaagaaataaaatgttcagttaaaaagtgtccacaaatgttccatctcaaatgtgttgcggaagatacttcaaactttaccgttgaaagcttcaggtgccctcaacatgggtgtatggtttgtaagcaaaagatgttcttttggcgctgcggacgttgtacagttgcagcacatacgaaatgtgcaccatggccagtggttcacctaaaaaatgatcaaggaagtgcaatttgctggaggcatccttctgactggctgctgcaaaataaggaatactttgtttgctggtgacagaatgctgactttaccaacagtgtagagtattttgccggctacctcttccatatgttaatgaagacttaaatattgattcaatcatcagggattatgctgaggctgtttataagccacccccctatacatctatcaggcgcaatgtatatctgataaaaaagaagcgcactggtgttcgcgtggatattgggtgcacaaactgcagggctgattctacttgcaaagaagactgtgaatgcaggggtctttctatgagttgttccaagaattgtcgctgctcagatctatgtacaaacaggccattccgcaaggataagaaaattaaaattgtgaagacaaagcgatgtggatggggtgctgttgcgttggagccattggagagaggtgattttgtaatcgagtatgttggtgaagtcattgatgatgcgacatgtgaacaaaggctttgggatataagacggcgtggtgacaaaaacttctacatgtgtgaaatcagcaaagattttacaatagatgcgacatttaaaggcaatgtgtcacgttttctaaatcacagttgtgagcccaactgtaaactcgaaaaatggcaggttgatggtgagacaagagttggtgtctttgcctctcgttccatcgaagttggagagcccttaacttatgattacaggtttgtgcattttggagagaaagtgaagtgccattgcgaagcagtgaactgccagggatacctgggcagccaaataaagaacccaattcaaagcattcttgccactgtagcaccgcaagtgcagttgcgagagtattcgcccatgcaccacgaagctccaagattgaagccaataaatcacttgttaccctggaccaactgtatagaggtctcttttaacctgagaagcaaaaggaaaattgaccggctatgctgggcccgcaagaagaagagaacatccctcgtgccatcttcaacaagcatgccagcatcgccgagtgaagttcctgccgcggatttctaactgcccttcgttgaagagcaagcctgccctgtataataatttcatggtacattctttacatgcattggttggaaacgattctttcacattgctcatcaatggtgttgtaacctgcaacattctttatttggtttcatagggcattcagtcagtttacgggtggtagtttgtcggaacatgtacccaatttttctgatgaaacaaatgtttgagcttcatgtaatgttggctgctgttttttttatgcgagataatgttatgaaactggatagtccctgtaaacatggcttaaaacatgacagaattattttcttttaggagaatgctaccccttttattttatgtacaaggaattgataaaaagagcagaggtcctagcggcctaggcgtgcgagagcctagagcgcatatctaatcatcagtttaatataaaggcgattaacgaagacacggaacttactgtcctgtcttgattgagttctgaattgcatccctctggtcgccaacaagggcaaagtttatgttggcaggtcgcattcgcatatgctgagctcgttcttcgtcagttttgtccagttcctgacccaagaaaattccactccctaggccggcacggcactagggagcacgaagaaaaaaaatcgtcttgcccagcaggtgat

SEQ ID NO: 43974 - DNA, 2072 bp, Zea Mays
cttacttcgaattcccatttaactcgactcttatgtctgggcggatcaagcaaaatgcagctggtcgaatgtcgtttgtgctccaagattatttatgttggagaagaaataaaatgttcagttaaaaagtgtccacaaatgttccatctcaaatgtgttgcggaagatacttcaaactttaccgttgaaagcttcaggtgccctcaacatgggtgtatggtttgtaagcaaaagatgttcttttggcgctgcggacgttgtacagttgcagcacatacgaaatgtgcaccatggccagtggttcacctaaaaaatgatcaaggaagtgcaatttgctggaggcatccttctgactggctgctgcaaaataaggaatactttgtttgctggtgacagaatgctgactttaccaacagtgtagaggaagtattttgccggctacctcttccatatgttaatgaagacttaaatattgattcaatcatcagggattatgctgaggctgtttataagccacccccctatacatctatcaggcgcaatgtatatctgataaaaaagaagcgcactggtgttcgcgtggatattgggtgcacaaactgcagggctgattctacttgcaaagaagactgtgaatgcaggggtctttctatgagttgttccaagaattgtcgctgctcagatctatgtacaaacaggccattccgcaaggataagaaaattaaaattgtgaagacaaagcgatgtggatggggtgctgttgcgttggagccattggagagaggtgattttgtaatcgagtatgttggtgaagtcattgatgatgcgacatgtgaacaaaggctttgggatataagacggcgtggtgacaaaaacttctacatgtgtgaaatcagcaaagattttacaatagatgcgacatttaaaggcaatgtgtcacgttttctaaatcacagttgtgagcccaactgtaaactcgaaaaatggcaggttgatggtgagacaagagttggtgtctttgcctctcgttccatcgaagttggagagcccttaacttatgattacaggtttgtgcattttggagagaaagtgaagtgccattgcgaagcagtgaactgccagggatacctgggcagccaaataaagaacccaattcaaagcattcttgccactgtagcaccgcaagtgcagttgcgagagtattcgcccatgcaccacgaagctccaagattgaagccaataaatcacttgttaccctggaccaactgtatagaggtctcttttaacctgagaagcaaaaggaaaattgaccggctatgctgggcccgcaagaagaagagaacatccctcgtgccatcttcaacaagcatgccagcatcgccgagtgaagttcctgccgcggatttctaactgcccttcgttgaagagcaagcctgccctgtataataatttcatggtacattctttacatgcattggttggaaacgattctttcacattgctcatcaatggtgttgtaacctgcaacattctttatttggtttcatagggcattcagtcagtttacgggtggtagtttgtcggaacatgtacccaatttttctgatgaaacaaatgtttgagcttcatgtaatgttggctgctgttttttttatgcgagataatgttatgaaactggatagtccctgtaaacatggcttaaaacatgacagaattattttcttttaggagaatgctaccccttttattttatgtacaaggaattgataaaaagagcagaggtcctagcggcctaggcgtgcgagagcctagagcgcatatctaatcatcagtttaatataaaggcgattaacgaagacacggaacttactgtcctgtcttgattgagttctgaattgcatccctctggtcgccaacaagggcaaagtttatgttggcaggtcgcattcgcatatgctgagctcgttcttcgtcagttttgtccagttcctgacccaagaaaattccactccctaggccggcacggcactagggagcacgaagaaaaaaaatcgtcttgcccagcaggtgat

SEQ ID NO: 43975 - DNA, 2507 bp, Zea Mays
gttacatttccacggctcccaccagcgtgagtgcgtgaccagccccaatgccctccaaaccctagtccacagctcctgtaccctggcggccatgccggatctgagcaccagctacctccctcccttccctgaactgtccctcgatgcgggggccctcgccgtcgaccacgcggggaatgctgcagccgccgcctcggccgatgcggcgtccgcgtacgcgtcttcgtctgcctctgtgggcagcggcgtagacgacctcgttattccagcggaatgccggtggaagggccatgtccgcaccttcgacatggcgggcgcgggcgctgtcaccacttgccccgccgcgcggcgtggcggcgggaagaagctgtcactgattccgtcactcgagccggcacggacgcaggcttcagcatcggctccgacgctcgaggaacgcgtgagcgagtgggcggctaagaaggcagcggccggcgttccgactcatcactgcgtgctgcctttcctcaccggggcgccaatggcggtcgaatgtcgtttgtgctccaagattatttatgttggagaagaaataaaatgttcagttaaaaagtgtccacaaatgttccatctcaaatgtgttgcggaagatacttcaaactttaccgttgaaagcttcaggtgccctcaacatgggtgtatggtttgtaagcaaaagatgttcttttggcgctgcggacgttgtacagttgcagcacatacgaaatgtgcaccatggccagtggttcacctaaaaaatgatcaaggaagtgcaatttgctggaggcatccttctgactggctgctgcaaaataagaatgctgactttaccaacagtgtagaggaagtattttgccggctacctcttccatatgttaatgaagacttaaatattgattcaatcatcagggattatgctgaggctgtttataagccacccccctatacatctatcaggcgcaatgtatatctgataaaaaagaagcgcactggtgttcgcgtggatattgggtgcacaaactgcagggctgattctacttgcaaagaagactgtgaatgcaggggtctttctatgagttgttccaagaattgtcgctgctcagatctatgtacaaacaggccattccgcaaggataagaaaattaaaattgtgaagacaaagcgatgtggatggggtgctgttgcgttggagccattggagagaggtgattttgtaatcgagtatgttggtgaagtcattgatgatgcgacatgtgaacaaaggctttgggatataagacggcgtggtgacaaaaacttctacatgtgtgaaatcagcaaagattttacaatagatgcgacatttaaaggcaatgtgtcacgttttctaaatcacagttgtgagcccaactgtaaactcgaaaaatggttgatggtgagacaagagttggtgtctttgcctctcgttccatcgaagttggagagcccttaacttatgattacaggtttgtgcattttggagagaaagtgaagtgccattgcgaagcagtgaactgccagggatacctgggcagccaaataaagaacccaattcaaagcattcttgccactgtagcaccgcaagtgcagttgcgagagtattcgcccatgcaccacgaagctccaagattgaagccaataaatcacttgttaccctggaccaactgtatagaggtctcttttaacctgagaagcaaaaggaaaattgaccggctatgctgggcccgcaagaagaagagaacatccctcgtgccatcttcaacaagcatgccagcatcgccgagtgaagttcctgccgcggatttctaactgcccttcgttgaagagcaagcctgccctgtataataatttcatggtacattctttacatgcattggttggaaacgattctttcacattgctcatcaatggtgttgtaacctgcaacattctttatttggtttcatagggcattcagtcagtttacgggtggtagtttgtcggaacatgtacccaatttttctgatgaaacaaatgtttgagcttcatgtaatgttggctgctgttttttttatgcgagataatgttatgaaactggatagtccctgtaaacatggcttaaaacatgacagaattattttcttttaggagaatgctaccccttttattttatgtacaaggaattgataaaaagagcagaggtcctagcggcctaggcgtgcgagagcctagagcgcatatctaatcatcagtttaatataaaggcgattaacgaagacacggaacttactgtcctgtcttgattgagttctgaattgcatccctctggtcgccaacaagggcaaagtttatgttggcaggtcgcattcgcatatgctgagctcgttcttcgtcagttttgtccagttcctgacccaagaaaattccactccctaggccggcacggcactagggagcacgaagaaaaaaaatcgtcttgcccagcaggtgat

SEQ ID NO: 43976 - DNA, 2401 bp, Zea Mays
gtcctcttcccctccggttcacgtcttcgttacatttccacggctcccaccagcgtgagtgcgtgaccagccccaatgccctccaaaccctagtccacagctcctgtaccctggcggccatgccggatctgagcaccagctacctccctcccttccctgaactgtccctcgatgcgggggccctcgccgtcgaccacgcggggaatgctgcagccgccgcctcggccgatgcggcgtccgcgtacgcgtcttcgtctgcctctgtgggcagcggcgtagacgacctcgttattccagcggaatgccggtggaagggccatgtccgcaccttcgacatggcgggcgcgggcgctgtcaccacttgccccgccgcgcggcgtggcggcgggaagaagctgtcactgattccgtcactcgagccggcacggacgcaggcttcagcatcggctccgacgctcgaggaacgcgtgagcgagtgggcggctaagaaggcagcggccggcgttccgactcatcactgcgtgctgcctttcctcaccggggcgccaatggcggtcgaatgtcgtttgtgctccaagattatttatgttggagaagaaataaaatgttcagttaaaaagtgtccacaaatgttccatctcaaatgtgttgcggaagatacttcaaactttaccgttgaaagcttcaggtgccctcaacatgaatactttgtttgctggtgacagaatgctgactttaccaacagtgtagaggaagtattttgccggctacctcttccatatgttaatgaagacttaaatattgattcaatcatcagggattatgctgaggctgtttataagccacccccctatacatctatcaggcgcaatgtatatctgataaaaaagaagcgcactggtgttcgcgtggatattgggtgcacaaactgcagggctgattctacttgcaaagaagactgtgaatgcaggggtctttctatgagttgttccaagaattgtcgctgctcagatctatgtacaaacaggccattccgcaaggataagaaaattaaaattgtgaagacaaagcgatgtggatggggtgctgttgcgttggagccattggagagaggtgattttgtaatcgagtatgttggtgaagtcattgatgatgcgacatgtgaacaaaggctttgggatataagacggcgtggtgacaaaaacttctacatgtgtgaaatcagcaaagattttacaatagatgcgacatttaaaggcaatgtgtcacgttttctaaatcacagttgtgagcccaactgtaaactcgaaaaatggcaggttgatggtgagacaagagttggtgtctttgcctctcgttccatcgaagttggagagcccttaacttatgattacaggtttgtgcattttggagagaaagtgaagtgccattgcgaagcagtgaactgccagggatacctgggcagccaaataaagaacccaattcaaagcattcttgccactgtagcaccgcaagtgcagttgcgagagtattcgcccatgcaccacgaagctccaagattgaagccaataaatcacttgttaccctggaccaactgtatagaggtctcttttaacctgagaagcaaaaggaaaattgaccggctatgctgggcccgcaagaagaagagaacatccctcgtgccatcttcaacaagcatgccagcatcgccgagtgaagttcctgccgcggatttctaactgcccttcgttgaagagcaagcctgccctgtataataatttcatggtacattctttacatgcattggttggaaacgattctttcacattgctcatcaatggtgttgtaacctgcaacattctttatttggtttcatagggcattcagtcagtttacgggtggtagtttgtcggaacatgtacccaatttttctgatgaaacaaatgtttgagcttcatgtaatgttggctgctgttttttttatgcgagataatgttatgaaactggatagtccctgtaaacatggcttaaaacatgacagaattattttcttttaggagaatgctaccccttttattttatgtacaaggaattgataaaaagagcagaggtcctagcggcctaggcgtgcgagagcctagagcgcatatctaatcatcagtttaatataaaggcgattaacgaagacacggaacttactgtcctgtcttgattgagttctgaattgcatccctctggtcgccaacaagggcaaagtttatgttggcaggtcgcattcgcatatgctgagctcgttcttcgtcagttttgtccagttcctgacccaagaaaattccactccctaggccggcacggcactagggagcacgaagaaaaaaaatcgtcttgcccagcaggtgat

SEQ ID NO: 43977 - DNA, 2590 bp, Zea Mays
cttcgctctctcaattctgttgagcgagtcctcttcccctccggttcacgtcttcgttacatttccacggctcccaccagcgtgagtgcgtgaccagccccaatgccctccaaaccctagtccacagctcctgtaccctggcggccatgccggatctgagcaccagctacctccctcccttccctgaactgtccctcgatgcgggggccctcgccgtcgaccacgcggggaatgctgcagccgccgcctcggccgatgcggcgtccgcgtacgcgtcttcgtctgcctctgtgggcagcggcgtagacgacctcgttattccagcggaatgccggtggaagggccatgtccgcaccttcgacatggcgggcgcgggcgctgtcaccacttgccccgccgcgcggcgtggcggcgggaagaagctgtcactgattccgtcactcgagccggcacggacgcaggcttcagcatcggctccgacgctcgaggaacgcgtgagcgagtgggcggctaagaaggcagcggccggcgttccgactcatcactgcgtgctgcctttcctcaccggggcgccaatggcggtcgaatgtcgtttgtgctccaagattatttatgttggagaagaaataaaatgttcagttaaaaagtgtccacaaatgttccatctcaaatgtgttgcggaagatacttcaaactttaccgttgaaagcttcaggtgccctcaacatgggtgtatggtttgtaagcaaaagatgttcttttggcgctgcggacgttgtacagttgcagcacatacgaaatgtgcaccatggccagtggttcacctaaaaaatgatcaaggaagtgcaatttgctggaggcatccttctgactggctgctgcaaaataaggaatactttgtttgctggtgacagaatgctgactttaccaacagtgtagaggaagtattttgccggctacctcttccatatgttaatgaagacttaaatattgattcaatcatcagggattatgctgaggctgtttataagccacccccctatacatctatcaggcgcaatgtatatctgataaaaaagaagcgcactggtgttcgcgtggatattgggtgcacaaactgcagggctgattctacttgcaaagaagactgtgaatgcaggggtctttctatgagttgttccaagaattgtcgctgctcagatctatgtacaaacaggccattccgcaaggataagaaaattaaaattgtgaagacaaagcgatgtggatggggtgctgttgcgttggagccattggagagaggtgattttgtaatcgagtatgttggtgaagtcattgatgatgcgacatgtgaacaaaggctttgggatataagacggcgtggtgacaaaaacttctacatgtgtgaaatcagcaaagattttacaatagatgcgacatttaaaggcaatgtgtcacgttttctaaatcacagttgtgagcccaactgtaaactcgaaaaatggcaggttgatggtgagacaagagttggtgtctttgcctctcgttccatcgaagttggagagcccttaacttatgattacaggtttgtgcattttggagagaaagtgaagtgccattgcgaagcagtgaactgccagggatacctgggcagccaaataaagaacccaattcaaagcattcttgccactgtagcaccgcaagtgcagttgcgagagtattcgcccatgcaccacgaagctccaagattgaagccaataaatcacttgttaccctggaccaactgtatagaggtctcttttaacctgagaagcaaaaggaaaattgaccggctatgctgggcccgcaagaagaagagaacatccctcgtgccatcttcaacaagcatgccagcatcgccgagtgaagttcctgccgcggatttctaactgcccttcgttgaagagcaagcctgccctgtataataatttcatggtacattctttacatgcattggttggaaacgattctttcacattgctcatcaatggtgttgtaacctgcaacattctttatttggtttcatagggcattcagtcagtttacgggtggtagtttgtcggaacatgtacccaatttttctgatgaaacaaatgtttgagcttcatgtaatgttggctgctgttttttttatgcgagataatgttatgaaactggatagtccctgtaaacatggcttaaaacatgacagaattattttcttttaggagaatgctaccccttttattttatgtacaaggaattgataaaaagagcagaggtcctagcggcctaggcgtgcgagagcctagagcgcatatctaatcatcagtttaatataaaggcgattaacgaagacacggaacttactgtcctgtcttgattgagttctgaattgcatccctctggtcgccaacaagggcaaagtttatgttggcaggtcgcattcgcatatgctgagctcgttcttcgtcagttttgtccagttcctgacccaagaaaattccactccctaggccggcacggcactagggagcacgaagaaaaaaaatcgtcttgcccagcaggtgat

SEQ ID NO: 43978 - DNA, 2579 bp, Zea Mays
atttctttcacagcttcgctctctcaattctgttgagcgagtcctcttcccctccggttcacgtcttcgttacatttccacggctcccaccagcgtgagtgcgtgaccagccccaatgccctccaaaccctagtccacagctcctgtaccctggcggccatgccggatctgagcaccagctacctccctcccttccctgaactgtccctcgatgcgggggccctcgccgtcgaccacgcggggaatgctgcagccgccgcctcggccgatgcggcgtccgcgtacgcgtcttcgtctgcctctgtgggcagcggcgtagacgacctcgttattccagcggaatgccggtggaagggccatgtccgcaccttcgacatggcgggcgcgggcgctgtcaccacttgccccgccgcgcggcgtggcggcgggaagaagctgtcactgattccgtcactcgagccggcacggacgcaggcttcagcatcggctccgacgctcgaggaacgcgtgagcgagtgggcggctaagaaggcagcggccggcgttccgactcatcactgcgtgctgcctttcctcaccggggcgccaatggcggtcgaatgtcgtttgtgctccaagattatttatgttggagaagaaataaaatgttcagttaaaaagtgtccacaaatgttccatctcaaatgtgttgcggaagatacttcaaactttaccgttgaaagcttcaggtgccctcaacatgggtgtatggtttgtaagcaaaagatgttcttttggcgctgcggacgttgtacagttgcagcacatacgaaatgtgcaccatggccagtggttcacctaaaaaatgatcaaggaagtgcaatttgctggaggcatccttctgactggctgctgcaaaataagaatgctgactttaccaacagtgtagaggaagtattttgccggctacctcttccatatgttaatgaagacttaaatattgattcaatcatcagggattatgctgaggctgtttataagccacccccctatacatctatcaggcgcaatgtatatctgataaaaaagaagcgcactggtgttcgcgtggatattgggtgcacaaactgcagggctgattctacttgcaaagaagactgtgaatgcaggggtctttctatgagttgttccaagaattgtcgctgctcagatctatgtacaaacaggccattccgcaaggataagaaaattaaaattgtgaagacaaagcgatgtggatggggtgctgttgcgttggagccattggagagaggtgattttgtaatcgagtatgttggtgaagtcattgatgatgcgacatgtgaacaaaggctttgggatataagacggcgtggtgacaaaaacttctacatgtgtgaaatcagcaaagattttacaatagatgcgacatttaaaggcaatgtgtcacgttttctaaatcacagttgtgagcccaactgtaaactcgaaaaatggcaggttgatggtgagacaagagttggtgtctttgcctctcgttccatcgaagttggagagcccttaacttatgattacaggtttgtgcattttggagagaaagtgaagtgccattgcgaagcagtgaactgccagggatacctgggcagccaaataaagaacccaattcaaagcattcttgccactgtagcaccgcaagtgcagttgcgagagtattcgcccatgcaccacgaagctccaagattgaagccaataaatcacttgttaccctggaccaactgtatagaggtctcttttaacctgagaagcaaaaggaaaattgaccggctatgctgggcccgcaagaagaagagaacatccctcgtgccatcttcaacaagcatgccagcatcgccgagtgaagttcctgccgcggatttctaactgcccttcgttgaagagcaagcctgccctgtataataatttcatggtacattctttacatgcattggttggaaacgattctttcacattgctcatcaatggtgttgtaacctgcaacattctttatttggtttcatagggcattcagtcagtttacgggtggtagtttgtcggaacatgtacccaatttttctgatgaaacaaatgtttgagcttcatgtaatgttggctgctgttttttttatgcgagataatgttatgaaactggatagtccctgtaaacatggcttaaaacatgacagaattattttcttttaggagaatgctaccccttttattttatgtacaaggaattgataaaaagagcagaggtcctagcggcctaggcgtgcgagagcctagagcgcatatctaatcatcagtttaatataaaggcgattaacgaagacacggaacttactgtcctgtcttgattgagttctgaattgcatccctctggtcgccaacaagggcaaagtttatgttggcaggtcgcattcgcatatgctgagctcgttcttcgtcagttttgtccagttcctgacccaagaaaattccactccctaggccggcacggcactagggagcacgaagaaaaaaaatcgtcttgcccagcaggtgat

SEQ ID NO: 43979 - DNA, 894 bp, Zea Mays
caatgtgatgcttcatggattagaaaaggctgggaggcacaccattattctgatgcagccatctcaaaatagggcttctagaacatttatggattacaattcgattaatcatgcattggatggaatctgtgggctttatgaaaggaaaattagggatatcaacccaatgatcccaaacataacttatgacatcagcgacctctataacttcattgatggcctagccgacattagtgcgctggtttatgatcactcgattcaggcattcctgccatatgatcgacagtggataaagcaaaagttgtttcaacacctgaagaaattggctcagcggtagcacaactgttgtttgttcttgatgccttttatccaacaaacaagcatgcgtgacaataggtgtccaatcagtggtattgggagttgtttcttgtaaactttgtaatgttacatgacagatttgctcccttgtattctggatgtttgactcggatttcattggtggcttgcttgtggttgtggtatgctaaacttgttttgtttcgcagtgctgggaatcagataacccttttgcctgttgtaaaaaagattttttcctgtagatggtttctatgtattattgttctttagaaacatgccctacggccataaagtctttaggacaaggttttgtcaatcttgaaggctactagcaccaatgacttgattatcatggttattaaaacgttaaaacgacatgaaccaacttttcaaagttgaaaagtttaaacgtttaaacgaacgttgaaacgtctttttagacttgacatagaatttcaaatatagaataagttcatacataagttgagctcacaaaccaaatagcattagcataaaaagaaacagatcaagttcaac

SEQ ID NO: 43980 - DNA, 405 bp, Zea Mays
caacaaccgagggttgttgggatcgtagcaaacctgaccgaggtttgttagtcgattcgggatcctttccgcaaccatatatatcggcatcttcacacatccctcctcgaccgtcgacgcctgcctcactttagcatccagatgagagggagaggaggccaccgcggttgaccttcatgctccaggctgcctacctccaatcacgtgcatgggagaagtcgtcggtgcacgccacccgcgtacgaggatttgtagtgtggaatagttgatcggagtatgggagatctctcatcggagctccatcatcgccgccgagttgcccttctcgtggtctgcacggccatgaccttaattgctgaggcgaggtgacgaggaccttgaagccccagttttaggtcaacatct

SEQ ID NO: 43981 - DNA, 1336 bp, Zea Mays
gaacgggagagttcgaccaaaattcccacgcccggcggttctacggtcgagccaagccccctcaactgctgaacggagagttcgacctagcacgcccggccgccgccgcagcccgcaatggcgtcccttttcaaggaccccagcaagctctcggcgtacagggaccgccggttcaaggggacgcaggaggagtatgaggcggcgctgcttgcgtcgacaacgctgtacatcggtaatatgtccttctacaccacggaggagcaggcctacgagctcttctcccgcgccggcgagatcaagaagatcatcatggggctcgacaagaactccaagaccccatgcggtttctgctttgtacttggtgtggtacatgcatatctatggaaaagcaatgggtacggacagggcaaccccgcagcagaacgccatgggcgacggcgcttgcctctgctgtatgctgcatttcatcatagtgtatatgtatttatctcttatcttgccgcccacccctaaacaattatcttcaactgctcctatggtcactgttgatttttgcactctagtgagggtgtggtatagtttgtcaattttgatgagagttgaaatttagtaacatataatgttccaaactggtgatttcagtggccatttgggaatttttatatgtaaaagcttgtaccacagctgttttctgtgcttggttctgagcccttcaccagaagcctaggatgtgagttcatgggcactgatatttaggtactactctagggaggatgctgaagatgctgtcaaatacattagtggaacgatgcttgacgatcgtccaatccgcgttgatttcgattggggctttgaagaaggcagacagtggggccgtggacgaagtggtggacaagtcagagatgagtaccgtacagattatgatcctgatatcctttgatgctattctattacagtttactccattctaatttggtgctatatagaacatagaaagtcataacatgtttccatacatgctccagacctccatgtgtcatcttaagttcacctataaaatgacatgttaaaactcggccggtgagagaaagaccgccctcccggtattatattaagaagagaccgaaacaatggttctggccgagaaaatccccgaaccttggccccctattactaacaggccagcgtcagttgtccactctgcaacggcccaaccggagggtggcgcacagggcatcgtaacccgatagcggatggggcacgagggaatttttttaaccaagcttaaaaattcgccccgagggggatcaaacctaggacctggatgtgctacatg

SEQ ID NO: 43982 - DNA, 967 bp, Zea Mays
ctcactgctctatctgtcatccactctctcccccgctccgctccggtcgctttgccgccgatctgtcgaagcaccgcagctgactagccgccgtgatcaccgcgcgcaccggccggcgccgcgcttctggcactagtagctagctaggtggtgcaccgctccacacgcccatcttcttgttcgcgtcattgtatgccgcggaaccaccgcgcgctaggcgttggtgcccggcggtacgtcgtcgtcccgtctcccgtccgcaggaatttctatttctgggcggttcgtacgtacggatggtctccccctggatgctggatctgagctttttgggcgcgcgggtgtacctcctcgcacggatttgcccccctccccctgtcgcctggtacggaaggggatccacctgcgccccctgccaacttctcgggaaggtaaaaatcggtatgtttggtcgtcggtgtggaatgtgaattcttcgatgttcatcgtttggaagtctccagattctggatgtcgtcgccgccatggcagaaaggaattccaaaggctccaagagcacgccgccagcctgtcgactcttccatctcagttctcagatctgctcatcatcatcatcgtcatcattcactcctttctcctttgtcagatcctgttcatacagtccgtccctgtgtggtatagatggtcggcagcagccattatatttgtgatgtcacgtttctgctcgagcctctacagaatggcagggagtagggactaggtcgctatcgagacgacactgttccattcgtgacgtctcgtgcttatctcttcaatgagatctgccctgttcgtcttcagtcaatttttcgctcttggtgaagattcttgtagtccttgataacagctgtgtcgtctgcgtagaacgttgtatgtgtttcatcaacattttaatatacaatatatatatagagaaagattgtatatt

SEQ ID NO: 43983 - DNA, 1184 bp, Zea Mays
gtttggttgagcgtgaaatgtttgatcacttggtcttttgcttggtcaacagcctccacgttcaaggaaaaacaaaggccttgatagaagtctagttggtgcaaggatcaaagtttggtggccagatgataagatgttctacaatggtattgtggagtcatttgatgctgtttctaagaggcacaaggtagcatatgatgatggggatgtagaggtactactgctgagggaggaaaagtgggaattcatcagtgaggagaaggaagcttctatggcatctgaaacgccacgaggcagaaaaagaaaagcggatgcattgaaggaagaaaatacagaaacacctaaaagtgatgctgtggatcctccaaagaaaagaggacgtccaaaaggtgtgggatccagcaatgggacacccagtacctcagctactccgagcacaaaggggaaaactgccggcaaggttaccaaagaaacacctaaaactggccccaaccttaaaaaagaacttgagaagaactccaaggacaaggctaatgtttcaactgggacaaaagatgataagagtgtgagcaaacctaaggaggctattatcaaaggcaaggattcaaaagacgaaggcaagtccactgaaggaaaagctaagcctggtcggaaaccaaaaaatgctggtactcctgcgggtgattctgacaaagagaagcaggaggtagaagtcaaggcagctgaaatagaggaggcatcaggaaatgcttccacagggaagaagcgtaggaggaaggcttgaagttagcgctgatgaacttctcttgtaaatggatgtgctccctcctaggtttgctcctttaggaccttgtattattgagtgttaacttggaatttcgtctgattggtccctagtagttagttaggtgtggaagcaacatttgctatagccgtagtgttaggagtaccatgtgttcgttgtggtcaggtccatggtgcattggtgctgagccttaagcggaatgaaccctatgctcgctgtgaggcccatggcatcgtgttgtcgggtggtgttgtagcttgttgatgccctattttatattattatacgcgattgaagcagtggattttgtagcaaatgtaccttttggactaggatgttggcctggttttcgagttgtccttgtttctctgctacatgc

SEQ ID NO: 43984 - DNA, 2313 bp, Zea Mays
ttctcaacttggcattgctcttttctctggctaggagttctggacattcagaagccatcatatcctgcatggaaacaataatgagattggtaattgaggagagtgaggatgtccaaccacagattgcttcatgtctactccaaaatgttagaaaagaagaaaaggaatcttcaccttcctttgagcttgctgaaaaagtgataggtacatgtcgtgaaaaacttaagccagtctttctgcaatcactaaaaggcacttccttgagcgaatacagccaaatcgtcgcatcagtttgtgaagaggtttcagatgacagggaagataacaatgctaatccttctgggaaggacatggtggatgatggcaagctctctgaaaggactatttctgatgaattacctcaggaatcttcaaagatggagcaagatgttagccgtcctgaacaagacggtacttctatgaatggtgatacagttactgctattagcagtggtgctactccgccagatactagtgagtctgatcaaggaccaccttccacaaatgagaagattgaacaaccatgctatgcccaaaacatagcagatgctatgcagttgaaatctgaccacaatgaaggtgctgagtccaatgctgcaaagcccaataagaaagctacccttggttcagtaaaaaatactaagctcaaaccgtccgataaatgtgaaccaactgtgcattctgatgctgacactaaaaagcaagatcttgtagcatctgcagagggatccaatggagcagccgatgatacatcaagacctgctgatagtacacctaaacccaagcgaggtcgtcctcctggtccaaagtcattgcagaaggctcctgggaaggatcaatctccaggtttggatttgaaaaaggtcaatgatgattcagctgggaagctggcgaaacgatcagctaaggatgagaagccttctgcaaaaaacactggtgaaggagaaccatctaagaagactcaaaagaacaatttaaaacagcataagggtgaaactctttctgaggatgatcctgccaaggatctgagcttaaaggaaatgatatcgctgaaatcttcgaccaagggcccaggtagaaccaaagggcaaaccacagagaatagcacacctaagttgaagcaagaacaagaaactgatgagcctccacgttcaaggaaaaacaaaggccttgatagaagtctagttggtgcaaggatcaaagtttggtggccagatgataagatgttctacaatggtattgtggagtcatttgatgctgtttctaagaggcacaaggtagcatatgatgatggggatgtagaggtactactgctgagggaggaaaagtgggaattcatcagtgaggagaaggaagcttctatggcatctgaaacgccacgaggcagaaaaagaaaagcggatgcattgaaggaagaaaatacagaaacacctaaaagtgatgctgtggatcctccaaagaaaagaggacgtccaaaaggtgtgggatccagcaatgggacacccagtacctcagctactccgagcacaaaggggaaaactgccggcaaggttaccaaagaaacacctaaaactggccccaaccttaaaaaagaacttgagaagaactccaaggacaaggctaatgtttcaactgggacaaaagatgataagagtgtgagcaaacctaaggaggctattatcaaaggcaaggattcaaaagacgaaggcaagtccactgaaggaaaagctaagcctggtcggaaaccaaaaaatgctggtactcctgcgggtgattctgacaaagagaagcaggaggtagaagtcaaggcagctgaaatagaggaggcatcaggaaatgcttccacagggaagaagcgtaggaggaaggcttgaagttagcgctgatgaacttctcttgtaaatggatgtgctccctcctaggtttgctcctttaggaccttgtattattgagtgttaacttggaatttcgtctgattggtccctagtagttagttaggtgtggaagcaacatttgctatagccgtagtgttaggagtaccatgtgttcgttgtggtcaggtccatggtgcattggtgctgagccttaagcggaatgaaccctatgctcgctgtgaggcccatggcatcgtgttgtcgggtggtgttgtagcttgttgatgccctattttatattattatacgcgattgaagcagtggattttgtagcaaatgtaccttttggactaggatgttggcctggttttcgagttgtccttgtttctctgctacatgc

SEQ ID NO: 43985 - DNA, 3294 bp, Zea Mays
ccacaccacaaacgaacacaaaggcaccagcccccgcccgcgcaccgaaacctcgtcgcgtagcgcgggggcgaggagagggacggggggcgaggagagaatacccactgcggaatctcattctcatccagcaccgctccaccgctaaacccctctcgtgctcctcgacggcactgacgccgagtgcgacgccgagcgaggtcgcgactcgcgagggggaaccctagcagcgatagatctagagcgggcgctttcgatctgtccgggaaatggcggaggatcctgccgcggaacaggagacgcggcagctagaggaccggctcagggatgtcggggaacggctgcaggcgccttccgacgacgcggaggacctgctcaacctcctcatcgggcacgatgacggtggaaactgtggaaccaggaaaactgatgctttaatataattttagcattttttagtttcatttttcttactgtacagagcaatttgccatggtttagggtttactggaaatgatgtactcatactgtttgagtaaatatgaagactttgatcttgctaactgacctacctaagcttgttcctcgaatcgtatgaagtcatcaggttggttgatggtttgttcatgcaggaagttgaggaatgtttaattaaagtagagcagtcacctcgcgaaagcatatcaaatgctcttcgcccagcaactgaagctctggtcaagaaagagctgctgggccatgctgattcaaatgttagacttgctgtggcatcatgcatatctgagatcacacggatcacggcgcctgatgctccatatgatgatgatgcaatgaaggatgtattctctttaattgtgggggcctttgagcatctggatgacatagagagccccttctttggaaggagaacttcaattcttgatactgtggcaaaagttcggtcctgcgtggtgatgctagatcttgaatgtgatgatttgataaatgatatgttccatcacttcttgaggactgctaattctggacattcagaagccatcatatcctgcatggaaacaataatgagattggtaattgaggagagtgaggatgtccaaccacagattgcttcatgtctactccaaaatgttagaaaagaagaaaaggaatcttcaccttcctttgagcttgctgaaaaagtgataggtacatgtcgtgaaaaacttaagccagtctttctgcaatcactaaaaggcacttccttgagcgaatacagccaaatcgtcgcatcagtttgtgaagaggtttcagatgacagggaagataacaatgctaatccttctgggaaggacatggtggatgatggcaagctctctgaaaggactatttctgatgaattacctcaggaatcttcaaagatggagcaagatgttagccgtcctgaacaagacggtacttctatgaatggtgatacagttactgctattagcagtggtgctactccgccagatactagtgagtctgatcaaggaccaccttccacaaatgagaagattgaacaaccatgctatgcccaaaacatagcagatgctatgcagttgaaatctgaccacaatgaaggtgctgagtccaatgctgcaaagcccaataagaaagctacccttggttcagtaaaaaatactaagctcaaaccgtccgataaatgtgaaccaactgtgcattctgatgctgacactaaaaagcaagatcttgtagcatctgcagagggatccaatggagcagccgatgatacatcaagacctgctgatagtacacctaaacccaagcgaggtcgtcctcctggtccaaagtcattgcagaaggctcctgggaaggatcaatctccaggtttggatttgaaaaaggtcaatgatgattcagctgggaagctggcgaaacgatcagctaaggatgagaagccttctgcaaaaaacactggtgaaggagaaccatctaagaagactcaaaagaacaatttaaaacagcataagggtgaaactctttctgaggatgatcctgccaaggatctgagcttaaaggaaatgatatcgctgaaatcttcgaccaagggcccaggtagaaccaaagggcaaaccacagagaatagcacacctaagttgaagcaagaacaagaaactgatgagcctccacgttcaaggaaaaacaaaggccttgatagaagtctagttggtgcaaggatcaaagtttggtggccagatgataagatgttctacaatggtattgtggagtcatttgatgctgtttctaagaggcacaaggtagcatatgatgatggggatgtagaggtactactgctgagggaggaaaagtgggaattcatcagtgaggagaaggaagcttctatggcatctgaaacgccacgaggcagaaaaagaaaagcggatgcattgaaggaagaaaatacagaaacacctaaaagtgatgctgtggatcctccaaagaaaagaggacgtccaaaaggtgtgggatccagcaatgggacacccagtacctcagctactccgagcacaaaggggaaaactgccggcaaggttaccaaagaaacacctaaaactggccccaaccttaaaaaagaacttgagaagaactccaaggacaaggctaatgtttcaactgggacaaaagatgataagagtgtgagcaaacctaaggaggctattatcaaaggcaaggattcaaaagacgaaggcaagtccactgaaggaaaagctaagcctggtcggaaaccaaaaaatgctggtactcctgcgggtgattctgacaaagagaagcaggaggtagaagtcaaggcagctgaaatagaggaggcatcaggaaatgcttccacagggaagaagcgtaggaggaaggcttgaagttagcgctgatgaacttctcttgtaaatggatgtgctccctcctaggtttgctcctttaggaccttgtattattgagtgttaacttggaatttcgtctgattggtccctagtagttagttaggtgtggaagcaacatttgctatagccgtagtgttaggagtaccatgtgttcgttgtggtcaggtccatggtgcattggtgctgagccttaagcggaatgaaccctatgctcgctgtgaggcccatggcatcgtgttgtcgggtggtgttgtagcttgttgatgccctattttatattattatacgcgattgaagcagtggattttgtagcaaatgtaccttttggactaggatgttggcctggttttcgagttgtccttgtttctctgctacatgc

SEQ ID NO: 43986 - DNA, 3396 bp, Zea Mays
ctgctaggtttggcctcagatgatgaccaggatgaattgtcgacagatcctgatgaactgtgatcgaagaaagtgaagatatgagtggcgatgaggaggatatgttccggaacctcctcttgagagctggtttttgtcttacatacaaagataactatactcaaccacaagttatctaagagagaaaattataacagatgctactgcgatagctggattccttactgatctgcgtgtttatctggataacccagcaaaggttaagcgtatgcttcttccaaccaaagtatccaccaagagtggtggaaccaaagatacttcaaagtgtgattcaagctcaagctccacaagcctcattactttgttgatggggattagtgccttgaagcaggctattatagatttgcttctagatataatggttgaatgttgccaaccttcagaagaaagtggttcctcagcaagcactaaagcttttcccgattcaaatggggctagctctccaccagagcttagtgttgaaggtgatctaacagaatatgcatgcagtgatgtgtatgcgagagttgaatctaatagtgatgatattcgggatagtcctgtaatttgtaatgcaggtttggctgcaactgagattgctgtaaataatatagaacattcctgttttcctccagaaacatctgctgctgatttgccagcagatgaaggctccgagcaggcttcctggtcaaaatgtccagagcaatcagaggaattgttagggttgattgttaattcattgagggcattggacagcactgtcccgcatgggtgctgtgaaccaagaaggcggccgcaggctgtccggaagattgcacttgtcctagagaaagctccaaaacagctccagcaagatttgatttcccttgtaccgaagttggtggatggttcggaacactctcttgcagcttgtgccctgttggatcatcttcaaaggccagatgcagagccttcattgagattgccactgccattacttatgttcttaaggcggcatcacagtgtgagcatctttctgtagcggttagagctgttagatggagattgaaagatttgggaactgaagttccacattgtgtgcttgactttttatctaaaacaattcaaacccagctagatgtagctgaagctatattgaaggatattgattctgattgtgagcctgaaaacaattgcctagcatcaacatcaccttctagtacttgttctacagatgggctttcagctgaagggatgtattcttggcaagagcaagctgtgcatggaagaagtcatctatcagatgtttttgcactgatagaaatgttatcaatgcctggattatttgttgaagtcgcacaggttattgagagggctttattgcgagggtcctttggtctacaattagtagccatggtgctggaaagaagacattcttacaggtcaagttcaaagtctgggtctgttgtgaatgattcacagaacaaagaagttctgttagatgggcagtttgaacctttatctgtccaagaaaatgatttcacttcagtccttgcacttggtgaggtattatctctatctacagaaacgaaggttcaagattttgtgcggatgctttatgctatcatatttaagatctatgctgaggatcatcataggtatagaatccttaagggccttgttgaacgagcaacaaatacatcagataactgccgagcagttgacatcgatatggatgtcttggtatttcttgttaaggaggagtatgggatcgcgagacctgttttgaacatgatgtgtgaggttgctgaagttgctcaggctgaccgtgcaaatctttggcaccaaatatgtgctactgaagatgaaaatattcgtcttcgagaggacatggaaatggagcaaacaaatttcaccaatgaaaagattgcactaaaccaacggctaactgagttggaggcaactattggcagtctaaggtctgagctaaaagctgagagggatcgttttactcgtgagaagaaggcattatctgatcagatgcgagagattgagaatcagttggaatgggtgcgatcagagaaagatgatcagattgcaaagctctcctctgaaaagaggaatcttcatgatcggcttaatgacgcagagtcacaactcgccttggtgaaagcacggaaacgtgaagaattaaagaaagtgacaaaggagaaaaatacattagcagaacagctgaagaatgctgaagcttcaaggaaaaggtttgatgatgaattaaaacgttatgcagctgaaacacagactcgtgaagaaattcgaaaatcacttgagaatgaagtgagaaggctgacacagacagtggggcaaacagagggagaaaaaagggaaaaagaagagcaaattactcgttgtgaagcatacattgatgggatggaatccaaactgcaagtttgccagcaatacatccggacacttgaaacgtccctccaagaagaggtggcccggcatgctccactatacggtgtcggcgtcgaatcattgtcgtttaatgagctggaggcactcgcaaacatccacgagcagagtttaaggcagatcaaagctatccagcaaaggaaaggtagcagccatctcttgggtggcaccgccctttctcacatccctgccctattctccccgccgcctccttcagcggcagttggctctccggcctcacggatccccgcatccccaatggcaccaaacggtgcagggatgcacgggaacgggcaccacatgaacagcacgactggcggccgctggttcaacccgagctgagtgataaggtgcaaagattttgtgattcaacgggccacatttgcataggcgtattttgcagccgctgagcaagcccaacgtcaaccccattttgttcctggccttccgtcaggctttcttcttgtacttaggctctcctcaccataagatctaagtggatgtgcagaacacttctggcaatataggcatagtggagttcggaatatagatggcgggggtaggtcttctggtgaggtcggccttacttggtagtgccgtcgtcgtcttgatatcgcatgggcgtggagagcttggtatgaaataatgcatgtaataatcaagtgaaccgatggaaataccaggtacaagtggagggctatgggaatggttgtgcttgttcactttctaaaggcattcaggttcatttgttttagaggagtgttgcggatggtaaagacgaccgagttcgaagcttttattttctttagagttgcatacatagtagtccttgcacatgtcaggggtgtcacttcggtataaacttcgaaagcagaacgtgtttgcatcgcatgcctctaagct

SEQ ID NO: 43987 - DNA, 3482 bp, Zea Mays
ctgctaggtttggcctcagatgatgaccaggatgaattgtcgacagatcctgatgaactgtgatcgaagaaagtgaagatatgagtggcgatgaggaggatatgttccggaacctcctcttgagagctggtttttgtcttacatacaaagataactatactcaaccacaagttatctaagagagaaaattataacagatgctactgcgatagctggattccttactgatctgcgtgtttatctggataacccagcaaaggttaagcgtatgcttcttccaaccaaagtatccaccaagagtggtggaaccaaagatacttcaaagtgtgattcaagctcaagctccacaagcctcattactttgttgatggggattagtgccttgaagcaggctattatagatttgcttctagatataatggttgaatgttgccaaccttcagaagaaagtggttcctcagcaagcactaaagcttttcccgattcaaatggggctagctctccaccagagcttagtgttgaaggtgatctaacagaatatgcatgcagtgatgtgtatgcgagagttgaatctaatagtgatgatattcgggatagtcctgtaatttgtaatgcaggtttggctgcaactgagattgctgtaaataatatagaacattcctgttttcctccagaaacatctgctgctgatttgccagcagatgaaggctccgagcaggcttcctggtcaaaatgtccagagcaatcagaggaattgttagggttgattgttaattcattgagggcattggacagcactgtcccgcatgggtgctgtgaaccaagaaggcggccgcaggctgtccggaagattgcacttgtcctagagaaagctccaaaacagctccagcaagatttgatttcccttgtaccgaagttggtggatggttcggaacactctcttgcagcttgtgccctgttggatcatcttcaaaggccagatgcagagccttcattgagattgccagtttttggtgctctttctgagttagaacttgaaagtgatatctggaaacaagcatctgttcatgcactcgaattattgtctgactcgaacgatgagcctcttgtagctgccattacttatgttcttaaggcggcatcacagtgttagagctgttagatggagattgaaagatttgggaactgaagttccacattgtgtgcttgactttttatctaaaacaattcaaacccagctagatgtagctgaagctatattgaaggatattgattctgattgtgagcctgaaaacaattgcctagcatcaacatcaccttctagtacttgttctacagatgggctttcagctgaagggatgtattcttggcaagagcaagctgtgcatggaagaagtcatctatcagatgtttttgcactgatagaaatgttatcaatgcctggattatttgttgaagtcgcacaggttattgagagggctttattgcgagggtcctttggtctacaattagtagccatggtgctggaaagaagacattcttacaggtcaagttcaaagtctgggtctgttgtgaatgattcacagaacaaagaagttctgttagatgggcagtttgaacctttatctgtccaagaaaatgatttcacttcagtccttgcacttggtgaggtattatctctatctacagaaacgaaggttcaagattttgtgcggatgctttatgctatcatatttaagatctatgctgaggatcatcataggtatagaatccttaagggccttgttgaacgagcaacaaatacatcagataactgccgagcagttgacatcgatatggatgtcttggtatttcttgttaaggaggagtatgggatcgcgagacctgttttgaacatgatgtgtgaggttgctgaagttgctcaggctgaccgtgcaaatctttggcaccaaatatgtgctactgaagatgaaaatattcgtcttcgagaggacatggaaatggagcaaacaaatttcaccaatgaaaagattgcactaaaccaacggctaactgagttggaggcaactattggcagtctaaggtctgagctaaaagctgagagggatcgttttactcgtgagaagaaggcattatctgatcagatgcgagagattgagaatcagttggaatgggtgcgatcagagaaagatgatcagattgcaaagctctcctctgaaaagaggaatcttcatgatcggcttaatgacgcagagtcacaactcgccttggtgaaagcacggaaacgtgaagaattaaagaaagtgacaaaggagaaaaatacattagcagaacagctgaagaatgctgaagcttcaaggaaaaggtttgatgatgaattaaaacgttatgcagctgaaacacagactcgtgaagaaattcgaaaatcacttgagaatgaagtgagaaggctgacacagacagtggggcaaacagagggagaaaaaagggaaaaagaagagcaaattactcgttgtgaagcatacattgatgggatggaatccaaactgcaagtttgccagcaatacatccggacacttgaaacgtccctccaagaagaggtggcccggcatgctccactatacggtgtcggcgtcgaatcattgtcgtttaatgagctggaggcactcgcaaacatccacgagcagagtttaaggcagatcaaagctatccagcaaaggaaaggtagcagccatctcttgggtggcaccgccctttctcacatccctgccctattctccccgccgcctccttcagcggcagttggctctccggcctcacggatccccgcatccccaatggcaccaaacggtgcagggatgcacgggaacgggcaccacatgaacagcacgactggcggccgctggttcaacccgagctgagtgataaggtgcaaagattttgtgattcaacgggccacatttgcataggcgtattttgcagccgctgagcaagcccaacgtcaaccccattttgttcctggccttccgtcaggctttcttcttgtacttaggctctcctcaccataagatctaagtggatgtgcagaacacttctggcaatataggcatagtggagttcggaatatagatggcgggggtaggtcttctggtgaggtcggccttacttggtagtgccgtcgtcgtcttgatatcgcatgggcgtggagagcttggtatgaaataatgcatgtaataatcaagtgaaccgatggaaataccaggtacaagtggagggctatgggaatggttgtgcttgttcactttctaaaggcattcaggttcatttgttttagaggagtgttgcggatggtaaagacgaccgagttcgaagcttttattttctttagagttgcatacatagtagtccttgcacatgtcaggggtgtcacttcggtataaacttcgaaagcagaacgtgtttgcatcgcatgcctctaagct

SEQ ID NO: 43988 - DNA, 3483 bp, Zea Mays
ctgctaggtttggcctcagatgatgaccaggatgaattgtcgacagatcctgatgaactgtgatcgaagaaagtgaagatatgagtggcgatgaggaggatatgttccggaacctcctcttgagagctggtttttgtcttacatacaaagataactatactcaaccacaagttatctaagagagaaaattataacagatgctactgcgatagctggattccttactgatctgcgtgtttatctggataacccagcaaaggttaagcgtatgcttcttccaaccaaagtatccaccaagagtggtggaaccaaagatacttcaaagtgtgattcaagctcaagctccacaagcctcattactttgttgatggggattagtgccttgaagcaggctattatagatttgcttctagatataatggttgaatgttgccaaccttcagaagaaagtggttcctcagcaagcactaaagcttttcccgattcaaatggggctagctctccaccagagcttagtgttgaaggtgatctaacagaatatgcatgcagtgatgtgtatgcgagagttgaatctaatagtgatgatattcgggatagtcctgtaatttgtaatgcaggtttggctgcaactgagattgctgtaaataatatagaacattcctgttttcctccagaaacatctgctgctgatttgccagcagatgaaggctccgagcaggcttcctggtcaaaatgtccagagcaatcagaggaattgttagggttgattgttaattcattgagggcattggacagcactgtcccgcatgggtgctgtgaaccaagaaggcggccgcaggctgtccggaagattgcacttgtcctagagaaagctccaaaacagctccagcaagatttgatttcccttgtaccgaagttggtggatggttcggaacactctcttgcagcttgtgccctgttggatcatcttcaaaggccagatgcagagccttcattgagattgccagtttttggtgctctttctgagttagaacttgaaagtgatatctggaaacaagcatctgttcatgcactcgaattattgtctgactcgaacgatgagcctcttgtagctgccattacttatgttcttaaggcggcatcacagtggttagagctgttagatggagattgaaagatttgggaactgaagttccacattgtgtgcttgactttttatctaaaacaattcaaacccagctagatgtagctgaagctatattgaaggatattgattctgattgtgagcctgaaaacaattgcctagcatcaacatcaccttctagtacttgttctacagatgggctttcagctgaagggatgtattcttggcaagagcaagctgtgcatggaagaagtcatctatcagatgtttttgcactgatagaaatgttatcaatgcctggattatttgttgaagtcgcacaggttattgagagggctttattgcgagggtcctttggtctacaattagtagccatggtgctggaaagaagacattcttacaggtcaagttcaaagtctgggtctgttgtgaatgattcacagaacaaagaagttctgttagatgggcagtttgaacctttatctgtccaagaaaatgatttcacttcagtccttgcacttggtgaggtattatctctatctacagaaacgaaggttcaagattttgtgcggatgctttatgctatcatatttaagatctatgctgaggatcatcataggtatagaatccttaagggccttgttgaacgagcaacaaatacatcagataactgccgagcagttgacatcgatatggatgtcttggtatttcttgttaaggaggagtatgggatcgcgagacctgttttgaacatgatgtgtgaggttgctgaagttgctcaggctgaccgtgcaaatctttggcaccaaatatgtgctactgaagatgaaaatattcgtcttcgagaggacatggaaatggagcaaacaaatttcaccaatgaaaagattgcactaaaccaacggctaactgagttggaggcaactattggcagtctaaggtctgagctaaaagctgagagggatcgttttactcgtgagaagaaggcattatctgatcagatgcgagagattgagaatcagttggaatgggtgcgatcagagaaagatgatcagattgcaaagctctcctctgaaaagaggaatcttcatgatcggcttaatgacgcagagtcacaactcgccttggtgaaagcacggaaacgtgaagaattaaagaaagtgacaaaggagaaaaatacattagcagaacagctgaagaatgctgaagcttcaaggaaaaggtttgatgatgaattaaaacgttatgcagctgaaacacagactcgtgaagaaattcgaaaatcacttgagaatgaagtgagaaggctgacacagacagtggggcaaacagagggagaaaaaagggaaaaagaagagcaaattactcgttgtgaagcatacattgatgggatggaatccaaactgcaagtttgccagcaatacatccggacacttgaaacgtccctccaagaagaggtggcccggcatgctccactatacggtgtcggcgtcgaatcattgtcgtttaatgagctggaggcactcgcaaacatccacgagcagagtttaaggcagatcaaagctatccagcaaaggaaaggtagcagccatctcttgggtggcaccgccctttctcacatccctgccctattctccccgccgcctccttcagcggcagttggctctccggcctcacggatccccgcatccccaatggcaccaaacggtgcagggatgcacgggaacgggcaccacatgaacagcacgactggcggccgctggttcaacccgagctgagtgataaggtgcaaagattttgtgattcaacgggccacatttgcataggcgtattttgcagccgctgagcaagcccaacgtcaaccccattttgttcctggccttccgtcaggctttcttcttgtacttaggctctcctcaccataagatctaagtggatgtgcagaacacttctggcaatataggcatagtggagttcggaatatagatggcgggggtaggtcttctggtgaggtcggccttacttggtagtgccgtcgtcgtcttgatatcgcatgggcgtggagagcttggtatgaaataatgcatgtaataatcaagtgaaccgatggaaataccaggtacaagtggagggctatgggaatggttgtgcttgttcactttctaaaggcattcaggttcatttgttttagaggagtgttgcggatggtaaagacgaccgagttcgaagcttttattttctttagagttgcatacatagtagtccttgcacatgtcaggggtgtcacttcggtataaacttcgaaagcagaacgtgtttgcatcgcatgcctctaagct

SEQ ID NO: 43989 - DNA, 3150 bp, Zea Mays
ctgctaggtttggcctcagatgatgaccaggatgaattgtcgacagatcctgatgaactgtgatcgaagaaagtgaagatatgagtggcgatgaggaggatatgttccggaacctcctcttgagagctggtttttgtcttacatacaaagataactatactcaaccacaagttatctaagagagaaaattataacagatgctactgcgatagctggattccttactgatctgcgtgtttatctggataacccagcaaaggttaagcgtatgcttcttccaaccaaagtatccaccaagagtggtggaaccaaagatacttcaaagtgtgattcaagctcaagctccacaagcctcattactttgttgatggggattagtgccttgaagcaggctattatagatttgcttctagatataatggttgaatgttgccaaccttcagaagaaagtggttcctcagcaagcactaaagcttttcccgattcaaatggggctagctctccaccagagcttagtgttgaaggtgatctaacagaatatgcatgcagtgatgtgtatgcgagagttgaatctaatagtgatgatattcgggatagtcctgtaatttgtaatgcaggtttggctgcaactgagattgctgtaaataatatagaacattcctgttttcctccagaaacatctgctgctgatttgccagcagatgaaggctccgagcaggcttcctggtcaaaatgtccagagcaatcagaggaattgttagggttgattgttaattcattgagggcattggacagcactgtcccgcatgggtgctgtgaaccaagaaggcggccgcaggctgtccggaagattgcacttgtcctagagaaagctccaaaacagctccagcaagatttgatttcccttgtaccgaagttggtggatggttcggaacactctcttgcagcttgtgccctgttggatcatcttcaaaggccagatgcagagccttcattgagattgccaatgggctttcagctgaagggatgtattcttggcaagagcaagctgtgcatggaagaagtcatctatcagatgtttttgcactgatagaaatgttatcaatgcctggattatttgttgaagtcgcacaggttattgagagggctttattgcgagggtcctttggtctacaattagtagccatggtgctggaaagaagacattcttacaggtcaagttcaaagtctgggtctgttgtgaatgattcacagaacaaagaagttctgttagatgggcagtttgaacctttatctgtccaagaaaatgatttcacttcagtccttgcacttggtgaggtattatctctatctacagaaacgaaggttcaagattttgtgcggatgctttatgctatcatatttaagatctatgctgaggatcatcataggtatagaatccttaagggccttgttgaacgagcaacaaatacatcagataactgccgagcagttgacatcgatatggatgtcttggtatttcttgttaaggaggagtatgggatcgcgagacctgttttgaacatgatgtgtgaggttgctgaagttgctcaggctgaccgtgcaaatctttggcaccaaatatgtgctactgaagatgaaaatattcgtcttcgagaggacatggaaatggagcaaacaaatttcaccaatgaaaagattgcactaaaccaacggctaactgagttggaggcaactattggcagtctaaggtctgagctaaaagctgagagggatcgttttactcgtgagaagaaggcattatctgatcagatgcgagagattgagaatcagttggaatgggtgcgatcagagaaagatgatcagattgcaaagctctcctctgaaaagaggaatcttcatgatcggcttaatgacgcagagtcacaactcgccttggtgaaagcacggaaacgtgaagaattaaagaaagtgacaaaggagaaaaatacattagcagaacagctgaagaatgctgaagcttcaaggaaaaggtttgatgatgaattaaaacgttatgcagctgaaacacagactcgtgaagaaattcgaaaatcacttgagaatgaagtgagaaggctgacacagacagtggggcaaacagagggagaaaaaagggaaaaagaagagcaaattactcgttgtgaagcatacattgatgggatggaatccaaactgcaagtttgccagcaatacatccggacacttgaaacgtccctccaagaagaggtggcccggcatgctccactatacggtgtcggcgtcgaatcattgtcgtttaatgagctggaggcactcgcaaacatccacgagcagagtttaaggcagatcaaagctatccagcaaaggaaaggtagcagccatctcttgggtggcaccgccctttctcacatccctgccctattctccccgccgcctccttcagcggcagttggctctccggcctcacggatccccgcatccccaatggcaccaaacggtgcagggatgcacgggaacgggcaccacatgaacagcacgactggcggccgctggttcaacccgagctgagtgataaggtgcaaagattttgtgattcaacgggccacatttgcataggcgtattttgcagccgctgagcaagcccaacgtcaaccccattttgttcctggccttccgtcaggctttcttcttgtacttaggctctcctcaccataagatctaagtggatgtgcagaacacttctggcaatataggcatagtggagttcggaatatagatggcgggggtaggtcttctggtgaggtcggccttacttggtagtgccgtcgtcgtcttgatatcgcatgggcgtggagagcttggtatgaaataatgcatgtaataatcaagtgaaccgatggaaataccaggtacaagtggagggctatgggaatggttgtgcttgttcactttctaaaggcattcaggttcatttgttttagaggagtgttgcggatggtaaagacgaccgagttcgaagcttttattttctttagagttgcatacatagtagtccttgcacatgtcaggggtgtcacttcggtataaacttcgaaagcagaacgtgtttgcatcgcatgcctctaagct

SEQ ID NO: 43990 - DNA, 3489 bp, Zea Mays
ctgctaggtttggcctcagatgatgaccaggatgaattgtcgacagatcctgatgaactgtgatcgaagaaagtgaagatatgagtggcgatgaggaggatatgttccggaacctcctcttgagagctggtttttgtcttacatacaaagataactatactcaaccacaagttatctaagagagaaaattataacagatgctactgcgatagctggattccttactgatctgcgtgtttatctggataacccagcaaaggttaagcgtatgcttcttccaaccaaagtatccaccaagagtggtggaaccaaagatacttcaaagtgtgattcaagctcaagctccacaagcctcattactttgttgatggggattagtgccttgaagcaggctattatagatttgcttctagatataatggttgaatgttgccaaccttcagaagaaagtggttcctcagcaagcactaaagcttttcccgattcaaatggggctagctctccaccagagcttagtgttgaaggtgatctaacagaatatgcatgcagtgatgtgtatgcgagagttgaatctaatagtgatgatattcgggatagtcctgtaatttgtaatgcaggtttggctgcaactgagattgctgtaaataatatagaacattcctgttttcctccagaaacatctgctgctgatttgccagcagatgaaggctccgagcaggcttcctggagcaatcagaggaattgttagggttgattgttaattcattgagggcattggacagcactgtcccgcatgggtgctgtgaaccaagaaggcggccgcaggctgtccggaagattgcacttgtcctagagaaagctccaaaacagctccagcaagatttgatttcccttgtaccgaagttggtggatggttcggaacactctcttgcagcttgtgccctgttggatcatcttcaaaggccagatgcagagccttcattgagattgccagtttttggtgctctttctgagttagaacttgaaagtgatatctggaaacaagcatctgttcatgcactcgaattattgtctgactcgaacgatgagcctcttgtagctgccattacttatgttcttaaggcggcatcacagtgtgagcatctttctgtagcggttagagctgttagatggagattgaaagatttgggaactgaagttccacattgtgtgcttgactttttatctaaaacaattcaaacccagctagatgtagctgaagctatattgaaggatattgattctgattgtgagcctgaaaacaattgcctagcatcaacatcaccttctagtacttgttctacagatgggctttcagctgaagggatgtattcttggcaagagcaagctgtgcatggaagaagtcatctatcagatgtttttgcactgatagaaatgttatcaatgcctggattatttgttgaagtcgcacaggttattgagagggctttattgcgagggtcctttggtctacaattagtagccatggtgctggaaagaagacattcttacaggtcaagttcaaagtctgggtctgttgtgaatgattcacagaacaaagaagttctgttagatgggcagtttgaacctttatctgtccaagaaaatgatttcacttcagtccttgcacttggtgaggtattatctctatctacagaaacgaaggttcaagattttgtgcggatgctttatgctatcatatttaagatctatgctgaggatcatcataggtatagaatccttaagggccttgttgaacgagcaacaaatacatcagataactgccgagcagttgacatcgatatggatgtcttggtatttcttgttaaggaggagtatgggatcgcgagacctgttttgaacatgatgtgtgaggttgctgaagttgctcaggctgaccgtgcaaatctttggcaccaaatatgtgctactgaagatgaaaatattcgtcttcgagaggacatggaaatggagcaaacaaatttcaccaatgaaaagattgcactaaaccaacggctaactgagttggaggcaactattggcagtctaaggtctgagctaaaagctgagagggatcgttttactcgtgagaagaaggcattatctgatcagatgcgagagattgagaatcagttggaatgggtgcgatcagagaaagatgatcagattgcaaagctctcctctgaaaagaggaatcttcatgatcggcttaatgacgcagagtcacaactcgccttggtgaaagcacggaaacgtgaagaattaaagaaagtgacaaaggagaaaaatacattagcagaacagctgaagaatgctgaagcttcaaggaaaaggtttgatgatgaattaaaacgttatgcagctgaaacacagactcgtgaagaaattcgaaaatcacttgagaatgaagtgagaaggctgacacagacagtggggcaaacagagggagaaaaaagggaaaaagaagagcaaattactcgttgtgaagcatacattgatgggatggaatccaaactgcaagtttgccagcaatacatccggacacttgaaacgtccctccaagaagaggtggcccggcatgctccactatacggtgtcggcgtcgaatcattgtcgtttaatgagctggaggcactcgcaaacatccacgagcagagtttaaggcagatcaaagctatccagcaaaggaaaggtagcagccatctcttgggtggcaccgccctttctcacatccctgccctattctccccgccgcctccttcagcggcagttggctctccggcctcacggatccccgcatccccaatggcaccaaacggtgcagggatgcacgggaacgggcaccacatgaacagcacgactggcggccgctggttcaacccgagctgagtgataaggtgcaaagattttgtgattcaacgggccacatttgcataggcgtattttgcagccgctgagcaagcccaacgtcaaccccattttgttcctggccttccgtcaggctttcttcttgtacttaggctctcctcaccataagatctaagtggatgtgcagaacacttctggcaatataggcatagtggagttcggaatatagatggcgggggtaggtcttctggtgaggtcggccttacttggtagtgccgtcgtcgtcttgatatcgcatgggcgtggagagcttggtatgaaataatgcatgtaataatcaagtgaaccgatggaaataccaggtacaagtggagggctatgggaatggttgtgcttgttcactttctaaaggcattcaggttcatttgttttagaggagtgttgcggatggtaaagacgaccgagttcgaagcttttattttctttagagttgcatacatagtagtccttgcacatgtcaggggtgtcacttcggtataaacttcgaaagcagaacgtgtttgcatcgcatgcctctaagct

SEQ ID NO: 43991 - DNA, 3292 bp, Zea Mays
ctgctaggtttggcctcagatgatgaccaggatgaattgtcgacagatcctgatgaactgtgatcgaagaaagtgaagatatgagtggcgatgaggaggatatgttccggaacctcctcttgagagctggtttttgtcttacatacaaagataactatactcaaccacaagttatctaagagagaaaattataacagatgctactgcgatagctggattccttactgatctgcgtgtttatctggataacccagcaaaggttaagcgtatgcttcttccaaccaaagtatccaccaagagtggtggaaccaaagatacttcaaagtgtgattcaagctcaagctccacaagcctcattactttgttgatggggattagtgccttgaagcaggctattatagatttgcttctagatataatggttgaatgttgccaaccttcagaagaaagtggttcctcagcaagcactaaagcttttcccgattcaaatggggctagctctccaccagagcttagtgttgaaggtgatctaacagaatatgcatgcagtgatgtgtatgcgagagttgaatctaatagtgatgatattcgggatagtcctgtaatttgtaatgcaggtttggctgcaactgagattgctgtaaataatatagaacattcctgttttcctccagaaacatctgctgctgatttgccagcagatgaaggctccgagcaggcttcctggtcaaaatgtccagagcaatcagaggaattgttagggttgattgttaattcattgagggcattggacagcactgtcccgcatgggtgctgtgaaccaagaaggcggccgcaggctgtccggaagattgcacttgtcctagagaaagctccaaaacagctccagcaagatttgatttcccttgtaccgaagttggtggatggttcggaacactctcttgcagcttgtgccctgttggatcatcttcaaaggccagatgcagagccttcattgagattgccagtttttggtgctctttctgagttagaacttgaaagtgatatctggaaacaagcatctgttcatgcactcgaattattgtctgactcgaacgatgagcctcttgtagctgccattacttatgttcttaaggcggcatcacagtatgggctttcagctgaagggatgtattcttggcaagagcaagctgtgcatggaagaagtcatctatcagatgtttttgcactgatagaaatgttatcaatgcctggattatttgttgaagtcgcacaggttattgagagggctttattgcgagggtcctttggtctacaattagtagccatggtgctggaaagaagacattcttacaggtcaagttcaaagtctgggtctgttgtgaatgattcacagaacaaagaagttctgttagatgggcagtttgaacctttatctgtccaagaaaatgatttcacttcagtccttgcacttggtgaggtattatctctatctacagaaacgaaggttcaagattttgtgcggatgctttatgctatcatatttaagatctatgctgaggatcatcataggtatagaatccttaagggccttgttgaacgagcaacaaatacatcagataactgccgagcagttgacatcgatatggatgtcttggtatttcttgttaaggaggagtatgggatcgcgagacctgttttgaacatgatgtgtgaggttgctgaagttgctcaggctgaccgtgcaaatctttggcaccaaatatgtgctactgaagatgaaaatattcgtcttcgagaggacatggaaatggagcaaacaaatttcaccaatgaaaagattgcactaaaccaacggctaactgagttggaggcaactattggcagtctaaggtctgagctaaaagctgagagggatcgttttactcgtgagaagaaggcattatctgatcagatgcgagagattgagaatcagttggaatgggtgcgatcagagaaagatgatcagattgcaaagctctcctctgaaaagaggaatcttcatgatcggcttaatgacgcagagtcacaactcgccttggtgaaagcacggaaacgtgaagaattaaagaaagtgacaaaggagaaaaatacattagcagaacagctgaagaatgctgaagcttcaaggaaaaggtttgatgatgaattaaaacgttatgcagctgaaacacagactcgtgaagaaattcgaaaatcacttgagaatgaagtgagaaggctgacacagacagtggggcaaacagagggagaaaaaagggaaaaagaagagcaaattactcgttgtgaagcatacattgatgggatggaatccaaactgcaagtttgccagcaatacatccggacacttgaaacgtccctccaagaagaggtggcccggcatgctccactatacggtgtcggcgtcgaatcattgtcgtttaatgagctggaggcactcgcaaacatccacgagcagagtttaaggcagatcaaagctatccagcaaaggaaaggtagcagccatctcttgggtggcaccgccctttctcacatccctgccctattctccccgccgcctccttcagcggcagttggctctccggcctcacggatccccgcatccccaatggcaccaaacggtgcagggatgcacgggaacgggcaccacatgaacagcacgactggcggccgctggttcaacccgagctgagtgataaggtgcaaagattttgtgattcaacgggccacatttgcataggcgtattttgcagccgctgagcaagcccaacgtcaaccccattttgttcctggccttccgtcaggctttcttcttgtacttaggctctcctcaccataagatctaagtggatgtgcagaacacttctggcaatataggcatagtggagttcggaatatagatggcgggggtaggtcttctggtgaggtcggccttacttggtagtgccgtcgtcgtcttgatatcgcatgggcgtggagagcttggtatgaaataatgcatgtaataatcaagtgaaccgatggaaataccaggtacaagtggagggctatgggaatggttgtgcttgttcactttctaaaggcattcaggttcatttgttttagaggagtgttgcggatggtaaagacgaccgagttcgaagcttttattttctttagagttgcatacatagtagtccttgcacatgtcaggggtgtcacttcggtataaacttcgaaagcagaacgtgtttgcatcgcatgcctctaagct

SEQ ID NO: 43992 - DNA, 3312 bp, Zea Mays
ctgctaggtttggcctcagatgatgaccaggatgaattgtcgacagatcctgatgaactgtgatcgaagaaagtgaagatatgagtggcgatgaggaggatatgttccggaacctcctcttgagagctggtttttgtcttacatacaaagataactatactcaaccacaagttatctaagagagaaaattataacagatgctactgcgatagctggattccttactgatctgcgtgtttatctggataacccagcaaaggttaagcgtatgcttcttccaaccaaagtatccaccaagagtggtggaaccaaagatacttcaaagtgtgattcaagctcaagctccacaagcctcattactttgttgatggggattagtgccttgaagcaggctattatagatttgcttctagatataatggttgaatgttgccaaccttcagaagaaagtggttcctcagcaagcactaaagcttttcccgattcaaatggggctagctctccaccagagcttagtgttgaaggtgatctaacagaatatgcatgcagtgatgtgtatgcgagagttgaatctaatagtgatgatattcgggatagtcctgtaatttgtaatgcaggtttggctgcaactgagattgctgtaaataatatagaacattcctgttttcctccagaaacatctgctgctgatttgccagcagatgaaggctccgagcaggcttcctggtcaaaatgtccagagcaatcagaggaattgttagggttgattgttaattcattgagggcattggacagcactgtcccgcatgggtgctgtgaaccaagaaggcggccgcaggctgtccggaagattgcacttgtcctagagaaagctccaaaacagctccagcaagatttgatttcccttgtaccgaagttggtggatggttcggaacactctcttgcagcttgtgccctgttggatcatcttcaaaggccagatgcagagccttcattgagattgccagtttttggtgctctttctgagttagaacttgaaagtgatatctggaaacaagcatctgttcatgcactcgaattattgtctgactcgaacgatgagcctcttgtagctgccattacttatgttcttaaggcggcatcacagtgtgagcatctttctgtagcgatgggctttcagctgaagggatgtattcttggcaagagcaagctgtgcatggaagaagtcatctatcagatgtttttgcactgatagaaatgttatcaatgcctggattatttgttgaagtcgcacaggttattgagagggctttattgcgagggtcctttggtctacaattagtagccatggtgctggaaagaagacattcttacaggtcaagttcaaagtctgggtctgttgtgaatgattcacagaacaaagaagttctgttagatgggcagtttgaacctttatctgtccaagaaaatgatttcacttcagtccttgcacttggtgaggtattatctctatctacagaaacgaaggttcaagattttgtgcggatgctttatgctatcatatttaagatctatgctgaggatcatcataggtatagaatccttaagggccttgttgaacgagcaacaaatacatcagataactgccgagcagttgacatcgatatggatgtcttggtatttcttgttaaggaggagtatgggatcgcgagacctgttttgaacatgatgtgtgaggttgctgaagttgctcaggctgaccgtgcaaatctttggcaccaaatatgtgctactgaagatgaaaatattcgtcttcgagaggacatggaaatggagcaaacaaatttcaccaatgaaaagattgcactaaaccaacggctaactgagttggaggcaactattggcagtctaaggtctgagctaaaagctgagagggatcgttttactcgtgagaagaaggcattatctgatcagatgcgagagattgagaatcagttggaatgggtgcgatcagagaaagatgatcagattgcaaagctctcctctgaaaagaggaatcttcatgatcggcttaatgacgcagagtcacaactcgccttggtgaaagcacggaaacgtgaagaattaaagaaagtgacaaaggagaaaaatacattagcagaacagctgaagaatgctgaagcttcaaggaaaaggtttgatgatgaattaaaacgttatgcagctgaaacacagactcgtgaagaaattcgaaaatcacttgagaatgaagtgagaaggctgacacagacagtggggcaaacagagggagaaaaaagggaaaaagaagagcaaattactcgttgtgaagcatacattgatgggatggaatccaaactgcaagtttgccagcaatacatccggacacttgaaacgtccctccaagaagaggtggcccggcatgctccactatacggtgtcggcgtcgaatcattgtcgtttaatgagctggaggcactcgcaaacatccacgagcagagtttaaggcagatcaaagctatccagcaaaggaaaggtagcagccatctcttgggtggcaccgccctttctcacatccctgccctattctccccgccgcctccttcagcggcagttggctctccggcctcacggatccccgcatccccaatggcaccaaacggtgcagggatgcacgggaacgggcaccacatgaacagcacgactggcggccgctggttcaacccgagctgagtgataaggtgcaaagattttgtgattcaacgggccacatttgcataggcgtattttgcagccgctgagcaagcccaacgtcaaccccattttgttcctggccttccgtcaggctttcttcttgtacttaggctctcctcaccataagatctaagtggatgtgcagaacacttctggcaatataggcatagtggagttcggaatatagatggcgggggtaggtcttctggtgaggtcggccttacttggtagtgccgtcgtcgtcttgatatcgcatgggcgtggagagcttggtatgaaataatgcatgtaataatcaagtgaaccgatggaaataccaggtacaagtggagggctatgggaatggttgtgcttgttcactttctaaaggcattcaggttcatttgttttagaggagtgttgcggatggtaaagacgaccgagttcgaagcttttattttctttagagttgcatacatagtagtccttgcacatgtcaggggtgtcacttcggtataaacttcgaaagcagaacgtgtttgcatcgcatgcctctaagct

SEQ ID NO: 43993 - DNA, 5671 bp, Zea Mays
cccaaccaagccatcgctcctgtcctgcatctccatgagccaaagaccaaggaaaaagaatagggagaaaacacaccccgaaaaacaaaccaaaaatccccaatccatgaagcccaccacttccgccgccgccgccgccgtggcggcggttaccgtcaccaccgatgacccatccccttcgccgtccgactcaacgtcggcgacgttcacggtcgaccgccgtggggacgcttccgcctcctgccggtggacgctcccggacttcccccgcacccgcgcccgcaccttctacagccgatacttcgaggtcggcggcttcgactgccgcctcctcctctacccgcggggcgactcgcaggcgctgccggggtacctctccctctacctacaggtcctcgaccccaaagccccggtgtcgtcgtcgtcatccaccacgaccaccacctcctccaaatgggactgcttcctcagctaccgcctctccgtagtccaccccaccgatccagccaagtcgctgggccgcgattcctggcaccgattctcgtccaagaagcgctcccacggatggtgcgatttcgcgccctcctcctccgcccccttcctcttccagccccacgatgccctcgtcatttctgctgacatatctgtgctgtctgaggcggcctctttctccgatgccgacggtcgttttaactggaaggtgctcaattttggcctcttccgagaaatgatccgcacacagaagatcatgagccctgcattttttcctgcatctgcctctgctggcgggactgactgtgggctccggattagcgtctatcagagcaatgtatctggcgcagagcatttatctgtttgtctggaaagcaaggagcctgttgtgcaggtagcatccgggtcatcggcattggcatcaggtggtacagggagtggtgtgccagatggtgatcgtgggtgctggtgtcttttccgcatttcgatccttaatcagaggtctggtgggagccatatccacaaggactcatatggtcggtttggtgcggacagtgccagtcttggttggggagaatacatcaagatggatgagtttttggctgctgacggcggataccttgtagatggagctgtggtgtttagtgcctcagtgcatgtcataaaggagtcaaactcattcagtcggagcttgccaatggttcctggaatatgtggtgctggtggtgggcgtgctggggctaggaagtcagatggacactttgggaagtttgtgtggaggattgaaagcttcacaagacttaaggagcttctcaaaaagcgcaagatcgcgggtctgtgtatcaaaagcagacggtttcaagttgggaatcgagattgccgtcttattgtttatccacgggggcagtctcaaccgccatgccacctgtcagtgtttctggaagttacagatccccgaaatacaactactgaatggagttgctttgtgagccatcgtctctctgtcatcaaccaaaaagtggaggagaagtcgatcatgaaagagtctcagaatcgttactctaagtcagcgaaagattggggttggcgggaatttgtgacattaactagcctctttgatcaggatgcaggttttcttgtgcaggatactgttgtattttcagccgaggttctcattctgaaggaaacagcaactatgcaagagcttacagatgaagattctgaaacttgcagttcaacttatggatgtcagattgaagctttaccaaagcggccatcattcacatggaaagtggaaaatttcgtgtcttttaaggagattatggagtccagaaagatttttagtaaattttttcaggctgggggctgcgagctgcggataggtgtatatgagtcgtttgatacgatctgcatatacttggagagtgatcagtcatctgggtatgatcctgataagaacttttgggtgcactataaaatggctatagttaaccagaagaattctgcaaaaactgtgtgcaaagaatcttcaatctgcacgaaaacatggaataattcagttctccagtttatgaagacttcggacatggttgacactgacgctggctttcttgtccgggacactgttatttttacttgtgaaatcatagactgctgcccatggtttgatttctctgaccttgaggtttggcctcagatgatgaccaggatgaattgtcgacagatcctgatgaactgtgatcgaagaaagtgaagatatgagtggcgatgaggaggatatgttccggaacctcctcttgagagctggtttttgtcttacatacaaagataactatactcaaccacaagttatctaagagagaaaattataacagatgctactgcgatagctggattccttactgatctgcgtgtttatctggataacccagcaaaggttaagcgtatgcttcttccaaccaaagtatccaccaagagtggtggaaccaaagatacttcaaagtgtgattcaagctcaagctccacaagcctcattactttgttgatggggattagtgccttgaagcaggctattatagatttgcttctagatataatggttgaatgttgccaaccttcagaagaaagtggttcctcagcaagcactaaagcttttcccgattcaaatggggctagctctccaccagagcttagtgttgaaggtgatctaacagaatatgcatgcagtgatgtgtatgcgagagttgaatctaatagtgatgatattcgggatagtcctgtaatttgtaatgcaggtttggctgcaactgagattgctgtaaataatatagaacattcctgttttcctccagaaacatctgctgctgatttgccagcagatgaaggctccgagcaggcttcctggtcaaaatgtccagagcaatcagaggaattgttagggttgattgttaattcattgagggcattggacagcactgtcccgcatgggtgctgtgaaccaagaaggcggccgcaggctgtccggaagattgcacttgtcctagagaaagctccaaaacagctccagcaagatttgatttcccttgtaccgaagttggtggatggttcggaacactctcttgcagcttgtgccctgttggatcatcttcaaaggccagatgcagagccttcattgagattgccagtttttggtgctctttctgagttagaacttgaaagtgatatctggaaacaagcatctgttcatgcactcgaattattgtctgactcgaacgatgagcctcttgtagctgccattacttatgttcttaaggcggcatcacagtgtgagcatctttctgtagcggttagagctgttagatggagattgaaagatttgggaactgaagttccacattgtgtgcttgactttttatctaaaacaattcaaacccagctagatgtagctgaagctatattgaaggatattgattctgattgtgagcctgaaaacaattgcctagcatcaacatcaccttctagtacttgttctacagatgggctttcagctgaagggatgtattcttggcaagagcaagctgtgcatggaagaagtcatctatcagatgtttttgcactgatagaaatgttatcaatgcctggattatttgttgaagtcgcacaggttattgagagggctttattgcgagggtcctttggtctacaattagtagccatggtgctggaaagaagacattcttacaggtcaagttcaaagtctgggtctgttgtgaatgattcacagaacaaagaagttctgttagatgggcagtttgaacctttatctgtccaagaaaatgatttcacttcagtccttgcacttggtgaggtattatctctatctacagaaacgaaggttcaagattttgtgcggatgctttatgctatcatatttaagatctatgctgaggatcatcataggtatagaatccttaagggccttgttgaacgagcaacaaatacatcagataactgccgagcagttgacatcgatatggatgtcttggtatttcttgttaaggaggagtatgggatcgcgagacctgttttgaacatgatgtgtgaggttgctgaagttgctcaggctgaccgtgcaaatctttggcaccaaatatgtgctactgaagatgaaaatattcgtcttcgagaggacatggaaatggagcaaacaaatttcaccaatgaaaagattgcactaaaccaacggctaactgagttggaggcaactattggcagtctaaggtctgagctaaaagctgagagggatcgttttactcgtgagaagaaggcattatctgatcagatgcgagagattgagaatcagttggaatgggtgcgatcagagaaagatgatcagattgcaaagctctcctctgaaaagaggaatcttcatgatcggcttaatgacgcagagtcacaactcgccttggtgaaagcacggaaacgtgaagaattaaagaaagtgacaaaggagaaaaatacattagcagaacagctgaagaatgctgaagcttcaaggaaaaggtttgatgatgaattaaaacgttatgcagctgaaacacagactcgtgaagaaattcgaaaatcacttgagaatgaagtgagaaggctgacacagacagtggggcaaacagagggagaaaaaagggaaaaagaagagcaaattactcgttgtgaagcatacattgatgggatggaatccaaactgcaagtttgccagcaatacatccggacacttgaaacgtccctccaagaagaggtggcccggcatgctccactatacggtgtcggcgtcgaatcattgtcgtttaatgagctggaggcactcgcaaacatccacgagcagagtttaaggcagatcaaagctatccagcaaaggaaaggtagcagccatctcttgggtggcaccgccctttctcacatccctgccctattctccccgccgcctccttcagcggcagttggctctccggcctcacggatccccgcatccccaatggcaccaaacggtgcagggatgcacgggaacgggcaccacatgaacagcacgactggcggccgctggttcaacccgagctgagtgataaggtgcaaagattttgtgattcaacgggccacatttgcataggcgtattttgcagccgctgagcaagcccaacgtcaaccccattttgttcctggccttccgtcaggctttcttcttgtacttaggctctcctcaccataagatctaagtggatgtgcagaacacttctggcaatataggcatagtggagttcggaatatagatggcgggggtaggtcttctggtgaggtcggccttacttggtagtgccgtcgtcgtcttgatatcgcatgggcgtggagagcttggtatgaaataatgcatgtaataatcaagtgaaccgatggaaataccaggtacaagtggagggctatgggaatggttgtgcttgttcactttctaaaggcattcaggttcatttgttttagaggagtgttgcggatggtaaagacgaccgagttcgaagcttttattttctttagagttgcatacatagtagtccttgcacatgtcaggggtgtcacttcggtataaacttcgaaagcagaacgtgtttgcatcgcatgcctctaagct

SEQ ID NO: 43994 - DNA, 2174 bp, Zea Mays
cccaaccaagccatcgctcctgtcctgcatctccatgagccaaagaccaaggaaaaagaatagggagaaaacacaccccgaaaaacaaaccaaaaatccccaatccatgaagcccaccacttccgccgccgccgccgccgtggcggcggttaccgtcaccaccgatgacccatccccttcgccgtccgactcaacgtcggcgacgttcacggtcgaccgccgtggggacgcttccgcctcctgccggtggacgctcccggacttcccccgcacccgcgcccgcaccttctacagccgatacttcgaggtcggcggcttcgactgccgcctcctcctctacccgcggggcgactcgcaggcgctgccggggtacctctccctctacctacaggtcctcgaccccaaagccccggtgtcgtcgtcgtcatccaccacgaccaccacctcctccaaatgggactgcttcctcagctaccgcctctccgtagtccaccccaccgatccagccaagtcgctgggccgcgattcctggcaccgattctcgtccaagaagcgctcccacggatggtgcgatttcgcgccctcctcctccgcccccttcctcttccagccccacgatgccctcgtcatttctgctgacatatctgtgctgtctgaggcggcctctttctccgatgccgacggtcgttttaactggaaggtgctcaattttggcctcttccgagaaatgatccgcacacagaagatcatgagccctgcattttttcctgcatctgcctctgctggcgggactgactgtgggctccggattagcgtctatcagagcaatgtatctggcgcagagcatttatctgtttgtctggaaagcaaggagcctgttgtgcaggtagcatccgggtcatcggcattggcatcaggtggtacagggagtggtgtgccagatggtgatcgtgggtgctggtgtcttttccgcatttcgatccttaatcagaggtctggtgggagccatatccacaaggactcatatggtcggtttggtgcggacagtgccagtcttggttggggagaatacatcaagatggatgagtttttggctgctgacggcggataccttgtagatggagctgtggtgtttagtgcctcagtgcatgtcataaaggagtcaaactcattcagtcggagcttgccaatggttcctggaatatgtggtgctggtggtgggcgtgctggggctaggaagtcagatggacactttgggaagtttgtgtggaggattgaaagcttcacaagacttaaggagcttctcaaaaagcgcaagatcgcgggtctgtgtatcaaaagcagacggtttcaagttgggaatcgagattgccgtcttattgtttatccacgggtctcaaccgccatgccacctgtcagtgtttctggaagttacagatccccgaaatacaactactgaatggagttgctttgtgagccatcgtctctctgtcatcaaccaaaaagtggaggagaagtcgatcatgaaagagtctcagaatcgttactctaagtcagcgaaagattggggttggcgggaatttgtgacattaactagcctctttgatcaggatgcaggttttcttgtgcaggatactgttgtattttcagccgaggttctcattctgaaggaaacagcaactatgcaagagcttacagatgaagattctgaaacttgcagttcaacttatggatgtcagattgaagctttaccaaagcggccatcattcacatggaaagtggaaaatttcgtgtcttttaaggagattatggagtccagaaagatttttagtaaattttttcaggctgggggctgcgagctgcggataggtgtatatgagtcgtttgatacgatctgcatatacttggagagtgatcagtcatctgggtatgatcctgataagaacttttgggtgcactataaaatggctatagttaaccagaagaattctgcaaaaactgtgtgcaaagaatcttcaatctgcacgaaaacatggaataattcagttctccagtttatgaagacttcggacatggttgacactgacgctggctttcttgtccgggacactgttatttttacttgtgaaatcatagactgctgcccatggtttgatttctctgaccttgaggtg

SEQ ID NO: 43995 - DNA, 1269 bp, Zea Mays
gccatccttgccttctgtcgtcgggcgcaccggacagtccggtgcacaccggacactgtccggtgcccgatttccttccttaaacagagtagtcgaccgttgcagactgggagccgttggcgcaccggacagtccggtgcccccttccgaccgttggctcggccacgtgtcgcgcgcggattccgcggccgaccgttggctcaccggacagtccggtgcacaccggacagtccggtgaattttagccgtacgccgtcgacaatttcccgagagcggcatcttcgcccgaggcagcctggcgcaccggacactgtccggtgcaccaccggacagtccggtgccccagaccgaaacagccttttggctgtacacaaccaactcttctcttattcgttttctcctgtttcaagcacttagacacaatacattagtcttcaaaacaatgtactaaggcttagaaacatacctttactgttgatttgcactttgtccatccatgggcatagatttacatttcagcacttgggttggcacacaatcaccaaaatacttagaaatggcccaagggcacatttctctttcaatctccccctttttggtgatttatgccaacacaacataaagcaactagaacaagtgcaaaatcatttcaaataaaataaattcgagttttattcaattttggcatatatggatcatcctttgccaccacttggtttgtttttgcaaatcaaactcaaatctctatctctaagtcaaacacacatgttgaagcataaagagagtcattccaaaagagattgatcaaagatttcaaaaactccccctttttcccataatcaacatttctccccacaagaaaccaacttttgataaaagagacaatacaagagttttgacaaaccacaaaccaaaagctctattctactattttcaaaatttctcaagtggtagctgatccatttattgctttggcctttattttctccccctttggcatcaagcaccaaaacgggatcaattttggccctataaccccattgcctcaccaaaatcttcaattaagagcaaatggcaataagagttcatgagatgaacttggaataagttaccctctcatcggagtgcagtggaagtctttcatggtccaagtccaccttttccctttcaattctccttcgagactaaatcaagcaatctcaagcatatggttagtctcgaggggtcaagttgtaacacatctccccctaaacatgtgcatcactttgc

SEQ ID NO: 43996 - DNA, 3064 bp, Zea Mays
cgagcgtcgaagcccgaaggccatttcaacttctccagctcttcgatccttacggctgttcgcctgtgcctgttcctgccttcctggcgccctggcggctggatacctggcgactgcgagaagagttcctggcggctggctggcttcctggcgctactggccggagtagtggagtggcgaatgcgcgctgccagctgccgtcgctgcgcggctgaatgcccagaccgcctgctgcctgctactgcgctggatctccctggcgtctggcgaattgctgcctactgctggtgattgtgactaaaatatgaagaaacagggagatattgcctctctttttcgtaatcatgttgcaaaaaacagaagtttattgcttattcattatctccggatgttactcaagcgtcgacacctaaagaacaagagaaagaaaggataaataaagaaattgtgaatccaatgtcatctgcaccgccaccgccaacactttatgatgtcagtcgtcttccacatgatccaggtgaaagacaacctattgcaagttaccatgctttataaatcctaatgcagcaattgataacaaaattgagaagtggagtgatgatgatcacaatctttataagataaggttgacatattcacttcgatgtttgaagtttcttttgcatcaaggattgtcattccgtggatatgatgaaagtgaagagtctagcagcagaggaaactttattaaaattttgaaatttcttgctgtaaatagtgaagaggtcaacaagtatgttcttaacaacgctccaaataattgcactttgactagcccaaagatacaaaagcagattattcagtgttgcgctatagaaactagaaagaaaataattgaagagcttggggaagagccatttgcaattttagcggatgagtttagtgacatgtcacacaaagaacaactagctctttgcttgcgttttgttgatgcattgggaaggccatgtgagcacttcattggagttgttcatgtagatgatactagctctttatcacttaaggatgcaattgaagcttgttaaacaaagagacataaggtgtttgatatggtttatttgcttctcaaattgatattgcttttgccgatggcgacaacaagtgttgaaagggcattttctacaatgagtttggtgaagactaaattgagaaacaagatgtgtgatagtcttttggatgattgtcttgttacatacatcgagagggatattttcttcgaagtgaatgaagaagatataattgaaacttttatggcgttgaggaagcgcagaccagataagtagtattattgcaatttttatgtttaatgtatgcaattttcatgtttatttgttgagtgtcaaactttatatctatatatcaaattgtttaccaaatttactatgaaattatatgtacattagatataattatacatgagaattttgttacgacataccctatgtaaaaatcctggatccgccactgctaccgaatggtagaaaacgctatatataccgtagcggaccacttacagtctactgttggaggcagcctaataccgttggaatttgagcaatatttagtgaaaattagatttatttatcaagggtaaaatgggtttatgtgtccatttcttaaaagattattagaaacttttagtaatttgaacatgatatataatatgttcgttgagggatacaaatatacaatcctcaggttgaagtttccccaaatttgaaatctcaaattcaaactatgcaaaatcagcattattgagttagttggcgttgacaatcagcacttttatcaacgtagcttaatatattgtgtcgttgttccactcccaccattgttctgggtgatctctcgctctctgcttgcctgcttacctctggtgatagagagcagttggtacacaacagttacaatacaatgtggctttccctatcttttgaccagagagttctctagtgtttttcttttcttgaaatagttgtagttagagctttgtttttctctagctcaagctaactatctccagcacatactcatactcatacatatattcaaactacgctctacaaacagtgcaatgtacagtgcaaaatggtgcaaaaacagtgtttcatatgcccatacttatacctattttcaaactacactgtacaaatagtgcaatgtgttggatcttttatgggcttggcccatttattcaataaactctatggtgtgtaatggtggagagtatcaatagtaccatattggaagtccaagggtctttggattgacttatatggtgggaattattccacttaatttgagaagtcaagaaacggacaagggcgtgccacacacgcgcgtgccgccaccgccgccggtcgggccgggctcgggtgtggtgtggcgtggcgtggcgtggcgaggcaggcaggcaggtaggcgacgagcgggcgtggtgtggttgtgttaatttttagtactcattaaccacggaagtttcaaccccgtctgttagcgtgccgcatgcgagacccttatccttcagctgcccgtctcttggcgtgccgcatgcgacccttcttcttcagcttccttccgcgaaaggttaagtaggggagaacccctgtcatttggtacacgagaacataacgctttcagaatcacagtccagtcgcaagtgtgggtatttccatctcgttactctacgcgcacagagaagcgagagggcaggtgcctccgaagcccttgtcgttcgagaccttacacggggatcggcaattaggtttttggagagcgtctacgcgacttcccaaaacatcttcttcttcctagcgacatgacaagagaagctggacaaggatctagatcctcagagcgcatgggagggtatgatcaatttatctccttattgttttgcgttctgcagattatatatgtttcatatattcatctctgctgtttcatatgtagccatgaatttatctcatctgttctgtcatattataatatgttatatctgtttgttttaattttacaatcatgt

SEQ ID NO: 43997 - DNA, 1157 bp, Zea Mays
cgtggtggcaaaaacgagccagagatgtttatggtgatggtggatctcgtggtgaccacaacgtggtagaactcaaaactctaaaggaataaactaagaccagcaactcgacacaaccgatgcaaccaaaaactcaacaagccctagctaagtagtactagtaaaggcttaatggtttataggattgcggtaaaactaatatactattttttggctttttctggactataggagataagaaaacaacgaagaaaagtaaatctctcaccgataaaccttgctctgattaccaactgagccttagcaaccgatacaccacctcctatggctgtcacgatcttgtggagcgtgacaccccggccactagggcactagtcctgcaagcaatcaaagaactagcaagaacaagtagaacaagtactgaattaccagatgtaaatgtaggtttcaaaatcaaactccaatatggtggggtttcgaagacaagaagacgggcggctgaaccagcacgcgcgcttacaagcaagtagcgagagctaaacttgatctaaacaaagcccgttgttcttggtggcggctagggggtttataaacatgggaggacgaccacaagggtattggggtcgtgctgcaaccctaggatgcgtccctaatggatccaactcgatacacgacccattgggccaaaatagggtgacgcagcaccatgggtagaaaaggcaggaaatgtctcggtaaggaaacaatgattacggcgacctcagaacagatatgactataattccaaatccatatgaaagtagacttgataagatttccatgttgtgcttgaacattccaatccgagcccgcatttgacagtggtgaccgtcacaagttggtgttcttctgcagtccgaatccaacatgttcaaattattttccctttcggtcttctccctgattcctaagcaaaacaagagtgcacgggtctccatggtctaaatatgatggacatgaactcaagagtgtaatcacctgatggttgagttgacgagcacgagcgcgagtaatgggaccagaaattgttacttgtattggcatagatgtatcagtagtatggatgtcttcatcaaggtgcacttcacacctttccatttgcagaagttggtgttgtt

SEQ ID NO: 43998 - DNA, 1281 bp, Zea Mays
cactattcatattcctaaactactccctccgccaaacgcgccccacgcctgcactactccaccttctcctccctctctccctcatctcgtccttttcccttggcgcgcacccatcgcggtcgtccctcgccgacccatccgaagctcgcgtcgcgtcgaccgctgaagctccatgtgtcgtcatccatgctctcactattgttcatcgttgtgaggtcaagtacacgtaccgccaagatgaggaccatgaaggatgtcgcgatgagttcgtgagaggtctaggccattgtctcccagtcaactatggttgcggaggatcgttgtcttcgtataatgtaattatttagctattttgtacagaacttctattatataataaagatttgacattcgtttctgtaccatgagtcatcatatgtgtgagacttgatcctagtacatatttgattaggccaccaaatctattatttggtagagccagcaaattaagataggtcaggtttccaagataggagatttggccagctaagttgttgtaggagaggttgagctccgtgccaccatatggtggcgtcaaggtgcacttcacactgttccactgcagaagtgggtgttgttggtccaactgttcatgactccttttggatcattggtgatattgttcttgaaatcgagcagagagtgaaaatcttggttgttttcatgaaccgtcgagcaatgaactttctccactctgtaacaatacagaaaaaataacaccatgagcatggctagtttgctcggtgatttagagttacacatgatgctcttaattggcacctacaagcataaagcataaacttgtgctattactagagaaaccaagaattaccagcgatagatcttaagaaaattgaaggcagacaccccactatatcttgaaaccttgcacaagtaacaaaagcaactgagtactaataatactaagaccttgttcggttaatcccgttatcaatggattggacgggattggaaaaaattaagaagaagtttgacttgcttggaatttaaactcacccaatcccactcaatccacgtggattgagagctaaccgaacaaatcctaagtggtaagagagagtagggtacctctgctccgtccttttgatctgctttgttttgcttgctagtgggagttcggaattctaataatactggagcagatgaggccccttaaatttaaaaactgctttgcagaactattacgtccacacgcttgtacttacgttacgacgcattagc

SEQ ID NO: 43999 - DNA, 2443 bp, Zea Mays
ctagccccctcctcggcccagtagcagtgtgcgcggcccacctataggccagtagcgtgcgcaacctgcgtgccctagcacccacgccgccgcaaccgcgtcccccagcttcgcccgctgccgggccgacctgtcaatcacacgagcgtcgcccactattcatattcctaaactactccctccgccaaacgcgccccacgcctgcactactccaccttctcctccctctctccctcatctcgtccttttcccttggcgcgcacccatcgcggtcgtccctcgccgacccatccgaagctcgcgtcgcgtcgaccgctgaagctccatgtgtcgtcatccatgctctcactattgttcatcgttgtgagagcgaggtcacaagaaacctgaagaccaacttggtgaagtacttggaatctcaagtcacaggcaagttatgttcttgaccactcttctttacctaataatgttcatgttaatcattgtgacatgctcaggttaatatgatgggacctaataggttaccctaattttgtttacctcacaccttgcaaaacaaatgaactattgggtagacttgctgttactctaactggttttgagattaatgttatatctgaattacgatcttgttccattaatattgttggtttaactattgttcatgataagattattgtgttatatagaacatggagtttaacttgagataacagtgctaccacaagggtggaatgggacgcccttggccaagtaattagaaaagatagggagagattaccttacccgaaaggagcaagcaggaagtgtgtcactatagagtatagagaggtcctcgggtcgaactgtctatgaagcttttcgcacgagggattcctatgcttccttcttcctgaatccgtagcgggttttctcaaactagtggaactttggaaaggtctcgtagtgctaccatgcctcatctcctcggtagagatgaatgggaagtcgtgaccccttagcaaatgggtaacatgacacgacttgtgggtaaagatgtacaacctctacagagtgtaaaactggtaatcagtcgtgctcgcggtcaagagcaactcaggactctcgcatgattaacttatggaattaaacttaatatgtcatatgcattgcattgtgagttttattattaatttcgatctcttatttatctgggttggtatctacttatacttagtaactgctaataaaatttttgatcaaaagcaatgcttagctttaactatcttcttttgtaagccttagacttcacatgagcccccaccgtaaattgttgagctcacacttgttgagcgatgaacgtatgtgagctcacacttgttgtactcacacccccaggtcaagtacacgtaccgccaagatgaggaccatgaaggatgtcgcgatgagttcgtgagaggtctaggccattgtctcccagtcaactatggttgcggaggatcgttgtcttcgtataatgtaattatttagctattttgtacagaacttctattatataataaagatttgacattcgtttctgtaccatgagtcatcatatgtgtgagacttgatcctagtacatatttgattaggccaccaaatctattatttggtagagccagcaaattaagataggtcaggtttccaagataggagatttggccagctaagttgttgtaggagaggttgagctccgtgccaccatatggtggcgtcaaggtgcacttcacactgttccactgcagaagtgggtgttgttggtccaactgttcatgactccttttggatcattggtgatattgttcttgaaatcgagcagagagtgaaaatcttggttgttttcatgaaccgtcgagcaatgaactttctccactctgtaacaatacagaaaaaataacaccatgagcatggctagtttgctcggtgatttagagttacacatgatgctcttaattggcacctacaagcataaagcataaacttgtgctattactagagaaaccaagaattaccagcgatagatcttaagaaaattgaaggcagacaccccactatatcttgaaaccttgcacaagtaacaaaagcaactgagtactaataatactaagaccttgttcggttaatcccgttatcaatggattggacgggattggaaaaaattaagaagaagtttgacttgcttggaatttaaactcacccaatcccactcaatccacgtggattgagagctaaccgaacaaatcctaagtggtaagagagagtagggtacctctgctccgtccttttgatctgctttgttttgcttgctagtgggagttcggaattctaataatactggagcagatgaggccccttaaatttaaaaactgctttgcagaactattacgtccacacgcttgtacttacgttacgacgcattagc

SEQ ID NO: 44000 - DNA, 6659 bp, Zea Mays
ggtgagaagagcttttgatgagttgtgtcccaaaaatgataagatgatttcggggacgattcaaaaagaacttgcaaactgttgtgcagaaacagtcacacgtgcaattaaagaagaaatggaggattgtttattctctattcttgttgatgaatcccgtgatatatcggttaaagaacaaatgactattgttgtgagatttgtcaataaacagggtgaagtaataggaagatttttgggcatcaagcatgtcaaggacacaacatcagaatcattgaagaaagcattagttgagatggtaagtgatcatggattagttgttgcaaagcttcgagggcagggatatgatggtgcttctaatatgagaggtgaatttaatggtcttcaaaaattaattcgagatgagaacccattcactttctatgttcattgctttgctcatcaattgcaattgattattgttgctgtctcaaaatgttgttcatcacttgtggatttctttgagtatgtaacatccattgtgaatagcacttgtgcttcttgcaaaagaaaggatatattacaacataagcatcgtttgaatctcttatcaaagttagagagtggagaaatttcatcagggagaggcaaacaacaagaaacatcattgtcaagacttggagatacaagatggggatctcattacaagactttgctccgtattgagtcaatgtgggaatcagtgatataagttttagaaattgtgcaccaagatgagtgtaatccatcaggtgcaggtggctttgttgggaaaatggagtgtttcagctttgtgtttatgatgaagttgatgttacagatcctccgtatcacaaatgagctttctcttctcttgcaaagaaaggatcaaaatgttgtcgaagccatgtctctggttgttgatgtgagaacacgtttgataaatttgagaaatgatgattgggagccattgttggaagaagccacaacattctgccttgcaaatgatatcccaataccaaatatgagtgatgttgtaccacgatttggtcgatcaaggaaaggtgggagaaataatattaccacagagcatttttatcgtgttgataccttctatgctattatagattctgtcaccacagagtttgatcatcactttaatgagctatctcaagagttgctcgtgtgttttcttgtcttgacccatgggagtcgttctctaagtttgatgtggataagcttgctcggctcgcggatatctattctgatgatttttcttttgatgattgcaagactataaaagatcaactaagaacttttattattcatgtacgaaaaattgaagagttcaaagcttgttgtgatcttgctagtctatcgaagagaatggttgagcttgagaggcatattgtgtttccactggtatatcgacttattgagttagcattgttgttaccggtggcgactgcaacaatggaaagggccttctcagctacgaagattattaagactgagttgcacaacaagatgtccaatggttggttaaatgacttgatggtgtgctacactgaaagagaaatttttaaaggactggaccttcagaaaataaagaaggcatttcaaaataagaaaactagacaaatgcaattgcctagatctcctaaaactagactcaactaaagattttattcgctatatggcatttggttgtaaatggattgtaatcaagatgactattaaataaggtatttttcaacatctattacttattttgtagctacaagttattttgaactgtgtcataaattttattcttcgttgcgttagcaacacctaaattttctggcatcctccgccactgcgtgtatcacacatgtgagacttattggtctagaattgtttcttatttggacagcctctgagtgaccattatagcatggtgaaagggaaatagactctaaaccatttctatattggtttcagtgtttgatgaccaatacaatattatgaactaactagtttgttaactggatggttataggttcacagaaataagaatagaagattcttattgaactaaagatcaacacccaactagaaaggacaatactcgaaaaagataaactattgatagttcaatattttggttaagtgtcctaggaatgaatttgagtatctaagaaaggctggaaagctcgagtttaacatttggaatttatggagctaagttcaagcaaaaatgagaatataagttgaagaattcaaaacggtgaagacctatggcttagactagttggacaaactctatatatgtttgtctaagtcatagaagtactctagaagatagccaaatcgaaacaaagaagaaaatctccaaaaggactatgtgtgctgctctgcggcacatctgaccagtccagtgtgcatcggaccgatcaccaaacctgttatgcagtaagcatgttttagggctttcgagggctgcgtcattggaccagtccagtgtgcaccagatgtcgcactggaccggttgcacaaatagatgttttcaggtgctgagcagtcgacaaactagatgagagctgtgtgtggtccaatgtgcaccagacctattaggacccaattgtcactttccagatccaatggtcaagatgatgtggcgctgacgtgatagagtctggtcggtgatcgaaccaatacggtgccacctaacacataacacaggagtccgaacggtcactgatcggacaatttgatagaggtccagtgcaccactagacttatattgtaggaggtctgatgcactcacagaatgtgcaaaatttgctattcaattccaatggctagttaagtggttggggctataaatacaccctaatcggctcattcaatacacaagagctaagcaaacaagtcatatgaatagagtaacacatacaattcattccaagtgatccaagcatcatatttgctaagagatagccattgcttagtaaaagagtgctagtgtactttagtgatccactttgtcgttgttatgttgagtgcttgagtcttggtgcaaggtgttgaatacatcactccaatgcatacaacgcacggatcgataacacgagcacgtgcacgatatctaaatctctaggttcattctaacctagtcaattgtgtttttgagcttatgcatggtgccattgatgttttgatgattatgaatcttgaagaggactagaaaggacggccaagatgtcaaggaagagaagctaggatgttcatgacaagagggggccaagtatgacccaacttggtctccacctcgaagtccaggactagtctgcactaaaacggacgcctaggatgcatccaaactccgattaggtcgtactttatatggatggaaagctaaggatataagatttccaaccaacctataaccaacttaaaatttgaccagagtcaacagaaatcatcgaaacaaatcaacattcagattttgttttggtgctacgacactgtgtgttgggctgtcggcccgtgtattgtgttggagcctattagggatatctccaggggctttgcacccctaacctctattttattagcagccaccacaacattagggtttgggtttttcttagattcattctatcatcgaacactattgtcgttcatcggtttgtgagaccccatctcatgatcaatacaattttgattgtgttcttcctgttcttgcttttcttcttgattgcacttacatggataatccttcgtggcgaggtcactcgtgtgtcacgagtgataaccaatggagcagtggtgtcgtgattgcgatgatccattcgctcagagccttggatcatcaatgtcgaggtctccaccaaatcaagttatcctaccttacggaagattaggccttaccatctatcaagtggtatcaagattcaggtgtcttgtgaggtataatcctacctttagatttgttttatttctccccataacttacaagaaagccaacctcaaaaaacataagtgtatcttgacctacaaccatcgtcttagcttttgcataattcaatttcagagttcatagttctaagttcgtgtcctaggttgagtttggttgctagtttagatttgttttggtttagtttgatcctctccatccactgcaatcccaaaaaaataatctccaaaacatattccatctactaaaccgatcaaatctacaaaactaatcctattttatctcatcatctcgtctttatcagatcaatatgtgtttagttcggtatttttgagcatacatcgtgtatacaaactcagaatttagtattcttgtactttctagaaagcctagaaaattatctacaactttcttgtttatgaggtttctagaaaacatcagaatcaaggagttatttgtattggaagtaaatctatttgtgatcctgtaatcagtctgtatttaaggttcaatatcctccacttcctttatttaaacaagacgtgccatatatctaaatgaaatataaaaaggagacctacaactttcatgttgtgagctttttgcatttgaggtcactaaatttatcaaacggtcttatttttgtgacacttttgtgaaaaaaagaaaatataaaatgcaagtgcgacaaaaaatccccgcacaaaacaaagaaaaaagaaaaaaaagagagaaagagtgcgcataagcaggaacaccattgatctgtccacctctgtgattgtttttccttccaacttgttcccttgttgtacctagatccttttacctcctttgtgtcttcctccaactatgctaatacattctctaggacagcagctaggacgagtactttggacacttattcagtattgctatatattactgacttgtgtgccatagatatatatttatggagccttcccaaagctccatctttctcttgagcagaatatgtacttctttgcaatcacatccatgctctaagtttgtcacaccggccaccatttgccacctaaagtgctggtaagaaccttgtaagtgcggggtaagacgcttcattactcgtgttccaccaccacacctaagagtagttgtagggtttataatttttttgtttcctttgtttctattttgtactaacaatgacaagaccaaagacccaaacgaacaaggataagggtcctaagcctaatgatggtgagtgtgtctcccatctagaattgaaggagatgatgcacacattgactaaagcttttgagagctacaccattgatgttgattcgtctctctcaggttctatatatccatatttctcttcttttaatgaaaatattgcaaatgagtatactgaatgggaagtatcaatggataagattttttcccgatgtcatatatgtgataggagaaaaataaaaattgtggctagtacattaatgaatcatgcattagtttggtggaacaatttgcataattatgacaaacaaaaaatgtgggctgatatgaaaacacgtataagagaacaatttgtttcttcccatgatgtcatgtattcaaataaatctgagttacctttgttacatgatgattgtactactaatttttgtgataacaaagagttgagtgatggttcttctattacttatatgccacaacttgagaatgaacttgatattgttgcttccaatcctattagttgtgctaagattagaattttgaatcccataactagtgtgcatgatgagctaaaattgttatcttcttcaaatagtttgggttatattgaatttgatgttctatgtaatcaagataatttagaagagaaactatcttttagtactgattttctatgaatatctaaacatacaaatcattttattggaagatataattggaaaggagaatatatggtacatcgagtatatatttgttcaaatatgaattcgcctttttcatgtaacaatatgatcaactagagggctatgttaagctaaacatatcacgttcagttccacttgtccttctttgtatgttttgcaacaacagtgtcaactttatgaaggggcaaggttggacgatgtcaagacctacaacaataccttatgtaggcaccaacaactttgagtcgaggacaactcaaaaccaagaaggggagaatgatgagtacatgaacttcaactatatggttaaggcccaatcaatcatagatttctaagctcaagaggagttgaagtctagtttatttgcgaatccggtttagactgcaggagtgggtctcacgaaaatggatgcccagaacacatacaaacttcgttggaaagctaagaagataagcttcccaacctgttacaccctgaatttgggggtataaaatttattttctgatatccatcaaattcaggtgttaccttctttttcctctttctttttggccctttattcatttcttcccaaataatagggaatgttactttaaatataggtgttaataaaaccctagagaagttttggttgttgcatcctaccggagcatatattattttgtttgtggagtgatttcatggagcattcatttaattaggagtttaaatttaattagtaggaagaagacaaaataggaagaaattaaaaaggaaaacccactctggtcccctcctttggc

SEQ ID NO: 44001 - DNA, 2463 bp, Zea Mays
tgcattgcaagctgaatcattccggggacatgatgagactagtacttccttaaacaaagagaattttttagaatttcttgattggtacaaacaaaggaatgaagaggtgagaagagcttttgatgagttgtgtcccaaaaatgataagatgatttcggggacgattcaaaaagaacttgcaaactgttgtgcagaaacagtcacacgtgcaattaaagaagaaatggaggattgtttattctctattcttgttgatgaatcccgtgatatatcggttaaagaacaaatgactattgttgtgagatttgtcaataaacagggtgaagtaataggaagatttttgggcatcaagcatgtcaaggacacaacatcagaatcattgaagaaagcattagttgagatggtaagtgatcatggattagttgttgcaaagcttcgagggcagggatatgatggtgcttctaatatgagaggtgaatttaatggtcttcaaaaattaattcgagatgagaacccattcactttctatgttcattgctttgctcatcaattgcaattgattattgttgctgtctcaaaatgttgttcatcacttgtggatttctttgagtatgtaacatccattgtgaatagcacttgtgcttcttgcaaaagaaaggatatattacaacataagcatcgtttgaatctcttatcaaagttagagagtggagaaatttcatcagggagaggcaaacaacaagaaacatcattgtcaagacttggagatacaagatggggatctcattacaagactttgctccgtattgagtcaatgtgggaatcagtgatataagttttagaaattgtgcaccaagatgagtgtaatccatcaggtgcaggtggctttgttgggaaaatggagtgtttcagctttgtgtttatgatgaagttgatgttacagatcctccgtatcacaaatgagctttctcttctcttgcaaagaaaggatcaaaatgttgtcgaagccatgtctctggttgttgatgtgagaacacgtttgataaatttgagaaatgatgattgggagccattgttggaagaagccacaacattctgccttgcaaatgatatcccaataccaaatatgagtgatgttgtaccacgatttggtcgatcaaggaaaggtgggagaaataatattaccacagagcatttttatcgtgttgataccttctatgctattatagattctgtcaccacagagtttgatcatcactttaatgagctatctcaagagttgctcgtgtgttttcttgtcttgacccatgggagtcgttctctaagtttgatgtggataagcttgctcggctcgcggatatctattctgatgatttttcttttgatgattgcaagactataaaagatcaactaagaacttttattattcatgtacgaaaaattgaagagttcaaagcttgttgtgatcttgctagtctatcgaagagaatggttgagcttgagaggcatattgtgtttccactggtatatcgacttattgagttagcattgttgttaccggtggcgactgcaacaatggaaagggccttctcagctacgaagattattaagactgagttgcacaacaagatgtccaatggttggttaaatgacttgatggtgtgctacactgaaagagaaatttttaaaggactggaccttcagaaaataaagaaggcatttcaaaataagaaaactagacaaatgcaattgcctagatctcctaaaactagactcaactaaagattttattcgctatatggcatttggttgtaaatggattgtaatcaagatgactattaaataagtgtcaactttatgaaggggcaaggttggacgatgtcaagacctacaacaataccttatgtaggcaccaacaactttgagtcgaggacaactcaaaaccaagaaggggagaatgatgagtacatgaacttcaactatatggttaaggcccaatcaatcatagatttctaagctcaagaggagttgaagtctagtttatttgcgaatccggtttagactgcaggagtgggtctcacgaaaatggatgcccagaacacatacaaacttcgttggaaagctaagaagataagcttcccaacctgttacaccctgaatttgggggtataaaatttattttctgatatccatcaaattcaggtgttaccttctttttcctctttctttttggccctttattcatttcttcccaaataatagggaatgttactttaaatataggtgttaataaaaccctagagaagttttggttgttgcatcctaccggagcatatattattttgtttgtggagtgatttcatggagcattcatttaattaggagtttaaatttaattagtaggaagaagacaaaataggaagaaattaaaaaggaaaacccactctggtcccctcctttggc

SEQ ID NO: 44002 - DNA, 1010 bp, Zea Mays
cagcgaccgagcgtcgtccgcccgccccgcaagcgccgtcccgcagccgcaggccacagcagcagaccacatgccgctactctgtgtctccgctccagcacaggcgcacagcgcacagcgccgcagccgcaccacacacagcgttgccacgcgctccgccgctccgcggctccgcgctgcaggcctgcaggctacagcctgcagcagctcgggatctcgggctctcggcgagccgctgctgcctgctggggggctgcgggctggccggctgcggctgggcgctggctgcctggtcgtctgcctctgctagtctgctgcctgctgcagtgctccgctagacgctatcggctagtccgctgtccgcggtcggctgcctctgtgtgactgcgtcccgacgtggtcgtggtcggctgataggatttaaagagctatttcagtcaagcttctagtggaagtagaccaagcactcgcgctagtggagtttgcaatgaacccggaatacaagttgaagttcaagagaataatagtgaagatgccaatggtgaaaatatttatggtcaagtcgaaggtataaatcagttcaacccagatcacattatttctgatccgggactttgtattccaatcgattattttgctcctaataatagagatgatgttagaagggctttcatagctaaaggtccgactcaaccaattggtcataactttcctcagtcacatgacaaaaggagctttcaaaaacattggtttagacaacatagttggttggaatatagtgtggagaagaataaggcttattgcttctattgttacctttttaagcacgatcgaatggatgataaatttttccatgatgcatttacaaaagttggcttctcacaatggagaaatgtttatacggcatttccaaaacgtgttggtgggcctaatagcatacacaatactgcagcaacagcattccatgatttttgtaaccaaaggtcaagtgttagtcataaggttgcaaa

SEQ ID NO: 44003 - DNA, 1162 bp, Zea Mays
cagcgaccgagcgtcgtccgcccgccccgcaagcgccgtcccgcagccgcaggccacagcagcagaccacatgccgctactctgtgtctccgctccagcacaggcgcacagcgcacagcgccgcagccgcaccacacacagcgttgccacgcgctccgccgctccgcggctccgcgctgcaggcctgcaggctacagcctgcagcagctcgggatctcgggctctcggcgagccgctgctgcctgctggggggctgcgggctggccggctgcggctgggcgctggctgcctggtcgtctgcctctgctagtctgctgcctgctgcagtgctccgctagacgctatcggctagtccgctgtccgcggtcggctgcctctgtgtgactgcgtcccgacgtggtcgtggtcggctgataggattttccaattttctaaatagcagtcttggttagaaacaaaaacaaggcaaagaatatggcccaaaaaagtatctctatattatgtgaacactctactgttgtaatgtcttcattttatctaatacatgttatatgcttcataaaatgacagatttaaagagctatttcagtcaagcttctagtggaagtagaccaagcactcgcgctagtggagtttgcaatgaacccggaatacaagttgaagttcaagagaataatagtgaagatgccaatggtgaaaatatttatggtcaagtcgaaggtataaatcagttcaacccagatcacattatttctgatccgggactttgtattccaatcgattattttgctcctaataatagagatgatgttagaagggctttcatagctaaaggtccgactcaaccaattggtcataactttcctcagtcacatgacaaaaggagctttcaaaaacattggtttagacaacatagttggttggaatatagtgtggagaagaataaggcttattgcttctattgttacctttttaagcacgatcgaatggatgataaatttttccatgatgcatttacaaaagttggcttctcacaatggagaaatgtttatacggcatttccaaaacgtgttggtgggcctaatagcatacacaatactgcagcaacagcattccatgatttttgtaaccaaaggtcaagtgttagtcataaggttgcaaa

SEQ ID NO: 44004 - DNA, 3406 bp, Zea Mays
caagctaaggcgtcctacgtgaagtgtgtaaactgtttttaaatccctgggggcgcctcgtctgcccacagagcatccaacttaaagttacaactcccactagcaagcaaaacaaagcagttcaaaaggacttctggcagagcagaggtgccaattaagagcatcatgcgtaactctaagccgccgagcaaactggccatgctcatggtgttattgtttctgctttgttacggagttgagaaagtccattgctcgacggttcatgaaaacaaccaagattttcactctctgctcgatttcaagaagggcatcacccacgatccaaatggagccatgaacgattggatcaacaacacccacttctgccgatggaaaggtgtgaagtgcaccttaacaccgccatatcgcgtcacggagctcaacctctctcacaacaacttagctggccaaatctcctcctctcttggaaacctgaccaaccttaatttgctggctctaccaaataatagatttggtggaccaataccccttcttgacaggctccaaaacctaaattacctatccctggacaacaactccttaaatggtgtgattcctgaatcacttgcaaactgcttcaacttaaacaaactaggtctctctaataataacctcaccggtgttatccctcctaacataggttctcttaccaagctacaagttcttctccttcatagaaataagctttccggggtcatcccatcaagcctcagcaacatcacaaatttaattgcaatatctctttcagaaaatcaattgaacggatccattcccattgaattatggcaaatgccacagctaacgtctttgtaccttcatgataattatctattcggtgaaatcccacaaactctctctaatgtatcttctcttcatatgctatccttggcgtacaatatgttgagcaacactttgccatctaacttcggccatgccctccataatctaaaatggttgtacttggaaggcaacttgtttgaaggacatattccagattccctaggcaatgtttcaggtctattacatttggatatatcttctaatcatttcactggcaaaatccctagcatatttggaaaactttcagggctgtcttttctaaacctcgaggaaaatatgtttgaagcgagtgatagtacaggctgggaattctttgctgacctagcaacatgtagttacctgtcggagttttcattggctagcaataatctgcagggtgctataccaaattccatcgctaacatgtccaccaacctcaaaaggcttctgatgagtgataaccacctatccggaatagtcccctcaagcattggaaaatttaatggtttaattgaactcgatcttggtggaaacaattttaccggtacaattgaggattggatcccaaagttgacgagcctacaaaacttatatctcaatgacaacaactttgatggtataatcccaccttaattctattagtaaccttactcaattggcacttttggatgtttcaaataataaattcactggttcaataccacctagcatgggaaccatttaacctctattcaatttgaccctaagcaacaacaatttcagagggagaatacctgccgagttttgggaccttaaacaattagtcttccttgatgtttcatcgaacaaatttagtggggaaattcctcaaagtttgggccagtgccaaaatctaggcaccattgaaatggaccaaaatattcttacaggaaacatcccgacctccttcagtaatctatatagcttgaccttgctaaatctttcccataacagtttctcaggtcgcttgccagattatctaaatgacctaaagcttctcaataaaattgacctgtcttacaataatttccaaggagagataccaaaagctagtatattcgataacgctacagttgtttcactggatggcaatccaggattgtgtggaggaaccatggatttgcatatgccttcatgccctactgtttctagaagagcgacgatcataagctatttgattaagatattgatcccaatatttgggttcatgtccctcctattacttgtctactttttagtccttgagaagaagacttcaagaagagcacatcagtcacaactttcttttggtgagcattttgagaaagttacttacaatgatctagcgcaagcaacaagggacttctcagaatccaacctgattggaaaaggaagctatggcacggtgtacagtgggaaattgaaggaatcaaagacggaagtggctgtcaaggtttttgaccttgagatgcaaggtgcagagagaagcttcttggcagagtgtgaagcattgagaagtattcagcaccggaatcttcttcccatcataactgcatgctcaactgtagatacggcgggcaatgttttcaaggcattaatttatgagcttatgccaaatgggaacttggataaatggatacatcacaaaggcgacgaggcagttccaaagcgccgtctaagcttaactcaaagaattgcagttgtcgttagtgtagctgatgcattggattacttacaccacgactgcggaaggcccactgtccattgtgacttgaagaagcttaactcaaagaattgcagttgtcgttcaattagttcgatcggtattaagggcacaattggctatatccctccagaatacggaggtggtggccatgtttcgacgtccggtgatgtttatagttttggtatagtgttgttggagattttgaccggtaaaaggccgacagatcctatgttcaccgggggactagacatcatcagcttcgtggagaacagttttccggatcaaatatttcaagttattgatccgcatcttgtggaagaccgccagaagataaatcagccaaatgaagtagcaaacaatgaaatgtaccaatgcctggtggctctgctgcaagtagcactttcttgcacgcgctcattaccatctgaacggtccaatatgaagcaggtagcaagcaaactgcaagcaatcaaggcggcacaacttggaggcaaatccaagtgagattagatgtactccctcgacgagcagcgtaaaccggaatacgagatgactagaaatgtactctagtctagcatacaagtgttgtttaccttgtatatgcatctatggttcaatatggttataccgtcaagcaactacaacatgatatgtaatatctagtatttacacattgaaagcatcgaactatgtatggtttgaaatagttatttactttgtttagatttcttgaattatgtagttcattatttaattgtgagaaaatttaatgagtttatcctctcatacgtgttataatatttattaagctaattgaattaggaa

SEQ ID NO: 44005 - DNA, 1522 bp, Zea Mays
ggtgccaattaagagcatcatgcgtaactctaagccgccgagcaaactggccatgctcatggtgttattgtttctgctttgttacggagttgagaaagtccattgctcgacggttcatgaaaacaaccaagattttcactctctgctcgatttcaagaagggcatcacccacgatccaaatggagccatgaacgattggatcaacaacacccacttctgccgatggaaagtccttgagaagaagacttcaagaagagcacatcagtcacaactttcttttggtgagcattttgagaaagttacttacaatgatctagcgcaagcaacaagggacttctcagaatccaacctgattggaaaaggaagctatggcacggtgtacagtgggaaattgaaggaatcaaagacggaagtggctgtcaaggtttttgaccttgagatgcaaggtgcagagagaagcttcttggcagagtgtgaagcattgagaagtattcagcaccggaatcttcttcccatcataactgcatgctcaactgtagatacggcgggcaatgttttcaaggcattaatttatgagcttatgccaaatgggaacttggataaatggatacatcacaaaggcgacgaggcagttccaaagcgccgtctaagcttaactcaaagaattgcagttgtcgttagtgtagctgatgcattggattacttacaccacgactgcggaaggcccactgtccattgtgacttgaagaagcttaactcaaagaattgcagttgtcgttcaattagttcgatcggtattaagggcacaattggctatatccctccagaatacggaggtggtggccatgtttcgacgtccggtgatgtttatagttttggtatagtgttgttggagattttgaccggtaaaaggccgacagatcctatgttcaccgggggactagacatcatcagcttcgtggagaacagttttccggatcaaatatttcaagttattgatccgcatcttgtggaagaccgccagaagataaatcagccaaatgaagtagcaaacaatgaaatgtaccaatgcctggtggctctgctgcaagtagcactttcttgcacgcgctcattaccatctgaacggtccaatatgaagcaggtagcaagcaaactgcaagcaatcaaggcggcacaacttggaggcaaatccaagtgagattagatgtactccctcgacgagcagcgtaaaccggaatacgagatgactagaaatgtactctagtctagcatacaagtgttgtttaccttgtatatgcatctatggttcaatatggttataccgtcaagcaactacaacatgatatgtaatatctagtatttacacattgaaagcatcgaactatgtatggtttgaaatagttatttactttgtttagatttcttgaattatgtagttcattatttaattgtgagaaaatttaatgagtttatcctctcatacgtgttataatatttattaagctaattgaattaggaa

SEQ ID NO: 44006 - DNA, 3263 bp, Zea Mays
ggcggtgccaattaagagcatcatgcgtaactctaagccgccgagcaaactggccatgctcatggtgttattgtttctgctttgttacggagttgagaaagtccattgctcgacggttcatgaaaacaaccaagattttcactctctgctcgatttcaagaagggcatcacccacgatccaaatggagccatgaacgattggatcaacaacacccacttctgccgatggaaaggtgtgaagtgcaccttaacaccgccatatcgcgtcacggagctcaacctctctcacaacaacttagctggccaaatctcctcctctcttggaaacctgaccaaccttaatttgctggctctaccaaataatagatttggtggaccaataccccttcttgacaggctccaaaacctaaattacctatccctggacaacaactccttaaatggtgtgattcctgaatcacttgcaaactgcttcaacttaaacaaactaggtctctctaataataacctcaccggtgttatccctcctaacataggttctcttaccaagctacaagttcttctccttcatagaaataagctttccggggtcatcccatcaagcctcagcaacatcacaaatttaattgcaatatctctttcagaaaatcaattgaacggatccattcccattgaattatggcaaatgccacagctaacgtctttgtaccttcatgataattatctattcggtgaaatcccacaaactctctctaatgtatcttctcttcatatgctatccttggcgtacaatatgttgagcaacactttgccatctaacttcggccatgccctccataatctaaaatggttgtacttggaaggcaacttgtttgaaggacatattccagattccctaggcaatgtttcaggtctattacatttggatatatcttctaatcatttcactggcaaaatccctagcatatttggaaaactttcagggctgtcttttctaaacctcgaggaaaatatgtttgaagcgagtgatagtacaggctgggaattctttgctgacctagcaacatgtagttacctgtcggagttttcattggctagcaataatctgcagggtgctataccaaattccatcgctaacatgtccaccaacctcaaaaggcttctgatgagtgataaccacctatccggaatagtcccctcaagcattggaaaatttaatggtttaattgaactcgatcttggtggaaacaattttaccggtacaattgaggattggatcccaaagttgacgagcctacaaaacttatatctcaatgacaacaactttgatggtataatcccaccttaattctattagtaaccttactcaattggcacttttggatgtttcaaataataaattcactggttcaataccacctagcatgggaaccatttaacctctattcaatttgaccctaagcaacaacaatttcagagggagaatacctgccgagttttgggaccttaaacaattagtcttccttgatgtttcatcgaacaaatttagtggggaaattcctcaaagtttgggccagtgccaaaatctaggcaccattgaaatggaccaaaatattcttacaggaaacatcccgacctccttcagtaatctatatagcttgaccttgctaaatctttcccataacagtttctcaggtcgcttgccagattatctaaatgacctaaagcttctcaataaaattgacctgtcttacaataatttccaaggagagataccaaaagctagtatattcgataacgctacagttgtttcactggatggcaatccaggattgtgtggaggaaccatggatttgcatatgccttcatgccctactgtttctagaagagcgacgatcataagctatttgattaagatattgatcccaatatttgggttcatgtccctcctattacttgtctactttttagtccttgagaagaagacttcaagaagagcacatcagtcacaactttcttttggtgagcattttgagaaagttacttacaatgatctagcgcaagcaacaagggacttctcagaatccaacctgattggaaaaggaagctatggcacggtgtacagtgggaaattgaaggaatcaaagacggaagtggctgtcaaggtttttgaccttgagatgcaaggtgcagagagaagcttcttggcagagtgtgaagcattgagaagtattcagcaccggaatcttcttcccatcataactgcatgctcaactgtagatacggcgggcaatgttttcaaggcattaatttatgagcttatgccaaatgggaacttggataaatggatacatcacaaaggcgacgaggcagttccaaagcgccgtctaagcttaactcaaagaattgcagttgtcgttagtgtagctgatgcattggattacttacaccacgactgcggaaggcccactgtccattgtgacttgaagaagcttaactcaaagaattgcagttgtcgttcaattagttcgatcggtattaagggcacaattggctatatccctccagaatacggaggtggtggccatgtttcgacgtccggtgatgtttatagttttggtatagtgttgttggagattttgaccggtaaaaggccgacagatcctatgttcaccgggggactagacatcatcagcttcgtggagaacagttttccggatcaaatatttcaagttattgatccgcatcttgtggaagaccgccagaagataaatcagccaaatgaagtagcaaacaatgaaatgtaccaatgcctggtggctctgctgcaagtagcactttcttgcacgcgctcattaccatctgaacggtccaatatgaagcaggtagcaagcaaactgcaagcaatcaaggcggcacaacttggaggcaaatccaagtgagattagatgtactccctcgacgagcagcgtaaaccggaatacgagatgactagaaatgtactctagtctagcatacaagtgttgtttaccttgtatatgcatctatggttcaatatggttataccgtcaagcaactacaacatgatatgtaatatctagtatttacacattgaaagcatcgaactatgtatggtttgaaatagttatttactttgtttagatttcttgaattatgtagttcattatttaattgtgagaaaatttaatgagtttatcctctcatacgtgttataatatttattaagctaattgaattaggaa

SEQ ID NO: 44007 - DNA, 2017 bp, Zea Mays
tttgttttagtttgttacatctcaataattttcgggtgagtttgtcaccactggagtgagtccacgtgaagcacacaagaagctcattggttagcctcttgagagcctggtcatagcattacaacatatctaggttgatctcctcgagctagggtggcctagtcttgcttggtagccaacatttaatcccgtcgctgtagctaggaatctccttccttgcttgggtcatgttgacgagaatgagccgatgtagataagtcaatgaagatgagccgatgtcgctgagcggatgtaaattgactgatgcagtggtcgatgtcgatgtctcatcgggtgtgcctgacatgtctcatcatgggaaaactatggtttatcgtcaacacagtcgacacacaaggagacaagagatgcattggtattgtggtcatctctctttgttgtggctccgactgcttctaattgcaagaggttgttagtgggttctaagcatgccacttggcttgatctatcaagtagggagggtgtaatgtagtcattaaattactctatagatgcacaataacagattaaaacatcaaattcctgccatatcatgtggatcagcatgtactaattacattaacacgctaccttgaggttattgtcagcttttctaggtcggtatcaactaaataagtgaaagtaaacattcattgaaagcaaaagtaaacatgcacaaccacgagcgcaacaataggctaagaagacaccaggattaaacacactatcaaccaaatctagggccaaataaatagtaaatcattcataggaacatcctagatccaatctatattatgtatcatgccaattaccctaggaacatttgtagtcggtatattgatggtcatgcaagcaaacatagataaggacctcaaaaaaagttcatccagaataaacaatgtgactaaagaatgtaaggtaagatgccatatgcatatcaaactctcgagttgctacatacacatgttgcattctcatgttgtggattgtagcaattgtacaagagatacatgtttggtcatgcaagatcaatctaataacattaagctcagcatgaaataaattgatactacacaagataactagcagatcttgccaaccacaacgattagtccaagatctactaggtaaggtgacaacatcatattgtcttgatgaaatctacaagagattgagccatggcatcatgggacttatcttaggaaacccttggtcaaggggcgacgatgcgtgagatgagaagcacatgtttcttgggtgaatgtctgccttataattattattatcatgaaatgtacattttatagtctttcgacttgaagtgataagcgctccctaaccgattttatctaactgggacctatttatagatacaagctttgtaggccctagctctttgcatatgccaaatattcattatgctcatattatatatagaccctatttgggagagcttcacttcaagaatttcaagcctatttcagcttctatccaaacaggcccagctcagctagctctagctttaaaaaactaaaactagaggctagtttcataaaattttcgaagcttttcaaaggttgtttcaaaaacactatttttatacttctctgaagttgcaccaaaattatccaatacgccattgatttataagaactaccgatttgtgtctctttctccactcgctaatcattaagggtaattaagtaaacttacaaaaattaattgtattatagaagctggagtctatgtgcaagccaaacacacttgaaccacgccttactaatctattaagttgtttcatggtgaagctggaaaaccgaaactacattttttgaagtataaccctcccacatagggccttaattcaaattttgggagcttcaccataggaagatttatattctggatctgtcgcccttgctattattacttgtgcttccacctaatatgtgatgtttttttatttcatgcattctgc

SEQ ID NO: 44008 - DNA, 617 bp, Zea Mays
atttgaagcatgttaaatgatgtggaattatgttggcatgtcatgcgtagtttatccttcatttttccataccggtacaataagcaccgtacgttgcccgaggacgggtacgatgtagcttcatatccctagaggtatgaatgcagaagtcataattgcatttgtagtcatatgcactcatgaggaatatgtggaacatgacattgatatgttactattgagattttcctctttgtgatttgggaactaggtgtattgtacattgtattcttgctgcaccctagaaatccatggttggtaaaacactgtagttatgttgtcaaactattgcataatcattttacttgctgagatgtgtcatctcactcttgcattgcttgatgcaggtacttgaatcttgtttgggaaaggagggaagtagcagtgcgttcacctacacttctaaataactctgccactgcctagtaatggcattaattaggaacttcgggtcaaagatgttggtcccttttaaatagtgtgtgcaagtggtttaatctgttctggtcattatggtggttgttcctttgctagctgaattaataatgttttgtatgtttattcttatcatgcattat

SEQ ID NO: 44009 - DNA, 463 bp, Zea Mays
ccatttccccccttgcagtcgaacccctctccctctctcgccctttgcagccaccaccccccatcctctccaagcaaccgcccctcctccacatccaaaccctagccaccaccccccattccacctctccaaggtgcagccactccctcccttggatctcttttgggtttgtgcaagtctccattggaagattggtgggaggaagaaggaaggggtgaagaaggagttcaaggtacttgaatcttgtttgggaaaggagggaagtagcagtgcgttcacctacacttctaaataactctgccactgcctagtaatggcattaattaggaacttcgggtcaaagatgttggtcccttttaaatagtgtgtgcaagtggtttaatctgttctggtcattatggtggttgttcctttgctagctgaattaataatgttttgtatgtttattcttatcatgcattat

SEQ ID NO: 44010 - DNA, 428 bp, Zea Mays
acagcagcacgagaccagcccgaggtatcatccctgagcactgatttaagatgtatctccagtactacatcaacgagaagggggacaaggtctacaccaccaagaaggagtcacctcttggggtgccaacgcagtctgctcacccagctcggttctcaccagatgacaagtactctcgccagcgatacctgttgaagaagagatttggacttctgccaacgcagaatccaggaccgaagtactgaagcttcaagtcaactgtccaacctgcgatgttctttttgtgtcaatgcttgttggttggaatgtactatcttcgttctcgaatatttgtggtccacttgttcaattttgaactaaaccgcgacaaataaaaaagaccactcatttgtccatttggcgtttacttagtgtaaataagttcggct

SEQ ID NO: 44011 - DNA, 2912 bp, Zea Mays
tgcaccgagccaccgaggtgaaacaaaagcgcaccccgccgcaacccagcccaacccaccgcagccaccgctctgcaatggcggctccgcttcccccacttctccttctcctctccatctcccccgcaatcttcctctcgtagtgctgctctcattcttccaccaaccgaaggttctgcggccgcgagagtgctggggggcgaacaatggaggcggcgtggaggaaggccaagagggcgctgggctccagcctctgcgtgcaccaccccgccgtcgccggcgaccgcgaggacggcgccagcgagcgccgcgcctcggatgcgctctccctcgacactaccgcggcggcgcacgcatcgacgcccaacgcgccggcgccgccggaggccggcgcgctgcggaggtccaagtccggagagaatgtgtgcaatatgttttgattccatgaagccaggtcgtggacaagctctattcactgctgaatgttctcatatgtttcacttccactgcatctcctctagtgtgaaacacggcaaccatgtatgcccagtttgccgggcaaaatggaaagagatccccttcaatcgctcattatcttctatagttccatgtggaagaggtggccaagcttggttaccccagcaaagtggctacatggctcttctccgccaggttccaaaccatcagcaacaaggtccagacttggttacttctgagccagcagacttcaatgatgacaaacctttgcagaagatggagtctgctaatattggatctagtagaactgtggaaattaagacatattcagagttttcagctattcaacagtcatctcaagatgactttgctgttctgatccatctgaaagccccatatgctaacccagagcaggtcacaagcagatcggtcaatgcaacctcaattgctacatcccgtgcccctgttgatcttgtttctgtgcttgatgttagtggaagtatggcaggcactaaacttgcactcttgaagcgagccatgggttttgttatacatcatcttggtccatcggatcgcctttcagtcattgctttctcttctactgcaagaaggttgttccatctccgacggatgtcacattctggccggcagcaggccctgcaggctgtcaactcacttggcgctagtggtggcacaaacattgctgatgcactaaagaaagctgccaaggttattgaggaccgaagccatcaaaatccagtatgcagcatcattctcttgtctgatggccaagatacatacaatattctctcagatattaggggtgtccggccagattatagttcactagttccaccctccattctaaatcacacatttcgcctagtgcctgtgcatggatttggttttggaatagaccatgattcagatgctttgcattcgatcgcagaggcctctggtggcacattctcctttatcgaggatgaaggtgtgatccaggatgcatttgctcagtgtataggtgggcttctcagcgtggttgttcaaaatgtgcaagtaaatgtggagtgtgtccatcctggtgtccagctccgctgcatcaaatctggtagttacctgagtaaggtgtctgcagataggcagaatggttcagttgatgttggtcatctctacgccgacgaggaaagggacttcctgctgtcggtgagcttaccgcattgctgtgaacagaccacacttttgaaagttgcttgtgcctacagagattcattgaccaatgaagagatcaaaattcaaggtgatgaggtaacaatcttgaggcctaaatcgcccgtacccgagccagtctgcatggaggttgaccgtgagaggaaccgtgtccgtgccgctgatgctatcgaggctgcaagggatgctgctgagagaggtgatctttccgatgccgtgtcaattcttgaggattgccggaggatactttcagaatctttttcaagccggagtggggaccggctctgcaatgcccttgatgcagagctgagggaaatgcaagagaggatggctaaccggcaacgctatgaggcttcggggcgggcatatctgctgtctggccttagctcacattcatggcagagagccactgcacgaggcgactccactgacagtgatacacttgtttactcctaccagacaccatccatggttcacatgctacagcgctcacagaaccagggcccatcacaggtccaacaacctaggatcttggtggagccccatccaaggtagaaggtaactcagtaatccatcgctatcttgcgaagcaagcgcacagatgttggtgaagagattcagttcgtatggctgcttagtaggtcgtagcgtagttctctagcacctttattttgctttttcttgtttgagtcatggtggtggtataccggaggcggtgaggcgggattggaagtaaatatcatctgtaggggcgtatactggggaggtaaggtggtgctttggtggtaaatacattgtggggggtatactcctgtagtgttaagaaataagtagagtagaagaggagggcctggagaaattgtgcaatagctttaacgggttggagctaaggtagtttagtgtaggtcagttcattgtagataagacataagagggtctgatcttgggacggtataccatgaaatctctgggattttttgatgtgttgggtccgggaggtgtgtttcgacctgcaacttgtattccatgtgttcgtgcttgttgcattggctgaagttggactggaatttgatatggttctgcgcgttggctgaagtaatgagtttacatgtattcttatccctccaattgattgaacgttaataaagaacagtgctagtagacaatgtatgattgtattaataaagtaacatcagttgtaaagtgta

SEQ ID NO: 44012 - DNA, 261 bp, Zea Mays
tgacggttggaccctaaaactttaggacacatgactgttggggtctcagaggtgcaagggtcttgactttcaagtaaagtacaactgttttcaccagttattgtagtctctgcacgactggtttgcaattggttaccagtggttctctcctcaagggaatctgcctcttcagtcaactctttcttggcactgccatgcatactagatctaggcgtctgaccacctttaatcttcagcttcttattataatggtctgaatcc

SEQ ID NO: 44013 - DNA, 869 bp, Zea Mays
gtttttatgtctacattaaaatgaataatgatgaatctagacacatgtacaaaacatatacatcaaatattgtataaatccactaactattaataactaatggatcaaacatgaccttatgtctaatactccattgcacaaatgaaaatctacatcaaaggtaaagctagcctagcgagctatttttatttcattgtcattatataagtgttaatcatcatcattttgcacgtccctaacggggtgctaaatgcttcgctaaccgtttggaaaacgaatgtacagaactcaaatctgtgccaagattcgacgagcatcgcaatgtgaagagctcagcatcatgcacagtacataatcttttgacttgctcatcagtaagcatcatctggaaccgaatgaatattcaatgaaatcagtatactcgtcaatggtcagaccttttgcacctccaaagattcatctcctcctctctgcgctgatagtaaggcgttcaaaactcctcatagtgggatcatcctggccgattcttccaggttttgggaatgacgaggtcctgccctcaagtccagttgactggtgaagcctttgattggttgatggacggctgctgctgctggtggtcgggactaggtggctactgcgatttgggtcgctgggatctccagaacctcggctgcttgacagaagagccttccttgatgtgcttccattccgagatgatgaatgctttcttttatctgaatcaacagcctggaatacgttgtgaaaagtgttatgcgatgagctctttagtcaatcaccgtgggattgtaaataaattctttggtaaccaccatgccctgaatatgactaaagacggaggaacaaag

SEQ ID NO: 44014 - DNA, 1777 bp, Zea Mays
agagcagttctctgtagcgagtgccgtcccgatccaaaccccaacgctaatagggtattcgggtgagccggcagcggcgtcggctcggctccggctggggggtgcggcggcagcggcgtcggccttcgcgggagacgcggcggcggccgggcgagcttcgggcttcgggcgtggcctcacgcccgcgccttggcggcctcgccacggcagcaacgcgtcagggcgtcggcctttgcgggagacgcgggcacgcggcgggcgggcttcggccgtgggcctcgcgcccgcgcttaggtggcctcgctgcggtagcaacgcgggcatcagctttcgcggaagaggcggcagcggccggccgggcttcggcggagggcatcgcgcccgcgccaggcgtcggcattcgcgagcttcggtacaggctgtctcttctagaatgctagaattgatgccggagaaatgcaagtttgaggacagaagacctcttcaggactagcagttcttgacatctacacggttcaacacctgtttcttctggggaagaaagcacagcaattcattatgaagagcagcgacggaaaccaaatcaagttacaaccaatgtggagaaaagttgcctatgggggaaggcagtcaggatatgatgataactacactgacgagtccttccttgaggagatggttatgaatgccaatgtcgtcaagagggaccttctgaaagtgatgatcgactctgtatccatatcacagtatctttgcatcgtcgctcttgtggtttctacatggaccctaacgctgaacttggacattgatgaatctactctcctcaaactagatgttggtcttctccttgttgggttctgggtcctcttgctcacaacttgtccgttctcgctgaagcttctgacaaagtatgtcctcaatatatcattcttcataagcggtctttatgttctcgcaccaatttatcataccctcaccaggtccatcagttcagattcaatatgggcccttgctgtatctcttctgctggttcatctatttttacacgattactctggttcaaccataaggcctccaggcgcattgaacaacccaaaattaactagcaacatctccttgaatgcatcgatagtagcctctgtccttgtggcttcgcggctgccatcaaggctgcacgtcttcgcaatcatgttgttctccttgcaagtcttcctctttgcacccctcattactttctgtgtgaagaaataccattttaggcttcatctgctattctccttcacgctaatggctgtggccctgagtgtcacataccagttgcatcgaatgttcttcactgttctattggcgctacttgtttttgtctcaatcgtttgcccttactggcttataaggattcaggaatacaagtttgagatcaatggcccctgggatgaagcaaaactctgctttgatataactgaatagcagtgctaagttttctttaggaatgatttgcattgaagattggtttggttgtatatactggcatataggctcgctgcgagccttcatggcataggtgttttcatgtgaatgtatatgctatttaatggatttattgtgttaccgagactaattcttggcatgctttgacatgcctaatgatcactaattctggtgtcactggcagtttgggatgttaaaaagctactttgtaaggaagatctacattctgtcttttgctgactgacatatttgtgaggtgaaaagctattgcatatgtgggatttgtttt

SEQ ID NO: 44015 - DNA, 1064 bp, Zea Mays
aaactgaacaactgatcctaattcagatccatgatgcctttacaaaactatttctgcaagataacttaggcccaacagttgttccaaaaggactcgaagataattactcctgaagctctagctactgttaaggctgctattgcaaatagtgagaaagacaagaaggttgatgcaacaaaaaaggcagtgcctcgaaaggcagctgggcaaagttgggaggaccctaccttggctgattggcctgaaaatgatttccgtttgttctgcggtgatcttggaaatgaagtgaatgatgatgttcttgcaaaggcattctcaaaatatccatccttcaatatggccagggttatacgggacaagtggactggtaaaactaaaggatatggttttgttagttttgctgatgcgtctgatcttacttctgccttgaaagatatgaatggtaaatatgtaggaaatcggccaatcaaattacggaagagcacatggaagaacaggatagacttagaagctttggagaagggaaagacccaaccacagaagaaaatcaaactgcagaaaagaagtgttcttcacaaatgaatctgaaaaattctgctcgttcatcgtctgtcagtatcgtttgggaaagctgtctgaagcattaacagttttacttaacgtcagatgtgtaggactgatggtcaccaagttcccggtgacactgtatacaatcgcagacgcgatgctatgttggtgattgaacaggtgtagccgaatagttggatccaataacttcacctgtagtgtaatggtccaattttatcatgggaactgtagttctaaatactccagtgaccagtgctattgtggtgaattattctgtgatctttattcataaatattcgtgggtgttggcctgtttgaatcataatgctaatggtagctagctaagtgacaagtgctcgtattctgtgattttgttcagaaattatgtataatatataccccctccgtggttgctccaggattcactagtgatactaatagctaattgttattgggctatttggtgaacatgtcac

SEQ ID NO: 44016 - DNA, 1487 bp, Zea Mays
agacgcttccagagctttccacaccattcgctcacgaccacgaggcacgatcacacagcacaagcctcacccggcggaacacctcttccgagttccaactcccaaccgcagcctcagcctcagcctcacacggtcgaagcagaacccgtgaacacctcaaacctcacggctcacgccaccgtcctccagccccgttctccggcgatcctgtcattccagacgcgtctccgcccctctcggtccaccaccccgacgccgccacatgtcgacgcagtccatttcgccggcctctgcgtccgcgcagttcacctacccggcggcagcggccccgtcttacttccccgtgcccttccacctccagaacgcgcaatacaccgcatggaccgcagccgcgccggcggtgcctgtgtacaacgccatctatcccatgccccaagtccagcaggcccaacagttgttccaaaaggactcgaagataattactcctgaagctctagctactgttaaggctgctattgcaaatagtgagaaagacaagaaggttgatgcaacaaaaaaggcagtgcctcgaaaggcagctgggcaaagttgggaggaccctaccttggctgattggcctgaaagtgctcaaggatgtgatgagcccaacagattgccacacgtgatttagatgatttccgtttgttctgcggtgatcttggaaatgaagtgaatgatgatgttcttgcaaaggcattctcaaaatatccatccttcaatatggccagggttatacgggacaagtggactggtaaaactaaaggatatggttttgttagttttgctgatgcgtctgatcttacttctgccttgaaagatatgaatggtaaatatgtaggaaatcggccaatcaaattacggaagagcacatggaagaacaggatagacttagaagctttggagaagggaaagacccaaccacagaagaaaatcaaactgcagaaaagaagtgttcttcacaaatgaatctgaaaaattctgctcgttcatcgtctgtcagtatcgtttgggaaagctgtctgaagcattaacagttttacttaacgtcagatgtgtaggactgatggtcaccaagttcccggtgacactgtatacaatcgcagacgcgatgctatgttggtgattgaacaggtgtagccgaatagttggatccaataacttcacctgtagtgtaatggtccaattttatcatgggaactgtagttctaaatactccagtgaccagtgctattgtggtgaattattctgtgatctttattcataaatattcgtgggtgttggcctgtttgaatcataatgctaatggtagctagctaagtgacaagtgctcgtattctgtgattttgttcagaaattatgtataatatataccccctccgtggttgctccaggattcactagtgatactaatagctaattgttattgggctatttggtgaacatgtcac

SEQ ID NO: 44017 - DNA, 2299 bp, Zea Mays
agacgcttccagagctttccacaccattcgctcacgaccacgaggcacgatcacacagcacaagcctcacccggcggaacacctcttccgagttccaactcccaaccgcagcctcagcctcagcctcacacggtcgaagcagaacccgtgaacacctcaaacctcacggctcacgccaccgtcctccagccccgttctccggcgatcctgtcattccagacgcgtctccgcccctctcggtccaccaccccgacgccgccacatgtcgacgcagtccatttcgccggcctctgcgtccgcgcagttcacctacccggcggcagcggccccgtcttacttccccgtgcccttccacctccagaacgcgcaatacaccgcatggaccgcagccgcgccggcggtgcctgtgtacaacgccatctatcccatgccccaagtccagcaggcccaacagttgttccaaaaggactcgaagataattactcctgaagctctagctactgttaaggctgctattgcaaatagtgagaaagacaagaaggttgatgcaacaaaaaaggcagtgcctcgaaaggcagctgggcaaagttgggaggaccctaccttggctgattggcctgaaactcttattgctcgttgccttgcagacaacaaccatgagaaaatgtcagtcttacaggcaaggtctaatgctctatctattatgctttgatctgaaacaaattgctcttttttccctttctctaaaggtgctcaaggatgtgatgagcccaacagattgccacacgtgatttaggtgggcttgcagatgattactgaacgttttcaaagtacctaattcctgtttacctgatttgtcacatgtagttgaatattgtttcatgtacctttattaatcttgggcatgcttatgctgttgtatgaaatgctatattcttcttgtgatgtttgatgcaaacgtatgtgtagggtttgaatttctttgtgcattacaggcacacaccccaactgctatgttccctccattacttagttcgccataagaatggcggcatacttgttctgtcaattgttggtttgttggctgtaggaacgttgtcttggctgctttcttcattgctcctcccctcttcaatggttgatttaagtttgaatgatgtccatccacctaccaatatttatgtaatgtccacaatttctaagatgtgccatatatgtctttttcataaaaaatcactattgttaattttgcaccgttttggtcaatgaatttctttaagtatttaatagttattctataattgttttgctagcacttacctgctcggtggccacaacttcaagttttgagttgcactactaattcatttgtgcattgataatgtgattctaccttgtagtcttcctgatgacaattcagttagtttctttaaggatacttcaagtaccctcattcacaattgcttgatctctcgcctacagatgatttccgtttgttctgcggtgatcttggaaatgaagtgaatgatgatgttcttgcaaaggcattctcaaaatatccatccttcaatatggccagggttatacgggacaagtggactggtaaaactaaaggatatggttttgttagttttgctgatgcgtctgatcttacttctgccttgaaagatatgaatggtaaatatgtaggaaatcggccaatcaaattacggaagagcacatggaagaacaggatagacttagaagctttggagaagggaaagacccaaccacagaagaaaatcaaactgcagaaaagaagtgttcttcacaaatgaatctgaaaaattctgctcgttcatcgtctgtcagtatcgtttgggaaagctgtctgaagcattaacagttttacttaacgtcagatgtgtaggactgatggtcaccaagttcccggtgacactgtatacaatcgcagacgcgatgctatgttggtgattgaacaggtgtagccgaatagttggatccaataacttcacctgtagtgtaatggtccaattttatcatgggaactgtagttctaaatactccagtgaccagtgctattgtggtgaattattctgtgatctttattcataaatattcgtgggtgttggcctgtttgaatcataatgctaatggtagctagctaagtgacaagtgctcgtattctgtgattttgttcagaaattatgtataatatataccccctccgtggttgctccaggattcactagtgatactaatagctaattgttattgggctatttggtgaacatgtcac

SEQ ID NO: 44018 - DNA, 2275 bp, Zea Mays
agacgcttccagagctttccacaccattcgctcacgaccacgaggcacgatcacacagcacaagcctcacccggcggaacacctcttccgagttccaactcccaaccgcagcctcagcctcagcctcacacggtcgaagcagaacccgtgaacacctcaaacctcacggctcacgccaccgtcctccagccccgttctccggcgatcctgtcattccagacgcgtctccgcccctctcggtccaccaccccgacgccgccacatgtcgacgcagtccatttcgccggcctctgcgtccgcgcagttcacctacccggcggcagcggccccgtcttacttccccgtgcccttccacctccagaacgcgcaatacaccgcatggaccgcagccgcgccggcggtgcctgtgtacaacgccatctatcccatgccccaagtccagcaggcccaacagttgttccaaaaggactcgaagataattactcctgaagctctagctactgttaaggctgctattgcaaatagtgagaaagacaagaaggttgatgcaacaaaaaaggcagtgcctcgaaaggcagctgggcaaagttgggaggaccctaccttggctgattggcctgaaaacaacaaccatgagaaaatgtcagtcttacaggcaaggtctaatgctctatctattatgctttgatctgaaacaaattgctcttttttccctttctctaaaggtgctcaaggatgtgatgagcccaacagattgccacacgtgatttaggtgggcttgcagatgattactgaacgttttcaaagtacctaattcctgtttacctgatttgtcacatgtagttgaatattgtttcatgtacctttattaatcttgggcatgcttatgctgttgtatgaaatgctatattcttcttgtgatgtttgatgcaaacgtatgtgtagggtttgaatttctttgtgcattacaggcacacaccccaactgctatgttccctccattacttagttcgccataagaatggcggcatacttgttctgtcaattgttggtttgttggctgtaggaacgttgtcttggctgctttcttcattgctcctcccctcttcaatggttgatttaagtttgaatgatgtccatccacctaccaatatttatgtaatgtccacaatttctaagatgtgccatatatgtctttttcataaaaaatcactattgttaattttgcaccgttttggtcaatgaatttctttaagtatttaatagttattctataattgttttgctagcacttacctgctcggtggccacaacttcaagttttgagttgcactactaattcatttgtgcattgataatgtgattctaccttgtagtcttcctgatgacaattcagttagtttctttaaggatacttcaagtaccctcattcacaattgcttgatctctcgcctacagatgatttccgtttgttctgcggtgatcttggaaatgaagtgaatgatgatgttcttgcaaaggcattctcaaaatatccatccttcaatatggccagggttatacgggacaagtggactggtaaaactaaaggatatggttttgttagttttgctgatgcgtctgatcttacttctgccttgaaagatatgaatggtaaatatgtaggaaatcggccaatcaaattacggaagagcacatggaagaacaggatagacttagaagctttggagaagggaaagacccaaccacagaagaaaatcaaactgcagaaaagaagtgttcttcacaaatgaatctgaaaaattctgctcgttcatcgtctgtcagtatcgtttgggaaagctgtctgaagcattaacagttttacttaacgtcagatgtgtaggactgatggtcaccaagttcccggtgacactgtatacaatcgcagacgcgatgctatgttggtgattgaacaggtgtagccgaatagttggatccaataacttcacctgtagtgtaatggtccaattttatcatgggaactgtagttctaaatactccagtgaccagtgctattgtggtgaattattctgtgatctttattcataaatattcgtgggtgttggcctgtttgaatcataatgctaatggtagctagctaagtgacaagtgctcgtattctgtgattttgttcagaaattatgtataatatataccccctccgtggttgctccaggattcactagtgatactaatagctaattgttattgggctatttggtgaacatgtcac

SEQ ID NO: 44019 - DNA, 1975 bp, Zea Mays
agacgcttccagagctttccacaccattcgctcacgaccacgaggcacgatcacacagcacaagcctcacccggcggaacacctcttccgagttccaactcccaaccgcagcctcagcctcagcctcacacggtcgaagcagaacccgtgaacacctcaaacctcacggctcacgccaccgtcctccagccccgttctccggcgatcctgtcattccagacgcgtctccgcccctctcggtccaccaccccgacgccgccacatgtcgacgcagtccatttcgccggcctctgcgtccgcgcagttcacctacccggcggcagcggccccgtcttacttccccgtgcccttccacctccagaacgcgcaatacaccgcatggaccgcagccgcgccggcggtgcctgtgtacaacgccatctatcccatgccccaagtccagcaggcccaacagttgttccaaaaggactcgaagataattactcctgaagctctagctactgttaaggctgctattgcaaatagtgagaaagacaagaaggttgatgcaacaaaaaaggcagtgcctcgaaaggcagctgggcaaagttgggaggaccctaccttggctgattggcctgaaaacaacaaccatgagaaaatgtcagtcttacaggcaaggtctaatgctctatctattatgctttgatctgaaacaaattgctcttttttccctttctctaaaggtgctcaaggatgtgatgagcccaacagattgccacacgtgatttaggtgggcttgcagatgattactgaacgttttcaaagtacctaattcctgtttacctgatttgtcacatgtagttgaatattgtttcatgtacctttattaatcttgggcatgcttatgctgttgtatgaaatgctatattcttcttgtgatgtttgatgcaaacgtatgtgtagggtttgaatttctttgtgcattacaggcacacaccccaactgctatgttccctccattacttagttcgccataagaatggcggcatacttgttctgtcaattgttggtttgttggctgtaggaacgttgtcttggctgctttcttcattgctcctcccctcttcaatggttgatttaagtttgaatgatgtccatccacctaccaatatttatatgatttccgtttgttctgcggtgatcttggaaatgaagtgaatgatgatgttcttgcaaaggcattctcaaaatatccatccttcaatatggccagggttatacgggacaagtggactggtaaaactaaaggatatggttttgttagttttgctgatgcgtctgatcttacttctgccttgaaagatatgaatggtaaatatgtaggaaatcggccaatcaaattacggaagagcacatggaagaacaggatagacttagaagctttggagaagggaaagacccaaccacagaagaaaatcaaactgcagaaaagaagtgttcttcacaaatgaatctgaaaaattctgctcgttcatcgtctgtcagtatcgtttgggaaagctgtctgaagcattaacagttttacttaacgtcagatgtgtaggactgatggtcaccaagttcccggtgacactgtatacaatcgcagacgcgatgctatgttggtgattgaacaggtgtagccgaatagttggatccaataacttcacctgtagtgtaatggtccaattttatcatgggaactgtagttctaaatactccagtgaccagtgctattgtggtgaattattctgtgatctttattcataaatattcgtgggtgttggcctgtttgaatcataatgctaatggtagctagctaagtgacaagtgctcgtattctgtgattttgttcagaaattatgtataatatataccccctccgtggttgctccaggattcactagtgatactaatagctaattgttattgggctatttggtgaacatgtcac

SEQ ID NO: 44020 - DNA, 2173 bp, Zea Mays
agacgcttccagagctttccacaccattcgctcacgaccacgaggcacgatcacacagcacaagcctcacccggcggaacacctcttccgagttccaactcccaaccgcagcctcagcctcagcctcacacggtcgaagcagaacccgtgaacacctcaaacctcacggctcacgccaccgtcctccagccccgttctccggcgatcctgtcattccagacgcgtctccgcccctctcggtccaccaccccgacgccgccacatgtcgacgcagtccatttcgccggcctctgcgtccgcgcagttcacctacccggcggcagcggccccgtcttacttccccgtgcccttccacctccagaacgcgcaatacaccgcatggaccgcagccgcgccggcggtgcctgtgtacaacgccatctatcccatgccccaagtccagcaggcccaacagttgttccaaaaggactcgaagataattactcctgaagctctagctactgttaaggctgctattgcaaatagtgagaaagacaagaaggttgatgcaacaaaaaaggcagtgcctcgaaaggcagctgggcaaagttgggaggaccctaccttggctgattggcctgaaagtgctcaaggatgtgatgagcccaacagattgccacacgtgatttaggtgggcttgcagatgattactgaacgttttcaaagtacctaattcctgtttacctgatttgtcacatgtagttgaatattgtttcatgtacctttattaatcttgggcatgcttatgctgttgtatgaaatgctatattcttcttgtgatgtttgatgcaaacgtatgtgtagggtttgaatttctttgtgcattacaggcacacaccccaactgctatgttccctccattacttagttcgccataagaatggcggcatacttgttctgtcaattgttggtttgttggctgtaggaacgttgtcttggctgctttcttcattgctcctcccctcttcaatggttgatttaagtttgaatgatgtccatccacctaccaatatttatgtaatgtccacaatttctaagatgtgccatatatgtctttttcataaaaaatcactattgttaattttgcaccgttttggtcaatgaatttctttaagtatttaatagttattctataattgttttgctagcacttacctgctcggtggccacaacttcaagttttgagttgcactactaattcatttgtgcattgataatgtgattctaccttgtagtcttcctgatgacaattcagttagtttctttaaggatacttcaagtaccctcattcacaattgcttgatctctcgcctacagatgatttccgtttgttctgcggtgatcttggaaatgaagtgaatgatgatgttcttgcaaaggcattctcaaaatatccatccttcaatatggccagggttatacgggacaagtggactggtaaaactaaaggatatggttttgttagttttgctgatgcgtctgatcttacttctgccttgaaagatatgaatggtaaatatgtaggaaatcggccaatcaaattacggaagagcacatggaagaacaggatagacttagaagctttggagaagggaaagacccaaccacagaagaaaatcaaactgcagaaaagaagtgttcttcacaaatgaatctgaaaaattctgctcgttcatcgtctgtcagtatcgtttgggaaagctgtctgaagcattaacagttttacttaacgtcagatgtgtaggactgatggtcaccaagttcccggtgacactgtatacaatcgcagacgcgatgctatgttggtgattgaacaggtgtagccgaatagttggatccaataacttcacctgtagtgtaatggtccaattttatcatgggaactgtagttctaaatactccagtgaccagtgctattgtggtgaattattctgtgatctttattcataaatattcgtgggtgttggcctgtttgaatcataatgctaatggtagctagctaagtgacaagtgctcgtattctgtgattttgttcagaaattatgtataatatataccccctccgtggttgctccaggattcactagtgatactaatagctaattgttattgggctatttggtgaacatgtcac

SEQ ID NO: 44021 - DNA, 1472 bp, Zea Mays
agacgcttccagagctttccacaccattcgctcacgaccacgaggcacgatcacacagcacaagcctcacccggcggaacacctcttccgagttccaactcccaaccgcagcctcagcctcagcctcacacggtcgaagcagaacccgtgaacacctcaaacctcacggctcacgccaccgtcctccagccccgttctccggcgatcctgtcattccagacgcgtctccgcccctctcggtccaccaccccgacgccgccacatgtcgacgcagtccatttcgccggcctctgcgtccgcgcagttcacctacccggcggcagcggccccgtcttacttccccgtgcccttccacctccagaacgcgcaatacaccgcatggaccgcagccgcgccggcggtgcctgtgtacaacgccatctatcccatgccccaagtccagcaggcccaacagttgttccaaaaggactcgaagataattactcctgaagctctagctactgttaaggctgctattgcaaatagtgagaaagacaagaaggttgatgcaacaaaaaaggcagtgcctcgaaaggcagctgggcaaagttgggaggaccctaccttggctgattggcctgaaaacaacaaccatgagaaaatgtcagtcttacagatgatttccgtttgttctgcggtgatcttggaaatgaagtgaatgatgatgttcttgcaaaggcattctcaaaatatccatccttcaatatggccagggttatacgggacaagtggactggtaaaactaaaggatatggttttgttagttttgctgatgcgtctgatcttacttctgccttgaaagatatgaatggtaaatatgtaggaaatcggccaatcaaattacggaagagcacatggaagaacaggatagacttagaagctttggagaagggaaagacccaaccacagaagaaaatcaaactgcagaaaagaagtgttcttcacaaatgaatctgaaaaattctgctcgttcatcgtctgtcagtatcgtttgggaaagctgtctgaagcattaacagttttacttaacgtcagatgtgtaggactgatggtcaccaagttcccggtgacactgtatacaatcgcagacgcgatgctatgttggtgattgaacaggtgtagccgaatagttggatccaataacttcacctgtagtgtaatggtccaattttatcatgggaactgtagttctaaatactccagtgaccagtgctattgtggtgaattattctgtgatctttattcataaatattcgtgggtgttggcctgtttgaatcataatgctaatggtagctagctaagtgacaagtgctcgtattctgtgattttgttcagaaattatgtataatatataccccctccgtggttgctccaggattcactagtgatactaatagctaattgttattgggctatttggtgaacatgtcac

SEQ ID NO: 44022 - DNA, 1707 bp, Zea Mays
caagcttcagcagttcagagattctgctggagcctggaggaagcttctctacccaccactccgacgcggccgccgtcgacgagatcagccgcgccgtcgccaccaaaggcaaaagaagagatcgagctcgaggctcgagctcgagcaggcagcagggagggggcacccagatatatagatcccccaaaaggtgcatgtaatcatcggctgcgtcgtcacgtcagtcgttcatgtgtttgtatctgattcgtggatgccagattaattgatggacctgtccccgaaccccgagagcccgggaagcggtggtgatggcggcggtggcggaggcggagccgggggatcgagcagcggcggggcgtctccgtcggcgggcttcggcacgccgcagacgccgagccggtacgaggcgcagaagcggcgggactggaacacgttcgggcagtacctgcggaaccaccggccgccgctgagcctggcgcagtgcagcggtgcgcacgtgctggagttcctgcgctacctggaccagttcggcaagaccaaggtgcacacgccggcgtgccccttcttcggccacccgaacccgcccgcgccgtgcccctgcccgctgcgccaggcctggggtagcctcgacgcgctggtgggccgcctccgcgctgccttcgaggagaacgggggccgcccggagtccaaccccttcgcggcgcgcgccgtccgcctctacctccgcgaggtccgcgagcaccaggcccgcgcgcgcggcgtcagctacgagaagaagaagcgcaagaaggcgcagcggccggctgatcacgccagcggcagtggaggcggccaaggacctcaccacccgccgcccgccggcgcgtcgggctgaggaacccatggtatgccggccggactgagcatattttatgtagtttcgatcgatttgcggctgcatgcatgcacacggtctacttactcctaccattttgctcgcgccatgctactgcttcttcttcttcttcttcggttagactctccgcagatcgtgtgcctacattgttattgtgcttctgctctctctgctgctactagcttcagttcctagctaccgcttatttttggtgtcaatcagtttaatttgccggtggaagcaaatcttgtcatttgatcaatgaattatatgattgctagctttttataactttttcatccagcattgctcattgtagatcgacttgcatacacttgtgtatcgattcactgtacatatacgtacgtacgtgtcctcaattcaaagtacatggcgaggacgagagagccaagtcccatcgaggacgtacaagcttgacgcaccctcatctttggctctctttctagttctgcttcctgcgccgtttcctttttctggtcagctggcgctcgatcggcgccgcgccaaacagcgaactgcaccagtgagcagtgtgacaacgggcatggccggaccgatcgatcgatcggatcgccgctcgtactggcgcggcgcactgttgcatgccatccgccgtcccattggctcggtgcatatcttgctagatcttgcaatgtctgacggttgaacaggatgccactgttgttcttctctagcgcgctcgtgccactggtcggcctgccggttggccgggttcgccatccccagctgcagactgcagtaacgcccttatagataggaggtcaaat

SEQ ID NO: 44023 - DNA, 556 bp, Zea Mays
ctttgatatcatggatacaagaatatcacttaacaaactgtgtcaactcttgaaacaacacaatgtgcttgcaatctagccaattcaaaaagtattaggtttgtcatccattaccaaatttcatatggtgttgttcggtatatattgacatgtgtctagaagctatcgaagaactattgcaaggcagtactgagttggagcatttgagaaatagagctaccaaaaattcatatgggcactaaatcccctttccatccctcagtatatcatgtcaccccacatcgccttccacccttcctgctctccttttccttctctccttcggttgctgacataccgctaacaagagtataacgtggcaagttcaaaattgtggtcagggtttaaagttcagacattcatttgctacatgttttgattcatctcaggacctcgattagaagtttattcatgaagcatcaagcaagttctaatgtttgttgttctgtatttatattttgttctgatttttaatttcgtggcaacgcacgggcatatacctagtcgtatacataag

SEQ ID NO: 44024 - DNA, 688 bp, Zea Mays
caaccacggatgccataccaggttcttgcgttcctgtcatatcccactgaaacaggtttgaagagaagcgctcgacgtggcgcaggtctgtcagattctatggtgtagttcaagatttttctttagttcaatgtttgtggagatggatattatgctccaggatcctacaacatgacatcacatcaattgtaaaggaggtctttgatatcatggatacaagaatatcacttaacaaactgtgtcaactcttgaaacaacacaatgtgcttgcaatctagccaattcaaaaagaagctatcgaagaactattgcaaggcagtactgagttggagcatttgagaaatagagctaccaaaaattcatatgggcactaaatcccctttccatccctcagtatatcatgtcaccccacatcgccttccacccttcctgctctccttttccttctctccttcggttgctgacataccgctaacaagagtataacgtggcaagttcaaaattgtggtcagggtttaaagttcagacattcatttgctacatgttttgattcatctcaggacctcgattagaagtttattcatgaagcatcaagcaagttctaatgtttgttgttctgtatttatattttgttctgatttttaatttcgtggcaacgcacgggcatatacctagtcgtatacataag

SEQ ID NO: 44025 - DNA, 856 bp, Zea Mays
cttgattatacctaatatggtattggatcagcttgcagtgctccaatagagatttagatgcggtgcagttgcttttgtttggtgcccttgagcatatgaggcattgattgtttcagcaattgatgcttgatcacaatgatcactcccttgttgggtaccagaagaacacctacagggaagccataccaggttcttgcgttcctgtcatatcccactgaaacaggtttgaagagaagcgctcgacgtggcgcaggtctgtcagattctatggtgtagttcaagatttttctttagttcaatgtttgtggagatggatattatgctccaggatcctacaacatgacatcacatcaattgtaaaggaggtctttgatatcatggatacaagaatatcacttaacaaactgtgtcaactcttgaaacaacacaatgtgcttgcaatctagccaattcaaaaagaagctatcgaagaactattgcaaggcagtactgagttggagcatttgagaaatagagctaccaaaaattcatatgggcactaaatcccctttccatccctcagtatatcatgtcaccccacatcgccttccacccttcctgctctccttttccttctctccttcggttgctgacataccgctaacaagagtataacgtggcaagttcaaaattgtggtcagggtttaaagttcagacattcatttgctacatgttttgattcatctcaggacctcgattagaagtttattcatgaagcatcaagcaagttctaatgtttgttgttctgtatttatattttgttctgatttttaatttcgtggcaacgcacgggcatatacctagtcgtatacataag

SEQ ID NO: 44026 - DNA, 1630 bp, Zea Mays
cgcagccttcacctcgacagaggacgcatggccgctgcgcccgccctgctcgcggtgacccccctccctcccccgatagtcgtcgtcgttccattttccccaaccctccatgcccttctccaagaaacagagcgacgagatcaacccagcagcaggatcgatcgttcagagatgatgatggattccgcggagcatcagaaggacgtggggcaagtgggtggccgagatccgagagcccaacaagcgcaccctgccacccgcctctggctcggctccttcgccactgccgaggaggctgcgctcgcctacgacgaggacgcgcgcaggctctacggccccgacgccttcctcaacctgccgcacctccgcgcctccgatgtctcctcctctgccacgcaccagaggcttaggtggctcgctgcctccgccaggggcgccgccgccgtcccggcctacggcctgctcaacctcaacgcgcagcacaacgtatacaatcttttggcacatgttcctttgatggattttcaaaaggaatcaacatttgatatgtggagtactgttggtccttgcttcaattcatcaaaatgtcattccttcaatgtcaaacccttccatcttatggataagcagttgaagtctcatcctccaaagaacgttgaatcggaaatcttgtctgagcatatcaagaaagagaagggaggcagcaaaggctggaaaatgaccatactatctgaagaaaggaacatggggtggaatggaggaagatgataaacggcggcggtggccagaagaggtgcaacccaaatatcattcgctttcaacaccacattgagtccgaccccaagttcttcgacaagtcgtggcgtaagctccatgacaccattcgcgagatctacaaccacaactgcaccggcctctccttcgaggagctctacaggtgcctccatttctactacttcaaccttggtgcgagaggatctttacagatccaagcttaccttcgatgggaaagaaaaggaagaggaccttgtacaagtgcagacttatatcaggtaggatttgaggaagcaatggaagaactacatgctaaggtgtacaagggactctctattgatcagatgaggcaacaatgcaatataagaatcttacctgataggaagccataccaggttcttgcgttcctgtcatatcccactgaaacaggtttgaagagaagcgctcgacgtggcgcagaagctatcgaagaactattgcaaggcagtactgagttggagcatttgagaaatagagctaccaaaaattcatatgggcactaaatcccctttccatccctcagtatatcatgtcaccccacatcgccttccacccttcctgctctccttttccttctctccttcggttgctgacataccgctaacaagagtataacgtggcaagttcaaaattgtggtcagggtttaaagttcagacattcatttgctacatgttttgattcatctcaggacctcgattagaagtttattcatgaagcatcaagcaagttctaatgtttgttgttctgtatttatattttgttctgatttttaatttcgtggcaacgcacgggcatatacctagtcgtatacataag

SEQ ID NO: 44027 - DNA, 2096 bp, Zea Mays
ctcgcctgcaagccctcgtgattccagcgccgtcgtcgcgatgcccgcgcacgcgcaccccctcggcccctcccctcggcgcccctcgcttccacccgccctgacgcccctcgccccgtcttcccccagccgcagccttcacctcgacagaggacgcatggccgctgcgcccgccctgctcgcggtgacccccctccctcccccgatagtcgtcgtcgttccattttccccaaccctccatgcccttctccaagaaacagagcgacgagatcaacccagcagcaggatcgatcgttcagagatgatgatggattccgcggagcatcagaaggacgtggggcaagtgggtggccgagatccgagagcccaacaagcgcaccctgccacccgcctctggctcggctccttcgccactgccgaggaggctgcgctcgcctacgacgaggacgcgcgcaggctctacggccccgacgccttcctcaacctgccgcacctccgcgcctccgatgtctcctcctctgccacgcaccagaggcttaggtggctcgctgcctccgccaggggcgccgccgccgtcccggcctacggcctgctcaacctcaacgcgcagcacaacgtatacaatcttttggcacatgttcctttgatggattttcaaaaggaatcaacatttgatatgtggagtactgttggtctgtcttctaaaggagaaaatgactcttccatgttcaccaaagcatggctgtcttttctcatgttaccactaccacttgatgtgtacaaggaggtccttgcttcaattcatcaaaatgtcattccttcaatgtcaaacccttccatcttatgtgatttcttgactagatcatatggtattggttgtgttattagtgtgatggccttaagtggtcttttcattcttatgacacaacacagtctggagtatcgaaaattctatgaaaagctttatgcactactcactcttgttgttttcatggcaaaacaccgatcagtatttttgcaagaacatggggtggaatggaggaagatgataaacggcggcggtggccagaagaggtgcaacccaaatatcattcgctttcaacaccacattgagtccgaccccaagttcttcgacaagtcgtggcgtaagctccatgacaccattcgcgagatctacaaccacaactgcaccggcctctccttcgaggagctctacaggtgcctccatttctactacttcaaccttggtgcgagaggatctttacagatccaagcttaccttcgatgggaaagaaaaggaaggtagtcatacacaccagagaaagaaaaggaggagtatgaagctgcaagagctaggttaataaaagaattaaatagaggtgtttctttagagaagctttgagtgaaattgataaaaccaccagaagcacatgagttagatgaaagtaaatctcctgcatctcgaatgtcttctgataaaattccagaggaccttgtacaagtgcagacttatatcaggtaggatttgaggaagcaatggaagaactacatgctaaggtgtacaagggactctctattgatcagatgaggcaacaatgcaatataagaatcttacctgataggaagccataccaggttcttgcgttcctgtcatatcccactgaaacaggtttgaagagaagcgctcgacgtggcgcagaagctatcgaagaactattgcaaggcagtactgagttggagcatttgagaaatagagctaccaaaaattcatatgggcactaaatcccctttccatccctcagtatatcatgtcaccccacatcgccttccacccttcctgctctccttttccttctctccttcggttgctgacataccgctaacaagagtataacgtggcaagttcaaaattgtggtcagggtttaaagttcagacattcatttgctacatgttttgattcatctcaggacctcgattagaagtttattcatgaagcatcaagcaagttctaatgtttgttgttctgtatttatattttgttctgatttttaatttcgtggcaacgcacgggcatatacctagtcgtatacataag

SEQ ID NO: 44028 - DNA, 479 bp, Zea Mays
cttcatcctcctcttcaagacaagtcatccgtgcaccaacaaaggtagattgattccctaacatgtcggaacgagaccaagcttgcatacacataagtgcttctatcatcgatggtgcaagcctactgcgatgtggactaataatcctccctccagtactaaagacagactctgatgccactgttgacacaggaatagcaagaacatcacgtgcaatctttcgcaaagttggatacttgagcccagcatgctgccaccactgaattatatccaactcttgtgtcctaggcaacaatggttcttctaggtacaaatccaactctgtccggacgtatgtggatgtcactgttggttgctttgacatataatcatcgaaagtatcaatccaatcttcatctattgtcatagtagaagcactagttgtcctagtttgagcaccatctgatgtggcacttgcctccatgctatcttggtattct

SEQ ID NO: 44029 - DNA, 909 bp, Zea Mays
atggcgatctcggcgcccttgaagagaacgtgaaggccgcggtgaagaactgcgtgacgcaggtggccaagaagtccctgagcctgaacgccaggggcgggctccacaacgcgcgcttctgcgagaaggacctgcagacggcgatcgaccgcgaggcggtgttcgcgtacgcggacgacccgtgcagccccaactacgcgctgatgcagaagctccgcgcggtgctggtcgagcacgcgctggccaacggcgacgccgagcgcgacgtggacacgtccatcttcgccaaggtggccgagttcgagcagcaggtccgcgcggcgctgcccaaggaggtggaggccgcgcgcgcggccgtggagaacggcagccctctggtccccaacaggatcaaggagtgccggtcctacccgctgtaccggttcgtgcgcgaggaggtcggcaccaagtacctgaccggcgagaagacgaggtcgcccggcgaggagctcaacaaggtgctcgtggccatcaaccagcgcaagcacatcgacccgctgctcgagtgcctcaaggagtggaacggcgagcccctgccgctctgctgagctgcaccagcagagaaagacaatgtatacagaaggaaaacaaaagtatagcagcacaaaacagagcgtttcaaggtcgttgtgaagtgctttacgatcatactagcaggagaactctatatttaccgttgccctgtaccagtagctaaagttcatgtgaatgttgttgtgttcccgcagctgcgacgccatggcctgcgatgtgcatggtcttggctgctgcagctactgaaacttttgatggttttaacatgtaagttggggggataaagtaaactactttgctctacaatggtgaatgggaactgagaagtttcttgtc

SEQ ID NO: 44030 - DNA, 762 bp, Zea Mays
cttgactagtgaagacaaaagctctactagcgcttattctgacttcagattgaacatgagagagactgcaaatttgtctgatgcaaaaaaatcatcgataagtcaaaccttcagataaagtcagttgtggcattggatcatctaaaaattatatttatgttgaagctgagaaggaggctcatgtcaaagagagagggaccgtctaaaagtattgtgcaagatatagagcatgcactcatcatatctaagtgatcgaagtgatattgattggcttattagatggatattggcccagtttatctttcattttttctatagctgttagaaatttactttgctcatagttcatactataattaatatgagactcttgttttgtggtccaagtgttcagcgctcagggtgccttggaagtacgctagcttgttgtcatgaagaagtcattcaagttccttccactgaagttggtgcataaggctgcaacaccatctagtggagggtgttctggacaaagaaagcttgtaccttaaaacaggaggatataagaagctggagtggttgtctgaaggcttttgaactgcttgaagcattagtgtagctttggtgcttttgtgactgatcagctctggagcagctagagtaatatagttgtgggcttttgaataatagttggagtgatatgaaacattagtgatctagttgtgaatgatattataattgtgatgcttttgtgaatatataattgtggtgcttttgtgttta

SEQ ID NO: 44031 - DNA, 1608 bp, Zea Mays
aagccgccgccctcccctgctttcttatcttctccctgccgcgctcctcgctcgaccttgaagcttccatggccgccgccctgccctgccctccagtgccgcatccggctgcctgacttgccgcgtgcccatctccgcgagcccgccatggagcttccccgccgctcagctcggagttccctcggctcggtcccagttccctgtgcgcgcgcaccttcctcatgcttggatccggccatcgtctctgacagctggccgcgcccctcaagctcggccagggagcttccttcctccctcgcccgcggctccctcatggcgcctaggatctcctccccatctcctggatgctcggcgcccagccccagcactcgccccgccgccctccctgatccccatgcccgaactcgccctcagccatggcgggtgcggccgccacctcacccatggttctcgccgcgcccctcttcaagctggcaactccacctcgaagtccgttgcgcgatcctgcttctcccttggctcacgcactcgattttcctggtgccgcgccctgctccatccgcgcgtccctggccccggcatggaactcgcccagtttgcgcgtcgagctcggcctctgcttctcttgcgttgtgcccagcccccggcgttgagattcctccatgaccgcgcctggtctttacttgagctcagctctgccctctactccagctcgcccccttgtttgttctcgccgttgggccgggtctgcttggtcgccgcgcccgtgccgagctccctgtgcgcgtagccgtgcccctctgctcgcgtggccggttccttgtttgcgccgcggttctctcccagctccctgccgtgtgctcgcccgaccgtacgctcgctctgctcgtccatgccgcctgctgcgcgtgcgtctactccgtccggtcgccggtctacccctgcgcgcggcctcctgcacgctaggatggctcgtctccgctggccggacgtcgatctcctatttgccatggacaatgcatcgacgccccattaccgccgaccgtcgtaaaactctagtgcttgtcgttgatatccggtcgtctccaaccattattttgtcgtcgtcgttcggtcaccccgtctcgatgttggtgcctacgtgatgcctccgaattgtgatcgcgcggacaaaagaatccccaagagaagatgtccaaagattggatgttggtgtgcgtgaaatttgtgtagcatctgccaaacgctcgacaaattgtttgaattggaaaatcattaccgatctcgcggattcaagtcagctattggaacggtatgataattaatcgcgtgacgcggaaggcgacccaagtcgacccaggataatgcagagattggacatctccgcaagacgacgtcgtcagtcggatcaacctgaagatggatagacgaagcaagtatcggaacaaaggagagtcgtcaagtgatcgacgtctaacaacactaacctagtgttacccaagcaagccccggtgcatttgccacctccttgctgttttataatcttttatcaccttgtttgatgcattaggtgataggagttgtgtgctaaacaattgatgcattttc

SEQ ID NO: 44032 - DNA, 911 bp, Zea Mays
atggcgggtgcggccgccacctcacccatggttctcgctgcgcccctcttcaagctggcaactccacctcgaagtccgttgcgcgatcctgcttctcccttggctcacgcactcgattttcctggtgccgcgccctgctccatccgcgcgtccctggccccggcatggaactcgcccagtttgcgcgccgagctcggcctctgcagctctgcttctcttgcgttgcgccagcccccggcgctgaggttcctccatggctgcgcctggtctttacttgtactcggctctgccctctactccagctcgcccccttatttgttctcgccgttgggccgggtctgcttggccgccgcgcccgtgccaagctccctgtgcgcgtagccttgcccctgtgctcgccgtggccggttccttgttcgcgtcgcggttctctcctagctccctgtcgtgtgctcgcccgatcatacgctcgctctgctcgtccatgccgcctgctgcgcgtgcgtctactccgtccggtcggtggtctacccctgcgcacggcctcttgcacgctaggatggctcgtctctgctggccggacgtcgatctcctatttgccatggacaacgcatcgacgccccattaccgtcgcccgtcgtaaaactctagtgcttgtcattgatatccggtcatctccaacctttgtcttactgtcgttcagtcaccccgtttcgatgtcggtccctacgagatgcctccgaattgtgatcgcgcggacaaaagaatccccaagagaagatgtcaaaagattggatggtggtgtgcgtgaagttcgtgtagcaccttccaaacgttcgacaaattgtttgaatcggaaaatcattactgatatcgtggattcgagtcagctattggaacgttgttcgtga

SEQ ID NO: 44033 - DNA, 604 bp, Zea Mays
gttttcttacaataaaagactcctggaaagaattagatgaccaagcaaacgagcaagatggtcttctgaaactaagaccctgaaaacaagtggagacctttcagattggttgagctcaatgtacagttatctggccatggtggattacccacttccgtcaaaatttctcaggcctttgccagccaatcctattaaaaagtatgcagaaatatcgacagtcaacctaagggtactggtactctggaacgtatatatgcatgagtaaatgtatactacaattatattggcactgttgactgctttgatctaaatgatgatccccatggaatgggtggatgtgactggcaggcttgtaccgagatggtaatgccaatgtcttatagtgaacagaggagcatgtatccaccatataaatttgactgcgcttcctatgctgaggattgcatcaaaagctatggtgtcaggccacatgtaagctattgtcacgttcaggggttccagtactatgatatcattgagcaaacaagctcttttgattttcttcccagcttgtttagaataacaattagggtttttacaaatcaacgtattttatcatattgat

SEQ ID NO: 44034 - DNA, 1721 bp, Zea Mays
ctttgttgcggtgaaaaatctcatgttcaattcccctgagaagtcccacaactcgctcctacgtcctaccatgattctctcagaactgagtacttttgtttgaagaaagatttgttcagtcaagctttgcaaattaccatcatagtttggatgacatccatggttactttgatgagtttatggagccctggttgccgagcttatctgggttctctgacaatggaactgtaatatttgcaacaaaactttcctcatcttggaagaaagtttcaagagggcttgacaacttataagtgtcctgtgaagcctgatgacgtgttcgtgagggcgaagtgggagagcaaaattacttctggcatgcagatgtcaacagatcctaatcactacggggtatttccacattcattctgcaaccaacatgtggtttcatttcagacgagttcagttactagtgtatcaggagccataccagtttgtctagacacttccagtggaatgaatggcaatatggcgatgttgaacactacaacttcaacgattgtatccactggttcaccaaacatgagtgctgagttttcttgccagaacctcaagtatactgcaccgttggctgtggagtggtcctatccggagctgcaattgttgaatgatggcctcaacaagtatgcaaatgaaccaggaatcatgaagtacataaagatagcagccacgttaccagacaagacagtaagagatgttgccatgagatgccaatggatggcagcgagaaaagaagctacaagacgacggaaacctgaagaacattatcttggaaaaaagataaaagatagaaaggataaaatggctgagccgtcatcatggggtaccaatcctcctgttcagactgagatgagatgttcctcttctatgcctgctaacgccaaacacaatgggtttctctctgcagactctcaaattgatcatggaatgctaaatatattggaagaaaatgctaagctactcaatcaaatagaagtaaatattttaacatcacaggcccataacaatattgaacttttccatcacgcaagaaggaacatcaatggtcttttacaaagcatgagccaaattcccggaataatgagcaagatgcccccattgcctatttcggtggatgaaaggctagctagctgcatactccctcgtgctcctatggctcaagttcttggcagcagtcatttgaaagaagaacgaagagtatggtaggccactgctagacagggaagcagctcaattttcagcagcagtttgaccaaaaatatctgaagagccatgtgcttgggagtctgcatggagaagcataggtgaaagaacgatctggcttttctgatggtctcaaagctacagaagcaacatgatccacttcacctcatggcttaaagaacactgtctagcttgccttgtcaggatgctctgtattagtgatcaacaaatttgagatagggagagttttccgtaatctgcagttttcctcaccttggttgcacatatcgattcttttttgggttttgtcctggtgatcgatgttaacagaagtgtagcgtagaaattgaactttgatatgaataattagcaggaaaagcctagcctttttgtcagttactacaatggtaaccaacctcctgtgtatctagtattctagttctagtatgatgcatatgcaagcctggttctctaaacgt

SEQ ID NO: 44035 - DNA, 1361 bp, Zea Mays
gcccccggcccttcctttttgggcgcatataaacgagcaacgtctcgcctttggggtcggcggggccgccgctttttagttgcgctctcccctcctctcccccgcaccctgcctgccttttccattggagcgcacaaagccggacggcaccaccatttaaagaaggccaaccaagcacacggcacggcgaagaagagaccaccacctcacactccattcacggcaggatcgatcgctatagctgctgcgcccccctgcacccttgcgtcttctgccgctgctgcgctgcggctccggcacaggtatgcaaatgaaccaggaatcatgaagtacataaagatagcagccacgttaccagacaagacagtaagagatgttgccatgagatgccaatggatggcagcgagaaaagaagctacaagacgacggaaacctgaagaacattatcttggaaaaaagataaaagatagaaaggataaaatggctgagccgtcatcatggggtaccaatcctcctgttcagactgagatgagatgttcctcttctatgcctgctaacgccaaacacaatgggtttctctctgcagactctcaaattgatcatggaatgctaaatatattggaagaaaatgctaagctactcaatcaaatagaagtaaatattttaacatcacaggcccataacaatattgaacttttccatcacgcaagaaggaacatcaatggtcttttacaaagcatgagccaaattcccggaataatgagcaagatgcccccattgcctatttcggtggatgaaaggctagctagctgcatactccctcgtgctcctatggctcaagttcttggcagcagtcatttgaaagaagaacgaagagtatggtaggccactgctagacagggaagcagctcaattttcagcagcagtttgaccaaaaatatctgaagagccatgtgcttgggagtctgcatggagaagcataggtgaaagaacgatctggcttttctgatggtctcaaagctacagaagcaacatgatccacttcacctcatggcttaaagaacactgtctagcttgccttgtcaggatgctctgtattagtgatcaacaaatttgagatagggagagttttccgtaatctgcagttttcctcaccttggttgcacatatcgattcttttttgggttttgtcctggtgatcgatgttaacagaagtgtagcgtagaaattgaactttgatatgaataattagcaggaaaagcctagcctttttgtcagttactacaatggtaaccaacctcctgtgtatctagtattctagttctagtatgatgcatatgcaagcctggttctctaaacgt

SEQ ID NO: 44036 - DNA, 4066 bp, Zea Mays
gcttcgaacccgccacctggtgactcaatgcaaactacctgagaaccctggactctagtattaagcgcaatacaaccgttataaagaagttgaagacaataaatgatgaacagaaggatgtgataatggatgagttaaaaagtgtgaatttgagtaaatttgtcagcgaagcagtttcttacatttgtgaggccaaacttcgctccgctgatatacaagctgctgttcaggtttgctcgctccttcatcaaagatacaaggacttctctccttgtcttatagaaggtctactgaagatcttctttcctggaaaatctggagatgatttggatgcagataaaaattcgagagccatgaagaagagaagcacattgaaacttttgattgaactatattttgttggaattgtcgaagatgctagcatatttgtaaatattataaaagatcttacatcagcagaacatttgaaggaccgtgaaggaactcaaacaaacctatctcttctatctacctttgctcgtcaagggaagttttttgtagggctacaacctcatggtcaagaagcttatgacgagttctttaaggacctaaatgttactgctgagcagaagaagttctttaagaaagccttgaactcttactatgatgctgtagctgaactactacaatcagaacatgcgtctcttcgtctaatggaggcggagaatgcaaaagttttaagtgccaaaggtgaactaagtgatgagaacacatcctcatatgagaaactcaggaagtcttttgatcagttactacgtggtgtttcctcgttggctgaatctcttgacatgcaacctccagtgatgccagatgatggaaatacaacaagagttactacaggaaccgatgcgttgccttcttctggaaaagaatcatctgcattggaacctatctgggatgatgaagataccaaagctttttatgaatctttacctgatctcagagcatttgtgccagctgtattactgggagaggttgaaccaaaatcaaatgagcaacatgttaagggccgtgagctatctggtgagtccacttcagaacaagagactgaactacatgacaatgttccaacttctgccactgaacgtcaactagaagttaaagtagatgatctagtgaaagagagtgaagacagagataaagagaaggggaaggatggagaaaaggaaaaatccaaggagaaggatctggataagaaaaatgaaagagagaaggagaaaggaagagtcttggatggcgcaagtctggataacctcctgcagaggctgccaggatgtgtcagtcgtgatctcattgatcaattgacggttgagttttgctacctaaattctaaagcaaatcgaaagaaacttgtgcgtgccttattcaatgttaataggacttcactggaactgttgccatactattctcgtttggttgcaacactctcaacctgtatgaaagatgttccaagtatgcttctgtctatgcttgaagaggagttcaactttttaataaataagaaggaccagatcaacatagaaacaaaaataaaaaatatacggtttatcggggagttgtgcaagttcaaaatggctcctccagctcttgtttttagctgtttgaaggcctgccttgatgatttcagtcatcataatattgatgtggcttgcaaccttcttgagacttgtggtcgttttttgtatcgctcacctgaaactaccattcgcatggctaacatgctggagatactgatgagattgaaaaatgtcaagaatttggattcacgccacagtacacttgtagaaaacgcctactacctttgtaaaccgcccgaaagatctgcgcggatatcgaaagttcggccaccgttgcatcaatacataagaaagttgcttttctcagatcttgacaaatcaagtgttgaacatgttttgcgccaactacgcaaattaccttgggcagagtgtcaacaataccttctgaagtgctttctaaaggttcacaaaggaaagtacagccaagttcatctgattgctcttctcactgctagtctcagccgctatcacgatgactttgctgtctcagtggtagatgaggttttagaagagataagggttggattggagttgaatgactatgggatgcaacaaaggaggcttgcccacatgcggttccttggagagctatacagctacaagcatatagattcatcagttgtttttgatacactgtaccttatcattgtgtttggtcatggaactccggaacaagatgtgctggatccaccagaagattgtttcagaatcaggttgatcattacacttctacagacctgtggtcactatttcagtaaggggtcttcaaaaaggaagctcgacaaattcttgctacactttcaaagatacattattagtaaagggcccttaccactcgacatagagtttgacattcaggatttatttggtgagctacgaccaaccatgtctaggtattcgtcaattgaggaacttgttgccgcgttagttgagtttgaagaaaatgaacgttcagccccagtagaaaaggttgaaaatgaaagacactccgacaatgaatctcagaaaagacactcgcgagatgctggtccatctgtgaatggtgaaagcgctgcaaatggaaccgaggaaaatggcaaggctcatgaagtagcagatagtgagagctattcagatactggcagcattgatggacgggaagaagaggaggatatattatctgaggataaatcaaatgatggctcagataacgaaggcgacgatgaagatgatggcattcctgttgtttctgatgaagatgaaaatgttgaggttagacagaaagtcatgaatgttgatcctaaggagcaagaagacttcgatcgagagctcaaagcccttcttcaggagagcttggagtctcgtaaatcagaggcccgttcaaggctccctttgaatatgatggtgccgatgaacgtcctcgagggttcaaaagactcaagggccacagaatctgagagtggagaagaaacagtagacgaagagggtgggaatgctgggggtagcagcaaggtgcgtgtgaaggtgctaatgaagaaaggacacaagcaacagacaagacaaatgttaattccggccgatagttcaattgtgcaaagcacgaagcagcaggaagctgctgagcttgaggagaagcagagcatcaagcggaggatccttgagtacaatgagagggaggaagaattgaatggagcatcccaaatggggaactggggccaaggagctaccagtaccagcagtatcagatcaggtggccggggcagctgggatggttcagcacggggaggtggtcgacaacggcaccacataacgggttctggtggtttctaccacagttatggcaggagaagataagttcgcctgtgtgagctatttcgccctgagccttttggcaggtagaaagcatcctagtctgacaaattgcctctagcaaatgagattagcgtttaacacagcttgatggacaattgcctctagcaccctagtctgaaaataagacaattctaccactggtcatgggagatagcaatgccttgagaaggagctgcaaatctgatggtcctaatggcttgagttgctacggtgtttggtaaagctggttgtgatggctgtacccggatacatgcgcatactgtttcgacgccatgtagggggtatctggtcaaagttcgctgtctgatgcctgttctaatttagtggagtattactggcaatgtggtacaagcatcttgtcttgaaaatcgaaaactgcacggtatgtgtgcgccattttttgtctgatgaggtgtgttccatgcgtgtatttcatatgtagctacaccaatcgcgtgtccaccgaacgatgctaacttgctatgccgatggagcatgctttctacccgcatcgcaacccgcaaatccttgtccagtcgtttgtcttccatccaggaatgataccgagttctcatgtcacgcttgacgcttctttccgt

SEQ ID NO: 44037 - DNA, 4358 bp, Zea Mays
ctcgagttcacgagtgctccctctctctctctcgttacgatgattgggtgaccgccgccgccgccgttgccccacgccaggtgcccaggtcttcgtcaggccctttgccgccgacgagcatcaaccctagttctgggtttttgctctgaagaacaaaatggacaatgctcagagtgacaaccgaactgataccaagcaagatgatgatgcgcgccaaagcaaacaggatgatgagaggaggcccgccttgaagaatataaaaagatcattgatcaaaagatttccctccgccggagcaaccaaaaccctgaaaggcctgatgcaaactacctgagaaccctggactctagtattaagcgcaatacaaccgttataaagaagttgaagacaataaatgatgaacagaaggatgtgataatggatgagttaaaaagtgtgaatttgagtaaatttgtcagcgaagcagtttcttacatttgtgaggccaaacttcgctccgctgatatacaagctgctgttcaggtttgctcgctccttcatcaaagatacaaggacttctctccttgtcttatagaaggtctactgaagatcttctttcctggaaaatctggagatgatttggatgcagataaaaattcgagagccatgaagaagagaagcacattgaaacttttgattgaactatattttgttggaattgtcgaagatgctagcatatttgtaaatattataaaagatcttacatcagcagaacatttgaaggaccgtgaaggaactcaaacaaacctatctcttctatctacctttgctcgtcaagggaagttttttgtagggctacaacctcatggtcaagaagcttatgacgagttctttaaggacctaaatgttactgctgagcagaagaagttctttaagaaagccttgaactcttactatgatgctgtagctgaactactacaatcagaacatgcgtctcttcgtctaatggaggcggagaatgcaaaagttttaagtgccaaaggtgaactaagtgatgagaacacatcctcatatgagaaactcaggaagtcttttgatcagttactacgtggtgtttcctcgttggctgaatctcttgacatgcaacctccagtgatgccagatgatggaaatacaacaagagttactacaggaaccgatgcgttgccttcttctggaaaagaatcatctgcattggaacctatctgggatgatgaagataccaaagctttttatgaatctttacctgatctcagagcatttgtgccagctgtattactgggagaggttgaaccaaaatcaaatgagcaacatgttaagggccgtgagctatctggtgagtccacttcagaacaagagactgaactacatgacaatgttccaacttctgccactgaacgtcaactagaagttaaagtagatgatctagtgaaagagagtgaagacagagataaagagaaggggaaggatggagaaaaggaaaaatccaaggagaaggatctggataagaaaaatgaaagagagaaggagaaaggaagagtcttggatggcgcaagtctggataacctcctgcagaggctgccaggatgtgtcagtcgtgatctcattgatcaattgacggttgagttttgctacctaaattctaaagcaaatcgaaagaaacttgtgcgtgccttattcaatgttaataggacttcactggaactgttgccatactattctcgtttggttgcaacactctcaacctgtatgaaagatgttccaagtatgcttctgtctatgcttgaagaggagttcaactttttaataaataagaaggaccagatcaacatagaaacaaaaataaaaaatatacggtttatcggggagttgtgcaagttcaaaatggctcctccagctcttgtttttagctgtttgaaggcctgccttgatgatttcagtcatcataatattgatgtggcttgcaaccttcttgagacttgtggtcgttttttgtatcgctcacctgaaactaccattcgcatggctaacatgctggagatactgatgagattgaaaaatgtcaagaatttggattcacgccacagtacacttgtagaaaacgcctactacctttgtaaaccgcccgaaagatctgcgcggatatcgaaagttcggccaccgttgcatcaatacataagaaagttgcttttctcagatcttgacaaatcaagtgttgaacatgttttgcgccaactacgcaaattaccttgggcagagtgtcaacaataccttctgaagtgctttctaaaggttcacaaaggaaagtacagccaagttcatctgattgctcttctcactgctagtctcagccgctatcacgatgactttgctgtctcagtggtagatgaggttttagaagagataagggttggattggagttgaatgactatgggatgcaacaaaggaggcttgcccacatgcggttccttggagagctatacagctacaagcatatagattcatcagttgtttttgatacactgtaccttatcattgtgtttggtcatggaactccggaacaagatgtgctggatccaccagaagattgtttcagaatcaggttgatcattacacttctacagacctgtggtcactatttcagtaaggggtcttcaaaaaggaagctcgacaaattcttgctacactttcaaagatacattattagtaaagggcccttaccactcgacatagagtttgacattcaggatttatttggtgagctacgaccaaccatgtctaggtattcgtcaattgaggaacttgttgccgcgttagttgagtttgaagaaaatgaacgttcagccccagtagaaaaggttgaaaatgaaagacactccgacaatgaatctcagaaaagacactcgcgagatgctggtccatctgtgaatggtgaaagcgctgcaaatggaaccgaggaaaatggcaaggctcatgaagtagcagatagtgagagctattcagatactggcagcattgatggacgggaagaagaggaggatatattatctgaggataaatcaaatgatggctcagataacgaaggcgacgatgaagatgatggcattcctgttgtttctgatgaagatgaaaatgttgaggttagacagaaagtcatgaatgttgatcctaaggagcaagaagacttcgatcgagagctcaaagcccttcttcaggagagcttggagtctcgtaaatcagaggcccgttcaaggctccctttgaatatgatggtgccgatgaacgtcctcgagggttcaaaagactcaagggccacagaatctgagagtggagaagaaacagtagacgaagagggtgggaatgctgggggtagcagcaaggtgcgtgtgaaggtgctaatgaagaaaggacacaagcaacagacaagacaaatgttaattccggccgatagttcaattgtgcaaagcacgaagcagcaggaagctgctgagcttgaggagaagcagagcatcaagcggaggatccttgagtacaatgagagggaggaagaattgaatggagcatcccaaatggggaactggggccaaggagctaccagtaccagcagtatcagatcaggtggccggggcagctgggatggttcagcacggggaggtggtcgacaacggcaccacataacgggttctggtggtttctaccacagttatggcaggagaagataagttcgcctgtgtgagctatttcgccctgagccttttggcaggtagaaagcatcctagtctgacaaattgcctctagcaaatgagattagcgtttaacacagcttgatggacaattgcctctagcaccctagtctgaaaataagacaattctaccactggtcatgggagatagcaatgccttgagaaggagctgcaaatctgatggtcctaatggcttgagttgctacggtgtttggtaaagctggttgtgatggctgtacccggatacatgcgcatactgtttcgacgccatgtagggggtatctggtcaaagttcgctgtctgatgcctgttctaatttagtggagtattactggcaatgtggtacaagcatcttgtcttgaaaatcgaaaactgcacggtatgtgtgcgccattttttgtctgatgaggtgtgttccatgcgtgtatttcatatgtagctacaccaatcgcgtgtccaccgaacgatgctaacttgctatgccgatggagcatgctttctacccgcatcgcaacccgcaaatccttgtccagtcgtttgtcttccatccaggaatgataccgagttctcatgtcacgcttgacgcttctttccgt

SEQ ID NO: 44038 - DNA, 4376 bp, Zea Mays
gttcattcctgcgttctcttctcgagttcacgagtgctccctctctctctctcgttacgatgattgggtgaccgccgccgccgccgttgccccacgccaggtgcccaggtcttcgtcaggccctttgccgccgacgagcatcaaccctagttctgggtttttgctctgaagaacaaaatggacaatgctcagagtgacaaccgaactgataccaagcaagatgatgatgcgcgccaaagcaaacaggatgatgaggaggcccgccttgaagaatataaaaagatcattgatcaaaagatttccctccgccggagcaaccaaaaccctgaaaggcctgatgcaaactacctgagaaccctggactctagtattaagcgcaatacaaccgttataaagaagttgaagacaataaatgatgaacagaaggatgtgataatggatgagttaaaaagtgtgaatttgagtaaatttgtcagcgaagcagtttcttacatttgtgaggccaaacttcgctccgctgatatacaagctgctgttcaggtttgctcgctccttcatcaaagatacaaggacttctctccttgtcttatagaaggtctactgaagatcttctttcctggaaaatctggagatgatttggatgcagataaaaattcgagagccatgaagaagagaagcacattgaaacttttgattgaactatattttgttggaattgtcgaagatgctagcatatttgtaaatattataaaagatcttacatcagcagaacatttgaaggaccgtgaaggaactcaaacaaacctatctcttctatctacctttgctcgtcaagggaagttttttgtagggctacaacctcatggtcaagaagcttatgacgagttctttaaggacctaaatgttactgctgagcagaagaagttctttaagaaagccttgaactcttactatgatgctgtagctgaactactacaatcagaacatgcgtctcttcgtctaatggaggcggagaatgcaaaagttttaagtgccaaaggtgaactaagtgatgagaacacatcctcatatgagaaactcaggaagtcttttgatcagttactacgtggtgtttcctcgttggctgaatctcttgacatgcaacctccagtgatgccagatgatggaaatacaacaagagttactacaggaaccgatgcgttgccttcttctggaaaagaatcatctgcattggaacctatctgggatgatgaagataccaaagctttttatgaatctttacctgatctcagagcatttgtgccagctgtattactgggagaggttgaaccaaaatcaaatgagcaacatgttaagggccgtgagctatctggtgagtccacttcagaacaagagactgaactacatgacaatgttccaacttctgccactgaacgtcaactagaagttaaagtagatgatctagtgaaagagagtgaagacagagataaagagaaggggaaggatggagaaaaggaaaaatccaaggagaaggatctggataagaaaaatgaaagagagaaggagaaaggaagagtcttggatggcgcaagtctggataacctcctgcagaggctgccaggatgtgtcagtcgtgatctcattgatcaattgacggttgagttttgctacctaaattctaaagcaaatcgaaagaaacttgtgcgtgccttattcaatgttaataggacttcactggaactgttgccatactattctcgtttggttgcaacactctcaacctgtatgaaagatgttccaagtatgcttctgtctatgcttgaagaggagttcaactttttaataaataagaaggaccagatcaacatagaaacaaaaataaaaaatatacggtttatcggggagttgtgcaagttcaaaatggctcctccagctcttgtttttagctgtttgaaggcctgccttgatgatttcagtcatcataatattgatgtggcttgcaaccttcttgagacttgtggtcgttttttgtatcgctcacctgaaactaccattcgcatggctaacatgctggagatactgatgagattgaaaaatgtcaagaatttggattcacgccacagtacacttgtagaaaacgcctactacctttgtaaaccgcccgaaagatctgcgcggatatcgaaagttcggccaccgttgcatcaatacataagaaagttgcttttctcagatcttgacaaatcaagtgttgaacatgttttgcgccaactacgcaaattaccttgggcagagtgtcaacaataccttctgaagtgctttctaaaggttcacaaaggaaagtacagccaagttcatctgattgctcttctcactgctagtctcagccgctatcacgatgactttgctgtctcagtggtagatgaggttttagaagagataagggttggattggagttgaatgactatgggatgcaacaaaggaggcttgcccacatgcggttccttggagagctatacagctacaagcatatagattcatcagttgtttttgatacactgtaccttatcattgtgtttggtcatggaactccggaacaagatgtgctggatccaccagaagattgtttcagaatcaggttgatcattacacttctacagacctgtggtcactatttcagtaaggggtcttcaaaaaggaagctcgacaaattcttgctacactttcaaagatacattattagtaaagggcccttaccactcgacatagagtttgacattcaggatttatttggtgagctacgaccaaccatgtctaggtattcgtcaattgaggaacttgttgccgcgttagttgagtttgaagaaaatgaacgttcagccccagtagaaaaggttgaaaatgaaagacactccgacaatgaatctcagaaaagacactcgcgagatgctggtccatctgtgaatggtgaaagcgctgcaaatggaaccgaggaaaatggcaaggctcatgaagtagcagatagtgagagctattcagatactggcagcattgatggacgggaagaagaggaggatatattatctgaggataaatcaaatgatggctcagataacgaaggcgacgatgaagatgatggcattcctgttgtttctgatgaagatgaaaatgttgaggttagacagaaagtcatgaatgttgatcctaaggagcaagaagacttcgatcgagagctcaaagcccttcttcaggagagcttggagtctcgtaaatcagaggcccgttcaaggctccctttgaatatgatggtgccgatgaacgtcctcgagggttcaaaagactcaagggccacagaatctgagagtggagaagaaacagtagacgaagagggtgggaatgctgggggtagcagcaaggtgcgtgtgaaggtgctaatgaagaaaggacacaagcaacagacaagacaaatgttaattccggccgatagttcaattgtgcaaagcacgaagcagcaggaagctgctgagcttgaggagaagcagagcatcaagcggaggatccttgagtacaatgagagggaggaagaattgaatggagcatcccaaatggggaactggggccaaggagctaccagtaccagcagtatcagatcaggtggccggggcagctgggatggttcagcacggggaggtggtcgacaacggcaccacataacgggttctggtggtttctaccacagttatggcaggagaagataagttcgcctgtgtgagctatttcgccctgagccttttggcaggtagaaagcatcctagtctgacaaattgcctctagcaaatgagattagcgtttaacacagcttgatggacaattgcctctagcaccctagtctgaaaataagacaattctaccactggtcatgggagatagcaatgccttgagaaggagctgcaaatctgatggtcctaatggcttgagttgctacggtgtttggtaaagctggttgtgatggctgtacccggatacatgcgcatactgtttcgacgccatgtagggggtatctggtcaaagttcgctgtctgatgcctgttctaatttagtggagtattactggcaatgtggtacaagcatcttgtcttgaaaatcgaaaactgcacggtatgtgtgcgccattttttgtctgatgaggtgtgttccatgcgtgtatttcatatgtagctacaccaatcgcgtgtccaccgaacgatgctaacttgctatgccgatggagcatgctttctacccgcatcgcaacccgcaaatccttgtccagtcgtttgtcttccatccaggaatgataccgagttctcatgtcacgcttgacgcttctttccgt

SEQ ID NO: 44039 - DNA, 4458 bp, Zea Mays
caggactttgccaaacgcccaaacagactcgactgtgttcatcggttcattcctgcgttctcttctcgagttcacgagtgctccctctctctctctcgttacgatgattgggtgaccgccgccgccgccgttgccccacgccaggtgcccaggtcttcgtcaggccctttgccgccgacgagcatcaaccctatactaaggttattttggctgtgcatatcacgttgtagagttctgggtttttgctctgaagaacaaaatggacaatgctcagagtgacaaccgaactgataccaagcaagatgatgatgcgcgccaaagcaaacaggatgatgaggaggcccgccttgaagaatataaaaagatcattgatcaaaagatttccctccgccggagcaaccaaaaccctgaaaggcctgatgcaaactacctgagaaccctggactctagtattaagcgcaatacaaccgttataaagaagttgaagacaataaatgatgaacagaaggatgtgataatggatgagttaaaaagtgtgaatttgagtaaatttgtcagcgaagcagtttcttacatttgtgaggccaaacttcgctccgctgatatacaagctgctgttcaggtttgctcgctccttcatcaaagatacaaggacttctctccttgtcttatagaaggtctactgaagatcttctttcctggaaaatctggagatgatttggatgcagataaaaattcgagagccatgaagaagagaagcacattgaaacttttgattgaactatattttgttggaattgtcgaagatgctagcatatttgtaaatattataaaagatcttacatcagcagaacatttgaaggaccgtgaaggaactcaaacaaacctatctcttctatctacctttgctcgtcaagggaagttttttgtagggctacaacctcatggtcaagaagcttatgacgagttctttaaggacctaaatgttactgctgagcagaagaagttctttaagaaagccttgaactcttactatgatgctgtagctgaactactacaatcagaacatgcgtctcttcgtctaatggaggcggagaatgcaaaagttttaagtgccaaaggtgaactaagtgatgagaacacatcctcatatgagaaactcaggaagtcttttgatcagttactacgtggtgtttcctcgttggctgaatctcttgacatgcaacctccagtgatgccagatgatggaaatacaacaagagttactacaggaaccgatgcgttgccttcttctggaaaagaatcatctgcattggaacctatctgggatgatgaagataccaaagctttttatgaatctttacctgatctcagagcatttgtgccagctgtattactgggagaggttgaaccaaaatcaaatgagcaacatgttaagggccgtgagctatctggtgagtccacttcagaacaagagactgaactacatgacaatgttccaacttctgccactgaacgtcaactagaagttaaagtagatgatctagtgaaagagagtgaagacagagataaagagaaggggaaggatggagaaaaggaaaaatccaaggagaaggatctggataagaaaaatgaaagagagaaggagaaaggaagagtcttggatggcgcaagtctggataacctcctgcagaggctgccaggatgtgtcagtcgtgatctcattgatcaattgacggttgagttttgctacctaaattctaaagcaaatcgaaagaaacttgtgcgtgccttattcaatgttaataggacttcactggaactgttgccatactattctcgtttggttgcaacactctcaacctgtatgaaagatgttccaagtatgcttctgtctatgcttgaagaggagttcaactttttaataaataagaaggaccagatcaacatagaaacaaaaataaaaaatatacggtttatcggggagttgtgcaagttcaaaatggctcctccagctcttgtttttagctgtttgaaggcctgccttgatgatttcagtcatcataatattgatgtggcttgcaaccttcttgagacttgtggtcgttttttgtatcgctcacctgaaactaccattcgcatggctaacatgctggagatactgatgagattgaaaaatgtcaagaatttggattcacgccacagtacacttgtagaaaacgcctactacctttgtaaaccgcccgaaagatctgcgcggatatcgaaagttcggccaccgttgcatcaatacataagaaagttgcttttctcagatcttgacaaatcaagtgttgaacatgttttgcgccaactacgcaaattaccttgggcagagtgtcaacaataccttctgaagtgctttctaaaggttcacaaaggaaagtacagccaagttcatctgattgctcttctcactgctagtctcagccgctatcacgatgactttgctgtctcagtggtagatgaggttttagaagagataagggttggattggagttgaatgactatgggatgcaacaaaggaggcttgcccacatgcggttccttggagagctatacagctacaagcatatagattcatcagttgtttttgatacactgtaccttatcattgtgtttggtcatggaactccggaacaagatgtgctggatccaccagaagattgtttcagaatcaggttgatcattacacttctacagacctgtggtcactatttcagtaaggggtcttcaaaaaggaagctcgacaaattcttgctacactttcaaagatacattattagtaaagggcccttaccactcgacatagagtttgacattcaggatttatttggtgagctacgaccaaccatgtctaggtattcgtcaattgaggaacttgttgccgcgttagttgagtttgaagaaaatgaacgttcagccccagtagaaaaggttgaaaatgaaagacactccgacaatgaatctcagaaaagacactcgcgagatgctggtccatctgtgaatggtgaaagcgctgcaaatggaaccgaggaaaatggcaaggctcatgaagtagcagatagtgagagctattcagatactggcagcattgatggacgggaagaagaggaggatatattatctgaggataaatcaaatgatggctcagataacgaaggcgacgatgaagatgatggcattcctgttgtttctgatgaagatgaaaatgttgaggttagacagaaagtcatgaatgttgatcctaaggagcaagaagacttcgatcgagagctcaaagcccttcttcaggagagcttggagtctcgtaaatcagaggcccgttcaaggctccctttgaatatgatggtgccgatgaacgtcctcgagggttcaaaagactcaagggccacagaatctgagagtggagaagaaacagtagacgaagagggtgggaatgctgggggtagcagcaaggtgcgtgtgaaggtgctaatgaagaaaggacacaagcaacagacaagacaaatgttaattccggccgatagttcaattgtgcaaagcacgaagcagcaggaagctgctgagcttgaggagaagcagagcatcaagcggaggatccttgagtacaatgagagggaggaagaattgaatggagcatcccaaatggggaactggggccaaggagctaccagtaccagcagtatcagatcaggtggccggggcagctgggatggttcagcacggggaggtggtcgacaacggcaccacataacgggttctggtggtttctaccacagttatggcaggagaagataagttcgcctgtgtgagctatttcgccctgagccttttggcaggtagaaagcatcctagtctgacaaattgcctctagcaaatgagattagcgtttaacacagcttgatggacaattgcctctagcaccctagtctgaaaataagacaattctaccactggtcatgggagatagcaatgccttgagaaggagctgcaaatctgatggtcctaatggcttgagttgctacggtgtttggtaaagctggttgtgatggctgtacccggatacatgcgcatactgtttcgacgccatgtagggggtatctggtcaaagttcgctgtctgatgcctgttctaatttagtggagtattactggcaatgtggtacaagcatcttgtcttgaaaatcgaaaactgcacggtatgtgtgcgccattttttgtctgatgaggtgtgttccatgcgtgtatttcatatgtagctacaccaatcgcgtgtccaccgaacgatgctaacttgctatgccgatggagcatgctttctacccgcatcgcaacccgcaaatccttgtccagtcgtttgtcttccatccaggaatgataccgagttctcatgtcacgcttgacgcttctttccgt

SEQ ID NO: 44040 - DNA, 4382 bp, Zea Mays
gggcttcaggcttctgcttcaccgtgctcctcccagcccagcgccgacgccgagctccccttccttgaaccgccggccgtgccaacccgcgactcgctggagtaggcggtacgattaattcgaccagacgcggccgcggatcctaaacgatactaaggttattttggctgtgcatatcacgttgtagagttctgggtttttgctctgaagaacaaaatggacaatgctcagagtgacaaccgaactgataccaagcaagatgatgatgcgcgccaaagcaaacaggatgatgaggaggcccgccttgaagaatataaaaagatcattgatcaaaagatttccctccgccggagcaaccaaaaccctgaaaggcctgatgcaaactacctgagaaccctggactctagtattaagcgcaatacaaccgttataaagaagttgaagacaataaatgatgaacagaaggatgtgataatggatgagttaaaaagtgtgaatttgagtaaatttgtcagcgaagcagtttcttacatttgtgaggccaaacttcgctccgctgatatacaagctgctgttcaggtttgctcgctccttcatcaaagatacaaggacttctctccttgtcttatagaaggtctactgaagatcttctttcctggaaaatctggagatgatttggatgcagataaaaattcgagagccatgaagaagagaagcacattgaaacttttgattgaactatattttgttggaattgtcgaagatgctagcatatttgtaaatattataaaagatcttacatcagcagaacatttgaaggaccgtgaaggaactcaaacaaacctatctcttctatctacctttgctcgtcaagggaagttttttgtagggctacaacctcatggtcaagaagcttatgacgagaagaagttctttaagaaagccttgaactcttactatgatgctgtagctgaactactacaatcagaacatgcgtctcttcgtctaatggaggcggagaatgcaaaagttttaagtgccaaaggtgaactaagtgatgagaacacatcctcatatgagaaactcaggaagtcttttgatcagttactacgtggtgtttcctcgttggctgaatctcttgacatgcaacctccagtgatgccagatgatggaaatacaacaagagttactacaggaaccgatgcgttgccttcttctggaaaagaatcatctgcattggaacctatctgggatgatgaagataccaaagctttttatgaatctttacctgatctcagagcatttgtgccagctgtattactgggagaggttgaaccaaaatcaaatgagcaacatgttaagggccgtgagctatctggtgagtccacttcagaacaagagactgaactacatgacaatgttccaacttctgccactgaacgtcaactagaagttaaagtagatgatctagtgaaagagagtgaagacagagataaagagaaggggaaggatggagaaaaggaaaaatccaaggagaaggatctggataagaaaaatgaaagagagaaggagaaaggaagagtcttggatggcgcaagtctggataacctcctgcagaggctgccaggatgtgtcagtcgtgatctcattgatcaattgacggttgagttttgctacctaaattctaaagcaaatcgaaagaaacttgtgcgtgccttattcaatgttaataggacttcactggaactgttgccatactattctcgtttggttgcaacactctcaacctgtatgaaagatgttccaagtatgcttctgtctatgcttgaagaggagttcaactttttaataaataagaaggaccagatcaacatagaaacaaaaataaaaaatatacggtttatcggggagttgtgcaagttcaaaatggctcctccagctcttgtttttagctgtttgaaggcctgccttgatgatttcagtcatcataatattgatgtggcttgcaaccttcttgagacttgtggtcgttttttgtatcgctcacctgaaactaccattcgcatggctaacatgctggagatactgatgagattgaaaaatgtcaagaatttggattcacgccacagtacacttgtagaaaacgcctactacctttgtaaaccgcccgaaagatctgcgcggatatcgaaagttcggccaccgttgcatcaatacataagaaagttgcttttctcagatcttgacaaatcaagtgttgaacatgttttgcgccaactacgcaaattaccttgggcagagtgtcaacaataccttctgaagtgctttctaaaggttcacaaaggaaagtacagccaagttcatctgattgctcttctcactgctagtctcagccgctatcacgatgactttgctgtctcagtggtagatgaggttttagaagagataagggttggattggagttgaatgactatgggatgcaacaaaggaggcttgcccacatgcggttccttggagagctatacagctacaagcatatagattcatcagttgtttttgatacactgtaccttatcattgtgtttggtcatggaactccggaacaagatgtgctggatccaccagaagattgtttcagaatcaggttgatcattacacttctacagacctgtggtcactatttcagtaaggggtcttcaaaaaggaagctcgacaaattcttgctacactttcaaagatacattattagtaaagggcccttaccactcgacatagagtttgacattcaggatttatttggtgagctacgaccaaccatgtctaggtattcgtcaattgaggaacttgttgccgcgttagttgagtttgaagaaaatgaacgttcagccccagtagaaaaggttgaaaatgaaagacactccgacaatgaatctcagaaaagacactcgcgagatgctggtccatctgtgaatggtgaaagcgctgcaaatggaaccgaggaaaatggcaaggctcatgaagtagcagatagtgagagctattcagatactggcagcattgatggacgggaagaagaggaggatatattatctgaggataaatcaaatgatggctcagataacgaaggcgacgatgaagatgatggcattcctgttgtttctgatgaagatgaaaatgttgaggttagacagaaagtcatgaatgttgatcctaaggagcaagaagacttcgatcgagagctcaaagcccttcttcaggagagcttggagtctcgtaaatcagaggcccgttcaaggctccctttgaatatgatggtgccgatgaacgtcctcgagggttcaaaagactcaagggccacagaatctgagagtggagaagaaacagtagacgaagagggtgggaatgctgggggtagcagcaaggtgcgtgtgaaggtgctaatgaagaaaggacacaagcaacagacaagacaaatgttaattccggccgatagttcaattgtgcaaagcacgaagcagcaggaagctgctgagcttgaggagaagcagagcatcaagcggaggatccttgagtacaatgagagggaggaagaattgaatggagcatcccaaatggggaactggggccaaggagctaccagtaccagcagtatcagatcaggtggccggggcagctgggatggttcagcacggggaggtggtcgacaacggcaccacataacgggttctggtggtttctaccacagttatggcaggagaagataagttcgcctgtgtgagctatttcgccctgagccttttggcaggtagaaagcatcctagtctgacaaattgcctctagcaaatgagattagcgtttaacacagcttgatggacaattgcctctagcaccctagtctgaaaataagacaattctaccactggtcatgggagatagcaatgccttgagaaggagctgcaaatctgatggtcctaatggcttgagttgctacggtgtttggtaaagctggttgtgatggctgtacccggatacatgcgcatactgtttcgacgccatgtagggggtatctggtcaaagttcgctgtctgatgcctgttctaatttagtggagtattactggcaatgtggtacaagcatcttgtcttgaaaatcgaaaactgcacggtatgtgtgcgccattttttgtctgatgaggtgtgttccatgcgtgtatttcatatgtagctacaccaatcgcgtgtccaccgaacgatgctaacttgctatgccgatggagcatgctttctacccgcatcgcaacccgcaaatccttgtccagtcgtttgtcttccatccaggaatgataccgagttctcatgtcacgcttgacgcttctttccgt

SEQ ID NO: 44041 - DNA, 4435 bp, Zea Mays
agcaaactgcgttgtcgagagggcttcaggcttctgcttcaccgtgctcctcccagcccagcgccgacgccgagctccccttccttgaaccgccggccgtgccaacccgcgactcgctggagtaggcggtacgattaattcgaccagacgcggccgcggatcctaaacgatactaaggttattttggctgtgcatatcacgttgtagagttctgggtttttgctctgaagaacaaaatggacaatgctcagagtgacaaccgaactgataccaagcaagatgatgatgcgcgccaaagcaaacaggatgatgaggaggcccgccttgaagaatataaaaagatcattgatcaaaagatttccctccgccggagcaaccaaaaccctgaaaggcctgatgcaaactacctgagaaccctggactctagtattaagcgcaatacaaccgttataaagaagttgaagacaataaatgatgaacagaaggatgtgataatggatgagttaaaaagtgtgaatttgagtaaatttgtcagcgaagcagtttcttacatttgtgaggccaaacttcgctccgctgatatacaagctgctgttcaggtttgctcgctccttcatcaaagatacaaggacttctctccttgtcttatagaaggtctactgaagatcttctttcctggaaaatctggagatgatttggatgcagataaaaattcgagagccatgaagaagagaagcacattgaaacttttgattgaactatattttgttggaattgtcgaagatgctagcatatttgtaaatattataaaagatcttacatcagcagaacatttgaaggaccgtgaaggaactcaaacaaacctatctcttctatctacctttgctcgtcaagggaagttttttgtagggctacaacctcatggtcaagaagcttatgacgagttctttaaggacctaaatgttactgctgagcagaagaagttctttaagaaagccttgaactcttactatgatgctgtagctgaactactacaatcagaacatgcgtctcttcgtctaatggaggcggagaatgcaaaagttttaagtgccaaaggtgaactaagtgatgagaacacatcctcatatgagaaactcaggaagtcttttgatcagttactacgtggtgtttcctcgttggctgaatctcttgacatgcaacctccagtgatgccagatgatggaaatacaacaagagttactacaggaaccgatgcgttgccttcttctggaaaagaatcatctgcattggaacctatctgggatgatgaagataccaaagctttttatgaatctttacctgatctcagagcatttgtgccagctgtattactgggagaggttgaaccaaaatcaaatgagcaacatgttaagggccgtgagctatctggtgagtccacttcagaacaagagactgaactacatgacaatgttccaacttctgccactgaacgtcaactagaagttaaagtagatgatctagtgaaagagagtgaagacagagataaagagaaggggaaggatggagaaaaggaaaaatccaaggagaaggatctggataagaaaaatgaaagagagaaggagaaaggaagagtcttggatggcgcaagtctggataacctcctgcagaggctgccaggatgtgtcagtcgtgatctcattgatcaattgacggttgagttttgctacctaaattctaaagcaaatcgaaagaaacttgtgcgtgccttattcaatgttaataggacttcactggaactgttgccatactattctcgtttggttgcaacactctcaacctgtatgaaagatgttccaagtatgcttctgtctatgcttgaagaggagttcaactttttaataaataagaaggaccagatcaacatagaaacaaaaataaaaaatatacggtttatcggggagttgtgcaagttcaaaatggctcctccagctcttgtttttagctgtttgaaggcctgccttgatgatttcagtcatcataatattgatgtggcttgcaaccttcttgagacttgtggtcgttttttgtatcgctcacctgaaactaccattcgcatggctaacatgctggagatactgatgagattgaaaaatgtcaagaatttggattcacgccacagtacacttgtagaaaacgcctactacctttgtaaaccgcccgaaagatctgcgcggatatcgaaagttcggccaccgttgcatcaatacataagaaagttgcttttctcagatcttgacaaatcaagtgttgaacatgttttgcgccaactacgcaaattaccttgggcagagtgtcaacaataccttctgaagtgctttctaaaggttcacaaaggaaagtacagccaagttcatctgattgctcttctcactgctagtctcagccgctatcacgatgactttgctgtctcagtggtagatgaggttttagaagagataagggttggattggagttgaatgactatgggatgcaacaaaggaggcttgcccacatgcggttccttggagagctatacagctacaagcatatagattcatcagttgtttttgatacactgtaccttatcattgtgtttggtcatggaactccggaacaagatgtgctggatccaccagaagattgtttcagaatcaggttgatcattacacttctacagacctgtggtcactatttcagtaaggggtcttcaaaaaggaagctcgacaaattcttgctacactttcaaagatacattattagtaaagggcccttaccactcgacatagagtttgacattcaggatttatttggtgagctacgaccaaccatgtctaggtattcgtcaattgaggaacttgttgccgcgttagttgagtttgaagaaaatgaacgttcagccccagtagaaaaggttgaaaatgaaagacactccgacaatgaatctcagaaaagacactcgcgagatgctggtccatctgtgaatggtgaaagcgctgcaaatggaaccgaggaaaatggcaaggctcatgaagtagcagatagtgagagctattcagatactggcagcattgatggacgggaagaagaggaggatatattatctgaggataaatcaaatgatggctcagataacgaaggcgacgatgaagatgatggcattcctgttgtttctgatgaagatgaaaatgttgaggttagacagaaagtcatgaatgttgatcctaaggagcaagaagacttcgatcgagagctcaaagcccttcttcaggagagcttggagtctcgtaaatcagaggcccgttcaaggctccctttgaatatgatggtgccgatgaacgtcctcgagggttcaaaagactcaagggccacagaatctgagagtggagaagaaacagtagacgaagagggtgggaatgctgggggtagcagcaaggtgcgtgtgaaggtgctaatgaagaaaggacacaagcaacagacaagacaaatgttaattccggccgatagttcaattgtgcaaagcacgaagcagcaggaagctgctgagcttgaggagaagcagagcatcaagcggaggatccttgagtacaatgagagggaggaagaattgaatggagcatcccaaatggggaactggggccaaggagctaccagtaccagcagtatcagatcaggtggccggggcagctgggatggttcagcacggggaggtggtcgacaacggcaccacataacgggttctggtggtttctaccacagttatggcaggagaagataagttcgcctgtgtgagctatttcgccctgagccttttggcaggtagaaagcatcctagtctgacaaattgcctctagcaaatgagattagcgtttaacacagcttgatggacaattgcctctagcaccctagtctgaaaataagacaattctaccactggtcatgggagatagcaatgccttgagaaggagctgcaaatctgatggtcctaatggcttgagttgctacggtgtttggtaaagctggttgtgatggctgtacccggatacatgcgcatactgtttcgacgccatgtagggggtatctggtcaaagttcgctgtctgatgcctgttctaatttagtggagtattactggcaatgtggtacaagcatcttgtcttgaaaatcgaaaactgcacggtatgtgtgcgccattttttgtctgatgaggtgtgttccatgcgtgtatttcatatgtagctacaccaatcgcgtgtccaccgaacgatgctaacttgctatgccgatggagcatgctttctacccgcatcgcaacccgcaaatccttgtccagtcgtttgtcttccatccaggaatgataccgagttctcatgtcacgcttgacgcttctttccgt

SEQ ID NO: 44042 - DNA, 4397 bp, Zea Mays
agcaaactgcgttgtcgagagggcttcaggcttctgcttcaccgtgctcctcccagcccagcgccgacgccgagctccccttccttgaaccgccggccgtgccaacccgcgactcgctggagtaggcggtacgattaattcgaccagacgcggccgcggatcctaaacgagttctgggtttttgctctgaagaacaaaatggacaatgctcagagtgacaaccgaactgataccaagcaagatgatgatgcgcgccaaagcaaacaggatgatgaggaggcccgccttgaagaatataaaaagatcattgatcaaaagatttccctccgccggagcaaccaaaaccctgaaaggcctgatgcaaactacctgagaaccctggactctagtattaagcgcaatacaaccgttataaagaagttgaagacaataaatgatgaacagaaggatgtgataatggatgagttaaaaagtgtgaatttgagtaaatttgtcagcgaagcagtttcttacatttgtgaggccaaacttcgctccgctgatatacaagctgctgttcaggtttgctcgctccttcatcaaagatacaaggacttctctccttgtcttatagaaggtctactgaagatcttctttcctggaaaatctggagatgatttggatgcagataaaaattcgagagccatgaagaagagaagcacattgaaacttttgattgaactatattttgttggaattgtcgaagatgctagcatatttgtaaatattataaaagatcttacatcagcagaacatttgaaggaccgtgaaggaactcaaacaaacctatctcttctatctacctttgctcgtcaagggaagttttttgtagggctacaacctcatggtcaagaagcttatgacgagttctttaaggacctaaatgttactgctgagcagaagaagttctttaagaaagccttgaactcttactatgatgctgtagctgaactactacaatcagaacatgcgtctcttcgtctaatggaggcggagaatgcaaaagttttaagtgccaaaggtgaactaagtgatgagaacacatcctcatatgagaaactcaggaagtcttttgatcagttactacgtggtgtttcctcgttggctgaatctcttgacatgcaacctccagtgatgccagatgatggaaatacaacaagagttactacaggaaccgatgcgttgccttcttctggaaaagaatcatctgcattggaacctatctgggatgatgaagataccaaagctttttatgaatctttacctgatctcagagcatttgtgccagctgtattactgggagaggttgaaccaaaatcaaatgagcaacatgttaagggccgtgagctatctggtgagtccacttcagaacaagagactgaactacatgacaatgttccaacttctgccactgaacgtcaactagaagttaaagtagatgatctagtgaaagagagtgaagacagagataaagagaaggggaaggatggagaaaaggaaaaatccaaggagaaggatctggataagaaaaatgaaagagagaaggagaaaggaagagtcttggatggcgcaagtctggataacctcctgcagaggctgccaggatgtgtcagtcgtgatctcattgatcaattgacggttgagttttgctacctaaattctaaagcaaatcgaaagaaacttgtgcgtgccttattcaatgttaataggacttcactggaactgttgccatactattctcgtttggttgcaacactctcaacctgtatgaaagatgttccaagtatgcttctgtctatgcttgaagaggagttcaactttttaataaataagaaggaccagatcaacatagaaacaaaaataaaaaatatacggtttatcggggagttgtgcaagttcaaaatggctcctccagctcttgtttttagctgtttgaaggcctgccttgatgatttcagtcatcataatattgatgtggcttgcaaccttcttgagacttgtggtcgttttttgtatcgctcacctgaaactaccattcgcatggctaacatgctggagatactgatgagattgaaaaatgtcaagaatttggattcacgccacagtacacttgtagaaaacgcctactacctttgtaaaccgcccgaaagatctgcgcggatatcgaaagttcggccaccgttgcatcaatacataagaaagttgcttttctcagatcttgacaaatcaagtgttgaacatgttttgcgccaactacgcaaattaccttgggcagagtgtcaacaataccttctgaagtgctttctaaaggttcacaaaggaaagtacagccaagttcatctgattgctcttctcactgctagtctcagccgctatcacgatgactttgctgtctcagtggtagatgaggttttagaagagataagggttggattggagttgaatgactatgggatgcaacaaaggaggcttgcccacatgcggttccttggagagctatacagctacaagcatatagattcatcagttgtttttgatacactgtaccttatcattgtgtttggtcatggaactccggaacaagatgtgctggatccaccagaagattgtttcagaatcaggttgatcattacacttctacagacctgtggtcactatttcagtaaggggtcttcaaaaaggaagctcgacaaattcttgctacactttcaaagatacattattagtaaagggcccttaccactcgacatagagtttgacattcaggatttatttggtgagctacgaccaaccatgtctaggtattcgtcaattgaggaacttgttgccgcgttagttgagtttgaagaaaatgaacgttcagccccagtagaaaaggttgaaaatgaaagacactccgacaatgaatctcagaaaagacactcgcgagatgctggtccatctgtgaatggtgaaagcgctgcaaatggaaccgaggaaaatggcaaggctcatgaagtagcagatagtgagagctattcagatactggcagcattgatggacgggaagaagaggaggatatattatctgaggataaatcaaatgatggctcagataacgaaggcgacgatgaagatgatggcattcctgttgtttctgatgaagatgaaaatgttgaggttagacagaaagtcatgaatgttgatcctaaggagcaagaagacttcgatcgagagctcaaagcccttcttcaggagagcttggagtctcgtaaatcagaggcccgttcaaggctccctttgaatatgatggtgccgatgaacgtcctcgagggttcaaaagactcaagggccacagaatctgagagtggagaagaaacagtagacgaagagggtgggaatgctgggggtagcagcaaggtgcgtgtgaaggtgctaatgaagaaaggacacaagcaacagacaagacaaatgttaattccggccgatagttcaattgtgcaaagcacgaagcagcaggaagctgctgagcttgaggagaagcagagcatcaagcggaggatccttgagtacaatgagagggaggaagaattgaatggagcatcccaaatggggaactggggccaaggagctaccagtaccagcagtatcagatcaggtggccggggcagctgggatggttcagcacggggaggtggtcgacaacggcaccacataacgggttctggtggtttctaccacagttatggcaggagaagataagttcgcctgtgtgagctatttcgccctgagccttttggcaggtagaaagcatcctagtctgacaaattgcctctagcaaatgagattagcgtttaacacagcttgatggacaattgcctctagcaccctagtctgaaaataagacaattctaccactggtcatgggagatagcaatgccttgagaaggagctgcaaatctgatggtcctaatggcttgagttgctacggtgtttggtaaagctggttgtgatggctgtacccggatacatgcgcatactgtttcgacgccatgtagggggtatctggtcaaagttcgctgtctgatgcctgttctaatttagtggagtattactggcaatgtggtacaagcatcttgtcttgaaaatcgaaaactgcacggtatgtgtgcgccattttttgtctgatgaggtgtgttccatgcgtgtatttcatatgtagctacaccaatcgcgtgtccaccgaacgatgctaacttgctatgccgatggagcatgctttctacccgcatcgcaacccgcaaatccttgtccagtcgtttgtcttccatccaggaatgataccgagttctcatgtcacgcttgacgcttctttccgt

SEQ ID NO: 44043 - DNA, 4476 bp, Zea Mays
ctctcatcggcaccgctgcctcccagcaggagagggcttggcgatgggtctgttgggatgctccagtctctcactgtctactactacttgtaccaaatatctactggactctggatgggcatcgaattttatgctataaacaccgattcccaagcccttattaattcacaagcgcaatatcctctgcaaattggagagcagttgacccacgacttaggtaccggtggaaatccaaatttgggagagcaggctgctgaggaatcaagagaaaccatagccactgccctgagggattcagatcttgttttcataacagctgggatgggagggggtgctgctccaattgttgcccagatatcaaaggaagctggttatcttactgttggtgttgtcacctatccattcaatttcgagggccgtcagctctttgctcttttcacatctatatcaattgcttgccccacaaatgatcagccagggtcaggtaaaccatattgtgtaaccatcactataacactgcaatcattttctaaatagtacttttataaatcacaaatcgaaggtataaatacaaaagtgtagaaaattataatgagaacattacctatataaacaagaaaggaaaaccaatgatgttttccttgttgaagttatttgtggcttttacaatgtcagagaacgtgagcttgttttcatttacttttccttgtggcaccatgatcactccaaatgcaattgcaagaatggccttcttatttcttcctcctgtggataccagaggcacatcggctgaatcgcatcgacgaccgatcataaagccgcacagctttggattccctagaaagctggagttctgaaatgtaccaaattgaccaccggttggaataggcccctctaggtcattgttagaaacgttgaatgtggaaaggaagtgcagattctcgaatgcaactggaattttacccgtgagatcattgctggataaatctagcatccagcaggtttgtgagattgcagatagatgtggggatcggtccggttaagctgttggagctgatatcaagtgaaaggaggccttttaactgaccaatctctgggagaatcagaactgtgaatatgttgctgcttagatttagaattttaggaaaagcaatcggtatccggtacggtttcttcaaagaaattgatgccaagaagaagcgtggtcaggttcttagagctcctcagtatctgaagcgtgtttgttatatttgaaaggctgttgtttgggcaaggcgaatcaggcaagagttgatgacgagcggctaaactaatccaagagttgatgacgaccggcttgttctttcacttgcaacgacttagagtcgggcgacctgcaagatcaaggtgcatggtcgtcgaaggatggcgacggcgtatcctcgttcaggcaaggcgaatcaggcaagcatctatttggaggttggttagttatcccatgtcatcagacatcacgcaggaatcaagtcatccatcaggaagcagccaactctgcctggactaacccagggcaaaggcaaacagcaaactttccaggataagtctctgacttcgttatactttcctgtgtgcaggaggtcttgaagatctggaactgcaggtgcagaatgctattgcagcagttgcagctccacccaaggaaagcaatagtgtcagcagcaacgatcctggtagctcgtcctctgtgatttttccgtctggtccagctgatcaagtccctgttcctgctacctctccagaaattgagccccgttttgcaaaccaaatccctgctgcttcttcggaggttaaggcaccatgcatggcaggtctgttgtttgtaagcgacaggaacgagaggaactttaggttgcctagcccttctgataattgtccatggaacttattcgaatctagccgtagcgcagtcagctttctacaggagtatatgctttccggaatcgtgccactgaagttattcagcatgagatctatggttcttagactgggcatattgctgaataactatagttggtagatggtctcgctacagtagacaggaaaggcaccatgcctggcactggcaggtctgcagcgaacaccgttgtatgtgtatgtatagtatgcacgtgtgcaattcatattagcttaacagcctgtgtaacaaaaacaattacccaacttcccaagatagttaatgcactatatatccaaaacctgatacatgcatcaatttgtcttaaaaagtacattcataaaaatataaatgtataaagagttcatttgtattttaacaaaagtctttggtcaaagccatattctggagaccgtgtcagtgtcctagaccacaaataacattggagggagtaaattatatctcatgtctatcaacgaagttttactttttaggttctattaatgtctaattcttgtaacccctcttttttggtatctcaattgttgcagttaggaaaccttccattacggccttatttctgcagaagtatgacaccaactttcatctattctctaccaccaaagagatggaaaagcaggttgcccccacccccatagctttctgttttgtccctataacaggtttacctatgttatatatagacaccgtagcaatgcacgtgtaatggtagattttctgattggttagtttggaagtgaagtaggtgccaatgttgtgcatgagcagaagaaatattattcccttcaatattagtagaggtagagatatttacttttatcagtatttgtgttgtgatagctatttttagcctaatgtttcaggtcaaagggccatacttcatagctttttgctcctcattgttttaagtgaaagggcgccaactattcaaaatttactctaggtagataattttcattgtcgagttttattttggtatatgtaactttttgtaattgggcctaagcgtattggagcactctaagttaacaggtgcttgaagctgatgatgaaattatacagcttggatgaataaacctttgttgtagtgacataaggagtttcgaaattacaaggaattttaaatttgaatatttttcagtgagatgttgaggttgataattttaatctttgtgcactaatattttgtagaaagtagtttgttcaccgttgcaacgcacgggcatgtacctagtcaagcattaagcacgcgatgaacaacgtccttcccgttatcgcccaacaactagaattccacttctatcatcgaccccataacatcacacaacataacaccataacaacggatctagccataattaccaagcgcacacctcgcatcactggtatttctaacttaatcgtatacgcatacgaagcgtcttattttacgatcataaaaccgatagtaaaaatagcgaatcggctcaccacatcacaattcgatttggtagttgcctgaacaacgacggccttcagctgaagtccttgatcgaacatctggcgagcgtgaccgacgagctaagtctgaggcgaagctcgacgacgagatcgaacaggggatgatgagcgtgagggtttcacaacgaggatgagtgacatcgtggaatcttggtccaacatttaatcgaacacaacggaagcgaggcacagcaggaatggcagtattaagcatgggcacgataagggacgcgctgctgcacgacgcgatgatgaacgacgacaacctatgacggccaaaacggaagacttggtcgaggcggggtccaagcatccagagtttttttttgccgaggctgaacagagaaggatgcacaaatcctaggcacgatggtggccatagccaagcagtgggacgcgactgcgcgcagagaactcggcatggcgagggacgacggaacgctgcgtgcgcgtccagggagcaaggcgcggtcgagaacggacagagggagccgggagaaagaactgcggcgctgcgagcagagcgcaggggagttcgtggctgcgcgcagatgggcgagctggagcgccgcgacgagcgcaggggcgcggcacaagcgagggcgagctgccgcagggagaaagaagctggggaaagggccgcagcgctgggggctcgacgtgccgtgaccagcagagagatgcggcgctgcgcagaggagggagaggaaggagagagagcagccatgggaaagggaggagaactgggcgcgacgcaggcagccaagggagcttcaaggccgagcgccaggaagaatgagcagggcgccgcgacactgggacagggcaccggcgagcagcaagcagagagagaaggcgcggcggtcaggacgaacgtcagggagcttcggctggccatggaaccgagcagtgatgcgccatgggggagaaaccagcgcgcagcagagaagctcggcgaggaagatggggcaggaactcggcgccggcgaggggagcagggtgatgaacgccgaggaagctga

SEQ ID NO: 44044 - DNA, 4180 bp, Zea Mays
ccgccgccgcaatcaacgcgctcctcccccacgtggatccctccaccctcctccccaccgccgccgctcgaccgcggtttcgtcgcactccttccttcgaaagcgctcctttccatcctcgattcctccttccttccatgtcgctccttccttcgacggccagcctcatccggtcattcctcctcgctgtgccccctcccccgtattcaaccacctcttcctcctgcggatccaccaccgccgtcctcgcccaacgtctccttgacgcatatgcccgcagcggctccctcgcgtccccaatgttgagtctggcctgtatggaaggagtgcgggcgtgggtggagtgtgtagagaaatccaagcgaaaccccgtgagagcgaggtgacggcagacggaggcgagtgggtgagctgcgggcgagagacgaggtagcgggctagcggatggcgtcgctggttgtagtggccgcagcgctgctggtggcggcgctggtggcattctgcggcacggacccgctctggacggggttcgagtcccacctcgtcgaccttcccggggttcgagtcccacctcgtcgacctccccgatcccgccgagatgtcgacgcacgcggacgaacgggagtggctccgcggagccgaggtgcaacccctccaaaccggcgttcaaggacggcgccgctcaccagttgtatctgccttgagcgatccaggagagggcttggcgatgggtctgttgggatgctccagtctctcactgtctactactacttgtaccaaatatctactggactctggatgggcatcgaattttatgctataaacaccgattcccaagcccttattaattcacaagcgcaatatcctctgcaaattggagagcagttgacccacgacttaggtaccggtggaaatccaaatttgggagagcaggctgctgaggaatcaagagaaaccatagccactgccctgagggattcagatcttgttttcataacagctgggatgggagggggtgctgctccaattgttgcccagatatcaaaggaagctggttatcttactgttggtgttgtcacctatccattcaatttcgagggccgtaagcgctctttacagaggcacatcggctgaatcgcatcgacgaccgatcataaagccgcacagctttggattccctagaaagctggagttctgaaatgtaccaaattgaccaccggttggaataggcccctctaggtcattgttagaaacgttgaatgtggaaaggaagtgcagattctcgaatgcaactggaattttacccgtgagatcattgctggataaatctagcatccagcaggtttgtgagattgcagatagatgtggggatcggtccggttaagctgttggagctgatatcaagtgaaaggaggccttttaactgaccaatctctgggagaatcagaactgtgaatatgttgctgcttagatttagaattttaggaaaagcaatcggtatccggtacggtttcttcaaagaaattgatgccaagaagaagcgtggtcaggttcttagagctcctcagtatctgaagcgtgtttgttatatttgaaaggctgttgtttgggcaaggcgaatcaggcaagagttgatgacgagcggctaaactaatccaagagttgatgacgaccggcttgttctttcacttgcaacgacttagagtcgggcgacctgcaagatcaaggtgcatggtcgtcgaaggatggcgacggcgtatcctcgttcaggcaaggcgaatcaggcaagcatctatttggaggttggttagttatcccatgtcatcagacatcacgcaggaatcaagtcatccatcaggaagcagccaactctgcctggactaacccagggcaaaggcaaacagcaaactttccaggataagtctctgacttcgttatactttcctgtgtgcaggaggtcttgaagatctggaactgcaggtgcagaatgctattgcagcagttgcagctccacccaaggaaagcaatagtgtcagcagcaacgatcctggtagctcgtcctctgtgatttttccgtctggtccagctgatcaagtccctgttcctgctacctctccagaaattgagccccgttttgcaaaccaaatccctgctgcttcttcggaggttaaggcaccatgcatggcagttaggaaaccttccattacggccttatttctgcagaagtatgacaccaactttcatctattctctaccaccaaagagatggaaaagcaggttgcccccacccccatagctttctgttttgtccctataacaggtttacctatgttatatatagacaccgtagcaatgcacgtgtaatggtagattttctgattggttagtttggaagtgaagtaggtgccaatgttgtgcatgagcagaagaaatattattcccttcaatattagtagaggtagagatatttacttttatcagtatttgtgttgtgatagctatttttagcctaatgtttcaggtcaaagggccatacttcatagctttttgctcctcattgttttaagtgaaagggcgccaactattcaaaatttactctaggtagataattttcattgtcgagttttattttggtatatgtaactttttgtaattgggcctaagcgtattggagcactctaagttaacaggtgcttgaagctgatgatgaaattatacagcttggatgaataaacctttgttgtagtgacataaggagtttcgaaattacaaggaattttaaatttgaatatttttcagtgagatgttgaggttgataattttaatctttgtgcactaatattttgtagaaagtagtttgttcaccgttgcaacgcacgggcatgtacctagtcaagcattaagcacgcgatgaacaacgtccttcccgttatcgcccaacaactagaattccacttctatcatcgaccccataacatcacacaacataacaccataacaacggatctagccataattaccaagcgcacacctcgcatcactggtatttctaacttaatcgtatacgcatacgaagcgtcttattttacgatcataaaaccgatagtaaaaatagcgaatcggctcaccacatcacaattcgatttggtagttgcctgaacaacgacggccttcagctgaagtccttgatcgaacatctggcgagcgtgaccgacgagctaagtctgaggcgaagctcgacgacgagatcgaacaggggatgatgagcgtgagggtttcacaacgaggatgagtgacatcgtggaatcttggtccaacatttaatcgaacacaacggaagcgaggcacagcaggaatggcagtattaagcatgggcacgataagggacgcgctgctgcacgacgcgatgatgaacgacgacaacctatgacggccaaaacggaagacttggtcgaggcggggtccaagcatccagagtttttttttgccgaggctgaacagagaaggatgcacaaatcctaggcacgatggtggccatagccaagcagtgggacgcgactgcgcgcagagaactcggcatggcgagggacgacggaacgctgcgtgcgcgtccagggagcaaggcgcggtcgagaacggacagagggagccgggagaaagaactgcggcgctgcgagcagagcgcaggggagttcgtggctgcgcgcagatgggcgagctggagcgccgcgacgagcgcaggggcgcggcacaagcgagggcgagctgccgcagggagaaagaagctggggaaagggccgcagcgctgggggctcgacgtgccgtgaccagcagagagatgcggcgctgcgcagaggagggagaggaaggagagagagcagccatgggaaagggaggagaactgggcgcgacgcaggcagccaagggagcttcaaggccgagcgccaggaagaatgagcagggcgccgcgacactgggacagggcaccggcgagcagcaagcagagagagaaggcgcggcggtcaggacgaacgtcagggagcttcggctggccatggaaccgagcagtgatgcgccatgggggagaaaccagcgcgcagcagagaagctcggcgaggaagatggggcaggaactcggcgccggcgaggggagcagggtgatgaacgccgaggaagctga

SEQ ID NO: 44045 - DNA, 5447 bp, Zea Mays
ccctccttcccaccgccgccgcaatcaacgcgctcctcccccacgtggatccctccaccctcctccccaccgccgccgctcgaccgcggtttcgtcgcactccttccttcgaaagcgctcctttccatcctcgattcctccttccttccatgtcgctccttccttcgacggccagcctcatccggtcattcctcctcgctgtgccccctcccccgtattcaaccacctcttcctcctgcggatccaccaccgccgtcctcgcccaacgtctccttgacgcatatgcccgcagcggctccctcgcgtccccaatgttgagtctggcctgtatggaaggagtgcgggcgtgggtggagtgtgtagagaaatccaagcgaaaccccgtgagagcgaggtgacggcagacggaggcgagtgggtgagctgcgggcgagagacgaggtagcgggctagcggatggcgtcgctggttgtagtggccgcagcgctgctggtggcggcgctggtggcattctgcggcacggacccgctctggacggggttcgagtcccacctcgtcgaccttcccggggttcgagtcccacctcgtcgacctccccgatcccgccgagatgtcgacgcacgcggacgaacgggagtggctccgcggagccgaggtgcaacccctccaaaccggcgttcaaggacggcgccgctcaccagttgtatctgccttgagcgatccaggagagggcttggcgatgggtctgttgggatgctccagtctctcactgtctactactacttgtaccaaatatctactggactctggatgggcatcgaattttatgctataaacaccgattcccaagcccttattaattcacaagcgcaatatcctctgcaaattggagagcagttgacccacgacttaggtaccggtggaaatccaaatttgggagagcaggctgctgaggaatcaagagaaaccatagccactgccctgagggattcagatcttgttttcataacagctgggatgggagggggtgctgctccaattgttgcccagatatcaaaggaagctggttatcttactgttggtgttgtcacctatccattcaatttcgagggccgtaagcgctctttacaggatctcccatgtgacagatggcttggcaagattatactagagacttgtatttctcagatccatatttggcttaggtatgattcttgtgtcaatgctacatatatttttcctaattattgtaggtacttccatttagccttgcgacaataaatattttgtgcgaaacacatcatctcttcacggttcaatacgatcatcggctatatatcctggctgatcatcgtcaagagcattagtagttgctactgatatatataggtcagctctttgctcttttcacatctatatcaattgcttgccccacaaatgatcagccagggtcaggtaaaccatattgtgtaaccatcactataacactgcaatcattttctaaatagtacttttataaatcacaaatcgaaggtataaatacaaaagtgtagaaaattataatgagaacattacctatataaacaagaaaggaaaaccaatgatgttttccttgttgaagttatttgtggcttttacaatgtcagagaacgtgagcttgttttcatttacttttccttgtggcaccatgatcactccaaatgcaattgcaagaatggccttcttatttcttcctcctgtggataccagaggcacatcggctgaatcgcatcgacgaccgatcataaagccgcacagctttggattccctagaaagctggagttctgaaatgtaccaaattgaccaccggttggaataggcccctctaggtcattgttagaaacgttgaatgtggaaaggaagtgcagattctcgaatgcaactggaattttacccgtgagatcattgctggataaatctagcatccagcaggtttgtgagattgcagatagatgtggggatcggtccggttaagctgttggagctgatatcaagtgaaaggaggccttttaactgaccaatctctgggagaatcagaactgtgaatatgttgctgcttagatttagaattttaggaaaagcaatcggtatccggtacggtttcttcaaagaaattgatgccaagaagaagcgtggtcaggttcttagagctcctcagtatctgaagcgtgtttgttatatttgaaaggctgttgtttgggcaaggcgaatcaggcaagagttgatgacgagcggctaaactaatccaagagttgatgacgaccggcttgttctttcacttgcaacgacttagagtcgggcgacctgcaagatcaaggtgcatggtcgtcgaaggatggcgacggcgtatcctcgttcaggcaaggcgaatcaggcaagcatctatttggaggttggttagttatcccatgtcatcagacatcacgcaggaatcaagtcatccatcaggaagcagccaactctgcctggactaacccagggcaaaggcaaacagcaaactttccaggataagtctctgacttcgttatactttcctgtgtgcaggaggtcttgaagatctggaactgcaggtgcagaatgctattgcagcagttgcagctccacccaaggaaagcaatagtgtcagcagcaacgatcctggtagctcgtcctctgtgatttttccgtctggtccagctgatcaagtccctgttcctgctacctctccagaaattgagccccgttttgcaaaccaaatccctgctgcttcttcggaggttaaggcaccatgcatggcaggtctgttgtttgtaagcgacaggaacgagaggaactttaggttgcctagcccttctgataattgtccatggaacttattcgaatctagccgtagcgcagtcagctttctacaggagtatatgctttccggaatcgtgccactgaagttattcagcatgagatctatggttcttagactgggcatattgctgaataactatagttggtagatggtctcgctacagtagacaggaaaggcaccatgcctggcactggcaggtctgcagcgaacaccgttgtatgtgtatgtatagtatgcacgtgtgcaattcatattagcttaacagcctgtgtaacaaaaacaattacccaacttcccaagatagttaatgcactatatatccaaaacctgatacatgcatcaatttgtcttaaaaagtacattcataaaaatataaatgtataaagagttcatttgtattttaacaaaagtctttggtcaaagccatattctggagaccgtgtcagtgtcctagaccacaaataacattggagggagtaaattatatctcatgtctatcaacgaagttttactttttaggttctattaatgtctaattcttgtaacccctcttttttggtatctcaattgttgcagttaggaaaccttccattacggccttatttctgcagaagtatgacaccaactttcatctattctctaccaccaaagagatggaaaagcaggttgcccccacccccatagctttctgttttgtccctataacaggtttacctatgttatatatagacaccgtagcaatgcacgtgtaatggtagattttctgattggttagtttggaagtgaagtaggtgccaatgttgtgcatgagcagaagaaatattattcccttcaatattagtagaggtagagatatttacttttatcagtatttgtgttgtgatagctatttttagcctaatgtttcaggtcaaagggccatacttcatagctttttgctcctcattgttttaagtgaaagggcgccaactattcaaaatttactctaggtagataattttcattgtcgagttttattttggtatatgtaactttttgtaattgggcctaagcgtattggagcactctaagttaacaggtgcttgaagctgatgatgaaattatacagcttggatgaataaacctttgttgtagtgacataaggagtttcgaaattacaaggaattttaaatttgaatatttttcagtgagatgttgaggttgataattttaatctttgtgcactaatattttgtagaaagtagtttgttcaccgttgcaacgcacgggcatgtacctagtcaagcattaagcacgcgatgaacaacgtccttcccgttatcgcccaacaactagaattccacttctatcatcgaccccataacatcacacaacataacaccataacaacggatctagccataattaccaagcgcacacctcgcatcactggtatttctaacttaatcgtatacgcatacgaagcgtcttattttacgatcataaaaccgatagtaaaaatagcgaatcggctcaccacatcacaattcgatttggtagttgcctgaacaacgacggccttcagctgaagtccttgatcgaacatctggcgagcgtgaccgacgagctaagtctgaggcgaagctcgacgacgagatcgaacaggggatgatgagcgtgagggtttcacaacgaggatgagtgacatcgtggaatcttggtccaacatttaatcgaacacaacggaagcgaggcacagcaggaatggcagtattaagcatgggcacgataagggacgcgctgctgcacgacgcgatgatgaacgacgacaacctatgacggccaaaacggaagacttggtcgaggcggggtccaagcatccagagtttttttttgccgaggctgaacagagaaggatgcacaaatcctaggcacgatggtggccatagccaagcagtgggacgcgactgcgcgcagagaactcggcatggcgagggacgacggaacgctgcgtgcgcgtccagggagcaaggcgcggtcgagaacggacagagggagccgggagaaagaactgcggcgctgcgagcagagcgcaggggagttcgtggctgcgcgcagatgggcgagctggagcgccgcgacgagcgcaggggcgcggcacaagcgagggcgagctgccgcagggagaaagaagctggggaaagggccgcagcgctgggggctcgacgtgccgtgaccagcagagagatgcggcgctgcgcagaggagggagaggaaggagagagagcagccatgggaaagggaggagaactgggcgcgacgcaggcagccaagggagcttcaaggccgagcgccaggaagaatgagcagggcgccgcgacactgggacagggcaccggcgagcagcaagcagagagagaaggcgcggcggtcaggacgaacgtcagggagcttcggctggccatggaaccgagcagtgatgcgccatgggggagaaaccagcgcgcagcagagaagctcggcgaggaagatggggcaggaactcggcgccggcgaggggagcagggtgatgaacgccgaggaagctga

SEQ ID NO: 44046 - DNA, 5251 bp, Zea Mays
cgcccggatccccaccctccttcccaccgccgccgcaatcaacgcgctcctcccccacgtggatccctccaccctcctccccaccgccgccgctcgaccgcggtttcgtcgcactccttccttcgaaagcgctcctttccatcctcgattcctccttccttccatgtcgctccttccttcgacggccagcctcatccggtcattcctcctcgctgtgccccctcccccgtattcaaccacctcttcctcctgcggatccaccaccgccgtcctcgcccaacgtctccttgacgcatatgcccgcagcggctccctcgcgtccccaatgttgagtctggcctgtatggaaggagtgcgggcgtgggtggagtgtgtagagaaatccaagcgaaaccccgtgagagcgaggtgacggcagacggaggcgagtgggtgagctgcgggcgagagacgaggtagcgggctagcggatggcgtcgctggttgtagtggccgcagcgctgctggtggcggcgctggtggcattctgcggcacggacccgctctggacggggttcgagtcccacctcgtcgaccttcccggggttcgagtcccacctcgtcgacctccccgatcccgccgagatgtcgacgcacgcggacgaacgggagtggctccgcggagccgaggtgcaacccctccaaaccggcgttcaaggacggcgccgctcaccagttgtatctgccttgagcgatccaggagagggcttggcgatgggtctgttgggatgctccagtctctcactgtctactactacttgtaccaaatatctactggactctggatgggcatcgaattttatgctataaacaccgattcccaagcccttattaattcacaagcgcaatatcctctgcaaattggagagcagttgacccacgacttaggtaccggtggaaatccaaatttgggagagcaggctgctgaggaatcaagagaaaccatagccactgccctgagggattcagatcttgttttcataacagctgggatgggagggggtgctgctccaattgttgcccagatatcaaaggaagctggttatcttactgttggtgttgtcacctatccattcaatttcgagggccgtaagcgctctttacaggcaagtatctgagccccccttcactcctgaattagaattcaaactgtcatatctcgttttgcgactttcttttgctccatggaagcattagtttgtagtcataacaatgacatccaaccacatttattgttgatcatgtatacaatggtcggtcaaataaaggtagcatattgcgagggcggtcctcgtcgctcccatgtgcaggatctcccatgtgacagatggcttggcaagattatactagagacttgtatttctcagatccatatttggcttaggtatgattcttgtgtcaatgctacatatatttttcctaattattgtaggtacttccatttagccttgcgacaataaatattttgtgcgaaacacatcatctcttcacggttcaatacgatcatcggctatatatcctggctgatcatcgtcaagagcattagtagttgctactgatatatataggtcagctctttgctcttttcacatctatatcaattgcttgccccacaaatgatcagccagggtcaggtaaaccatattgtgtaaccatcactataacactgcaatcattttctaaatagtacttttataaatcacaaatcgaaggtataaatacaaaagtgtagaaaattataatgagaacattacctatataaacaagaaaggaaaaccaatgatgttttccttgttgaagttatttgtggcttttacaatgtcagagaacgtgagcttgttttcatttacttttccttgtggcaccatgatcactccaaatgcaattgcaagaatggccttcttatttcttcctcctgtggataccagaggcacatcggctgaatcgcatcgacgaccgatcataaagccgcacagctttggattccctagaaagctggagttctgaaatgtaccaaattgaccaccggttggaataggcccctctaggtcattgttagaaacgttgaatgtggaaaggaagtgcagattctcgaatgcaactggaattttacccgtgagatcattgctggataaatctagcatccagcaggtttgtgagattgcagatagatgtggggatcggtccggttaagctgttggagctgatatcaagtgaaaggaggccttttaactgaccaatctctgggagaatcagaactgtgaatatgttgctgcttagatttagaattttaggaaaagcaatcggtatccggtacggtttcttcaaagaaattgatgccaagaagaagcgtggtcaggttcttagagctcctcagtatctgaagcgtgtttgttatatttgaaaggctgttgtttgggcaaggcgaatcaggcaagagttgatgacgagcggctaaactaatccaagagttgatgacgaccggcttgttctttcacttgcaacgacttagagtcgggcgacctgcaagatcaaggtgcatggtcgtcgaaggatggcgacggcgtatcctcgttcaggcaaggcgaatcaggaggtcttgaagatctggaactgcaggtgcagaatgctattgcagcagttgcagctccacccaaggaaagcaatagtgtcagcagcaacgatcctggtagctcgtcctctgtgatttttccgtctggtccagctgatcaagtccctgttcctgctacctctccagaaattgagccccgttttgcaaaccaaatccctgctgcttcttcggaggttaaggcaccatgcatggcaggtctgttgtttgtaagcgacaggaacgagaggaactttaggttgcctagcccttctgataattgtccatggaacttattcgaatctagccgtagcgcagtcagctttctacaggagtatatgctttccggaatcgtgccactgaagttattcagcatgagatctatggttcttagactgggcatattgctgaataactatagttggtagatggtctcgctacagtagacaggaaaggcaccatgcctggcactggcaggtctgcagcgaacaccgttgtatgtgtatgtatagtatgcacgtgtgcaattcatattagcttaacagcctgtgtaacaaaaacaattacccaacttcccaagatagttaatgcactatatatccaaaacctgatacatgcatcaatttgtcttaaaaagtacattcataaaaatataaatgtataaagagttcatttgtattttaacaaaagtctttggtcaaagccatattctggagaccgtgtcagtgtcctagaccacaaataacattggagggagtaaattatatctcatgtctatcaacgaagttttactttttaggttctattaatgtctaattcttgtaacccctcttttttggtatctcaattgttgcagttaggaaaccttccattacggccttatttctgcagaagtatgacaccaactttcatctattctctaccaccaaagagatggaaaagcaggtcaaagggccatacttcatagctttttgctcctcattgttttaagtgaaagggcgccaactattcaaaatttactctaggtagataattttcattgtcgagttttattttggtatatgtaactttttgtaattgggcctaagcgtattggagcactctaagttaacaggtgcttgaagctgatgatgaaattatacagcttggatgaataaacctttgttgtagtgacataaggagtttcgaaattacaaggaattttaaatttgaatatttttcagtgagatgttgaggttgataattttaatctttgtgcactaatattttgtagaaagtagtttgttcaccgttgcaacgcacgggcatgtacctagtcaagcattaagcacgcgatgaacaacgtccttcccgttatcgcccaacaactagaattccacttctatcatcgaccccataacatcacacaacataacaccataacaacggatctagccataattaccaagcgcacacctcgcatcactggtatttctaacttaatcgtatacgcatacgaagcgtcttattttacgatcataaaaccgatagtaaaaatagcgaatcggctcaccacatcacaattcgatttggtagttgcctgaacaacgacggccttcagctgaagtccttgatcgaacatctggcgagcgtgaccgacgagctaagtctgaggcgaagctcgacgacgagatcgaacaggggatgatgagcgtgagggtttcacaacgaggatgagtgacatcgtggaatcttggtccaacatttaatcgaacacaacggaagcgaggcacagcaggaatggcagtattaagcatgggcacgataagggacgcgctgctgcacgacgcgatgatgaacgacgacaacctatgacggccaaaacggaagacttggtcgaggcggggtccaagcatccagagtttttttttgccgaggctgaacagagaaggatgcacaaatcctaggcacgatggtggccatagccaagcagtgggacgcgactgcgcgcagagaactcggcatggcgagggacgacggaacgctgcgtgcgcgtccagggagcaaggcgcggtcgagaacggacagagggagccgggagaaagaactgcggcgctgcgagcagagcgcaggggagttcgtggctgcgcgcagatgggcgagctggagcgccgcgacgagcgcaggggcgcggcacaagcgagggcgagctgccgcagggagaaagaagctggggaaagggccgcagcgctgggggctcgacgtgccgtgaccagcagagagatgcggcgctgcgcagaggagggagaggaaggagagagagcagccatgggaaagggaggagaactgggcgcgacgcaggcagccaagggagcttcaaggccgagcgccaggaagaatgagcagggcgccgcgacactgggacagggcaccggcgagcagcaagcagagagagaaggcgcggcggtcaggacgaacgtcagggagcttcggctggccatggaaccgagcagtgatgcgccatgggggagaaaccagcgcgcagcagagaagctcggcgaggaagatggggcaggaactcggcgccggcgaggggagcagggtgatgaacgccgaggaagctga

SEQ ID NO: 44047 - DNA, 5097 bp, Zea Mays
cgccatcaacgcccggatccccaccctccttcccaccgccgccgcaatcaacgcgctcctcccccacgtggatccctccaccctcctccccaccgccgccgctcgaccgcggtttcgtcgcactccttccttcgaaagcgctcctttccatcctcgattcctccttccttccatgtcgctccttccttcgacggccagcctcatccggtcattcctcctcgctgtgccccctcccccgtattcaaccacctcttcctcctgcggatccaccaccgccgtcctcgcccaacgtctccttgacgcatatgcccgcagcggctccctcgcgtccccaatgttgagtctggcctgtatggaaggagtgcgggcgtgggtggagtgtgtagagaaatccaagcgaaaccccgtgagagcgaggtgacggcagacggaggcgagtgggtgagctgcgggcgagagacgaggtagcgggctagcggatggcgtcgctggttgtagtggccgcagcgctgctggtggcggcgctggtggcattctgcggcacggacccgctctggacggggttcgagtcccacctcgtcgaccttcccggggttcgagtcccacctcgtcgacctccccgatcccgccgagatgtcgacgcacgcggacgaacgggagtggctccgcggagccgaggtgcaacccctccaaaccggcgttcaaggacggcgccgctcaccagttgtatctggttgtgaagaactaggggtgggagcgcctgtatggcgggcttatgccttctctcatcggcaccgctgcctcccaggagagggcttggcgatgggtctgttgggatgctccagtctctcactgtctactactacttgtaccaaatatctactggactctggatgggcatcgaattttatgctataaacaccgattcccaagcccttattaattcacaagcgcaatatcctctgcaaattggagagcagttgacccacgacttaggtaccggtggaaatccaaatttgggagagcaggctgctgaggaatcaagagaaaccatagccactgccctgagggattcagatcttgttttcataacagctgggatgggagggggtgctgctccaattgttgcccagatatcaaaggaagctggttatcttactgttggtgttgtcacctatccattcaatttcgagggccgtaagcgctctttacaggcaagtatctgagccccccttcactcctgaattagaattcaaactgtcatatctcgttttgcgactttcttttgctccatggaagcattagtttgtagtcataacaatgacatccaaccacatttattgttgatcatgtatacaatggtcggtcaaataaaggtagcatattgcgagggcggtcctcgtcgctcccatgtgcaggatctcccatgtgacagatggcttggcaagattatactagagacttgtatttctcagatccatatttggcttaggtatgattcttgtgtcaatgctacatatatttttcctaattattgtaggtacttccatttagccttgcgacaataaatattttgtgcgaaacacatcatctcttcacggttcaatacgatcatcggctatatatcctggctgatcatcgtcaagagcattagtagttgctactgatatatataggtcagctctttgctcttttcacatctatatcaattgcttgccccacaaatgatcagccagggtcaggtaaaccatattgtgtaaccatcactataacactgcaatcattttctaaatagtacttttataaatcacaaatcgaaggtataaatacaaaagtgtagaaaattataatgagaacattacctatataaacaagaaaggaaaaccaatgatgttttccttgttgaagttatttgtggcttttacaatgtcagagaacgtgagcttgttttcatttacttttccttgtggcaccatgatcactccaaatgcaattgcaagaatggccttcttatttcttcctcctgtggataccagaggcacatcggctgaatcgcatcgacgaccgatcataaagccgcacagctttggattccctagaaagctggagttctgaaatgtaccaaattgaccaccggttggaataggcccctctaggtcattgttagaaacgttgaatgtggaaaggaagtgcagattctcgaatgcaactggaattttacccgtgagatcattgctggataaatctagcatccagcaggtttgtgagattgcagatagatgtggggatcggtccggttaagctgttggagctgatatcaagtgaaaggaggccttttaactgaccaatctctgggagaatcagaactgtgaatatgttgctgcttagatttagaattttaggaaaagcaatcggtatccggtacggtttcttcaaagaaattgatgccaagaagaagcgtggtcaggttcttagagctcctcagtatctgaagcgtgtttgttatatttgaaaggctgttgtttgggcaaggcgaatcaggcaagagttgatgacgagcggctaaactaatccaagagttgatgacgaccggcttgttctttcacttgcaacgacttagagtcgggcgacctgcaagatcaaggtgcatggtcgtcgaaggatggcgacggcgtatcctcgttcaggcaaggcgaatcaggcaagcatctatttggaggttggttagttatcccatgtcatcagacatcacgcaggaatcaagtcatccatcaggaagcagccaactctgcctggactaacccagggcaaaggcaaacagcaaactttccaggataagtctctgacttcgttatactttcctgtgtgcaggaggtcttgaagatctggaactgcaggtgcagaatgctattgcagcagttgcagctccacccaaggaaagcaatagtgtcagcagcaacgatcctggtagctcgtcctctgtgatttttccgtctggtccagctgatcaagtccctgttcctgctacctctccagaaattgagccccgttttgcaaaccaaatccctgctgcttcttcggaggttaaggcaccatgcatggcagttaggaaaccttccattacggccttatttctgcagaagtatgacaccaactttcatctattctctaccaccaaagagatggaaaagcaggttgcccccacccccatagctttctgttttgtccctataacaggtttacctatgttatatatagacaccgtagcaatgcacgtgtaatggtagattttctgattggttagtttggaagtgaagtaggtgccaatgttgtgcatgagcagaagaaatattattcccttcaatattagtagaggtagagatatttacttttatcagtatttgtgttgtgatagctatttttagcctaatgtttcaggtcaaagggccatacttcatagctttttgctcctcattgttttaagtgaaagggcgccaactattcaaaatttactctaggtagataattttcattgtcgagttttattttggtatatgtaactttttgtaattgggcctaagcgtattggagcactctaagttaacaggtgcttgaagctgatgatgaaattatacagcttggatgaataaacctttgttgtagtgacataaggagtttcgaaattacaaggaattttaaatttgaatatttttcagtgagatgttgaggttgataattttaatctttgtgcactaatattttgtagaaagtagtttgttcaccgttgcaacgcacgggcatgtacctagtcaagcattaagcacgcgatgaacaacgtccttcccgttatcgcccaacaactagaattccacttctatcatcgaccccataacatcacacaacataacaccataacaacggatctagccataattaccaagcgcacacctcgcatcactggtatttctaacttaatcgtatacgcatacgaagcgtcttattttacgatcataaaaccgatagtaaaaatagcgaatcggctcaccacatcacaattcgatttggtagttgcctgaacaacgacggccttcagctgaagtccttgatcgaacatctggcgagcgtgaccgacgagctaagtctgaggcgaagctcgacgacgagatcgaacaggggatgatgagcgtgagggtttcacaacgaggatgagtgacatcgtggaatcttggtccaacatttaatcgaacacaacggaagcgaggcacagcaggaatggcagtattaagcatgggcacgataagggacgcgctgctgcacgacgcgatgatgaacgacgacaacctatgacggccaaaacggaagacttggtcgaggcggggtccaagcatccagagtttttttttgccgaggctgaacagagaaggatgcacaaatcctaggcacgatggtggccatagccaagcagtgggacgcgactgcgcgcagagaactcggcatggcgagggacgacggaacgctgcgtgcgcgtccagggagcaaggcgcggtcgagaacggacagagggagccgggagaaagaactgcggcgctgcgagcagagcgcaggggagttcgtggctgcgcgcagatgggcgagctggagcgccgcgacgagcgcaggggcgcggcacaagcgagggcgagctgccgcagggagaaagaagctggggaaagggccgcagcgctgggggctcgacgtgccgtgaccagcagagagatgcggcgctgcgcagaggagggagaggaaggagagagagcagccatgggaaagggaggagaactgggcgcgacgcaggcagccaagggagcttcaaggccgagcgccaggaagaatgagcagggcgccgcgacactgggacagggcaccggcgagcagcaagcagagagagaaggcgcggcggtcaggacgaacgtcagggagcttcggctggccatggaaccgagcagtgatgcgccatgggggagaaaccagcgcgcagcagagaagctcggcgaggaagatggggcaggaactcggcgccggcgaggggagcagggtgatgaacgccgaggaagctga

SEQ ID NO: 44048 - DNA, 5286 bp, Zea Mays
cgccatcaacgcccggatccccaccctccttcccaccgccgccgcaatcaacgcgctcctcccccacgtggatccctccaccctcctccccaccgccgccgctcgaccgcggtttcgtcgcactccttccttcgaaagcgctcctttccatcctcgattcctccttccttccatgtcgctccttccttcgacggccagcctcatccggtcattcctcctcgctgtgccccctcccccgtattcaaccacctcttcctcctgcggatccaccaccgccgtcctcgcccaacgtctccttgacgcatatgcccgcagcggctccctcgcgtccccaatgttgagtctggcctgtatggaaggagtgcgggcgtgggtggagtgtgtagagaaatccaagcgaaaccccgtgagagcgaggtgacggcagacggaggcgagtgggtgagctgcgggcgagagacgaggtagcgggctagcggatggcgtcgctggttgtagtggccgcagcgctgctggtggcggcgctggtggcattctgcggcacggacccgctctggacggggttcgagtcccacctcgtcgaccttcccggggttcgagtcccacctcgtcgacctccccgatcccgccgagatgtcgacgcacgcggacgaacgggagtggctccgcggagccgaggtgcaacccctccaaaccggcgttcaaggacggcgccgctcaccagttgtatctggttgtgaagaactaggggtgggagcgcctgtatggcgggcttatgccttctctcatcggcaccgctgcctcccaggagagggcttggcgatgggtctgttgggatgctccagtctctcactgtctactactacttgtaccaaatatctactggactctggatgggcatcgaattttatgctataaacaccgattcccaagcccttattaattcacaagcgcaatatcctctgcaaattggagagcagttgacccacgacttaggtaccggtggaaatccaaatttgggagagcaggctgctgaggaatcaagagaaaccatagccactgccctgagggattcagatcttgttttcataacagctgggatgggagggggtgctgctccaattgttgcccagatatcaaaggaagctggttatcttactgttggtgttgtcacctatccattcaatttcgagggccgtaagcgctctttacaggatctcccatgtgacagatggcttggcaagattatactagagacttgtatttctcagatccatatttggcttaggtatgattcttgtgtcaatgctacatatatttttcctaattattgtaggtacttccatttagccttgcgacaataaatattttgtgcgaaacacatcatctcttcacggttcaatacgatcatcggctatatatcctggctgatcatcgtcaagagcattagtagttgctactgatatatataggtcagctctttgctcttttcacatctatatcaattgcttgccccacaaatgatcagccagggtcaggtaaaccatattgtgtaaccatcactataacactgcaatcattttctaaatagtacttttataaatcacaaatcgaaggtataaatacaaaagtgtagaaaattataatgagaacattacctatataaacaagaaaggaaaaccaatgatgttttccttgttgaagttatttgtggcttttacaatgtcagagaacgtgagcttgttttcatttacttttccttgtggcaccatgatcactccaaatgcaattgcaagaatggccttcttatttcttcctcctgtggataccagaggcacatcggctgaatcgcatcgacgaccgatcataaagccgcacagctttggattccctagaaagctggagttctgaaatgtaccaaattgaccaccggttggaataggcccctctaggtcattgttagaaacgttgaatgtggaaaggaagtgcagattctcgaatgcaactggaattttacccgtgagatcattgctggataaatctagcatccagcaggtttgtgagattgcagatagatgtggggatcggtccggttaagctgttggagctgatatcaagtgaaaggaggccttttaactgaccaatctctgggagaatcagaactgtgaatatgttgctgcttagatttagaattttaggaaaagcaatcggtatccggtacggtttcttcaaagaaattgatgccaagaagaagcgtggtcaggttcttagagctcctcagtatctgaagcgtgtttgttatatttgaaaggctgttgtttgggcaaggcgaatcaggcaagagttgatgacgagcggctaaactaatccaagagttgatgacgaccggcttgttctttcacttgcaacgacttagagtcgggcgacctgcaagatcaaggtgcatggtcgtcgaaggatggcgacggcgtatcctcgttcaggcaaggcgaatcaggcaagcatctatttggaggttggttagttatcccatgtcatcagacatcacgcaggaatcaagtcatccatcaggaagcagccaactctgcctggactaacccagggcaaaggcaaacagcaaactttccaggataagtctctgacttcgttatactttcctgtgtgcaggaggtcttgaagatctggaactgcaggtgcagaatgctattgcagcagttgcagctccacccaaggaaagcaatagtgtcagcagcaacgatcctggtagctcgtcctctgtgatttttccgtctggtccagctgatcaagtccctgttcctgctacctctccagaaattgagccccgttttgcaaaccaaatccctgctgcttcttcggaggttaaggcaccatgcatggcaggtctgttgtttgtaagcgacaggaacgagaggaactttaggttgcctagcccttctgataattgtccatggaacttattcgaatctagccgtagcgcagtcagctttctacaggagtatatgctttccggaatcgtgccactgaagttattcagcatgagatctatggttcttagactgggcatattgctgaataactatagttggtagatggtctcgctacagtagacaggaaaggcaccatgcctggcactggcaggtctgcagcgaacaccgttgtatgtgtatgtatagtatgcacgtgtgcaattcatattagcttaacagcctgtgtaacaaaaacaattacccaacttcccaagatagttaatgcactatatatccaaaacctgatacatgcatcaatttgtcttaaaaagtacattcataaaaatataaatgtataaagagttcatttgtattttaacaaaagtctttggtcaaagccatattctggagaccgtgtcagtgtcctagaccacaaataacattggagggagtaaattatatctcatgtctatcaacgaagttttactttttaggttctattaatgtctaattcttgtaacccctcttttttggtatctcaattgttgcagttaggaaaccttccattacggccttatttctgcagaagtatgacaccaactttcatctattctctaccaccaaagagatggaaaagcaggtcaaagggccatacttcatagctttttgctcctcattgttttaagtgaaagggcgccaactattcaaaatttactctaggtagataattttcattgtcgagttttattttggtatatgtaactttttgtaattgggcctaagcgtattggagcactctaagttaacaggtgcttgaagctgatgatgaaattatacagcttggatgaataaacctttgttgtagtgacataaggagtttcgaaattacaaggaattttaaatttgaatatttttcagtgagatgttgaggttgataattttaatctttgtgcactaatattttgtagaaagtagtttgttcaccgttgcaacgcacgggcatgtacctagtcaagcattaagcacgcgatgaacaacgtccttcccgttatcgcccaacaactagaattccacttctatcatcgaccccataacatcacacaacataacaccataacaacggatctagccataattaccaagcgcacacctcgcatcactggtatttctaacttaatcgtatacgcatacgaagcgtcttattttacgatcataaaaccgatagtaaaaatagcgaatcggctcaccacatcacaattcgatttggtagttgcctgaacaacgacggccttcagctgaagtccttgatcgaacatctggcgagcgtgaccgacgagctaagtctgaggcgaagctcgacgacgagatcgaacaggggatgatgagcgtgagggtttcacaacgaggatgagtgacatcgtggaatcttggtccaacatttaatcgaacacaacggaagcgaggcacagcaggaatggcagtattaagcatgggcacgataagggacgcgctgctgcacgacgcgatgatgaacgacgacaacctatgacggccaaaacggaagacttggtcgaggcggggtccaagcatccagagtttttttttgccgaggctgaacagagaaggatgcacaaatcctaggcacgatggtggccatagccaagcagtgggacgcgactgcgcgcagagaactcggcatggcgagggacgacggaacgctgcgtgcgcgtccagggagcaaggcgcggtcgagaacggacagagggagccgggagaaagaactgcggcgctgcgagcagagcgcaggggagttcgtggctgcgcgcagatgggcgagctggagcgccgcgacgagcgcaggggcgcggcacaagcgagggcgagctgccgcagggagaaagaagctggggaaagggccgcagcgctgggggctcgacgtgccgtgaccagcagagagatgcggcgctgcgcagaggagggagaggaaggagagagagcagccatgggaaagggaggagaactgggcgcgacgcaggcagccaagggagcttcaaggccgagcgccaggaagaatgagcagggcgccgcgacactgggacagggcaccggcgagcagcaagcagagagagaaggcgcggcggtcaggacgaacgtcagggagcttcggctggccatggaaccgagcagtgatgcgccatgggggagaaaccagcgcgcagcagagaagctcggcgaggaagatggggcaggaactcggcgccggcgaggggagcagggtgatgaacgccgaggaagctga

SEQ ID NO: 44049 - DNA, 3337 bp, Zea Mays
cgccatcaacgcccggatccccaccctccttcccaccgccgccgcaatcaacgcgctcctcccccacgtggatccctccaccctcctccccaccgccgccgctcgaccgcggtttcgtcgcactccttccttcgaaagcgctcctttccatcctcgattcctccttccttccatgtcgctccttccttcgacggccagcctcatccggtcattcctcctcgctgtgccccctcccccgtattcaaccacctcttcctcctgcggatccaccaccgccgtcctcgcccaacgtctccttgacgcatatgcccgcagcggctccctcgcgtccccaatgttgagtctggcctgtatggaaggagtgcgggcgtgggtggagtgtgtagagaaatccaagcgaaaccccgtgagagcgaggtgacggcagacggaggcgagtgggtgagctgcgggcgagagacgaggtagcgggctagcggatggcgtcgctggttgtagtggccgcagcgctgctggtggcggcgctggtggcattctgcggcacggacccgctctggacggggttcgagtcccacctcgtcgaccttcccggggttcgagtcccacctcgtcgacctccccgatcccgccgagatgtcgacgcacgcggacgaacgggagtggctccgcggagccgaggtgcaacccctccaaaccggcgttcaaggacggcgccgctcaccagttgtatctggttgtgaagaactaggggtgggagcgcctgtatggcgggcttatgccttctctcatcggcaccgctgcctcccagccttgagcgatccaggagagggcttggcgatgggtctgttgggatgctccagtctctcactgtctactactacttgtaccaaatatctactggactctggatgggcatcgaattttatgctataaacaccgattcccaagcccttattaattcacaagcgcaatatcctctgcaaattggagagcagttgacccacgacttaggtaccggtggaaatccaaatttgggagagcaggctgctgaggaatcaagagaaaccatagccactgccctgagggattcagatcttgttttcataacagctgggatgggagggggtgctgctccaattgttgcccagatatcaaaggaagctggttatcttactgttggtgttgtcacctatccattcaatttcgagggccgtaagcgctctttacaggtagcatattgcgagggcggtcctcgtcgctcccatgtgcaggatctcccatgtgacagatggcttggcaagattatactagagacttgtatttctcagatccatatttggcttagttaggaaaccttccattacggccttatttctgcagaagtatgacaccaactttcatctattctctaccaccaaagagatggaaaagcaggttgcccccacccccatagctttctgttttgtccctataacaggtttacctatgttatatatagacaccgtagcaatgcacgtgtaatggtagattttctgattggttagtttggaagtgaagtaggtgccaatgttgtgcatgagcagaagaaatattattcccttcaatattagtagaggtagagatatttacttttatcagtatttgtgttgtgatagctatttttagcctaatgtttcaggtcaaagggccatacttcatagctttttgctcctcattgttttaagtgaaagggcgccaactattcaaaatttactctaggtagataattttcattgtcgagttttattttggtatatgtaactttttgtaattgggcctaagcgtattggagcactctaagttaacaggtgcttgaagctgatgatgaaattatacagcttggatgaataaacctttgttgtagtgacataaggagtttcgaaattacaaggaattttaaatttgaatatttttcagtgagatgttgaggttgataattttaatctttgtgcactaatattttgtagaaagtagtttgttcaccgttgcaacgcacgggcatgtacctagtcaagcattaagcacgcgatgaacaacgtccttcccgttatcgcccaacaactagaattccacttctatcatcgaccccataacatcacacaacataacaccataacaacggatctagccataattaccaagcgcacacctcgcatcactggtatttctaacttaatcgtatacgcatacgaagcgtcttattttacgatcataaaaccgatagtaaaaatagcgaatcggctcaccacatcacaattcgatttggtagttgcctgaacaacgacggccttcagctgaagtccttgatcgaacatctggcgagcgtgaccgacgagctaagtctgaggcgaagctcgacgacgagatcgaacaggggatgatgagcgtgagggtttcacaacgaggatgagtgacatcgtggaatcttggtccaacatttaatcgaacacaacggaagcgaggcacagcaggaatggcagtattaagcatgggcacgataagggacgcgctgctgcacgacgcgatgatgaacgacgacaacctatgacggccaaaacggaagacttggtcgaggcggggtccaagcatccagagtttttttttgccgaggctgaacagagaaggatgcacaaatcctaggcacgatggtggccatagccaagcagtgggacgcgactgcgcgcagagaactcggcatggcgagggacgacggaacgctgcgtgcgcgtccagggagcaaggcgcggtcgagaacggacagagggagccgggagaaagaactgcggcgctgcgagcagagcgcaggggagttcgtggctgcgcgcagatgggcgagctggagcgccgcgacgagcgcaggggcgcggcacaagcgagggcgagctgccgcagggagaaagaagctggggaaagggccgcagcgctgggggctcgacgtgccgtgaccagcagagagatgcggcgctgcgcagaggagggagaggaaggagagagagcagccatgggaaagggaggagaactgggcgcgacgcaggcagccaagggagcttcaaggccgagcgccaggaagaatgagcagggcgccgcgacactgggacagggcaccggcgagcagcaagcagagagagaaggcgcggcggtcaggacgaacgtcagggagcttcggctggccatggaaccgagcagtgatgcgccatgggggagaaaccagcgcgcagcagagaagctcggcgaggaagatggggcaggaactcggcgccggcgaggggagcagggtgatgaacgccgaggaagctga

SEQ ID NO: 44050 - DNA, 5020 bp, Zea Mays
cgccatcaacgcccggatccccaccctccttcccaccgccgccgcaatcaacgcgctcctcccccacgtggatccctccaccctcctccccaccgccgccgctcgaccgcggtttcgtcgcactccttccttcgaaagcgctcctttccatcctcgattcctccttccttccatgtcgctccttccttcgacggccagcctcatccggtcattcctcctcgctgtgccccctcccccgtattcaaccacctcttcctcctgcggatccaccaccgccgtcctcgcccaacgtctccttgacgcatatgcccgcagcggctccctcgcgtccccaatgttgagtctggcctgtatggaaggagtgcgggcgtgggtggagtgtgtagagaaatccaagcgaaaccccgtgagagcgaggtgacggcagacggaggcgagtgggtgagctgcgggcgagagacgaggtagcgggctagcggatggcgtcgctggttgtagtggccgcagcgctgctggtggcggcgctggtggcattctgcggcacggacccgctctggacggggttcgagtcccacctcgtcgaccttcccggggttcgagtcccacctcgtcgacctccccgatcccgccgagatgtcgacgcacgcggacgaacgggagtggctccgcggagccgaggtgcaacccctccaaaccggcgttcaaggacggcgccgctcaccagttgtatctggttgtgaagaactaggggtgggagcgcctgtatggcgggcttatgccttctctcatcggcaccgctgcctcccaggagagggcttggcgatgggtctgttgggatgctccagtctctcactgtctactactacttgtaccaaatatctactggactctggatgggcatcgaattttatgctataaacaccgattcccaagcccttattaattcacaagcgcaatatcctctgcaaattggagagcagttgacccacgacttaggtaccggtggaaatccaaatttgggagagcaggctgctgaggaatcaagagaaaccatagccactgccctgagggattcagatcttgttttcataacagctgggatgggagggggtgctgctccaattgttgcccagatatcaaaggaagctggttatcttactgttggtgttgtcacctatccattcaatttcgagggccgtaagcgctctttacaggcaagtatctgagccccccttcactcctgaattagaattcaaactgtcatatctcgttttgcgactttcttttgctccatggaagcattagtttgtagtcataacaatgacatccaaccacatttattgttgatcatgtatacaatggtcggtcaaataaaggtagcatattgcgagggcggtcctcgtcgctcccatgtgcaggatctcccatgtgacagatggcttggcaagattatactagagacttgtatttctcagatccatatttggcttagaggcacatcggctgaatcgcatcgacgaccgatcataaagccgcacagctttggattccctagaaagctggagttctgaaatgtaccaaattgaccaccggttggaataggcccctctaggtcattgttagaaacgttgaatgtggaaaggaagtgcagattctcgaatgcaactggaattttacccgtgagatcattgctggataaatctagcatccagcaggtttgtgagattgcagatagatgtggggatcggtccggttaagctgttggagctgatatcaagtgaaaggaggccttttaactgaccaatctctgggagaatcagaactgtgaatatgttgctgcttagatttagaattttaggaaaagcaatcggtatccggtacggtttcttcaaagaaattgatgccaagaagaagcgtggtcaggttcttagagctcctcagtatctgaagcgtgtttgttatatttgaaaggctgttgtttgggcaaggcgaatcaggcaagagttgatgacgagcggctaaactaatccaagagttgatgacgaccggcttgttctttcacttgcaacgacttagagtcgggcgacctgcaagatcaaggtgcatggtcgtcgaaggatggcgacggcgtatcctcgttcaggcaaggcgaatcaggaggtcttgaagatctggaactgcaggtgcagaatgctattgcagcagttgcagctccacccaaggaaagcaatagtgtcagcagcaacgatcctggtagctcgtcctctgtgatttttccgtctggtccagctgatcaagtccctgttcctgctacctctccagaaattgagccccgttttgcaaaccaaatccctgctgcttcttcggaggttaaggcaccatgcatggcaggtctgttgtttgtaagcgacaggaacgagaggaactttaggttgcctagcccttctgataattgtccatggaacttattcgaatctagccgtagcgcagtcagctttctacaggagtatatgctttccggaatcgtgccactgaagttattcagcatgagatctatggttcttagactgggcatattgctgaataactatagttggtagatggtctcgctacagtagacaggaaaggcaccatgcctggcactggcaggtctgcagcgaacaccgttgtatgtgtatgtatagtatgcacgtgtgcaattcatattagcttaacagcctgtgtaacaaaaacaattacccaacttcccaagatagttaatgcactatatatccaaaacctgatacatgcatcaatttgtcttaaaaagtacattcataaaaatataaatgtataaagagttcatttgtattttaacaaaagtctttggtcaaagccatattctggagaccgtgtcagtgtcctagaccacaaataacattggagggagtaaattatatctcatgtctatcaacgaagttttactttttaggttctattaatgtctaattcttgtaacccctcttttttggtatctcaattgttgcagttaggaaaccttccattacggccttatttctgcagaagtatgacaccaactttcatctattctctaccaccaaagagatggaaaagcaggttgcccccacccccatagctttctgttttgtccctataacaggtttacctatgttatatatagacaccgtagcaatgcacgtgtaatggtagattttctgattggttagtttggaagtgaagtaggtgccaatgttgtgcatgagcagaagaaatattattcccttcaatattagtagaggtagagatatttacttttatcagtatttgtgttgtgatagctatttttagcctaatgtttcaggtcaaagggccatacttcatagctttttgctcctcattgttttaagtgaaagggcgccaactattcaaaatttactctaggtagataattttcattgtcgagttttattttggtatatgtaactttttgtaattgggcctaagcgtattggagcactctaagttaacaggtgcttgaagctgatgatgaaattatacagcttggatgaataaacctttgttgtagtgacataaggagtttcgaaattacaaggaattttaaatttgaatatttttcagtgagatgttgaggttgataattttaatctttgtgcactaatattttgtagaaagtagtttgttcaccgttgcaacgcacgggcatgtacctagtcaagcattaagcacgcgatgaacaacgtccttcccgttatcgcccaacaactagaattccacttctatcatcgaccccataacatcacacaacataacaccataacaacggatctagccataattaccaagcgcacacctcgcatcactggtatttctaacttaatcgtatacgcatacgaagcgtcttattttacgatcataaaaccgatagtaaaaatagcgaatcggctcaccacatcacaattcgatttggtagttgcctgaacaacgacggccttcagctgaagtccttgatcgaacatctggcgagcgtgaccgacgagctaagtctgaggcgaagctcgacgacgagatcgaacaggggatgatgagcgtgagggtttcacaacgaggatgagtgacatcgtggaatcttggtccaacatttaatcgaacacaacggaagcgaggcacagcaggaatggcagtattaagcatgggcacgataagggacgcgctgctgcacgacgcgatgatgaacgacgacaacctatgacggccaaaacggaagacttggtcgaggcggggtccaagcatccagagtttttttttgccgaggctgaacagagaaggatgcacaaatcctaggcacgatggtggccatagccaagcagtgggacgcgactgcgcgcagagaactcggcatggcgagggacgacggaacgctgcgtgcgcgtccagggagcaaggcgcggtcgagaacggacagagggagccgggagaaagaactgcggcgctgcgagcagagcgcaggggagttcgtggctgcgcgcagatgggcgagctggagcgccgcgacgagcgcaggggcgcggcacaagcgagggcgagctgccgcagggagaaagaagctggggaaagggccgcagcgctgggggctcgacgtgccgtgaccagcagagagatgcggcgctgcgcagaggagggagaggaaggagagagagcagccatgggaaagggaggagaactgggcgcgacgcaggcagccaagggagcttcaaggccgagcgccaggaagaatgagcagggcgccgcgacactgggacagggcaccggcgagcagcaagcagagagagaaggcgcggcggtcaggacgaacgtcagggagcttcggctggccatggaaccgagcagtgatgcgccatgggggagaaaccagcgcgcagcagagaagctcggcgaggaagatggggcaggaactcggcgccggcgaggggagcagggtgatgaacgccgaggaagctga

SEQ ID NO: 44051 - DNA, 4681 bp, Zea Mays
cgccatcaacgcccggatccccaccctccttcccaccgccgccgcaatcaacgcgctcctcccccacgtggatccctccaccctcctccccaccgccgccgctcgaccgcggtttcgtcgcactccttccttcgaaagcgctcctttccatcctcgattcctccttccttccatgtcgctccttccttcgacggccagcctcatccggtcattcctcctcgctgtgccccctcccccgtattcaaccacctcttcctcctgcggatccaccaccgccgtcctcgcccaacgtctccttgacgcatatgcccgcagcggctccctcgcgtccccaatgttgagtctggcctgtatggaaggagtgcgggcgtgggtggagtgtgtagagaaatccaagcgaaaccccgtgagagcgaggtgacggcagacggaggcgagtgggtgagctgcgggcgagagacgaggtagcgggctagcggatggcgtcgctggttgtagtggccgcagcgctgctggtggcggcgctggtggcattctgcggcacggacccgctctggacggggttcgagtcccacctcgtcgaccttcccggggttcgagtcccacctcgtcgacctccccgatcccgccgagatgtcgacgcacgcggacgaacgggagtggctccgcggagccgaggtgcaacccctccaaaccggcgttcaaggacggcgccgctcaccagttgtatctggttgtgaagaactaggggtgggagcgcctgtatggcgggcttatgccttctctcatcggcaccgctgcctcccaggagagggcttggcgatgggtctgttgggatgctccagtctctcactgtctactactacttgtaccaaatatctactggactctggatgggcatcgaattttatgctataaacaccgattcccaagcccttattaattcacaagcgcaatatcctctgcaaattggagagcagttgacccacgacttaggtaccggtggaaatccaaatttgggagagcaggctgctgaggaatcaagagaaaccatagccactgccctgagggattcagatcttgttttcataacagctgggatgggagggggtgctgctccaattgttgcccagatatcaaaggaagctggttatcttactgttggtgttgtcacctatccattcaatttcgagggccgtaagcgctctttacagaggcacatcggctgaatcgcatcgacgaccgatcataaagccgcacagctttggattccctagaaagctggagttctgaaatgtaccaaattgaccaccggttggaataggcccctctaggtcattgttagaaacgttgaatgtggaaaggaagtgcagattctcgaatgcaactggaattttacccgtgagatcattgctggataaatctagcatccagcaggtttgtgagattgcagatagatgtggggatcggtccggttaagctgttggagctgatatcaagtgaaaggaggccttttaactgaccaatctctgggagaatcagaactgtgaatatgttgctgcttagatttagaattttaggaaaagcaatcggtatccggtacggtttcttcaaagaaattgatgccaagaagaagcgtggtcaggttcttagagctcctcagtatctgaagcgtgtttgttatatttgaaaggctgttgtttgggcaaggcgaatcaggcaagagttgatgacgagcggctaaactaatccaagagttgatgacgaccggcttgttctttcacttgcaacgacttagagtcgggcgacctgcaagatcaaggtgcatggtcgtcgaaggatggcgacggcgtatcctcgttcaggcaaggcgaatcaggcaagcatctatttggaggttggttagttatcccatgtcatcagacatcacgcaggaatcaagtcatccatcaggaagcagccaactctgcctggactaacccagggcaaaggcaaacagcaaactttccaggataagtctctgacttcgttatactttcctgtgtgcaggaggtcttgaagatctggaactgcaggtgcagaatgctattgcagcagttgcagctccacccaaggaaagcaatagtgtcagcagcaacgatcctggtagctcgtcctctgtgatttttccgtctggtccagctgatcaagtccctgttcctgctacctctccagaaattgagccccgttttgcaaaccaaatccctgctgcttcttcggaggttaaggcaccatgcatggcaggtctgttgtttgtaagcgacaggaacgagaggaactttaggttgcctagcccttctgataattgtccatggaacttattcgaatctagccgtagcgcagtcagctttctacaggagtatatgctttccggaatcgtgccactgaagttattcagcatgagatctatggttcttagactgggcatattgctgaataactatagttggtagatggtctcgctacagtagacaggaaaggcaccatgcctggcactggcaggtctgcagcgaacaccgttgtatgtgtatgtatagtatgcacgtgtgcaattcatattagcttaacagcctgtgtaacaaaaacaattacccaacttcccaagatagttaatgcactatatatccaaaacctgatacatgcatcaatttgtcttaaaaagtacattcataaaaatataaatgtataaagagttcatttgtattttaacaaaagtctttggtcaaagccatattctggagaccgtgtcagtgtcctagaccacaaataacattggagggagtaaattatatctcatgtctatcaacgaagttttactttttaggttctattaatgtctaattcttgtaacccctcttttttggtatctcaattgttgcagttaggaaaccttccattacggccttatttctgcagaagtatgacaccaactttcatctattctctaccaccaaagagatggaaaagcagcctaatgtttcaggtcaaagggccatacttcatagctttttgctcctcattgttttaagtgaaagggcgccaactattcaaaatttactctaggtagataattttcattgtcgagttttattttggtatatgtaactttttgtaattgggcctaagcgtattggagcactctaagttaacaggtgcttgaagctgatgatgaaattatacagcttggatgaataaacctttgttgtagtgacataaggagtttcgaaattacaaggaattttaaatttgaatatttttcagtgagatgttgaggttgataattttaatctttgtgcactaatattttgtagaaagtagtttgttcaccgttgcaacgcacgggcatgtacctagtcaagcattaagcacgcgatgaacaacgtccttcccgttatcgcccaacaactagaattccacttctatcatcgaccccataacatcacacaacataacaccataacaacggatctagccataattaccaagcgcacacctcgcatcactggtatttctaacttaatcgtatacgcatacgaagcgtcttattttacgatcataaaaccgatagtaaaaatagcgaatcggctcaccacatcacaattcgatttggtagttgcctgaacaacgacggccttcagctgaagtccttgatcgaacatctggcgagcgtgaccgacgagctaagtctgaggcgaagctcgacgacgagatcgaacaggggatgatgagcgtgagggtttcacaacgaggatgagtgacatcgtggaatcttggtccaacatttaatcgaacacaacggaagcgaggcacagcaggaatggcagtattaagcatgggcacgataagggacgcgctgctgcacgacgcgatgatgaacgacgacaacctatgacggccaaaacggaagacttggtcgaggcggggtccaagcatccagagtttttttttgccgaggctgaacagagaaggatgcacaaatcctaggcacgatggtggccatagccaagcagtgggacgcgactgcgcgcagagaactcggcatggcgagggacgacggaacgctgcgtgcgcgtccagggagcaaggcgcggtcgagaacggacagagggagccgggagaaagaactgcggcgctgcgagcagagcgcaggggagttcgtggctgcgcgcagatgggcgagctggagcgccgcgacgagcgcaggggcgcggcacaagcgagggcgagctgccgcagggagaaagaagctggggaaagggccgcagcgctgggggctcgacgtgccgtgaccagcagagagatgcggcgctgcgcagaggagggagaggaaggagagagagcagccatgggaaagggaggagaactgggcgcgacgcaggcagccaagggagcttcaaggccgagcgccaggaagaatgagcagggcgccgcgacactgggacagggcaccggcgagcagcaagcagagagagaaggcgcggcggtcaggacgaacgtcagggagcttcggctggccatggaaccgagcagtgatgcgccatgggggagaaaccagcgcgcagcagagaagctcggcgaggaagatggggcaggaactcggcgccggcgaggggagcagggtgatgaacgccgaggaagctga

SEQ ID NO: 44052 - DNA, 5374 bp, Zea Mays
cgccatcaacgcccggatccccaccctccttcccaccgccgccgcaatcaacgcgctcctcccccacgtggatccctccaccctcctccccaccgccgccgctcgaccgcggtttcgtcgcactccttccttcgaaagcgctcctttccatcctcgattcctccttccttccatgtcgctccttccttcgacggccagcctcatccggtcattcctcctcgctgtgccccctcccccgtattcaaccacctcttcctcctgcggatccaccaccgccgtcctcgcccaacgtctccttgacgcatatgcccgcagcggctccctcgcgtccccaatgttgagtctggcctgtatggaaggagtgcgggcgtgggtggagtgtgtagagaaatccaagcgaaaccccgtgagagcgaggtgacggcagacggaggcgagtgggtgagctgcgggcgagagacgaggtagcgggctagcggatggcgtcgctggttgtagtggccgcagcgctgctggtggcggcgctggtggcattctgcggcacggacccgctctggacggggttcgagtcccacctcgtcgaccttcccggggttcgagtcccacctcgtcgacctccccgatcccgccgagatgtcgacgcacgcggacgaacgggagtggctccgcggagccgaggtgcaacccctccaaaccggcgttcaaggacggcgccgctcaccagttgtatctggttgtgaagaactaggggtgggagcgcctgtatggcgggcttatgccttctctcatcggcaccgctgcctcccaggagagggcttggcgatgggtctgttgggatgctccagtctctcactgtctactactacttgtaccaaatatctactggactctggatgggcatcgaattttatgctataaacaccgattcccaagcccttattaattcacaagcgcaatatcctctgcaaattggagagcagttgacccacgacttaggtaccggtggaaatccaaatttgggagagcaggctgctgaggaatcaagagaaaccatagccactgccctgagggattcagatcttgttttcataacagctgggatgggagggggtgctgctccaattgttgcccagatatcaaaggaagctggttatcttactgttggtgttgtcacctatccattcaatttcgagggccgtaagcgctctttacaggcaagtatctgagccccccttcactcctgaattagaattcaaactgtcatatctcgttttgcgactttcttttgctccatggaagcattagtttgtagtcataacaatgacatccaaccacatttattgttgatcatgtatacaatggtcggtcaaataaaggtagcatattgcgagggcggtcctcgtcgctcccatgtgcaggatctcccatgtgacagatggcttggcaagattatactagagacttgtatttctcagatccatatttggcttaggtatgattcttgtgtcaatgctacatatatttttcctaattattgtaggtacttccatttagccttgcgacaataaatattttgtgcgaaacacatcatctcttcacggttcaatacgatcatcggctatatatcctggctgatcatcgtcaagagcattagtagttgctactgatatatatagaggcacatcggctgaatcgcatcgacgaccgatcataaagccgcacagctttggattccctagaaagctggagttctgaaatgtaccaaattgaccaccggttggaataggcccctctaggtcattgttagaaacgttgaatgtggaaaggaagtgcagattctcgaatgcaactggaattttacccgtgagatcattgctggataaatctagcatccagcaggtttgtgagattgcagatagatgtggggatcggtccggttaagctgttggagctgatatcaagtgaaaggaggccttttaactgaccaatctctgggagaatcagaactgtgaatatgttgctgcttagatttagaattttaggaaaagcaatcggtatccggtacggtttcttcaaagaaattgatgccaagaagaagcgtggtcaggttcttagagctcctcagtatctgaagcgtgtttgttatatttgaaaggctgttgtttgggcaaggcgaatcaggcaagagttgatgacgagcggctaaactaatccaagagttgatgacgaccggcttgttctttcacttgcaacgacttagagtcgggcgacctgcaagatcaaggtgcatggtcgtcgaaggatggcgacggcgtatcctcgttcaggcaaggcgaatcaggcaagcatctatttggaggttggttagttatcccatgtcatcagacatcacgcaggaatcaagtcatccatcaggaagcagccaactctgcctggactaacccagggcaaaggcaaacagcaaactttccaggataagtctctgacttcgttatactttcctgtgtgcaggaggtcttgaagatctggaactgcaggtgcagaatgctattgcagcagttgcagctccacccaaggaaagcaatagtgtcagcagcaacgatcctggtagctcgtcctctgtgatttttccgtctggtccagctgatcaagtccctgttcctgctacctctccagaaattgagccccgttttgcaaaccaaatccctgctgcttcttcggaggttaaggcaccatgcatggcaggtctgttgtttgtaagcgacaggaacgagaggaactttaggttgcctagcccttctgataattgtccatggaacttattcgaatctagccgtagcgcagtcagctttctacaggagtatatgctttccggaatcgtgccactgaagttattcagcatgagatctatggttcttagactgggcatattgctgaataactatagttggtagatggtctcgctacagtagacaggaaaggcaccatgcctggcactggcaggtctgcagcgaacaccgttgtatgtgtatgtatagtatgcacgtgtgcaattcatattagcttaacagcctgtgtaacaaaaacaattacccaacttcccaagatagttaatgcactatatatccaaaacctgatacatgcatcaatttgtcttaaaaagtacattcataaaaatataaatgtataaagagttcatttgtattttaacaaaagtctttggtcaaagccatattctggagaccgtgtcagtgtcctagaccacaaataacattggagggagtaaattatatctcatgtctatcaacgaagttttactttttaggttctattaatgtctaattcttgtaacccctcttttttggtatctcaattgttgcagttaggaaaccttccattacggccttatttctgcagaagtatgacaccaactttcatctattctctaccaccaaagagatggaaaagcaggttgcccccacccccatagctttctgttttgtccctataacaggtttacctatgttatatatagacaccgtagcaatgcacgtgtaatggtagattttctgattggttagtttggaagtgaagtaggtgccaatgttgtgcatgagcagaagaaatattattcccttcaatattagtagaggtagagatatttacttttatcagtatttgtgttgtgatagctatttttagcctaatgtttcaggtcaaagggccatacttcatagctttttgctcctcattgttttaagtgaaagggcgccaactattcaaaatttactctaggtagataattttcattgtcgagttttattttggtatatgtaactttttgtaattgggcctaagcgtattggagcactctaagttaacaggtgcttgaagctgatgatgaaattatacagcttggatgaataaacctttgttgtagtgacataaggagtttcgaaattacaaggaattttaaatttgaatatttttcagtgagatgttgaggttgataattttaatctttgtgcactaatattttgtagaaagtagtttgttcaccgttgcaacgcacgggcatgtacctagtcaagcattaagcacgcgatgaacaacgtccttcccgttatcgcccaacaactagaattccacttctatcatcgaccccataacatcacacaacataacaccataacaacggatctagccataattaccaagcgcacacctcgcatcactggtatttctaacttaatcgtatacgcatacgaagcgtcttattttacgatcataaaaccgatagtaaaaatagcgaatcggctcaccacatcacaattcgatttggtagttgcctgaacaacgacggccttcagctgaagtccttgatcgaacatctggcgagcgtgaccgacgagctaagtctgaggcgaagctcgacgacgagatcgaacaggggatgatgagcgtgagggtttcacaacgaggatgagtgacatcgtggaatcttggtccaacatttaatcgaacacaacggaagcgaggcacagcaggaatggcagtattaagcatgggcacgataagggacgcgctgctgcacgacgcgatgatgaacgacgacaacctatgacggccaaaacggaagacttggtcgaggcggggtccaagcatccagagtttttttttgccgaggctgaacagagaaggatgcacaaatcctaggcacgatggtggccatagccaagcagtgggacgcgactgcgcgcagagaactcggcatggcgagggacgacggaacgctgcgtgcgcgtccagggagcaaggcgcggtcgagaacggacagagggagccgggagaaagaactgcggcgctgcgagcagagcgcaggggagttcgtggctgcgcgcagatgggcgagctggagcgccgcgacgagcgcaggggcgcggcacaagcgagggcgagctgccgcagggagaaagaagctggggaaagggccgcagcgctgggggctcgacgtgccgtgaccagcagagagatgcggcgctgcgcagaggagggagaggaaggagagagagcagccatgggaaagggaggagaactgggcgcgacgcaggcagccaagggagcttcaaggccgagcgccaggaagaatgagcagggcgccgcgacactgggacagggcaccggcgagcagcaagcagagagagaaggcgcggcggtcaggacgaacgtcagggagcttcggctggccatggaaccgagcagtgatgcgccatgggggagaaaccagcgcgcagcagagaagctcggcgaggaagatggggcaggaactcggcgccggcgaggggagcagggtgatgaacgccgaggaagctga

SEQ ID NO: 44053 - DNA, 5423 bp, Zea Mays
cgccatcaacgcccggatccccaccctccttcccaccgccgccgcaatcaacgcgctcctcccccacgtggatccctccaccctcctccccaccgccgccgctcgaccgcggtttcgtcgcactccttccttcgaaagcgctcctttccatcctcgattcctccttccttccatgtcgctccttccttcgacggccagcctcatccggtcattcctcctcgctgtgccccctcccccgtattcaaccacctcttcctcctgcggatccaccaccgccgtcctcgcccaacgtctccttgacgcatatgcccgcagcggctccctcgcgtccccaatgttgagtctggcctgtatggaaggagtgcgggcgtgggtggagtgtgtagagaaatccaagcgaaaccccgtgagagcgaggtgacggcagacggaggcgagtgggtgagctgcgggcgagagacgaggtagcgggctagcggatggcgtcgctggttgtagtggccgcagcgctgctggtggcggcgctggtggcattctgcggcacggacccgctctggacggggttcgagtcccacctcgtcgaccttcccggggttcgagtcccacctcgtcgacctccccgatcccgccgagatgtcgacgcacgcggacgaacgggagtggctccgcggagccgaggtgcaacccctccaaaccggcgttcaaggacggcgccgctcaccagttgtatctggttgtgaagaactaggggtgggagcgcctgtatggcgggcttatgccttctctcatcggcaccgctgcctcccagccttgagcgatccaggagagggcttggcgatgggtctgttgggatgctccagtctctcactgtctactactacttgtaccaaatatctactggactctggatgggcatcgaattttatgctataaacaccgattcccaagcccttattaattcacaagcgcaatatcctctgcaaattggagagcagttgacccacgacttaggtaccggtggaaatccaaatttgggagagcaggctgctgaggaatcaagagaaaccatagccactgccctgagggattcagatcttgttttcataacagctgggatgggagggggtgctgctccaattgttgcccagatatcaaaggaagctggttatcttactgttggtgttgtcacctatccattcaatttcgagggccgtaagcgctctttacaggtacttccatttagccttgcgacaataaatattttgtgcgaaacacatcatctcttcacggttcaatacgatcatcggctatatatcctggctgatcatcgtcaagagcattagtagttgctactgatatatataggtcagctctttgctcttttcacatctatatcaattgcttgccccacaaatgatcagccagggtcaggtaaaccatattgtgtaaccatcactataacactgcaatcattttctaaatagtacttttataaatcacaaatcgaaggtataaatacaaaagtgtagaaaattataatgagaacattacctatataaacaagaaaggaaaaccaatgatgttttccttgttgaagttatttgtggcttttacaatgtcagagaacgtgagcttgttttcatttacttttccttgtggcaccatgatcactccaaatgcaattgcaagaatggccttcttatttcttcctcctgtggataccagaggcacatcggctgaatcgcatcgacgaccgatcataaagccgcacagctttggattccctagaaagctggagttctgaaatgtaccaaattgaccaccggttggaataggcccctctaggtcattgttagaaacgttgaatgtggaaaggaagtgcagattctcgaatgcaactggaattttacccgtgagatcattgctggataaatctagcatccagcaggtttgtgagattgcagatagatgtggggatcggtccggttaagctgttggagctgatatcaagtgaaaggaggccttttaactgaccaatctctgggagaatcagaactgtgaatatgttgctgcttagatttagaattttaggaaaagcaatcggtatccggtacggtttcttcaaagaaattgatgccaagaagaagcgtggtcaggttcttagagctcctcagtatctgaagcgtgtttgttatatttgaaaggctgttgtttgggcaaggcgaatcaggcaagagttgatgacgagcggctaaactaatccaagagttgatgacgaccggcttgttctttcacttgcaacgacttagagtcgggcgacctgcaagatcaaggtgcatggtcgtcgaaggatggcgacggcgtatcctcgttcaggcaaggcgaatcaggcaagcatctatttggaggttggttagttatcccatgtcatcagacatcacgcaggaatcaagtcatccatcaggaagcagccaactctgcctggactaacccagggcaaaggcaaacagcaaactttccaggataagtctctgacttcgttatactttcctgtgtgcaggaggtcttgaagatctggaactgcaggtgcagaatgctattgcagcagttgcagctccacccaaggaaagcaatagtgtcagcagcaacgatcctggtagctcgtcctctgtgatttttccgtctggtccagctgatcaagtccctgttcctgctacctctccagaaattgagccccgttttgcaaaccaaatccctgctgcttcttcggaggttaaggcaccatgcatggcaggtctgttgtttgtaagcgacaggaacgagaggaactttaggttgcctagcccttctgataattgtccatggaacttattcgaatctagccgtagcgcagtcagctttctacaggagtatatgctttccggaatcgtgccactgaagttattcagcatgagatctatggttcttagactgggcatattgctgaataactatagttggtagatggtctcgctacagtagacaggaaaggcaccatgcctggcactggcaggtctgcagcgaacaccgttgtatgtgtatgtatagtatgcacgtgtgcaattcatattagcttaacagcctgtgtaacaaaaacaattacccaacttcccaagatagttaatgcactatatatccaaaacctgatacatgcatcaatttgtcttaaaaagtacattcataaaaatataaatgtataaagagttcatttgtattttaacaaaagtctttggtcaaagccatattctggagaccgtgtcagtgtcctagaccacaaataacattggagggagtaaattatatctcatgtctatcaacgaagttttactttttaggttctattaatgtctaattcttgtaacccctcttttttggtatctcaattgttgcagttaggaaaccttccattacggccttatttctgcagaagtatgacaccaactttcatctattctctaccaccaaagagatggaaaagcaggttgcccccacccccatagctttctgttttgtccctataacaggtttacctatgttatatatagacaccgtagcaatgcacgtgtaatggtagattttctgattggttagtttggaagtgaagtaggtgccaatgttgtgcatgagcagaagaaatattattcccttcaatattagtagaggtagagatatttacttttatcagtatttgtgttgtgatagctatttttagcctaatgtttcaggtcaaagggccatacttcatagctttttgctcctcattgttttaagtgaaagggcgccaactattcaaaatttactctaggtagataattttcattgtcgagttttattttggtatatgtaactttttgtaattgggcctaagcgtattggagcactctaagttaacaggtgcttgaagctgatgatgaaattatacagcttggatgaataaacctttgttgtagtgacataaggagtttcgaaattacaaggaattttaaatttgaatatttttcagtgagatgttgaggttgataattttaatctttgtgcactaatattttgtagaaagtagtttgttcaccgttgcaacgcacgggcatgtacctagtcaagcattaagcacgcgatgaacaacgtccttcccgttatcgcccaacaactagaattccacttctatcatcgaccccataacatcacacaacataacaccataacaacggatctagccataattaccaagcgcacacctcgcatcactggtatttctaacttaatcgtatacgcatacgaagcgtcttattttacgatcataaaaccgatagtaaaaatagcgaatcggctcaccacatcacaattcgatttggtagttgcctgaacaacgacggccttcagctgaagtccttgatcgaacatctggcgagcgtgaccgacgagctaagtctgaggcgaagctcgacgacgagatcgaacaggggatgatgagcgtgagggtttcacaacgaggatgagtgacatcgtggaatcttggtccaacatttaatcgaacacaacggaagcgaggcacagcaggaatggcagtattaagcatgggcacgataagggacgcgctgctgcacgacgcgatgatgaacgacgacaacctatgacggccaaaacggaagacttggtcgaggcggggtccaagcatccagagtttttttttgccgaggctgaacagagaaggatgcacaaatcctaggcacgatggtggccatagccaagcagtgggacgcgactgcgcgcagagaactcggcatggcgagggacgacggaacgctgcgtgcgcgtccagggagcaaggcgcggtcgagaacggacagagggagccgggagaaagaactgcggcgctgcgagcagagcgcaggggagttcgtggctgcgcgcagatgggcgagctggagcgccgcgacgagcgcaggggcgcggcacaagcgagggcgagctgccgcagggagaaagaagctggggaaagggccgcagcgctgggggctcgacgtgccgtgaccagcagagagatgcggcgctgcgcagaggagggagaggaaggagagagagcagccatgggaaagggaggagaactgggcgcgacgcaggcagccaagggagcttcaaggccgagcgccaggaagaatgagcagggcgccgcgacactgggacagggcaccggcgagcagcaagcagagagagaaggcgcggcggtcaggacgaacgtcagggagcttcggctggccatggaaccgagcagtgatgcgccatgggggagaaaccagcgcgcagcagagaagctcggcgaggaagatggggcaggaactcggcgccggcgaggggagcagggtgatgaacgccgaggaagctga

SEQ ID NO: 44054 - DNA, 5338 bp, Zea Mays
cgccatcaacgcccggatccccaccctccttcccaccgccgccgcaatcaacgcgctcctcccccacgtggatccctccaccctcctccccaccgccgccgctcgaccgcggtttcgtcgcactccttccttcgaaagcgctcctttccatcctcgattcctccttccttccatgtcgctccttccttcgacggccagcctcatccggtcattcctcctcgctgtgccccctcccccgtattcaaccacctcttcctcctgcggatccaccaccgccgtcctcgcccaacgtctccttgacgcatatgcccgcagcggctccctcgcgtccccaatgttgagtctggcctgtatggaaggagtgcgggcgtgggtggagtgtgtagagaaatccaagcgaaaccccgtgagagcgaggtgacggcagacggaggcgagtgggtgagctgcgggcgagagacgaggtagcgggctagcggatggcgtcgctggttgtagtggccgcagcgctgctggtggcggcgctggtggcattctgcggcacggacccgctctggacggggttcgagtcccacctcgtcgaccttcccggggttcgagtcccacctcgtcgacctccccgatcccgccgagatgtcgacgcacgcggacgaacgggagtggctccgcggagccgaggtgcaacccctccaaaccggcgttcaaggacggcgccgctcaccagttgtatctggttgtgaagaactaggggtgggagcgcctgtatggcgggcttatgccttctctcatcggcaccgctgcctcccaggagagggcttggcgatgggtctgttgggatgctccagtctctcactgtctactactacttgtaccaaatatctactggactctggatgggcatcgaattttatgctataaacaccgattcccaagcccttattaattcacaagcgcaatatcctctgcaaattggagagcagttgacccacgacttaggtaccggtggaaatccaaatttgggagagcaggctgctgaggaatcaagagaaaccatagccactgccctgagggattcagatcttgttttcataacagctgggatgggagggggtgctgctccaattgttgcccagatatcaaaggaagctggttatcttactgttggtgttgtcacctatccattcaatttcgagggccgtaagcgctctttacaggcaagtatctgagccccccttcactcctgaattagaattcaaactgtcatatctcgttttgcgactttcttttgctccatggaagcattagtttgtagtcataacaatgacatccaaccacatttattgttgatcatgtatacaatggtcggtcaaataaaggtagcatattgcgagggcggtcctcgtcgctcccatgtgcaggatctcccatgtgacagatggcttggcaagattatactagagacttgtatttctcagatccatatttggcttaggtatgattcttgtgtcaatgctacatatatttttcctaattattgtaggtacttccatttagccttgcgacaataaatattttgtgcgaaacacatcatctcttcacggttcaatacgatcatcggctatatatcctggctgatcatcgtcaagagcattagtagttgctactgatatatataggtcagctctttgctcttttcacatctatatcaattgcttgccccacaaatgatcagccagggtcaggtaaaccatattgtgtaaccatcactataacactgcaatcattttctaaatagtacttttataaatcacaaatcgaaggtataaatacaaaagtgtagaaaattataatgagaacattacctatataaacaagaaaggaaaaccaatgatgttttccttgttgaagttatttgtggcttttacaatgtcagagaacgtgagcttgttttcatttacttttccttgtggcaccatgatcactccaaatgcaattgcaagaatggccttcttatttcttcctcctgtggataccagaggcacatcggctgaatcgcatcgacgaccgatcataaagccgcacagctttggattccctagaaagctggagttctgaaatgtaccaaattgaccaccggttggaataggcccctctaggtcattgttagaaacgttgaatgtggaaaggaagtgcagattctcgaatgcaactggaattttacccgtgagatcattgctggataaatctagcatccagcaggtttgtgagattgcagatagatgtggggatcggtccggttaagctgttggagctgatatcaagtgaaaggaggccttttaactgaccaatctctgggagaatcagaactgtgaatatgttgctgcttagatttagaattttaggaaaagcaatcggtatccggtacggtttcttcaaagaaattgatgccaagaagaagcgtggtcaggttcttagagctcctcagtatctgaagcgtgtttgttatatttgaaaggctgttgtttgggcaaggcgaatcaggcaagagttgatgacgagcggctaaactaatccaagagttgatgacgaccggcttgttctttcacttgcaacgacttagagtcgggcgacctgcaagatcaaggtgcatggtcgtcgaaggatggcgacggcgtatcctcgttcaggcaaggcgaatcaggcaagcatctatttggaggaggtcttgaagatctggaactgcaggtgcagaatgctattgcagcagttgcagctccacccaaggaaagcaatagtgtcagcagcaacgatcctggtagctcgtcctctgtgatttttccgtctggtccagctgatcaagtccctgttcctgctacctctccagaaattgagccccgttttgcaaaccaaatccctgctgcttcttcggaggttaaggcaccatgcatggcaggtctgttgtttgtaagcgacaggaacgagaggaactttaggttgcctagcccttctgataattgtccatggaacttattcgaatctagccgtagcgcagtcagctttctacaggagtatatgctttccggaatcgtgccactgaagttattcagcatgagatctatggttcttagactgggcatattgctgaataactatagttggtagatggtctcgctacagtagacaggaaaggcaccatgcctggcactggcaggtctgcagcgaacaccgttgtatgtgtatgtatagtatgcacgtgtgcaattcatattagcttaacagcctgtgtaacaaaaacaattacccaacttcccaagatagttaatgcactatatatccaaaacctgatacatgcatcaatttgtcttaaaaagtacattcataaaaatataaatgtataaagagttcatttgtattttaacaaaagtctttggtcaaagccatattctggagaccgtgtcagtgtcctagaccacaaataacattggagggagtaaattatatctcatgtctatcaacgaagttttactttttaggttctattaatgtctaattcttgtaacccctcttttttggtatctcaattgttgcagttaggaaaccttccattacggccttatttctgcagaagtatgacaccaactttcatctattctctaccaccaaagagatggaaaagcaggtcaaagggccatacttcatagctttttgctcctcattgttttaagtgaaagggcgccaactattcaaaatttactctaggtagataattttcattgtcgagttttattttggtatatgtaactttttgtaattgggcctaagcgtattggagcactctaagttaacaggtgcttgaagctgatgatgaaattatacagcttggatgaataaacctttgttgtagtgacataaggagtttcgaaattacaaggaattttaaatttgaatatttttcagtgagatgttgaggttgataattttaatctttgtgcactaatattttgtagaaagtagtttgttcaccgttgcaacgcacgggcatgtacctagtcaagcattaagcacgcgatgaacaacgtccttcccgttatcgcccaacaactagaattccacttctatcatcgaccccataacatcacacaacataacaccataacaacggatctagccataattaccaagcgcacacctcgcatcactggtatttctaacttaatcgtatacgcatacgaagcgtcttattttacgatcataaaaccgatagtaaaaatagcgaatcggctcaccacatcacaattcgatttggtagttgcctgaacaacgacggccttcagctgaagtccttgatcgaacatctggcgagcgtgaccgacgagctaagtctgaggcgaagctcgacgacgagatcgaacaggggatgatgagcgtgagggtttcacaacgaggatgagtgacatcgtggaatcttggtccaacatttaatcgaacacaacggaagcgaggcacagcaggaatggcagtattaagcatgggcacgataagggacgcgctgctgcacgacgcgatgatgaacgacgacaacctatgacggccaaaacggaagacttggtcgaggcggggtccaagcatccagagtttttttttgccgaggctgaacagagaaggatgcacaaatcctaggcacgatggtggccatagccaagcagtgggacgcgactgcgcgcagagaactcggcatggcgagggacgacggaacgctgcgtgcgcgtccagggagcaaggcgcggtcgagaacggacagagggagccgggagaaagaactgcggcgctgcgagcagagcgcaggggagttcgtggctgcgcgcagatgggcgagctggagcgccgcgacgagcgcaggggcgcggcacaagcgagggcgagctgccgcagggagaaagaagctggggaaagggccgcagcgctgggggctcgacgtgccgtgaccagcagagagatgcggcgctgcgcagaggagggagaggaaggagagagagcagccatgggaaagggaggagaactgggcgcgacgcaggcagccaagggagcttcaaggccgagcgccaggaagaatgagcagggcgccgcgacactgggacagggcaccggcgagcagcaagcagagagagaaggcgcggcggtcaggacgaacgtcagggagcttcggctggccatggaaccgagcagtgatgcgccatgggggagaaaccagcgcgcagcagagaagctcggcgaggaagatggggcaggaactcggcgccggcgaggggagcagggtgatgaacgccgaggaagctga

SEQ ID NO: 44055 - DNA, 5513 bp, Zea Mays
ccgccatcaacgcccggatccccaccctccttcccaccgccgccgcaatcaacgcgctcctcccccacgtggatccctccaccctcctccccaccgccgccgctcgaccgcggtttcgtcgcactccttccttcgaaagcgctcctttccatcctcgattcctccttccttccatgtcgctccttccttcgacggccagcctcatccggtcattcctcctcgctgtgccccctcccccgtattcaaccacctcttcctcctgcggatccaccaccgccgtcctcgcccaacgtctccttgacgcatatgcccgcagcggctccctcgcgtccccaatgttgagtctggcctgtatggaaggagtgcgggcgtgggtggagtgtgtagagaaatccaagcgaaaccccgtgagagcgaggtgacggcagacggaggcgagtgggtgagctgcgggcgagagacgaggtagcgggctagcggatggcgtcgctggttgtagtggccgcagcgctgctggtggcggcgctggtggcattctgcggcacggacccgctctggacggggttcgagtcccacctcgtcgaccttcccggggttcgagtcccacctcgtcgacctccccgatcccgccgagatgtcgacgcacgcggacgaacgggagtggctccgcggagccgaggtgcaacccctccaaaccggcgttcaaggacggcgccgctcaccagttgtatctgccttgagcgatccaggagagggcttggcgatgggtctgttgggatgctccagtctctcactgtctactactacttgtaccaaatatctactggactctggatgggcatcgaattttatgctataaacaccgattcccaagcccttattaattcacaagcgcaatatcctctgcaaattggagagcagttgacccacgacttaggtaccggtggaaatccaaatttgggagagcaggctgctgaggaatcaagagaaaccatagccactgccctgagggattcagatcttgttttcataacagctgggatgggagggggtgctgctccaattgttgcccagatatcaaaggaagctggttatcttactgttggtgttgtcacctatccattcaatttcgagggccgtaagcgctctttacaggtagcatattgcgagggcggtcctcgtcgctcccatgtgcaggatctcccatgtgacagatggcttggcaagattatactagagacttgtatttctcagatccatatttggcttaggtatgattcttgtgtcaatgctacatatatttttcctaattattgtaggtacttccatttagccttgcgacaataaatattttgtgcgaaacacatcatctcttcacggttcaatacgatcatcggctatatatcctggctgatcatcgtcaagagcattagtagttgctactgatatatataggtcagctctttgctcttttcacatctatatcaattgcttgccccacaaatgatcagccagggtcaggtaaaccatattgtgtaaccatcactataacactgcaatcattttctaaatagtacttttataaatcacaaatcgaaggtataaatacaaaagtgtagaaaattataatgagaacattacctatataaacaagaaaggaaaaccaatgatgttttccttgttgaagttatttgtggcttttacaatgtcagagaacgtgagcttgttttcatttacttttccttgtggcaccatgatcactccaaatgcaattgcaagaatggccttcttatttcttcctcctgtggataccagaggcacatcggctgaatcgcatcgacgaccgatcataaagccgcacagctttggattccctagaaagctggagttctgaaatgtaccaaattgaccaccggttggaataggcccctctaggtcattgttagaaacgttgaatgtggaaaggaagtgcagattctcgaatgcaactggaattttacccgtgagatcattgctggataaatctagcatccagcaggtttgtgagattgcagatagatgtggggatcggtccggttaagctgttggagctgatatcaagtgaaaggaggccttttaactgaccaatctctgggagaatcagaactgtgaatatgttgctgcttagatttagaattttaggaaaagcaatcggtatccggtacggtttcttcaaagaaattgatgccaagaagaagcgtggtcaggttcttagagctcctcagtatctgaagcgtgtttgttatatttgaaaggctgttgtttgggcaaggcgaatcaggcaagagttgatgacgagcggctaaactaatccaagagttgatgacgaccggcttgttctttcacttgcaacgacttagagtcgggcgacctgcaagatcaaggtgcatggtcgtcgaaggatggcgacggcgtatcctcgttcaggcaaggcgaatcaggcaagcatctatttggaggttggttagttatcccatgtcatcagacatcacgcaggaatcaagtcatccatcaggaagcagccaactctgcctggactaacccagggcaaaggcaaacagcaaactttccaggataagtctctgacttcgttatactttcctgtgtgcaggaggtcttgaagatctggaactgcaggtgcagaatgctattgcagcagttgcagctccacccaaggaaagcaatagtgtcagcagcaacgatcctggtagctcgtcctctgtgatttttccgtctggtccagctgatcaagtccctgttcctgctacctctccagaaattgagccccgttttgcaaaccaaatccctgctgcttcttcggaggttaaggcaccatgcatggcaggtctgttgtttgtaagcgacaggaacgagaggaactttaggttgcctagcccttctgataattgtccatggaacttattcgaatctagccgtagcgcagtcagctttctacaggagtatatgctttccggaatcgtgccactgaagttattcagcatgagatctatggttcttagactgggcatattgctgaataactatagttggtagatggtctcgctacagtagacaggaaaggcaccatgcctggcactggcaggtctgcagcgaacaccgttgtatgtgtatgtatagtatgcacgtgtgcaattcatattagcttaacagcctgtgtaacaaaaacaattacccaacttcccaagatagttaatgcactatatatccaaaacctgatacatgcatcaatttgtcttaaaaagtacattcataaaaatataaatgtataaagagttcatttgtattttaacaaaagtctttggtcaaagccatattctggagaccgtgtcagtgtcctagaccacaaataacattggagggagtaaattatatctcatgtctatcaacgaagttttactttttaggttctattaatgtctaattcttgtaacccctcttttttggtatctcaattgttgcagttaggaaaccttccattacggccttatttctgcagaagtatgacaccaactttcatctattctctaccaccaaagagatggaaaagcaggttgcccccacccccatagctttctgttttgtccctataacaggtttacctatgttatatatagacaccgtagcaatgcacgtgtaatggtagattttctgattggttagtttggaagtgaagtaggtgccaatgttgtgcatgagcagaagaaatattattcccttcaatattagtagaggtagagatatttacttttatcagtatttgtgttgtgatagctatttttagcctaatgtttcaggtcaaagggccatacttcatagctttttgctcctcattgttttaagtgaaagggcgccaactattcaaaatttactctaggtagataattttcattgtcgagttttattttggtatatgtaactttttgtaattgggcctaagcgtattggagcactctaagttaacaggtgcttgaagctgatgatgaaattatacagcttggatgaataaacctttgttgtagtgacataaggagtttcgaaattacaaggaattttaaatttgaatatttttcagtgagatgttgaggttgataattttaatctttgtgcactaatattttgtagaaagtagtttgttcaccgttgcaacgcacgggcatgtacctagtcaagcattaagcacgcgatgaacaacgtccttcccgttatcgcccaacaactagaattccacttctatcatcgaccccataacatcacacaacataacaccataacaacggatctagccataattaccaagcgcacacctcgcatcactggtatttctaacttaatcgtatacgcatacgaagcgtcttattttacgatcataaaaccgatagtaaaaatagcgaatcggctcaccacatcacaattcgatttggtagttgcctgaacaacgacggccttcagctgaagtccttgatcgaacatctggcgagcgtgaccgacgagctaagtctgaggcgaagctcgacgacgagatcgaacaggggatgatgagcgtgagggtttcacaacgaggatgagtgacatcgtggaatcttggtccaacatttaatcgaacacaacggaagcgaggcacagcaggaatggcagtattaagcatgggcacgataagggacgcgctgctgcacgacgcgatgatgaacgacgacaacctatgacggccaaaacggaagacttggtcgaggcggggtccaagcatccagagtttttttttgccgaggctgaacagagaaggatgcacaaatcctaggcacgatggtggccatagccaagcagtgggacgcgactgcgcgcagagaactcggcatggcgagggacgacggaacgctgcgtgcgcgtccagggagcaaggcgcggtcgagaacggacagagggagccgggagaaagaactgcggcgctgcgagcagagcgcaggggagttcgtggctgcgcgcagatgggcgagctggagcgccgcgacgagcgcaggggcgcggcacaagcgagggcgagctgccgcagggagaaagaagctggggaaagggccgcagcgctgggggctcgacgtgccgtgaccagcagagagatgcggcgctgcgcagaggagggagaggaaggagagagagcagccatgggaaagggaggagaactgggcgcgacgcaggcagccaagggagcttcaaggccgagcgccaggaagaatgagcagggcgccgcgacactgggacagggcaccggcgagcagcaagcagagagagaaggcgcggcggtcaggacgaacgtcagggagcttcggctggccatggaaccgagcagtgatgcgccatgggggagaaaccagcgcgcagcagagaagctcggcgaggaagatggggcaggaactcggcgccggcgaggggagcagggtgatgaacgccgaggaagctga

SEQ ID NO: 44056 - DNA, 5422 bp, Zea Mays
cccgccatcaacgcccggatccccaccctccttcccaccgccgccgcaatcaacgcgctcctcccccacgtggatccctccaccctcctccccaccgccgccgctcgaccgcggtttcgtcgcactccttccttcgaaagcgctcctttccatcctcgattcctccttccttccatgtcgctccttccttcgacggccagcctcatccggtcattcctcctcgctgtgccccctcccccgtattcaaccacctcttcctcctgcggatccaccaccgccgtcctcgcccaacgtctccttgacgcatatgcccgcagcggctccctcgcgtccccaatgttgagtctggcctgtatggaaggagtgcgggcgtgggtggagtgtgtagagaaatccaagcgaaaccccgtgagagcgaggtgacggcagacggaggcgagtgggtgagctgcgggcgagagacgaggtagcgggctagcggatggcgtcgctggttgtagtggccgcagcgctgctggtggcggcgctggtggcattctgcggcacggacccgctctggacggggttcgagtcccacctcgtcgaccttcccggggttcgagtcccacctcgtcgacctccccgatcccgccgagatgtcgacgcacgcggacgaacgggagtggctccgcggagccgaggtgcaacccctccaaaccggcgttcaaggacggcgccgctcaccagttgtatctggttgtgaagaactaggggtgggagcgcctgtatggcgggcttatgccttctctcatcggcaccgctgcctcccaggagagggcttggcgatgggtctgttgggatgctccagtctctcactgtctactactacttgtaccaaatatctactggactctggatgggcatcgaattttatgctataaacaccgattcccaagcccttattaattcacaagcgcaatatcctctgcaaattggagagcagttgacccacgacttaggtaccggtggaaatccaaatttgggagagcaggctgctgaggaatcaagagaaaccatagccactgccctgagggattcagatcttgttttcataacagctgggatgggagggggtgctgctccaattgttgcccagatatcaaaggaagctggttatcttactgttggtgttgtcacctatccattcaatttcgagggccgtaagcgctctttacaggtagcatattgcgagggcggtcctcgtcgctcccatgtgcaggatctcccatgtgacagatggcttggcaagattatactagagacttgtatttctcagatccatatttggcttaggtatgattcttgtgtcaatgctacatatatttttcctaattattgtaggtacttccatttagccttgcgacaataaatattttgtgcgaaacacatcatctcttcacggttcaatacgatcatcggctatatatcctggctgatcatcgtcaagagcattagtagttgctactgatatatataggtcagctctttgctcttttcacatctatatcaattgcttgccccacaaatgatcagccagggtcaggtaaaccatattgtgtaaccatcactataacactgcaatcattttctaaatagtacttttataaatcacaaatcgaaggtataaatacaaaagtgtagaaaattataatgagaacattacctatataaacaagaaaggaaaaccaatgatgttttccttgttgaagttatttgtggcttttacaatgtcagagaacgtgagcttgttttcatttacttttccttgtggcaccatgatcactccaaatgcaattgcaagaatggccttcttatttcttcctcctgtggataccagaggcacatcggctgaatcgcatcgacgaccgatcataaagccgcacagctttggattccctagaaagctggagttctgaaatgtaccaaattgaccaccggttggaataggcccctctaggtcattgttagaaacgttgaatgtggaaaggaagtgcagattctcgaatgcaactggaattttacccgtgagatcattgctggataaatctagcatccagcaggtttgtgagattgcagatagatgtggggatcggtccggttaagctgttggagctgatatcaagtgaaaggaggccttttaactgaccaatctctgggagaatcagaactgtgaatatgttgctgcttagatttagaattttaggaaaagcaatcggtatccggtacggtttcttcaaagaaattgatgccaagaagaagcgtggtcaggttcttagagctcctcagtatctgaagcgtgtttgttatatttgaaaggctgttgtttgggcaaggcgaatcaggcaagagttgatgacgagcggctaaactaatccaagagttgatgacgaccggcttgttctttcacttgcaacgacttagagtcgggcgacctgcaagatcaaggtgcatggtcgtcgaaggatggcgacggcgtatcctcgttcaggcaaggcgaatcaggcaagcatctatttggaggaggtcttgaagatctggaactgcaggtgcagaatgctattgcagcagttgcagctccacccaaggaaagcaatagtgtcagcagcaacgatcctggtagctcgtcctctgtgatttttccgtctggtccagctgatcaagtccctgttcctgctacctctccagaaattgagccccgttttgcaaaccaaatccctgctgcttcttcggaggttaaggcaccatgcatggcaggtctgttgtttgtaagcgacaggaacgagaggaactttaggttgcctagcccttctgataattgtccatggaacttattcgaatctagccgtagcgcagtcagctttctacaggagtatatgctttccggaatcgtgccactgaagttattcagcatgagatctatggttcttagactgggcatattgctgaataactatagttggtagatggtctcgctacagtagacaggaaaggcaccatgcctggcactggcaggtctgcagcgaacaccgttgtatgtgtatgtatagtatgcacgtgtgcaattcatattagcttaacagcctgtgtaacaaaaacaattacccaacttcccaagatagttaatgcactatatatccaaaacctgatacatgcatcaatttgtcttaaaaagtacattcataaaaatataaatgtataaagagttcatttgtattttaacaaaagtctttggtcaaagccatattctggagaccgtgtcagtgtcctagaccacaaataacattggagggagtaaattatatctcatgtctatcaacgaagttttactttttaggttctattaatgtctaattcttgtaacccctcttttttggtatctcaattgttgcagttaggaaaccttccattacggccttatttctgcagaagtatgacaccaactttcatctattctctaccaccaaagagatggaaaagcaggttgcccccacccccatagctttctgttttgtccctataacaggtttacctatgttatatatagacaccgtagcaatgcacgtgtaatggtagattttctgattggttagtttggaagtgaagtaggtgccaatgttgtgcatgagcagaagaaatattattcccttcaatattagtagaggtagagatatttacttttatcagtatttgtgttgtgatagctatttttagcctaatgtttcaggtcaaagggccatacttcatagctttttgctcctcattgttttaagtgaaagggcgccaactattcaaaatttactctaggtagataattttcattgtcgagttttattttggtatatgtaactttttgtaattgggcctaagcgtattggagcactctaagttaacaggtgcttgaagctgatgatgaaattatacagcttggatgaataaacctttgttgtagtgacataaggagtttcgaaattacaaggaattttaaatttgaatatttttcagtgagatgttgaggttgataattttaatctttgtgcactaatattttgtagaaagtagtttgttcaccgttgcaacgcacgggcatgtacctagtcaagcattaagcacgcgatgaacaacgtccttcccgttatcgcccaacaactagaattccacttctatcatcgaccccataacatcacacaacataacaccataacaacggatctagccataattaccaagcgcacacctcgcatcactggtatttctaacttaatcgtatacgcatacgaagcgtcttattttacgatcataaaaccgatagtaaaaatagcgaatcggctcaccacatcacaattcgatttggtagttgcctgaacaacgacggccttcagctgaagtccttgatcgaacatctggcgagcgtgaccgacgagctaagtctgaggcgaagctcgacgacgagatcgaacaggggatgatgagcgtgagggtttcacaacgaggatgagtgacatcgtggaatcttggtccaacatttaatcgaacacaacggaagcgaggcacagcaggaatggcagtattaagcatgggcacgataagggacgcgctgctgcacgacgcgatgatgaacgacgacaacctatgacggccaaaacggaagacttggtcgaggcggggtccaagcatccagagtttttttttgccgaggctgaacagagaaggatgcacaaatcctaggcacgatggtggccatagccaagcagtgggacgcgactgcgcgcagagaactcggcatggcgagggacgacggaacgctgcgtgcgcgtccagggagcaaggcgcggtcgagaacggacagagggagccgggagaaagaactgcggcgctgcgagcagagcgcaggggagttcgtggctgcgcgcagatgggcgagctggagcgccgcgacgagcgcaggggcgcggcacaagcgagggcgagctgccgcagggagaaagaagctggggaaagggccgcagcgctgggggctcgacgtgccgtgaccagcagagagatgcggcgctgcgcagaggagggagaggaaggagagagagcagccatgggaaagggaggagaactgggcgcgacgcaggcagccaagggagcttcaaggccgagcgccaggaagaatgagcagggcgccgcgacactgggacagggcaccggcgagcagcaagcagagagagaaggcgcggcggtcaggacgaacgtcagggagcttcggctggccatggaaccgagcagtgatgcgccatgggggagaaaccagcgcgcagcagagaagctcggcgaggaagatggggcaggaactcggcgccggcgaggggagcagggtgatgaacgccgaggaagctga

SEQ ID NO: 44057 - DNA, 5404 bp, Zea Mays
cccgccatcaacgcccggatccccaccctccttcccaccgccgccgcaatcaacgcgctcctcccccacgtggatccctccaccctcctccccaccgccgccgctcgaccgcggtttcgtcgcactccttccttcgaaagcgctcctttccatcctcgattcctccttccttccatgtcgctccttccttcgacggccagcctcatccggtcattcctcctcgctgtgccccctcccccgtattcaaccacctcttcctcctgcggatccaccaccgccgtcctcgcccaacgtctccttgacgcatatgcccgcagcggctccctcgcgtccccaatgttgagtctggcctgtatggaaggagtgcgggcgtgggtggagtgtgtagagaaatccaagcgaaaccccgtgagagcgaggtgacggcagacggaggcgagtgggtgagctgcgggcgagagacgaggtagcgggctagcggatggcgtcgctggttgtagtggccgcagcgctgctggtggcggcgctggtggcattctgcggcacggacccgctctggacggggttcgagtcccacctcgtcgaccttcccggggttcgagtcccacctcgtcgacctccccgatcccgccgagatgtcgacgcacgcggacgaacgggagtggctccgcggagccgaggtgcaacccctccaaaccggcgttcaaggacggcgccgctcaccagttgtatctggttgtgaagaactaggggtgggagcgcctgtatggcgggcttatgccttctctcatcggcaccgctgcctcccaggagagggcttggcgatgggtctgttgggatgctccagtctctcactgtctactactacttgtaccaaatatctactggactctggatgggcatcgaattttatgctataaacaccgattcccaagcccttattaattcacaagcgcaatatcctctgcaaattggagagcagttgacccacgacttaggtaccggtggaaatccaaatttgggagagcaggctgctgaggaatcaagagaaaccatagccactgccctgagggattcagatcttgttttcataacagctgggatgggagggggtgctgctccaattgttgcccagatatcaaaggaagctggttatcttactgttggtgttgtcacctatccattcaatttcgagggccgtaagcgctctttacaggtagcatattgcgagggcggtcctcgtcgctcccatgtgcaggatctcccatgtgacagatggcttggcaagattatactagagacttgtatttctcagatccatatttggcttaggtatgattcttgtgtcaatgctacatatatttttcctaattattgtaggtacttccatttagccttgcgacaataaatattttgtgcgaaacacatcatctcttcacggttcaatacgatcatcggctatatatcctggctgatcatcgtcaagagcattagtagttgctactgatatatataggtcagctctttgctcttttcacatctatatcaattgcttgccccacaaatgatcagccagggtcaggtaaaccatattgtgtaaccatcactataacactgcaatcattttctaaatagtacttttataaatcacaaatcgaaggtataaatacaaaagtgtagaaaattataatgagaacattacctatataaacaagaaaggaaaaccaatgatgttttccttgttgaagttatttgtggcttttacaatgtcagagaacgtgagcttgttttcatttacttttccttgtggcaccatgatcactccaaatgcaattgcaagaatggccttcttatttcttcctcctgtggataccagaggcacatcggctgaatcgcatcgacgaccgatcataaagccgcacagctttggattccctagaaagctggagttctgaaatgtaccaaattgaccaccggttggaataggcccctctaggtcattgttagaaacgttgaatgtggaaaggaagtgcagattctcgaatgcaactggaattttacccgtgagatcattgctggataaatctagcatccagcaggtttgtgagattgcagatagatgtggggatcggtccggttaagctgttggagctgatatcaagtgaaaggaggccttttaactgaccaatctctgggagaatcagaactgtgaatatgttgctgcttagatttagaattttaggaaaagcaatcggtatccggtacggtttcttcaaagaaattgatgccaagaagaagcgtggtcaggttcttagagctcctcagtatctgaagcgtgtttgttatatttgaaaggctgttgtttgggcaaggcgaatcaggcaagagttgatgacgagcggctaaactaatccaagagttgatgacgaccggcttgttctttcacttgcaacgacttagagtcgggcgacctgcaagatcaaggtgcatggtcgtcgaaggatggcgacggcgtatcctcgttcaggcaaggcgaatcaggaggtcttgaagatctggaactgcaggtgcagaatgctattgcagcagttgcagctccacccaaggaaagcaatagtgtcagcagcaacgatcctggtagctcgtcctctgtgatttttccgtctggtccagctgatcaagtccctgttcctgctacctctccagaaattgagccccgttttgcaaaccaaatccctgctgcttcttcggaggttaaggcaccatgcatggcaggtctgttgtttgtaagcgacaggaacgagaggaactttaggttgcctagcccttctgataattgtccatggaacttattcgaatctagccgtagcgcagtcagctttctacaggagtatatgctttccggaatcgtgccactgaagttattcagcatgagatctatggttcttagactgggcatattgctgaataactatagttggtagatggtctcgctacagtagacaggaaaggcaccatgcctggcactggcaggtctgcagcgaacaccgttgtatgtgtatgtatagtatgcacgtgtgcaattcatattagcttaacagcctgtgtaacaaaaacaattacccaacttcccaagatagttaatgcactatatatccaaaacctgatacatgcatcaatttgtcttaaaaagtacattcataaaaatataaatgtataaagagttcatttgtattttaacaaaagtctttggtcaaagccatattctggagaccgtgtcagtgtcctagaccacaaataacattggagggagtaaattatatctcatgtctatcaacgaagttttactttttaggttctattaatgtctaattcttgtaacccctcttttttggtatctcaattgttgcagttaggaaaccttccattacggccttatttctgcagaagtatgacaccaactttcatctattctctaccaccaaagagatggaaaagcaggttgcccccacccccatagctttctgttttgtccctataacaggtttacctatgttatatatagacaccgtagcaatgcacgtgtaatggtagattttctgattggttagtttggaagtgaagtaggtgccaatgttgtgcatgagcagaagaaatattattcccttcaatattagtagaggtagagatatttacttttatcagtatttgtgttgtgatagctatttttagcctaatgtttcaggtcaaagggccatacttcatagctttttgctcctcattgttttaagtgaaagggcgccaactattcaaaatttactctaggtagataattttcattgtcgagttttattttggtatatgtaactttttgtaattgggcctaagcgtattggagcactctaagttaacaggtgcttgaagctgatgatgaaattatacagcttggatgaataaacctttgttgtagtgacataaggagtttcgaaattacaaggaattttaaatttgaatatttttcagtgagatgttgaggttgataattttaatctttgtgcactaatattttgtagaaagtagtttgttcaccgttgcaacgcacgggcatgtacctagtcaagcattaagcacgcgatgaacaacgtccttcccgttatcgcccaacaactagaattccacttctatcatcgaccccataacatcacacaacataacaccataacaacggatctagccataattaccaagcgcacacctcgcatcactggtatttctaacttaatcgtatacgcatacgaagcgtcttattttacgatcataaaaccgatagtaaaaatagcgaatcggctcaccacatcacaattcgatttggtagttgcctgaacaacgacggccttcagctgaagtccttgatcgaacatctggcgagcgtgaccgacgagctaagtctgaggcgaagctcgacgacgagatcgaacaggggatgatgagcgtgagggtttcacaacgaggatgagtgacatcgtggaatcttggtccaacatttaatcgaacacaacggaagcgaggcacagcaggaatggcagtattaagcatgggcacgataagggacgcgctgctgcacgacgcgatgatgaacgacgacaacctatgacggccaaaacggaagacttggtcgaggcggggtccaagcatccagagtttttttttgccgaggctgaacagagaaggatgcacaaatcctaggcacgatggtggccatagccaagcagtgggacgcgactgcgcgcagagaactcggcatggcgagggacgacggaacgctgcgtgcgcgtccagggagcaaggcgcggtcgagaacggacagagggagccgggagaaagaactgcggcgctgcgagcagagcgcaggggagttcgtggctgcgcgcagatgggcgagctggagcgccgcgacgagcgcaggggcgcggcacaagcgagggcgagctgccgcagggagaaagaagctggggaaagggccgcagcgctgggggctcgacgtgccgtgaccagcagagagatgcggcgctgcgcagaggagggagaggaaggagagagagcagccatgggaaagggaggagaactgggcgcgacgcaggcagccaagggagcttcaaggccgagcgccaggaagaatgagcagggcgccgcgacactgggacagggcaccggcgagcagcaagcagagagagaaggcgcggcggtcaggacgaacgtcagggagcttcggctggccatggaaccgagcagtgatgcgccatgggggagaaaccagcgcgcagcagagaagctcggcgaggaagatggggcaggaactcggcgccggcgaggggagcagggtgatgaacgccgaggaagctga

SEQ ID NO: 44058 - DNA, 1567 bp, Zea Mays
ctttgatccctagggaggtctgcccggatccgacagccgtgagcgcgtgctctatctgcacaagctttcccgacgggctgcagagaaatcaaccaaaaaaattcacatcaaaccaccgtaacgacgcaaaaatcccaccgatctcgatgggggagacgagtaagcgagcgatgtagcgaggggagcacgaacctgaaagtggtaagcgagaaggagtattggctgtcacccatgaccgaggcgcggagtcacctcgttgcctcttccgggttggagtgtcggcgattcgtggcaaggtttttgctctagcgagggagagaggtggctgaggaaaaaaaggggaagacaacgacgagacggagcagggaaagagatggagaatcgcaggaggaaagagagagcggagtgtttctcaagaagaaacgttttgggctggagtccaagttgtacttgggctggctatctgagttggtgaccaaatataggttgcacctgggctgggcctgacccaccgccgcctcttccgccttgcacggttcccccaactcccttctccgacggccactgcccaccgtcacagcagaagctcctccggtcctcccttctctccgtagaaacatttcccgacgggtgtttcccacgccggaatggaccagccggcaccataagcccaagattcgtttgcattcagtaatgcctttgcctaaatcagacctggggtcataactctttagtagagaaccaagaagatgcaggcatctagggcaaggcttttcaaggagtacaaggaggtacagcgagagaagtcagctgaccctgatatccaattaatatgtgatgattctaacatattcaagtggactgctcttatcaagggcccttctgaaacaccttatgaaggtggtgtgtttcaacttgcattcgcaattccagagcagtatcctctgctgcctcctcaagttcgatttttgaccaaaactttccacccaaatgtgcatttcaagacaggtgagatttgtctggatatattgaagaatgcatggagccctatatggacccttcagtctgtttgtagagccataattgctctgatggcccaccctgaaccagacagcccacttaactgtgattcaggcaatctcctgcggtccggtgatatcagaggctatcaatcaatggcccgcatgtatacaaggctggcggccatgccaaagaaaggttagccgtagaacatgtgccaggccaagagcctattgtccatgcatggctacatgttgtcaggtctgccttgtgctgtctgtatgaactttgtggttcttgattcatgaaatactaaccgttcgtgtgttgcgtgtgtgtctggggtaatgagaggacactcgggttctcgatgttgtcaggtctgccttgtgctgtctgtatgaactttgtggttcttgattcatgaaatcctaaccgttcgtgtgttgcgtgtgtgtctggggtaatgagaggacactcgggttcttgatggtgttggtctgtgatgtatttagtaataagaaaataaaaaatgatttctcgataa

SEQ ID NO: 44059 - DNA, 1289 bp, Zea Mays
gtttttttggtatttggctggcatcctgagtccgctgctgcccgccgaacgatggtcgatctgatgattgggcaggcaaatacccagatcggtggcaccggcgtttaagttgaagaggagctgggatgagtttgtacgatactggctctacagttaggagaacacatttaatctaccttcactagtaatgcctttgcctaaatcagacctggggtcataactctttagtagagaaccaagaagatgcaggcatctagggcaaggcttttcaaggagtacaaggaggtacagcgagagaagtcagctgaccctgatatccaattaatatgtgatgattctaacatattcaagtggactgctcttatcaagggcccttctgaaacaccttatgaaggtggtgtgtttcaacttgcattcgcaattccagagcagtatcctctgctgcctcctcaagttcgatttttgaccaaaactttccacccaaatgtgcatttcaagacaggtgagatttgtctggatatattgaagaatgcatggagccctatatggacccttcagtctgtttgtagagccataattgctctgatggcccaccctgaaccagacagcccacttaactgtgattcaggcaatctcctgcggtccggtgatatcagaggctatcaatcaatggcccgcatgtatacaaggctggcggccatgccaaagaaaggttagccgtagaacatgtgccaggccaagagcctattgtccatgcatggctacatgttgtcaggtctgccttgtgctgtctgtatgaactttgtggttcttgattcatgaaatactaaccgttcgtgtgttgcgtgtgtgtctggggtaatgagaggacactcgggttctcgatggtgttggtctgtgatgtatttagtaataagaaaataaaaaatgatttctcgataagcgaggttgtgactgagcattgaggtcagcactatgacttttatttctgaacttttttccaatcgaattacacttgcaactttggtagaagcgagaagggggaaaagaaacatatcagccggctttgccgggcaagaggaggcaccttttttttaattcttttgaaactaggggaacgccgttgtgggcgtcttggtgcctgtcaggaagttgctgaagagcgtcagcgcctgccgcggcgcgtgcagaggcacctcgtgcccggctccgcggatggtgacgaacgtcaggccctcgtagacgaccgtccatccaccaacctgatttccggcggagaacggaagacg

SEQ ID NO: 44060 - DNA, 1642 bp, Zea Mays
atatcctccactgtccactgtgctgtacctgtaccaccgtgacagttctattaacttgacgagacaaaaggggggaaagttctcctcctacaatcctacctccagtgatgtcagtaccaccgccggccggcggcggcgccatcatcaacgaggtcctcaccgacgacgagctccgcgcagtgctcaggcggctggggcccgaggcggagcgggacgcgttcgggctcgtgtgccgccgctggctccggatccagagctccgagcggcggcgcctgcgcgcgcgcgccggcccggacatgctgcgccgcctcgctgcacgcttccctggtgtcctggatctcgacctctctcagtcgccctcccgctccttctaccctggggtcatcgacgacgacctcaacgttatcgccagcagcttccgcaacctgcgtgtcctcgcgctgcagaactgcaaaggtatctctgatgtcggagttgccaaattgggagatggactgccatctctacagtcccttgatgtttctcgctgcataaagctgagtgacaaaggtttgaaggcggttgcactagggtgcaaaaaattgagtcagctgcaaatcatgggatgcaaattagtaacagataatttattgactgctctatcaaagagctgcctgcaattggtagaacttggagctgcgggatgtaacagcataacagatgctggtatatctgctctggctgatggctgtcatcacataaaatcactagacataagcaaatgcaacaaagttagtgatcctggagtctgtaagatcgctgaggtttcttcatcatgcttggtgtcaataaagctattggactgcagcaagccattgatgtcggatgttgtgaccagataaccgacaatgcattcatggacggggaaggatacgggtttcagtctgaactgagagttttgaagatcagcagctgtgttcggctcacagttgcaggggtcggcagagtgattgaatccttcaaggctcttgagtacttggatgttcggtcatgccctcaggttacaagggacagctgcgagcaagctggagtgcagtttcctgctggctgtaaggtgaatttcgatggcagtttgctggaatctgatccatctgctgagatgttcttctaaaatgtgatctcggttgaaatcagatttagtgtgaactgcaaaactaagatttgaagagctcggtcatggaggcgagtgcttgacattgctgctgatctttcactgtcaaaatctatgcaagaacctgagaccacaacggatgcaagccatgatcatattcagtacccaattcaatatgcatgtgatttaatctgtagaaagtagcgcaaaagaccatgaaataagttgtctgaccaaagaacgtatttgcattatgtattgtgccagtgcagcgggtgtattaaaaaaatgtgcattttaatagactggtttcagtggattgtacgcagttctgttttttatctgcatcgcttgtatagatctttgttttggcgttatgccaaacagggaaacagtgttcggtctgttgtcttatgctcaaacactgctcccacctacaagaattggtggtatgtaagccgcatattttacgatactatataagcctctgtc

SEQ ID NO: 44061 - DNA, 2011 bp, Zea Mays
agcaggcttccctgtgccctatatcctccactgtccactgtgctgtacctgtaccaccgtgacagttctattaacttgacgagacaaaaggggggaaagttctcctcctacaatcctacctccagtgatgtcagtaccaccgccggccggcggcggcgccatcatcaacgaggtcctcaccgacgacgagctccgcgcagtgctcaggcggctggggcccgaggcggagcgggacgcgttcgggctcgtgtgccgccgctggctccggatccagagctccgagcggcggcgcctgcgcgcgcgcgccggcccggacatgctgcgccgcctcgctgcacgcttccctggtgtcctggatctcgacctctctcagtcgccctcccgctccttctaccctggggtcatcgacgacgacctcaacgttatcgccagcagcttccgcaacctgcgtgtcctcgcgctgcagaactgcaaagtcttgatttagtctatttcaagtccatattctaatctgggagatgttggagtttctttgtgaggtccttcagtttgtgaattaactttcttgtcattctggaggtgaatcctatctatactactcctaaatcttaggggtatctctgatgtcggagttgccaaattgggagatggactgccatctctacagtcccttgatgtttctcgctgcataaagctgagtgacaaaggtttgaaggcggttgcactagggtgcaaaaaattgagtcagctgcaaatcatgggatgcaaattagtaacagataatttattgactgctctatcaaagagctgcctgcaattggtagaacttggagctgcgggatgtaacagcataacagatgctggtatatctgctctggctgatggctgtcatcacataaaatcactagacataagcaaatgcaacaaagttagtgatcctggagtctgtaagatcgctgaggtttcttcatcatgcttggtgtcaataaagctattggactgcagcaaggtgggagataagtccatctattcgttagctaagttttgcagtaacctagagactcttgtcattggtggatgtcggaacattagcgatggctccatacaagcacttgctcttgcctgctccagtagcttaaggagcctgagaatggactggtgcttgaaaataacagacacatcattgcaaagcctgctgtctaactgtaaacttcttgtagccattgatgtcggatgttgtgaccagataaccgacaatgcattcatggacggggaaggatacgggtttcagtctgaactgagagttttgaagatcagcagctgtgttcggctcacagttgcaggggtcggcagagtgattgaatccttcaaggctcttgagtacttggatgttcggtcatgccctcaggttacaagggacagctgcgagcaagctggagtgcagtttcctgctggctgtaaggtgaatttcgatggcagtttgctggaatctgatccatctgctgagatgttcttctaaaatgtgatctcggttgaaatcagatttagtgtgaactgcaaaactaagatttgaagagctcggtcatggaggcgagtgcttgacattgctgctgatctttcactgtcaaaatctatgcaagaacctgagaccacaacggatgcaagccatgatcatattcagtacccaattcaatatgcatgtgatttaatctgtagaaagtagcgcaaaagaccatgaaataagttgtctgaccaaagaacgtatttgcattatgtattgtgccagtgcagcgggtgtattaaaaaaatgtgcattttaatagactggtttcagtggattgtacgcagttctgttttttatctgcatcgcttgtatagatctttgttttggcgttatgccaaacagggaaacagtgttcggtctgttgtcttatgctcaaacactgctcccacctacaagaattggtggtatgtaagccgcatattttacgatactatataagcctctgtc

SEQ ID NO: 44062 - DNA, 1754 bp, Zea Mays
agccggtttggatctttctggggaggagaggagaggagaagataggcaccagcgctataaaagaagccttttcctcctcctcatttggggcctgagtaacccgcaaccaccgcacattaggtaccgagagggcaggcaagaaccgagcaaatcagggcagcaggtgcctgctgccaagtcttggtcttggtcttggtgcgctgtgtaaagacgactcagcgatggaggggtcgacggcgaccgagggtcatgtggtcgggatcccggtgagcacaagggcttatggcatcgaggaacccgacttctcggtagaagagacgacgcccgaccgtggagagttcccgagctccttccagtactacagccatggtgcggaaaggaaccaagaaagtcgaagcatgtcgctgatcaagctatctttcaccttccagatgctgccagttcgacgacgaccgccgccgatcggccgacgagcaatcaacaagccactaggaagggagacaagatcgtccggggcatcaaagaacatgtgaccctgggaccgaagctctccgacacggtgaaggggaagctctcgctgggcgcgaagatcctccgggccggcggcagcgtggagaagctgttccggcagtggttctcggcggacaaggacgagaagctgctgcgggcgtcgcagtgccacctgtggacgacggcggggcccatcgccggcgtgctgttcgtgtcgacggcgcgggtggccttccgcagcgaccggtcgctgtcgctggcggtgtccaccccgcgcggcgactgcagcttccgcgcgccgtacaaggtggccgtcccgctgcggaaggtcggggcggtgcggcccagcgagaacaggcaccggccggagcagaggtacgtgcggctcgccaccaccgacggcttcgagttctggttcatgggcttcgtcagctacaacaagtcgctgcagcacctggagcgggccgttgcgtgcgcgcggcaggcgcggtgacggtgtgctagttctgggccggctctgtatgtgtaggctgcagctgcaacatgtcgttgtacatctgggcgatcggttgccctggtaagcaggttggtcatagactcacaggcgaccggtcaggcatgtggtcttttggggttgggcaagaaattcaccatgaatttgaaatagagagtgctggtgtagtggtgtgacaatggcgaaaccgccatcaatatccattcttttctcaagcaaaaaaaaaaacatctgccagcatgcatcacaaggcctaccaaaactgcactgatgcgaatgctggtttcttacagagacacagagtctagtcttattcaatcaggtcccggcataactgcactgatgtagcaaacaaactgttcatatcgtgcaaagaatatttatcgtccgctagttcatttttgaactaaaacgtgataaataaaaaagaacataggaagagtatcagacacacagaaaattagaaccagcacatttttatacggacacgggaaaccccacctctatggctctatatattgatttgatgatgcttcaaaaggccagagtacaaaagggggagggtttgataagggcatcaatgcggtgaacgcacgacaccaaaggtcagccacgccggtgtcctcgcgacgcagtctggtacaccaaagggcggcctcttccctgcactggcggacgatcgaagtggtagaggggtgcacgccttcgaaaaaccacaatgttccttctc

SEQ ID NO: 44063 - DNA, 1468 bp, Zea Mays
ctgaattcttttctactagagctagagccaggcagccagccaacgccaagcggggtaggttgactcttctgtctacagcacctacctcttcacaccaactgccgcccctgctccgagaaccagaatggccgccgccgatgcatcttcgttgcctccgtccgccatcacctgccgaggcgcaacttgatctgttccccagagtcttcggccacgaggcatccggagtagtagagagtgtcggtgaaggtgtgaccgagttccaagtcggtgaccacgttctcactgtcttcattggggaatgcaagagctgcaagcactgcgtctcagggaagagcaacatgtgccagaagctcggtctggagaggaagggtgtcatgcacagcgatcagaagacacgcttctctgtcaaggggaaacctgtgtaccattactgtgcagtgtcaagcttcagcgagtacacggttgtccattccggatgtgcggtgaaggttggcctgaccgtgccaatggacagggtgtgcctgctgagctgcggtgtgtcttcagtctggaatgtagctaatgtatcaaagggctcaagtgtagctatatttggtcttgggaccgtaggactttctgtcgctcaaggtgctaagcttcgaggggcgtccaagattataggagttgatactaatcctgagaagcaagaaaaggggaaatcatttggtgtcacggactttattaacccagatgaattgagtgaacctgttcaacaggtaatcaaaaggattactgatggaggggtggattactcatttgaatgtgtgggtgattctggagtagtctccactgcacttcaatcatgttctgatggttggggagtaactgtaactcttggcttaccaaaaggaaaactagaagtgtctactcattatgcatttcttctatccggaagaacactgaagggatctatgtttggaggatggaaacctaaatctgatctaccttcattggtggataaatatgcagcaaaggaaatccaagttgatggcctagtcacgcatgatataccattcaatgaaatcaacaaagcgcttgagttgatgctagaaaacaagtgcttgagatgtgtgattcacatgccacggtaacagggtcgaacagctgcacataataatatgatatctaccatatgttgcatatctgctctttctaccttgatcatctttgtggctcaaccgttcaagtactcatcagtcatcaccacgccggagcttgagtttttgtccttttctagtcccctggtaaagttgttgtaaatccagctatccatcaagaattatcaggagaactacactgatttgcttttgtatcttcatactttttcttctagaattgtcttcttatattgaatctttaatgtctgttctgttattttaatgctccatgtacaaaccatcaagcaaatattgttcttccagccggtgcc

SEQ ID NO: 44064 - DNA, 2965 bp, Zea Mays
gtttcgtcgacaagccagcagcccagcacgcaaagggcactgtgccgttacggcgcggcggagccggaaactcccgagtcgcgtgacagtaaacgaaggcacgaacgcgactcttccatccaactgtcgaagcaaccgaatcggggacaaccgagggcgagggcggccggcatggggatcgtggaggcgtggatgcgggagaagcccatccgcacattcctagcccgcctcgcccagcgccgggcggcggctgccgccgccttcctcgcttccccctctgccaccacggtcatcgatggcgagggcggcagcgacgggagcatcccgcagctttcctccgttgccaactccgtcgtgtcccgctgctcaaggattcttgctctttcaattgagaacttacagcgaagctttgagactgattttccacacagttgtaatgaggctaatacatatgcaagagaccttttagagtattgctgccataaagctcttcatgaagttacaacacgtccagattatttggccgataagaatcttcgccgcttgatgtttgatatgatgcttgcatgggaaactccaggtgctcaggatgtgtcagtagataatggttctattgtgcgtgattcccttgagattgaagatgaggatgaggggtcaattttttatgcaaattccacaagattggctgctcaagttgatgacaagaagacagtcgggttaagtgcttttgcacgaatagcaccttcatgcccaataatagctgacctggttactgtacgcaatctgtttgacgcacttacaagttcatctggaggccgattgcattttcttgtttatgacaagtatctcaagagtttagacagggaattgaggtctgtgaaaggtatcatgcaatcatcacttgcctcaagttttcatcttgatgctggagaatgcatattagctattgatggagacaagcccattcaaccggtactgcaacatattggaatatcagcatggccaggaagattggtcctcacaacacatgctctttattttcagagtattagagtgggatatggtgataagattgttaaatacgacctatcaacagattcaaatcaagtgattaagcgtgatttgactggaccactgggtgtccgcctctttgataaagctgtgatgtacaaatcaagcactttgacagaaccaatttatttcgatttctttgaattaggaggcccttcacgaagagactattggttagcaatcacccgtgaagtattgcagtcgatagaatgtcggagaaccattctataccattttctttgtatgctctctctagaatgggttttcttctgctgaagacaaacgataaatctgaaaaggaaatgagcttttgtgctgtttgctttggtgtaacaaaatctttggaggctgccctagaagagtcaatttgttactctgagagaatagagtcagcacgtgctacagttgatcaagtaaaggtagaaggcgttgatgcaaatcttgccctcatgcaggagttactcttccctttaattcaagcaggcaagattgtttactctctcagccaatgggaagatcctttgaaatcacttctattcttagcttttatgttgtatgctattcaaaggggtctcatcagttacatcgcaccctttgttttcttaacttttgctattatcatgctttggcataagtatattggagacggaaaattgttggaagtgcttgaagtgaaacctcctccaagtaaaaatgccgttgagcagattttgacattgcaggaggctatatccaagttagaaaattttctacagtctgcaaatattactcttctgaagttcagatctgtcttgtttgcctgtgttcctaaggccactgaagtagttgcagctgtacttattgtcgcagctgcatttcttgtcttcctaccttccaggcctctgatacagatgttagtcctggaaatgtacacaagggagatgcccctaaggaaacagaacactgaaaaattccgcaggcgaattagagagtggtgggctcgcattccagctgcacctgtgcagatgatcagacctaatgaaagcaagaaaaagagatgatcatgggcttttagggttgatttggtgacaaggggatcccgagaggattggaggggattaaggggaaagtaaattaatttccccctcaatcccctccgatcctcccatgatcccgggtcaccaaatcaacccttaggcttttggcagacctagtgccggaggcacccacaccgagaagggacaaactgaggaattctttccttcacaaatgcggagacactgctttgaacccgtgacctagcacctgccactgcactaggccagaatttaagatctcaaagagagaaaaaatagcccacatattctgttccctagtttgaacctaatcagctaacttaggcttcttcggttcgctctcaatccatgtggattaagtgtgattaggtgtgattaaattccaagcaagtcaaacttcttatttttttccagtcatatccaattcatatgtaatgggaataaccgaacaaggccttatgtagattttgacctactaagaaaaactagccccggtaaccagtgtatagcatcatgtcgctatgagtgtaaaatgatgactgcagaagaattattcatttttcttgcaagccatttcttagaagtttctagagctctgatgtgttctagaagaatttatcagatgtttgaactgatggttggaatgtaaggtggtttcatatggattctttgaacttatttgctctagtaaaattgatgtatccccacagcacattggagaagcagctgaaagtgtgtcgtgtagtccagtttagcactttatcttcaaaatttaaggtgttttggttttgttaagctaagtttgagcaagtttatggaaaaaagatgcaacattttcc

SEQ ID NO: 44065 - DNA, 3216 bp, Zea Mays
gtttcgtcgacaagccagcagcccagcacgcaaagggcactgtgccgttacggcgcggcggagccggaaactcccgagtcgcgtgacagtaaacgaaggcacgaacgcgactcttccatccaactgtcgaagcaaccgaatcggggacaaccgagggcgagggcggccggcatggggatcgtggaggcgtggatgcgggagaagcccatccgcacattcctagcccgcctcgcccagcgccgggcggcggctgccgccgccttcctcgcttccccctctgccaccacggtcatcgatggcgagggcggcagcgacgggagcatcccgcagctttcctccgttgccaactccgtcgtgtcccgctgctcaaggattcttgctctttcaattgagaacttacagcgaagctttgagactgattttccacacagttgtaatgaggctaatacatatgcaagagaccttttagagtattgctgccataaagctcttcatgaagttacaacacgtccagattatttggccgataagaatcttcgccgcttgatgtttgatatgatgcttgcatgggaaactccaggtgctcaggatgtgtcagtagataatggttctattgtgcgtgattcccttgagattgaagatgaggatgaggggtcaattttttatgcaaattccacaagattggctgctcaagttgatgacaagaagacagtcgggttaagtgcttttgcacgaatagcaccttcatgcccaataatagctgacctggttactgtacgcaatctgtttgacgcacttacaagttcatctggaggccgattgcattttcttgtttatgacaagtatctcaagagtttagacagggaattgaggtctgtgaaaggtatcatgcaatcatcacttgcctcaagttttcatcttgatgctggagaatgcatattagctattgatggagacaagcccattcaaccggtactgcaacatattggaatatcagcatggccaggaagattggtcctcacaacacatgctctttattttcagagtattagagtgggatatggtgataagattgttaaatacgacctatcaacagattcaaatcaagtgattaagcgtgatttgactggaccactgggtgtccgcctctttgataaagctgtgatgtacaaatcaagcactttaaccaatttatttcgatttctttgaattaggaggcccttcacgaagagactattggttagcaatcacccgtgaagtattgcaggtgaacagatttattaggaagttcaatcttggagatgttcagaaagcagaagcactctcaaaagctatcctaggcattttgagatactctgctgtcaaagaagcttttcatattgctccttctcactttaagacaacacttacttttagcttagcagaaaagcttccgaaaggagatatggtcttagaagcactgtataacaattatttccaactcttggactcttcattgagacatttggcaattgattctgcagtcgatagaatgtcggagaaccattctataccattttctttgtatgctctctctagaatgggttttcttctgctgaagacaaacgataaatctgaaaaggaaatgagcttttgtgctgtttgctttggtgtaacaaaatctttggaggctgccctagaagagtcaatttgttactctgagagaatagagtcagcacgtgctacagttgatcaagtaaaggtagaaggcgttgatgcaaatcttgccctcatgcaggagttactcttccctttaattcaagcaggcaagattgtttactctctcagccaatgggaagatcctttgaaatcacttctattcttagcttttatgttgtatgctattcaaaggggtctcatcagttacatcgcaccctttgttttcttaacttttgctattatcatgctttggcataagtatattggagacggaaaattgttggaagtgcttgaagtgaaacctcctccaagtaaaaatgccgttgagcagattttgacattgcaggaggctatatccaagttagaaaattttctacagtctgcaaatattactcttctgaagttcagatctgtcttgtttgcctgtgttcctaaggccactgaagtagttgcagctgtacttattgtcgcagctgcatttcttgtcttcctaccttccaggcctctgatacagatgttagtcctggaaatgtacacaagggagatgcccctaaggaaacagaacactgaaaaattccgcaggcgaattagagagtggtgggctcgcattccagctgcacctgtgcagatgatcagacctaatgaaagcaagaaaaagagatgatcatgggcttttagggttgatttggtgacaaggggatcccgagaggattggaggggattaaggggaaagtaaattaatttccccctcaatcccctccgatcctcccatgatcccgggtcaccaaatcaacccttaggcttttggcagacctagtgccggaggcacccacaccgagaagggacaaactgaggaattctttccttcacaaatgcggagacactgctttgaacccgtgacctagcacctgccactgcactaggccagaatttaagatctcaaagagagaaaaaatagcccacatattctgttccctagtttgaacctaatcagctaacttaggcttcttcggttcgctctcaatccatgtggattaagtgtgattaggtgtgattaaattccaagcaagtcaaacttcttatttttttccagtcatatccaattcatatgtaatgggaataaccgaacaaggccttatgtagattttgacctactaagaaaaactagccccggtaaccagtgtatagcatcatgtcgctatgagtgtaaaatgatgactgcagaagaattattcatttttcttgcaagccatttcttagaagtttctagagctctgatgtgttctagaagaatttatcagatgtttgaactgatggttggaatgtaaggtggtttcatatggattctttgaacttatttgctctagtaaaattgatgtatccccacagcacattggagaagcagctgaaagtgtgtcgtgtagtccagtttagcactttatcttcaaaatttaaggtgttttggttttgttaagctaagtttgagcaagtttatggaaaaaagatgcaacattttcc

SEQ ID NO: 44066 - DNA, 3006 bp, Zea Mays
gtttcgtcgacaagccagcagcccagcacgcaaagggcactgtgccgttacggcgcggcggagccggaaactcccgagtcgcgtgacagtaaacgaaggcacgaacgcgactcttccatccaactgtcgaagcaaccgaatcggggacaaccgagggcgagggcggccggcatggggatcgtggaggcgtggatgcgggagaagcccatccgcacattcctagcccgcctcgcccagcgccgggcggcggctgccgccgccttcctcgcttccccctctgccaccacggtcatcgatggcgagggcggcagcgacgggagcatcccgcagctttcctccgttgccaactccgtcgtgtcccgctgctcaaggattcttgctctttcaattgagaacttacagcgaagctttgagactgattttccacacagttgtaatgaggctaatacatatgcaagagaccttttagagtattgctgccataaagctcttcatgaagttacaacacgtccagattatttggccgataagaatcttcgccgcttgatgtttgatatgatgcttgcatgggaaactccaggtgctcaggatgtgtcagtagataatggttctattgtgcgtgattcccttgagattgaagatgaggatgaggggtcaattttttatgcaaattccacaagattggctgctcaagttgatgacaagaagacagtcgggttaagtgcttttgcacgaatagcaccttcatgcccaataatagctgacctggttactgtacgcaatctgtttgacgcacttacaagttcatctggaggccgattgcattttcttgtttatgacaagtatctcaagagtttagacagggaattgaggtctgtgaaaggtatcatgcaatcatcacttgcctcaagttttcatcttgatgctggagaatgcatattagctattgatggagacaagcccattcaaccggtactgcaacatattggaatatcagcatggccaggaagattggtcctcacaacacatgctctttattttcagagtattagagtgggatatggtgataagattgttaaatacgacctatcaacagattcaaatcaagtgattaagcgtgatttgactggaccactgggtgtccgcctctttgataaagctgtgatgtacaaatcaagcactttgacagaaccaatttatttcgatttctttgaattaggaggcccttcacgaagagactattggttagcaatcacccgtgaagtattgcagcagaaaagcttccgaaaggagatatggtcttagaagcactgtataacaattatttccaactcttggactcttcattgagacatttggcaattgattctgcagtcgatagaatgtcggagaaccattctataccattttctttgtatgctctctctagaatgggttttcttctgctgaagacaaacgataaatctgaaaaggaaatgagcttttgtgctgtttgctttggtgtaacaaaatctttggaggctgccctagaagagtcaatttgttactctgagagaatagagtcagcacgtgctacagttgatcaagtaaaggtagaaggcgttgatgcaaatcttgccctcatgcagatcctttgaaatcacttctattcttagcttttatgttgtatgctattcaaaggggtctcatcagttacatcgcaccctttgttttcttaacttttgctattatcatgctttggcataagtatattggagacggaaaattgttggaagtgcttgaagtgaaacctcctccaagtaaaaatgccgttgagcagattttgacattgcaggaggctatatccaagttagaaaattttctacagtctgcaaatattactcttctgaagttcagatctgtcttgtttgcctgtgttcctaaggccactgaagtagttgcagctgtacttattgtcgcagctgcatttcttgtcttcctaccttccaggcctctgatacagatgttagtcctggaaatgtacacaagggagatgcccctaaggaaacagaacactgaaaaattccgcaggcgaattagagagtggtgggctcgcattccagctgcacctgtgcagatgatcagacctaatgaaagcaagaaaaagagatgatcatgggcttttagggttgatttggtgacaaggggatcccgagaggattggaggggattaaggggaaagtaaattaatttccccctcaatcccctccgatcctcccatgatcccgggtcaccaaatcaacccttaggcttttggcagacctagtgccggaggcacccacaccgagaagggacaaactgaggaattctttccttcacaaatgcggagacactgctttgaacccgtgacctagcacctgccactgcactaggccagaatttaagatctcaaagagagaaaaaatagcccacatattctgttccctagtttgaacctaatcagctaacttaggcttcttcggttcgctctcaatccatgtggattaagtgtgattaggtgtgattaaattccaagcaagtcaaacttcttatttttttccagtcatatccaattcatatgtaatgggaataaccgaacaaggccttatgtagattttgacctactaagaaaaactagccccggtaaccagtgtatagcatcatgtcgctatgagtgtaaaatgatgactgcagaagaattattcatttttcttgcaagccatttcttagaagtttctagagctctgatgtgttctagaagaatttatcagatgtttgaactgatggttggaatgtaaggtggtttcatatggattctttgaacttatttgctctagtaaaattgatgtatccccacagcacattggagaagcagctgaaagtgtgtcgtgtagtccagtttagcactttatcttcaaaatttaaggtgttttggttttgttaagctaagtttgagcaagtttatggaaaaaagatgcaacattttcc

SEQ ID NO: 44067 - DNA, 3029 bp, Zea Mays
gtttcgtcgacaagccagcagcccagcacgcaaagggcactgtgccgttacggcgcggcggagccggaaactcccgagtcgcgtgacagtaaacgaaggcacgaacgcgactcttccatccaactgtcgaagcaaccgaatcggggacaaccgagggcgagggcggccggcatggggatcgtggaggcgtggatgcgggagaagcccatccgcacattcctagcccgcctcgcccagcgccgggcggcggctgccgccgccttcctcgcttccccctctgccaccacggtcatcgatggcgagggcggcagcgacgggagcatcccgcagctttcctccgttgccaactccgtcgtgtcccgctgctcaaggattcttgctctttcaattgagaacttacagcgaagctttgagactgattttccacacagttgtaatgaggctaatacatatgcaagagaccttttagagtattgctgccataaagctcttcatgaagttacaacacgtccagattatttggccgataagaatcttcgccgcttgatgtttgatatgatgcttgcatgggaaactccaggtgctcaggatgtgtcagtagataatggttctattgtgcgtgattcccttgagattgaagatgaggatgaggggtcaattttttatgcaaattccacaagattggctgctcaagttgatgacaagaagacagtcgggttaagtgcttttgcacgaatagcaccttcatgcccaataatagctgacctggttactgtacgcaatctgtttgacgcacttacaagttcatctggaggccgattgcattttcttgtttatgacaagtatctcaagagtttagacagggaattgaggtctgtgaaaggtatcatgcaatcatcacttgcctcaagttttcatcttgatgctggagaatgcatattagctattgatggagacaagcccattcaaccggtactgcaacatattggaatatcagcatggccagagtattagagtgggatatggtgataagattgttaaatacgacctatcaacagattcaaatcaagtgattaagcgtgatttgactggaccactgggtgtccgcctctttgataaagctgtgatgtacaaatcaagcactttgacagaaccaatttatttcgatttctttgaattaggaggcccttcacgaagagactattggttagcaatcacccgtgaagtattgcaggtgaacagatttattaggaagttcaatcttggagatgttcagaaagcagaagcactctcaaaagctatcctaggcattttgagatactctgctgtcaaagaagcttttcatattgctccttctcactttaagacaacacttacttttagcttagcagaaaagcttccgaaaggagatatggtcttagaagcactgtataacaattatttccaactcttggactcttcattgagacatttggcaattgattctgcagtcgatagaatgtcggagaaccattctataccattttctttgtatgctctctctagaatgggttttcttctgctgaagacaaacgataaatctgaaaaggaaatgagcttttgtgctgtttgctttggtgtaacaaaatctttggaggctgccctagaagagtcaatttgttactctgagagaatagagtcagcacgtgctacagttgatcaagtaaaggtagaaggcgttgatgcaaatcttgccctcatgcaggagttactcttccctttaattcaagcaggcaagattgtttactctctcagccaatgggaagatcctttgaaatcacttctattcttagcttttatgttgtatgctattcaaaggaggctatatccaagttagaaaattttctacagtctgcaaatattactcttctgaagttcagatctgtcttgtttgcctgtgttcctaaggccactgaagtagttgcagctgtacttattgtcgcagctgcatttcttgtcttcctaccttccaggcctctgatacagatgttagtcctggaaatgtacacaagggagatgcccctaaggaaacagaacactgaaaaattccgcaggcgaattagagagtggtgggctcgcattccagctgcacctgtgcagatgatcagacctaatgaaagcaagaaaaagagatgatcatgggcttttagggttgatttggtgacaaggggatcccgagaggattggaggggattaaggggaaagtaaattaatttccccctcaatcccctccgatcctcccatgatcccgggtcaccaaatcaacccttaggcttttggcagacctagtgccggaggcacccacaccgagaagggacaaactgaggaattctttccttcacaaatgcggagacactgctttgaacccgtgacctagcacctgccactgcactaggccagaatttaagatctcaaagagagaaaaaatagcccacatattctgttccctagtttgaacctaatcagctaacttaggcttcttcggttcgctctcaatccatgtggattaagtgtgattaggtgtgattaaattccaagcaagtcaaacttcttatttttttccagtcatatccaattcatatgtaatgggaataaccgaacaaggccttatgtagattttgacctactaagaaaaactagccccggtaaccagtgtatagcatcatgtcgctatgagtgtaaaatgatgactgcagaagaattattcatttttcttgcaagccatttcttagaagtttctagagctctgatgtgttctagaagaatttatcagatgtttgaactgatggttggaatgtaaggtggtttcatatggattctttgaacttatttgctctagtaaaattgatgtatccccacagcacattggagaagcagctgaaagtgtgtcgtgtagtccagtttagcactttatcttcaaaatttaaggtgttttggttttgttaagctaagtttgagcaagtttatggaaaaaagatgcaacattttcc

SEQ ID NO: 44068 - DNA, 2992 bp, Zea Mays
gtccttgtttcgtcgacaagccagcagcccagcacgcaaagggcactgtgccgttacggcgcggcggagccggaaactcccgagtcgcgtgacagtaaacgaaggcacgaacgcgactcttccatccaactgtcgaagcaaccgaatcggggacaaccgagggcgagggcggccggcatggggatcgtggaggcgtggatgcgggagaagcccatccgcacattcctagcccgcctcgcccagcgccgggcggcggctgccgccgccttcctcgcttccccctctgccaccacggtcatcgatggcgagggcggcagcgacgggagcatcccgcagctttcctccgttgccaactccgtcgtgtcccgctgctcaagggttctattgtgcgtgattcccttgagattgaagatgaggatgaggggtcaattttttatgcaaattccacaagattggctgctcaagttgatgacaagaagacagtcgggttaagtgcttttgcacgaatagcaccttcatgcccaataatagctgacctggttactgtacgcaatctgtttgacgcacttacaagttcatctggaggccgattgcattttcttgtttatgacaagtatctcaagagtttagacagggaattgaggtctgtgaaaggtatcatgcaatcatcacttgcctcaagttttcatcttgatgctggagaatgcatattagctattgatggagacaagcccattcaaccggtactgcaacatattggaatatcagcatggccaggaagattggtcctcacaacacatgctctttattttcagagtattagagtgggatatggtgataagattgttaaatacgacctatcaacagattcaaatcaagtgattaagcgtgatttgactggaccactgggtgtccgcctctttgataaagctgtgatgtacaaatcaagcactttgacagaaccaatttatttcgatttctttgaattaggaggcccttcacgaagagactattggttagcaatcacccgtgaagtattgcaggtgaacagatttattaggaagttcaatcttggagatgttcagaaagcagaagcactctcaaaagctatcctaggcattttgagatactctgctgtcaaagaagcttttcatattgctccttctcactttaagacaacacttacttttagcttagcagaaaagcttccgaaaggagatatggtcttagaagcactgtataacaattatttccaactcttggactcttcattgagacatttggcaattgattctgcagtcgatagaatgtcggagaaccattctataccattttctttgtatgctctctctagaatgggttttcttctgctgaagacaaacgataaatctgaaaaggaaatgagcttttgtgctgtttgctttggtgtaacaaaatctttggaggctgccctagaagagtcaatttgttactctgagagaatagagtcagcacgtgctacagttgatcaagtaaaggtagaaggcgttgatgcaaatcttgccctcatgcaggagttactcttccctttaattcaagcaggcaagattgtttactctctcagccaatgggaagatcctttgaaatcacttctattcttagcttttatgttgtatgctattcaaaggggtctcatcagttacatcgcaccctttgttttcttaacttttgctattatcatgctttggcataagtatattggagacggaaaattgttggaagtgcttgaagtgaaacctcctccaagtaaaaatgccgttgagcagattttgacattgcaggaggctatatccaagttagaaaattttctacagtctgcaaatattactcttctgaagttcagatctgtcttgtttgcctgtgttcctaaggccactgaagtagttgcagctgtacttattgtcgcagctgcatttcttgtcttcctaccttccaggcctctgatacagatgttagtcctggaaatgtacacaagggagatgcccctaaggaaacagaacactgaaaaattccgcaggcgaattagagagtggtgggctcgcattccagctgcacctgtgcagatgatcagacctaatgaaagcaagaaaaagagatgatcatgggcttttagggttgatttggtgacaaggggatcccgagaggattggaggggattaaggggaaagtaaattaatttccccctcaatcccctccgatcctcccatgatcccgggtcaccaaatcaacccttaggcttttggcagacctagtgccggaggcacccacaccgagaagggacaaactgaggaattctttccttcacaaatgcggagacactgctttgaacccgtgacctagcacctgccactgcactaggccagaatttaagatctcaaagagagaaaaaatagcccacatattctgttccctagtttgaacctaatcagctaacttaggcttcttcggttcgctctcaatccatgtggattaagtgtgattaggtgtgattaaattccaagcaagtcaaacttcttatttttttccagtcatatccaattcatatgtaatgggaataaccgaacaaggccttatgtagattttgacctactaagaaaaactagccccggtaaccagtgtatagcatcatgtcgctatgagtgtaaaatgatgactgcagaagaattattcatttttcttgcaagccatttcttagaagtttctagagctctgatgtgttctagaagaatttatcagatgtttgaactgatggttggaatgtaaggtggtttcatatggattctttgaacttatttgctctagtaaaattgatgtatccccacagcacattggagaagcagctgaaagtgtgtcgtgtagtccagtttagcactttatcttcaaaatttaaggtgttttggttttgttaagctaagtttgagcaagtttatggaaaaaagatgcaacattttcc

SEQ ID NO: 44069 - DNA, 3207 bp, Zea Mays
ccggctcccagactcccagtccttgtttcgtcgacaagccagcagcccagcacgcaaagggcactgtgccgttacggcgcggcggagccggaaactcccgagtcgcgtgacagtaaacgaaggcacgaacgcgactcttccatccaactgtcgaagcaaccgaatcggggacaaccgagggcgagggcggccggcatggggatcgtggaggcgtggatgcgggagaagcccatccgcacattcctagcccgcctcgcccagcgccgggcggcggctgccgccgccttcctcgcttccccctctgccaccacggtcatcgatggcgagggcggcagcgacgggagcatcccgcagctttcctccgttgccaactccgtcgtgtcccgctgctcaaggattcttgctctttcaattgagaacttacagcgaagctttgagactgattttccacacagttgtaatgaggctaatacatatgcaagagaccttttagagtattgctgccataaagctcttcatgaagttacaacacgtccagattatttggccgataagaatcttcgccgcttgatgtttgatatgatgcttgcatgggaaactccaggtgctcaggatgtgtcagtagataatggttctattgtgcgtgattcccttgagattgaagatgaggatgaggggtcaattttttatgcaaattccacaagattggctgctcaagttgatgacaagaagacagtcgggttaagtgcttttgcacgaatagcaccttcatgcccaataatagctgacctggttactgtacgcaatctgtttgacgcacttacaagttcatctggaggccgattgcattttcttgtttatgacaagtatctcaagagtttagacagggaattgaggtctgtgaaaggtatcatgcaatcatcacttgcctcaagttttcatcttgatgctggagaatgcatattagctattgatggagacaagcccattcaaccggtactgcaacatattggaatatcagcatggccagagtattagagtgggatatggtgataagattgttaaatacgacctatcaacagattcaaatcaagtgattaagcgtgatttgactggaccactgggtgtccgcctctttgataaagctgtgatgtacaaatcaagcactttgacagaaccaatttatttcgatttctttgaattaggaggcccttcacgaagagactattggttagcaatcacccgtgaagtattgcaggtgaacagatttattaggaagttcaatcttggagatgttcagaaagcagaagcactctcaaaagctatcctaggcattttgagatactctgctgtcaaagaagcttttcatattgctccttctcactttaagacaacacttacttttagcttagcagaaaagcttccgaaaggagatatggtcttagaagcactgtataacaattatttccaactcttggactcttcattgagacatttggcaattgattctgcagtcgatagaatgtcggagaaccattctataccattttctttgtatgctctctctagaatgggttttcttctgctgaagacaaacgataaatctgaaaaggaaatgagcttttgtgctgtttgctttggtgtaacaaaatctttggaggctgccctagaagagtcaatttgttactctgagagaatagagtcagcacgtgctacagttgatcaagtaaaggtagaaggcgttgatgcaaatcttgccctcatgcaggagttactcttccctttaattcaagcaggcaagattgtttactctctcagccaatgggaagatcctttgaaatcacttctattcttagcttttatgttgtatgctattcaaaggggtctcatcagttacatcgcaccctttgttttcttaacttttgctattatcatgctttggcataagtatattggagacggaaaattgttggaagtgcttgaagtgaaacctcctccaagtaaaaatgccgttgagcagattttgacattgcaggaggctatatccaagttagaaaattttctacagtctgcaaatattactcttctgaagttcagatctgtcttgtttgcctgtgttcctaaggccactgaagtagttgcagctgtacttattgtcgcagctgcatttcttgtcttcctaccttccaggcctctgatacagatgttagtcctggaaatgtacacaagggagatgcccctaaggaaacagaacactgaaaaattccgcaggcgaattagagagtggtgggctcgcattccagctgcacctgtgcagatgatcagacctaatgaaagcaagaaaaagagatgatcatgggcttttagggttgatttggtgacaaggggatcccgagaggattggaggggattaaggggaaagtaaattaatttccccctcaatcccctccgatcctcccatgatcccgggtcaccaaatcaacccttaggcttttggcagacctagtgccggaggcacccacaccgagaagggacaaactgaggaattctttccttcacaaatgcggagacactgctttgaacccgtgacctagcacctgccactgcactaggccagaatttaagatctcaaagagagaaaaaatagcccacatattctgttccctagtttgaacctaatcagctaacttaggcttcttcggttcgctctcaatccatgtggattaagtgtgattaggtgtgattaaattccaagcaagtcaaacttcttatttttttccagtcatatccaattcatatgtaatgggaataaccgaacaaggccttatgtagattttgacctactaagaaaaactagccccggtaaccagtgtatagcatcatgtcgctatgagtgtaaaatgatgactgcagaagaattattcatttttcttgcaagccatttcttagaagtttctagagctctgatgtgttctagaagaatttatcagatgtttgaactgatggttggaatgtaaggtggtttcatatggattctttgaacttatttgctctagtaaaattgatgtatccccacagcacattggagaagcagctgaaagtgtgtcgtgtagtccagtttagcactttatcttcaaaatttaaggtgttttggttttgttaagctaagtttgagcaagtttatggaaaaaagatgcaacattttcc

SEQ ID NO: 44070 - DNA, 3096 bp, Zea Mays
ccggctcccagactcccagtccttgtttcgtcgacaagccagcagcccagcacgcaaagggcactgtgccgttacggcgcggcggagccggaaactcccgagtcgcgtgacagtaaacgaaggcacgaacgcgactcttccatccaactgtcgaagcaaccgaatcggggacaaccgagggcgagggcggccggcatggggatcgtggaggcgtggatgcgggagaagcccatccgcacattcctagcccgcctcgcccagcgccgggcggcggctgccgccgccttcctcgcttccccctctgccaccacggtcatcgatggcgagggcggcagcgacgggagcatcccgcagctttcctccgttgccaactccgtcgtgtcccgctgctcaaggattcttgctctttcaattgagaacttacagcgaagctttgagactgattttccacacagttgtaatgaggctaatacatatgcaagagaccttttagagtattgctgccataaagctcttcatgaagttacaacacgtccagattatttggccgataagaatcttcgccgcttgatgtttgatatgatgcttgcatgggaaactccaggtgctcaggatgtgtcagtagataatggttctattgtgcgtgattcccttgagattgaagatgaggatgaggggtcaattttttatgcaaattccacaagattggctgctcaagttgatgacaagaagacagtcgggttaagtgcttttgcacgaatagcaccttcatgcccaataatagctgacctggttactgtacgcaatctgtttgacgcacttacaagttcatctggaggccgattgcattttcttgtttatgacaagtatctcaagagtttagacagggaattgaggtctgtgaaaggtatcatgcaatcatcacttgcctcaagttttcatcttgatgctggagaatgcatattagctattgatggagacaagcccattcaaccggtactgcaacatattggaatatcagcatggccaggaagattggtcctcacaacacatgctctttattttcagagtattagagtgggatatggtgataagattgttaaatacgacctatcaacagattcaaatcaagtgattaagcgtgatttgactggaccactgggtgtccgcctctttgataaagctgtgatgtacaaatcaagcactttgacagaaccaatttatttcgatttctttgaattaggaggcccttcacgaagagactattggttagcaatcacccgtgaagtattgcagcttagcagaaaagcttccgaaaggagatatggtcttagaagcactgtataacaattatttccaactcttggactcttcattgagacatttggcaattgattctgcagtcgatagaatgtcggagaaccattctataccattttctttgtatgctctctctagaatgggttttcttctgctgaagacaaacgataaatctgaaaaggaaatgagcttttgtgctgtttgctttggtgtaacaaaatctttggaggctgccctagaagagtcaatttgttactctgagagaatagagtcagcacgtgctacagttgatcaagtaaaggtagaaggcgttgatgcaaatcttgccctcatgcaggagttactcttccctttaattcaagcaggcaagattgtttactctctcagccaatgggaagatcctttgaaatcacttctattcttagcttttatgttgtatgctattcaaaggggtctcatcagttacatcgcaccctttgttttcttaacttttgctattatcatgctttggcataagtatattggagacggaaaattgttggaagtgcttgaagtgaaacctcctccaagtaaaaatgccgttgagcagattttgacattgcaggaggctatatccaagttagaaaattttctacagtctgcaaatattactcttctgaagttcagatctgtcttgtttgcctgtgttcctaaggccactgaagtagttgcagctgtacttattgtcgcagctgcatttcttgtcttcctaccttccaggcctctgatacagatgttagtcctggaaatgtacacaagggagatgcccctaaggaaacagaacactgaaaaattccgcaggcgaattagagagtggtgggctcgcattccagctgcacctgtgcagatgatcagacctaatgaaagcaagaaaaagagatgatcatgggcttttagggttgatttggtgacaaggggatcccgagaggattggaggggattaaggggaaagtaaattaatttccccctcaatcccctccgatcctcccatgatcccgggtcaccaaatcaacccttaggcttttggcagacctagtgccggaggcacccacaccgagaagggacaaactgaggaattctttccttcacaaatgcggagacactgctttgaacccgtgacctagcacctgccactgcactaggccagaatttaagatctcaaagagagaaaaaatagcccacatattctgttccctagtttgaacctaatcagctaacttaggcttcttcggttcgctctcaatccatgtggattaagtgtgattaggtgtgattaaattccaagcaagtcaaacttcttatttttttccagtcatatccaattcatatgtaatgggaataaccgaacaaggccttatgtagattttgacctactaagaaaaactagccccggtaaccagtgtatagcatcatgtcgctatgagtgtaaaatgatgactgcagaagaattattcatttttcttgcaagccatttcttagaagtttctagagctctgatgtgttctagaagaatttatcagatgtttgaactgatggttggaatgtaaggtggtttcatatggattctttgaacttatttgctctagtaaaattgatgtatccccacagcacattggagaagcagctgaaagtgtgtcgtgtagtccagtttagcactttatcttcaaaatttaaggtgttttggttttgttaagctaagtttgagcaagtttatggaaaaaagatgcaacattttcc

SEQ ID NO: 44071 - DNA, 1622 bp, Zea Mays
cacggcctcaacacccagccgccgccgcccggcagttccgtctcccttcttcgccttctcagtcaagctaaaacctcgctcgcctcgtccagtcagacatggcatgaaaccctagggcgcccgcctcccctccgcaatttgccattgcgctccgcgatgcaggcatccgcgcgcctctcctactccgtggcctccaggaaagtgatcgcgggtgtctctatcgcgcccccacggtcgtgctatcggacctcccgagggaaggcgcatgcggcgccgctgcctgcgcaggagccgccaccgaaggggctgaagaggattacaaagcaggagcggagggttcgaatagtggaatttgttgagaatgcagttatagggcttcaaacgaaggcaagtttcctactgtaaaaaatatctgtcagcaaattggaggtggttactatgcagtgcgtgagttacttcaagaaatgaaatataatcatgcaaaattaccactgggtaatgctaaggcagctccacttcaaacaacagttgaagtcactgaacaccccatgcctaaggatgaagctagagtggttgaaagtcaaggaatactagaagtttctgagcactccatggccaaggatgatgctgaagtggctcaacctcaaggaacagctgaagtttttgagcacttcttatctaaagatgaaggtaaggtggctcagtgtcaaggaacgtttcactttcctgagcactcaagacctaaggatgacagtggaaagactgctcgacatgatatggacacttcagaaacctgtaagactgcagatgccccagctttatctgatctaacagagaatgagggaattttatctgaccaaacagagagtgaggacaaaccagatcctggaaatcagcaaagagaaatagaagctaacaaatttgatttgaagaatttcgaaaaaaatctgaatgcaaatgattcaaacgcatcagatcaaagtggaagtgatacggtgaatgaggcaaagacacatgccaggggagacaacccaaagcttgaggaatccgcgaacacgggtcttttgggcagcctgagatcttttgcttatggcatcagaaacttctggaaaaatatgtaaatctgttgtttttttgccgtgagtcacctaaaattgaaaaggctacagaatcgagaacttgcctctttgtcacgggcttttggttgcataggatcggagaggagagggcttttggttggagaggattgatggtttgtttgggagcaaggggagagcctctccaattcacttgctcccaaacaaaacaagccatgagacaatcccttgctattactagtaagagattatgtctctaaattcccttcaatccttatgcaataaaagccccaagcgtttgtgatactggatcaatttgtaaagttctttttgtgtcacaccaaatggtcatgttccgctatgacgtttcgataaagctagataggagtattattagtactgcccctgttgtggcccaagttcacatggtatttaagtgttggtggtatctaactgtgtttgtcaattgttgtgcacacattgaaggccctatttagaagtaaaatattttttatagtttttagg

SEQ ID NO: 44072 - DNA, 1089 bp, Zea Mays
cacggcctcaacacccagccgccgccgcccggcagttccgtctcccttcttcgccttctcagtcaagctaaaacctcgctcgcctcgtccagtcagacatggcatgaaaccctagggcgcccgcctcccctccgcaatttgccattgcgctccgcgatgcaggcatccgcgcgcctctcctactccgtggcctccaggaaagtgatcgcgggtgtctctatcgcgcccccacggtcgtgctatcggacctcccgagggaaggcgcatgcggcgccgctgcctgcgcaggagccgccaccgaaggggctgaagaggattacaaagcaggagcggagggttcgaatagtggaatttgttgagaattatagggcttcaaacgaagttgaagtcactgaacaccccatgcctaaggatgaagctagagtggttgaaagtcaaggaatactagaagtttctgagcactccatggccaaggatgatgctgaagtggctcaacctcaaggaacagctgaagtttttgagcacttcttatctaaagatgaaggtaaggtggctcagtgtcaaggaacgtttcactttcctgagcactcaagacctaaggatgacagtggaaagactgctcgacatgatatggacacttcagaaacctgtaagactgcagatgccccagctttatctgatctaacagagaatgagggaattttatctgaccaaacagagagtgaggacaaaccagatcctggaaatcagcaaagagaaatagaagctaacaaatttgatttgaagaatttcgaaaaaaatctgaatgcaaatgattcaaacgcatcagatcaaagtggaagtgatacggtgaatgaggcaaagacacatgccagttcttttgttatgatcaactacttggacttggcaagaggactgcttctgccacttagtgtgtacaattggttaattcaggctgtggaagatgaattttcccttagacttaggtagagaattgctattaactaactggtcaactgacacgtagttcctggattccctggaaatatagctttgccaaacagaacttaaattccatcaatttgtgcc

SEQ ID NO: 44073 - DNA, 1273 bp, Zea Mays
gtaatctttgtttttggggggaatgcagagcccttattcttggttgggccacggcctcaacacccagccgccgccgcccggcagttccgtctcccttcttcgccttctcagtcaagctaaaacctcgctcgcctcgtccagtcagacatggcatgaaaccctagggcgcccgcctcccctccgcaatttgccattgcgctccgcgatgcaggcatccgcgcgcctctcctactccgtggcctccaggaaagtgatcgcgggtgtctctatcgcgcccccacggtcgtgctatcggacctcccgagggaaggcgcatgcggcgccgctgcctgcgcaggagccgccaccgaaggggctgaagaggattacaaagcaggagcggagggttcgaatagtggaatttgttgagaaggcttcaaacgaaggcaagtttcctactgtaaaaaatatctgtcagcaaattggaggtggttactatgcagtgcgtgagttacttcaagaaatgaaatataatcatgcaaaattaccactgggtaatgctaaggcagctccacttcaaacaacagttgaagtcactgaacaccccatgcctaaggatgaagctagagtggttgaaagtcaaggaatactagaagtttctgagcactccatggccaaggatgatgctgaagtggctcaacctcaaggaacagctgaagtttttgagcacttcttatctaaagatgaaggtaaggtggctcagtgtcaaggaacgtttcactttcctgagcactcaagacctaaggatgacagtggaaagactgctcgacatgatatggacacttcagaaacctgtaagactgcagatgccccagctttatctgatctaacagagaatgagggaattttatctgaccaaacagagagtgaggacaaaccagatcctggaaatcagcaaagagaaatagaagctaacaaatttgatttgaagaatttcgaaaaaaatctgaatgcaaatgattcaaacgcatcagatcaaagtggaagtgatacggtgaatgaggcaaagacacatgccagttcttttgttatgatcaactacttggacttggcaagaggactgcttctgccacttagtgtgtacaattggttaattcaggctgtggaagatgaattttcccttagacttaggtagagaattgctattaactaactggtcaactgacacgtagttcctggattccctggaaatatagctttgccaaacagaacttaaattccatcaatttgtgcc

SEQ ID NO: 44074 - DNA, 1897 bp, Zea Mays
ctcatcacaggcgcgcggtacgggttacggagcactaactaacacagagcacgacgcacgctgacacaaaaattatttcgcctaagcgcacctccccacgcgtgcttatataccacccaagtcaccagcgcaccaagtcacagtccaacggactctttccttcactccactccactcccagtcgcagagtcgcagtccgtaccgtagctcctcctgccaccagaacccaccatgggcctctgcttcagcaagaagaagccaccggccaagccgggaaaggtcgccgccgcggtctccgacgacaaggccaagaagagtccggcgcagcagcccaagagagcggcggcggcggcggcgaacaaggctgcggtgtccgccaaggacgccgcggtgcccggggaggagaagaggaggcggtcgggatcgcaagggccggcggccgagaagcagctgccggtagtgctggtgccgtcggcgccggtgcgcacgtccagctgcaccaaggaggaggtggacgcgatcctcatccagtgcggccggctcagccggagctcgtccggggccggaagggcggcgtcgaccggcgacacggcagcgtgcggcggcgggcaccgcaggaggtcgagctctcccgcgaggatggcagcggggacggggaacgagaatgctggagcttgcggaccggcggcggggccggcgccggtgctcagccggagctcgtccaggaagaacgagcagtccccgtacaggcgctgccccatggccgagctcgacgacaacgctctccgtaacagcagcaaccacggtgccaggccgcacaagaaatctgctgagactgccgtcgccgcgacgcccaggaaggctacggggcgtgggaaggagccgacggcggtgaaagaaaagctggagatcacagaagcgtcagagacgagagcgcactcgtccaagacgtcgtcgaagacgaccacgacgcccacgctgagcgtcgtggccgagagcctgacccaaatgcccggtgcggcgcagccaggctgccgatcgcggcgggcttcgcgcgacttcgaccaaaaccccggctcgtacgccacacagctgctcgaagacatccacaactaccatcagcagtccacctccgccacgccggcgacgccgtccatctcgctcccggcgtgcgtcgccaaggcctgctccatcgtcgaggccgtggcggacctcaactcctcgtcgtcggagaaccgcgcctacgagcacgagcctggccactccgccgatgacaaaggctccgtcaacgcgccggtaggcagcggcagcgacggcttcgtcgagccgagcgccgccgcgcggaagcacctgctgccggcgcgggacgcccacgcggaaaccgagccccaggagtcggccgggagcaacagcgtctccggccacccgtggacgccctcctgggagcccacctcggccgagtccacggaccggacgtggagcaccggcgacgaggttgtcgagcagtccggcagtcacggcggccgctgcagcccgatgaacaggcaccaactgagcaagcagaggcagtgccagcccgagctcagtggccggtcccgcgccggctctggaaatgctaacggccagtaccgtgggcgcagcagcgctcatcgtgccagcggcagcgtggcgagcggacggtctggtgtccgagtcgtctcggcgaactcgtagtgtgggtagtagaaattgtagccagaggcaagatggattgctgctctgctccgtgtatgtgtttgtgtttctttgttagccatactttgttcggatgtgattcatggtgtgacattttgcgcgccatttcatgcatgcgttggttcgcttgtagccagaacttcacagcgttactgtttccttc

SEQ ID NO: 44075 - DNA, 248 bp, Zea Mays
tggacatcgccgcccactccatcgcctaatcatcctatcgtcgtgctccgtcgcgccctggttcctgttcttcgaccgaacgggcttcaaatcaagtttccagaggtgattgttcctttgttttagggttcttgttcttcgactgaacacgcttcaaatcaagcaatcttgtcctttcttggtgataccggtacgcgcaagaattatcatctacccaccatctatccaaggagaaaacgaagaggaag

SEQ ID NO: 44076 - DNA, 915 bp, Zea Mays
cacagacatggacatcgccgcccactccatcgcctaatcatcctatcgtcgtgctccgtcgcgccctgtagggttcctgttcttcgaccgaacgggcttcaaatcaagtttccagaggtgattgttcctttgttttagggttcttgttcttcgactgaacacgcttcaaatcaagcaatcttgtcctttcttggtgataccggtacgcgcaagaattatcatctacccaccatctatccaaggaggtaattacattttgccttccctacaaatttgcgtacaaatcaatttgttccatatgagaatgatggttcttctgcaatgttctatatgtcttccctactaattcaattgcctacaatattgcaaatggatcttctatcatgtttcatatgtctttccctactaattcaactgcctacaaactatggcttagctcacagagaccatctaccatgtgtttattgaacattctacttgctcccttgacctcttttggtcataccatagggtggtttttgtactggtcctcttggatcttaaattcccctcttcttattacaaagatgtgcagctctcctgcattttttcgagagagaaaaaatggttcatgacggcttgtgtgtatgttatttgctttccctgctaatacaactgcctataattttgcatagaaattaatttgtttaatatgcaaacagttcttgcaatgaccttagagaagactacatattgacttaacacctggaagcacactgttgctaagtgttgatgtatggtggttgaatgctacttagtatgtattgtagtctaaattcactctacaactggtatcaactattagggaaaaacaatattatctacttatattttggtttcttgcatacgcattgtatactcatatcatgtttaaat

SEQ ID NO: 44077 - DNA, 886 bp, Zea Mays
cgctccacagacatggacatcgccgcccactccatcgcctaatcatcctatcgtcgtgctccgtcgcgccctggttcctgttcttcgaccgaacgggcttcaaatcaagggttcttgttcttcgactgaacacgcttcaaatcaagcaatcttgtcctttcttggtgataccggtacgcgcaagaattatcatctacccaccatctatccaaggaggtaattacattttgccttccctacaaatttgcgtacaaatcaatttgttccatatgagaatgatggttcttctgcaatgttctatatgtcttccctactaattcaattgcctacaatattgcaaatggatcttctatcatgtttcatatgtctttccctactaattcaactgcctacaaactatggcttagctcacagagaccatctaccatgtgtttattgaacattctacttgctcccttgacctcttttggtcataccatagggtggtttttgtactggtcctcttggatcttaaattcccctcttcttattacaaagatgtgcagctctcctgcattttttcgagagagaaaaaatggttcatgacggcttgtgtgtatgttatttgctttccctgctaatacaactgcctataattttgcatagaaattaatttgtttaatatgcaaacagttcttgcaatgaccttagagaagactacatattgacttaacacctggaagcacactgttgctaagtgttgatgtatggtggttgaatgctacttagtatgtattgtagtctaaattcactctacaactggtatcaactattagggaaaaacaatattatctacttatattttggtttcttgcatacgcattgtatactcatatcatgtttaaat

SEQ ID NO: 44078 - DNA, 948 bp, Zea Mays
cttcattcccagctattctctctcgcccgccacgctccacagacatggacatcgccgcccactccatcgcctaatcatcctatcgtcgtgctccgtcgcgccctggttcctgttcttcgaccgaacgggcttcaaatcaagtttccagaggtgattgttcctttgttttagggttcttgttcttcgactgaacacgcttcaaatcaagcaatcttgtcctttcttggtgataccggtacgcgcaagaattatcatctacccaccatctatccaaggaggtaattacattttgccttccctacaaatttgcgtacaaatcaatttgttccatatgagaatgatggttcttctgcaatgttctatatgtcttccctactaattcaattgcctacaatattgcaaatggatcttctatcatgtttcatatgtctttccctactaattcaactgcctacaaactatggcttagctcacagagaccatctaccatgtgtttattgaacattctacttgctcccttgacctcttttggtcataccatagggtggtttttgtactggtcctcttggatcttaaattcccctcttcttattacaaagatgtgcagctctcctgcattttttcgagagagaaaaaatggttcatgacggcttgtgtgtatgttatttgctttccctgctaatacaactgcctataattttgcatagaaattaatttgtttaatatgcaaacagttcttgcaatgaccttagagaagactacatattgacttaacacctggaagcacactgttgctaagtgttgatgtatggtggttgaatgctacttagtatgtattgtagtctaaattcactctacaactggtatcaactattagggaaaaacaatattatctacttatattttggtttcttgcatacgcattgtatactcatatcatgtttaaat

SEQ ID NO: 44079 - DNA, 1191 bp, Zea Mays
ggaagaagcagcttgagcagctcaagaatcctgatattactggactcgctacccttgtagtaaagaaatgaggggttgtgacttgtatattgtcaaggatcacttggatgtggtaaatgctatactggacactgatgatagctgcataaggattgtgcggaaaaacgggaagacatccctacatactgctgcaaggattggataccatcgtattgtcaaggcactcatagagagggatccaggaattgttccgatcaaggataggaagggacaaactgcacttcacatggctgtgaaaggcaagaacacagatgtagtggaagagttactgatggctgatgtttccattctcaatgtgcgagacaagaagggaaatactgctttgcacatagctacacggaaatggaggccccaggtatggttcttttcaggtgtcttttacaagtagtttgctatttcagttttagctgactataacctgcattgagagctataacgctgttatatctgtaaggcgtggtttcaatgtgtagccaattttttatttatttgcccttattttagagttacatctgcgtggacatattgttttcttacagctgtctgaagtttagtagctgtctgaagtttagtagctgtctatcttgtttttcagggatctggaataacaggagcctgatggttgcatcagtagagttgaccacttctcagtattgcgagatgcatcttacatggtccagaagataattcctattctgaactacttgctcgtgttgatcagttttgcctagtcccagtaccatacaaagatgttcagctggatataaacatttctccacgtctctcttctgaatacataagttatctggaaaatcctgttgagttgctcaatgaagcggcaaaagctgcagagaaagatctatggaaaatcctgttgagttgctcaatgaaggcttttgcgaatcacttgaagtgttagtacttttgtgaatgattttgtaaagtgtttgtaaatatgtgcaaaacataataacatgtgtaggttttgtgaatgattttgttgtggtgcttgttgatggtttatgtgatgtggatctatcattgtgcaatactaattaaatttgtatatctatgtgattatgtgtataaaaattggtgatttgtgatgcttttgtatatataacagttgtt

SEQ ID NO: 44080 - DNA, 1378 bp, Zea Mays
gagaaatcccatgatttgggggaagacgaagtccaagcacaacccccgccaatcgctcgatgaaaaatctaaaccaaaaccctcagcgttttcatgggttccggagggattttatgttggtaaggatgatatggcctctcgcccaaagctgtctggtattcagaagcaggttttggcactgtacaggggattccttcggacagcacgccttaaggcccctgaagaacgccgcaggatcgagtctgttatcttggcagagttccgtgacaacgcaaggagtgttgaccgcttgtactggggttgtgacttgtatattgtcaaggatcacttggatgtggtaaatgctatactggacactgatgatagctgcataaggattgtgcggaaaaacgggaagacatccctacatactgctgcaaggattggataccatcgtattgtcaaggcactcatagagagggatccaggaattgttccgatcaaggataggaagggacaaactgcacttcacatggctgtgaaaggcaagaacacagatgtagtggaagagttactgatggctgatgtttccattctcaatgtgcgagacaagaagggaaatactgctttgcacatagctacacggaaatggaggccccaggtatggttcttttcaggtgtcttttacaagtagtttgctatttcagttttagctgactataacctgcattgagagctataacgctgttatatctgtaaggcgtggtttcaatgtgtagccaattttttatttatttgcccttattttagagttacatctgcgtggacatattgttttcttacagctgtctgaagtttagtagctgtctgaagtttagtagctgtctatcttgtttttcagggatctggaataacaggagcctgatggttgcatcagtagagttgaccacttctcagtattgcgagatgcatcttacatggttgatcagttttgcctagtcccagtaccatacaaagatgttcagctggatataaacatttctccacgtctctcttctgaatacataagttatctggaaaatcctgttgagttgctcaatgaagcggcaaaagctgcagagaaagatctatggaaaatcctgttgagttgctcaatgaaggcttttgcgaatcacttgaagtgttagtacttttgtgaatgattttgtaaagtgtttgtaaatatgtgcaaaacataataacatgtgtaggttttgtgaatgattttgttgtggtgcttgttgatggtttatgtgatgtggatctatcattgtgcaatactaattaaatttgtatatctatgtgattatgtgtataaaaattggtgatttgtgatgcttttgtatatataacagttgtt

SEQ ID NO: 44081 - DNA, 1349 bp, Zea Mays
gagaaatcccatgatttgggggaagacgaagtccaagcacaacccccgccaatcgctcgatgaaaaatctaaaccaaaaccctcagcgttttcatgggttccggagggattttatgttggggattccttcggacagcacgccttaaggcccctgaagaacgccgcaggatcgagtctgttatcttggcagagttccgtgacaacgcaaggagtgttgaccgcttgtactggggttgtgacttgtatattgtcaaggatcacttggatgtggtaaatgctatactggacactgatgatagctgcataaggattgtgcggaaaaacgggaagacatccctacatactgctgcaaggattggataccatcgtattgtcaaggcactcatagagagggatccaggaattgttccgatcaaggataggaagggacaaactgcacttcacatggctgtgaaaggcaagaacacagatgtagtggaagagttactgatggctgatgtttccattctcaatgtgcgagacaagaagggaaatactgctttgcacatagctacacggaaatggaggccccaggtatggttcttttcaggtgtcttttacaagtagtttgctatttcagttttagctgactataacctgcattgagagctataacgctgttatatctgtaaggcgtggtttcaatgtgtagccaattttttatttatttgcccttattttagagttacatctgcgtggacatattgttttcttacagctgtctgaagtttagtagctgtctgaagtttagtagctgtctatcttgtttttcagggatctggaataacaggagcctgatggttgcatcagtagagttgaccacttctcagtattgcgagatgcatcttacatggtccagaagataattcctattctgaactacttgctcgtgttgatcagttttgcctagtcccagtaccatacaaagatgttcagctggatataaacatttctccacgtctctcttctgaatacataagttatctggaaaatcctgttgagttgctcaatgaagcggcaaaagctgcagagaaagatctatggaaaatcctgttgagttgctcaatgaaggcttttgcgaatcacttgaagtgttagtacttttgtgaatgattttgtaaagtgtttgtaaatatgtgcaaaacataataacatgtgtaggttttgtgaatgattttgttgtggtgcttgttgatggtttatgtgatgtggatctatcattgtgcaatactaattaaatttgtatatctatgtgattatgtgtataaaaattggtgatttgtgatgcttttgtatatataacagttgtt

SEQ ID NO: 44082 - DNA, 729 bp, Zea Mays
atgttactgcttgcggtggaccttgtaaaggttataaccagagaagcctccaggagcatcagagaagtccaaagttggaaaaatagattgtactccgaggaaggtccttctcatgttcaaagtagtggattacactcacctagtgcaaaggtcagagcttccccaatctgtgctgcctttgattctaagggtaaaatttctgacaatatattgctccataagattgaagaacttaatcgatcagtgaagaatcttgagtctctactcgtaagatcacatagaagagaatgatctgatattatatcatctttgaaaattagctcaaattaaacatggaaagaacaggaggaacaagtggagtatatgaactctgtttttctatttagtccttcagatcagataccatgggaaattgcaaagctgctcatgccgtgaaggagcttctagtttgattcaagtttcacaagttatctgttgtacataggtcttgctgattcttccaagtttcacaatttgatgtacaaagaatcacagaatcagtggacagtggtctagggtcacaaagtagatcaacgtacatgtaagcttgtttactgtataaattctaaaatggtaatctgtgccaatacgtgtactgtaatgggcttaggctcagcccatatatgtttatagctatcaatacaacattctaatcctagttagggttttctattccaacatggtatcaag

SEQ ID NO: 44083 - DNA, 1790 bp, Zea Mays
cgagaacgagacgagaggattatttctgcgagagagagagagggttggggaaggtcaggttcagagggaagaggaagatctcagtcaaaagtcaagaccctcgtttccacctcctgcggcgtgattcgggcaatcgggctctgccgctcgtctctcctttcagcatccatcgccgctgcttgagctctgcctccacttatctactacagtctacagatactgcccgtgcaggctcttggctggaactaggaagtcatgttgagtggccacgccgtgacactgagcgagaggagcgcctccggtacgcgcttgatcgaggatgtagcgtgcgaggcaggcgatgaggaggaggcggacgccgccgcgagagttgtgtaccgggcctcgttccaagagctgatgcccaactaccttcagtacgacaccatcatctgggcactcatatccctgctgcttgtcctggcgtgggggatcgggctgctcctgcttctctacctgccgtacaagagatacgtgctgaagaaggatatcctatcccgccaactctttgtcaccgagagtaagatagtgtacaaggcgactaggccttcgtacatgccattcatggggatagttaagaaagagattaaagtacctctccatttgattgttgatgttataattgagcaaggagagctgtgcatacctatataccccacttgatggattcatttgtgtgaagctataattcagctatgtacttcagccaggcattggttctttgtaaaaattcactgaatgttcaaggaaaaaatcactgatggacgtattaatgcattttactcatctaaatgttacaggaatatatgccttatcttgtactagttcgtatctcatgcataaacttgaacagaaaattgtgaaattgccttctttaaaagttaggactgtatgtgtgtatgtttctgaaaaaaaggatctattatgcaggctgtctacaatctgcttacagcttatacacatttagaatagaaagcatagcccatgggaaacctgcttcagtggatgaactgcaatttcatggtgtccataatccagattttctaagaaaggttataaccagagaagcctccaggagcatcagagaagtccaaagttggaaaaatagattgtactccgaggaaggtccttctcatgttcaaagtagtggattacactcacctagtgcaaaggtcagagcttccccaatctgtgctgcctttgattctaagggtaaaatttctgacaatatattgctccataagattgaagaacttaatcgatcagtgaagaatcttgagtctctactcgtaagatcacatagaagagaatgatctgatattatatcatctttgaaaattagctcaaattaaacatggaaagaacaggaggaacaagtggagtatatgaactctgtttttctatttagtccttcagatcagataccatgggaaattgcaaagctgctcatgccgtgaaggagcttctagtttgattcaagtttcacaagttatctgttgtacataggtcttgctgattcttccaagtttcacaatttgatgtacaaagaatcacagaatcagtggacagtggtctagggtcacaaagtagatcaacgtacatgtaagcttgtttactgtataaattctaaaatggtaatctgtgccaatacgtgtactgtaatgggcttaggctcagcccatatatgtttatagctatcaatacaacattctaatcctagttagggttttctattccaacatggtatcaag

SEQ ID NO: 44084 - DNA, 1481 bp, Zea Mays
cgagaacgagacgagaggattatttctgcgagagagagagagggttggggaaggtcaggttcagagggaagaggaagatctcagtcaaaagtcaagaccctcgtttccacctcctgcggcgtgattcgggcaatcgggctctgccgctcgtctctcctttcagcatccatcgccgctgcttgagctctgcctccacttatctactacagtctacaggtgaggctcttggctggaactaggaagtcatgttgagtggccacgccgtgacactgagcgagaggagcgcctccggtacgcgcttgatcgaggatgtagcgtgcgaggcaggcgatgaggaggaggcggacgccgccgcgagagttgtgtaccgggcctcgttccaagagctgatgcccaactaccttcagtacgacaccatcatctgggcactcatatccctgctgcttgtcctggcgtgggggatcgggctgctcctgcttctctacctgccgtacaagagatacgtgctgaagaaggatatcctatcccgccaactctttgtcaccgagagtaagatagtgtacaaggcgactaggccttcgtacatgccattcatggggatagttaagaaagagattaaagtacctctccatttgattgttgatgttataattgagcaaggctgtctacaatctgcttacagcttatacacatttagaatagaaagcatagcccatgggaaacctgcttcagtggatgaactgcaatttcatggtgtccataatccagattttctaagaaaggttataaccagagaagcctccaggagcatcagagaagtccaaagttggaaaaatagattgtactccgaggaaggtccttctcatgttcaaagtagtggattacactcacctagtgcaaaggtcagagcttccccaatctgtgctgcctttgattctaagggtaaaatttctgacaatatattgctccataagattgaagaacttaatcgatcagtgaagaatcttgagtctctactcgtaagatcacatagaagagaatgatctgatattatatcatctttgaaaattagctcaaattaaacatggaaagaacaggaggaacaagtggagtatatgaactctgtttttctatttagtccttcagatcagataccatgggaaattgcaaagctgctcatgccgtgaaggagcttctagtttgattcaagtttcacaagttatctgttgtacataggtcttgctgattcttccaagtttcacaatttgatgtacaaagaatcacagaatcagtggacagtggtctagggtcacaaagtagatcaacgtacatgtaagcttgtttactgtataaattctaaaatggtaatctgtgccaatacgtgtactgtaatgggcttaggctcagcccatatatgtttatagctatcaatacaacattctaatcctagttagggttttctattccaacatggtatcaag

SEQ ID NO: 44085 - DNA, 1995 bp, Zea Mays
cgagaacgagacgagaggattatttctgcgagagagagagagggttggggaaggtcaggttcagagggaagaggaagatctcagtcaaaagtcaagaccctcgtttccacctcctgcggcgtgattcgggcaatcgggctctgccgctcgtctctcctttcagcatccatcgccgctgcttgagctctgcctccacttatctactacagtctacaggctcttggctggaactaggaagtcatgttgagtggccacgccgtgacactgagcgagaggagcgcctccggtacgcgcttgatcgaggatgtagcgtgcgaggcaggcgatgaggaggaggcggacgccgccgcgagagttgtgtaccgggcctcgttccaagagctgatgcccaactaccttcagtacgacaccatcatctgggcactcatatccctgctgcttgtcctggcgtgggggatcgggctgctcctgcttctctacctgccgtacaagagatacgtgctgaagaaggatatcctatcccgccaactctttgtcaccgagagtaagatagtgtacaaggtattggcgactaggccttcgtacatgccattcatggggatagttaagaaagagattaaagtacctctccatttgattgttgatgttataattgagcaaggtgactgtgtagttcctatttcggtttcaacttttggtaactacttgtttatgtgaaccaatacgacaaaacaatttctgcattttactaagctgaaaatactactttatggtgtttttcaacattgtttatggttgatatgaagttttgctagcatcagcttttgtttttcctaattcatctatatactccgctttttattggaacaatgcaggagagctgtgcatacctatataccccacttgatggattcatttgtgtgaagctataattcagctatgtacttcagccaggcattggttctttgtaaaaattcactgaatgttcaaggaaaaaatcactgatggacgtattaatgcattttactcatctaaatgttacaggaatatatgccttatcttgtactagttcgtatctcatgcataaacttgaacagaaaattgtgaaattgccttctttaaaagttaggactgtatgtgtgtatgtttctgaaaaaaaggatctattatgcaggctgtctacaatctgcttacagcttatacacatttagaatagaaagcatagcccatgggaaacctgcttcagtggatgaactgcaatttcatggtgtccataatccagattttctaagaaaggttataaccagagaagcctccaggagcatcagagaagtccaaagttggaaaaatagattgtactccgaggaaggtccttctcatgttcaaagtagtggattacactcacctagtgcaaaggtcagagcttccccaatctgtgctgcctttgattctaagggtaaaatttctgacaatatattgctccataagattgaagaacttaatcgatcagtgaagaatcttgagtctctactcgtaagatcacatagaagagaatgatctgatattatatcatctttgaaaattagctcaaattaaacatggaaagaacaggaggaacaagtggagtatatgaactctgtttttctatttagtccttcagatcagataccatgggaaattgcaaagctgctcatgccgtgaaggagcttctagtttgattcaagtttcacaagttatctgttgtacataggtcttgctgattcttccaagtttcacaatttgatgtacaaagaatcacagaatcagtggacagtggtctagggtcacaaagtagatcaacgtacatgtaagcttgtttactgtataaattctaaaatggtaatctgtgccaatacgtgtactgtaatgggcttaggctcagcccatatatgtttatagctatcaatacaacattctaatcctagttagggttttctattccaacatggtatcaag

SEQ ID NO: 44086 - DNA, 1487 bp, Zea Mays
cgagaacgagacgagaggattatttctgcgagagagagagagggttggggaaggtcaggttcagagggaagaggaagatctcagtcaaaagtcaagaccctcgtttccacctcctgcggcgtgattcgggcaatcgggctctgccgctcgtctctcctttcagcatccatcgccgctgcttgagctctgcctccacttatctactacagtctacaggtgaggctcttggctggaactaggaagtcatgttgagtggccacgccgtgacactgagcgagaggagcgcctccggtacgcgcttgatcgaggatgtagcgtgcgaggcaggcgatgaggaggaggcggacgccgccgcgagagttgtgtaccgggcctcgttccaagagctgatgcccaactaccttcagtacgacaccatcatctgggcactcatatccctgctgcttgtcctggcgtgggggatcgggctgctcctgcttctctacctgccgtacaagagatacgtgctgaagaaggatatcctatcccgccaactctttgtcaccgagagtaagatagtgtacaaggtattggcgactaggccttcgtacatgccattcatggggatagttaagaaagagattaaagtacctctccatttgattgttgatgttataattgagcaaggctgtctacaatctgcttacagcttatacacatttagaatagaaagcatagcccatgggaaacctgcttcagtggatgaactgcaatttcatggtgtccataatccagattttctaagaaaggttataaccagagaagcctccaggagcatcagagaagtccaaagttggaaaaatagattgtactccgaggaaggtccttctcatgttcaaagtagtggattacactcacctagtgcaaaggtcagagcttccccaatctgtgctgcctttgattctaagggtaaaatttctgacaatatattgctccataagattgaagaacttaatcgatcagtgaagaatcttgagtctctactcgtaagatcacatagaagagaatgatctgatattatatcatctttgaaaattagctcaaattaaacatggaaagaacaggaggaacaagtggagtatatgaactctgtttttctatttagtccttcagatcagataccatgggaaattgcaaagctgctcatgccgtgaaggagcttctagtttgattcaagtttcacaagttatctgttgtacataggtcttgctgattcttccaagtttcacaatttgatgtacaaagaatcacagaatcagtggacagtggtctagggtcacaaagtagatcaacgtacatgtaagcttgtttactgtataaattctaaaatggtaatctgtgccaatacgtgtactgtaatgggcttaggctcagcccatatatgtttatagctatcaatacaacattctaatcctagttagggttttctattccaacatggtatcaag

SEQ ID NO: 44087 - DNA, 1781 bp, Zea Mays
cgagaacgagacgagaggattatttctgcgagagagagagagggttggggaaggtcaggttcagagggaagaggaagatctcagtcaaaagtcaagaccctcgtttccacctcctgcggcgtgattcgggcaatcgggctctgccgctcgtctctcctttcagcatccatcgccgctgcttgagctctgcctccacttatctactacagtctacaggctcttggctggaactaggaagtcatgttgagtggccacgccgtgacactgagcgagaggagcgcctccggtacgcgcttgatcgaggatgtagcgtgcgaggcaggcgatgaggaggaggcggacgccgccgcgagagttgtgtaccgggcctcgttccaagagctgatgcccaactaccttcagtacgacaccatcatctgggcactcatatccctgctgcttgtcctggcgtgggggatcgggctgctcctgcttctctacctgccgtacaagagatacgtgctgaagaaggatatcctatcccgccaactctttgtcaccgagagtaagatagtgtacaaggtattggcgactaggccttcgtacatgccattcatggggatagttaagaaagagattaaagtacctctccatttgattgttgatgttataattgagcaaggagagctgtgcatacctatataccccacttgatggattcatttgtgtgaagctataattcagctatgtacttcagccaggcattggttctttgtaaaaattcactgaatgttcaaggaaaaaatcactgatggacgtattaatgcattttactcatctaaatgttacaggaatatatgccttatcttgtactagttcgtatctcatgcataaacttgaacagaaaattgtgaaattgccttctttaaaagttaggactgtatgtgtgtatgtttctgaaaaaaaggatctattatgcaggctgtctacaatctgcttacagcttatacacatttagaatagaaagcatagcccatgggaaacctgcttcagtggatgaactgcaatttcatggtgtccataatccagattttctaagaaaggttataaccagagaagcctccaggagcatcagagaagtccaaagttggaaaaatagattgtactccgaggaaggtccttctcatgttcaaagtagtggattacactcacctagtgcaaaggtcagagcttccccaatctgtgctgcctttgattctaagggtaaaatttctgacaatatattgctccataagattgaagaacttaatcgatcagtgaagaatcttgagtctctactcgtaagatcacatagaagagaatgatctgatattatatcatctttgaaaattagctcaaattaaacatggaaagaacaggaggaacaagtggagtatatgaactctgtttttctatttagtccttcagatcagataccatgggaaattgcaaagctgctcatgccgtgaaggagcttctagtttgattcaagtttcacaagttatctgttgtacataggtcttgctgattcttccaagtttcacaatttgatgtacaaagaatcacagaatcagtggacagtggtctagggtcacaaagtagatcaacgtacatgtaagcttgtttactgtataaattctaaaatggtaatctgtgccaatacgtgtactgtaatgggcttaggctcagcccatatatgtttatagctatcaatacaacattctaatcctagttagggttttctattccaacatggtatcaag

SEQ ID NO: 44088 - DNA, 1497 bp, Zea Mays
cgagaacgagacgagaggattatttctgcgagagagagagagggttggggaaggtcaggttcagagggaagaggaagatctcagtcaaaagtcaagaccctcgtttccacctcctgcggcgtgattcgggcaatcgggctctgccgctcgtctctcctttcagcatccatcgccgctgcttgagctctgcctccacttatctactacagtctacagatactgcccgtgcaggctcttggctggaactaggaagtcatgttgagtggccacgccgtgacactgagcgagaggagcgcctccggtacgcgcttgatcgaggatgtagcgtgcgaggcaggcgatgaggaggaggcggacgccgccgcgagagttgtgtaccgggcctcgttccaagagctgatgcccaactaccttcagtacgacaccatcatctgggcactcatatccctgctgcttgtcctggcgtgggggatcgggctgctcctgcttctctacctgccgtacaagagatacgtgctgaagaaggatatcctatcccgccaactctttgtcaccgagagtaagatagtgtacaaggtattggcgactaggccttcgtacatgccattcatggggatagttaagaaagagattaaagtacctctccatttgattgttgatgttataattgagcaaggctgtctacaatctgcttacagcttatacacatttagaatagaaagcatagcccatgggaaacctgcttcagtggatgaactgcaatttcatggtgtccataatccagattttctaagaaaggttataaccagagaagcctccaggagcatcagagaagtccaaagttggaaaaatagattgtactccgaggaaggtccttctcatgttcaaagtagtggattacactcacctagtgcaaaggtcagagcttccccaatctgtgctgcctttgattctaagggtaaaatttctgacaatatattgctccataagattgaagaacttaatcgatcagtgaagaatcttgagtctctactcgtaagatcacatagaagagaatgatctgatattatatcatctttgaaaattagctcaaattaaacatggaaagaacaggaggaacaagtggagtatatgaactctgtttttctatttagtccttcagatcagataccatgggaaattgcaaagctgctcatgccgtgaaggagcttctagtttgattcaagtttcacaagttatctgttgtacataggtcttgctgattcttccaagtttcacaatttgatgtacaaagaatcacagaatcagtggacagtggtctagggtcacaaagtagatcaacgtacatgtaagcttgtttactgtataaattctaaaatggtaatctgtgccaatacgtgtactgtaatgggcttaggctcagcccatatatgtttatagctatcaatacaacattctaatcctagttagggttttctattccaacatggtatcaag

SEQ ID NO: 44089 - DNA, 1037 bp, Zea Mays
cgagaacgagacgagaggattatttctgcgagagagagagagggttggggaaggtcaggttcagagggaagaggaagatctcagtcaaaagtcaagaccctcgtttccacctcctgcggcgtgattcgggcaatcgggctctgccgctcgtctctcctttcagcatccatcgccgctgcttgagctctgcctccacttatctactacagtctacaggctgtctacaatctgcttacagcttatacacatttagaatagaaagcatagcccatgggaaacctgcttcagtggatgaactgcaatttcatggtgtccataatccagattttctaagaaaggttataaccagagaagcctccaggagcatcagagaagtccaaagttggaaaaatagattgtactccgaggaaggtccttctcatgttcaaagtagtggattacactcacctagtgcaaaggtcagagcttccccaatctgtgctgcctttgattctaagggtaaaatttctgacaatatattgctccataagattgaagaacttaatcgatcagtgaagaatcttgagtctctactcgtaagatcacatagaagagaatgatctgatattatatcatctttgaaaattagctcaaattaaacatggaaagaacaggaggaacaagtggagtatatgaactctgtttttctatttagtccttcagatcagataccatgggaaattgcaaagctgctcatgccgtgaaggagcttctagtttgattcaagtttcacaagttatctgttgtacataggtcttgctgattcttccaagtttcacaatttgatgtacaaagaatcacagaatcagtggacagtggtctagggtcacaaagtagatcaacgtacatgtaagcttgtttactgtataaattctaaaatggtaatctgtgccaatacgtgtactgtaatgggcttaggctcagcccatatatgtttatagctatcaatacaacattctaatcctagttagggttttctattccaacatggtatcaag

SEQ ID NO: 44090 - DNA, 1989 bp, Zea Mays
cgagaacgagacgagaggattatttctgcgagagagagagagggttggggaaggtcaggttcagagggaagaggaagatctcagtcaaaagtcaagaccctcgtttccacctcctgcggcgtgattcgggcaatcgggctctgccgctcgtctctcctttcagcatccatcgccgctgcttgagctctgcctccacttatctactacagtctacaggctcttggctggaactaggaagtcatgttgagtggccacgccgtgacactgagcgagaggagcgcctccggtacgcgcttgatcgaggatgtagcgtgcgaggcaggcgatgaggaggaggcggacgccgccgcgagagttgtgtaccgggcctcgttccaagagctgatgcccaactaccttcagtacgacaccatcatctgggcactcatatccctgctgcttgtcctggcgtgggggatcgggctgctcctgcttctctacctgccgtacaagagatacgtgctgaagaaggatatcctatcccgccaactctttgtcaccgagagtaagatagtgtacaaggcgactaggccttcgtacatgccattcatggggatagttaagaaagagattaaagtacctctccatttgattgttgatgttataattgagcaaggtgactgtgtagttcctatttcggtttcaacttttggtaactacttgtttatgtgaaccaatacgacaaaacaatttctgcattttactaagctgaaaatactactttatggtgtttttcaacattgtttatggttgatatgaagttttgctagcatcagcttttgtttttcctaattcatctatatactccgctttttattggaacaatgcaggagagctgtgcatacctatataccccacttgatggattcatttgtgtgaagctataattcagctatgtacttcagccaggcattggttctttgtaaaaattcactgaatgttcaaggaaaaaatcactgatggacgtattaatgcattttactcatctaaatgttacaggaatatatgccttatcttgtactagttcgtatctcatgcataaacttgaacagaaaattgtgaaattgccttctttaaaagttaggactgtatgtgtgtatgtttctgaaaaaaaggatctattatgcaggctgtctacaatctgcttacagcttatacacatttagaatagaaagcatagcccatgggaaacctgcttcagtggatgaactgcaatttcatggtgtccataatccagattttctaagaaaggttataaccagagaagcctccaggagcatcagagaagtccaaagttggaaaaatagattgtactccgaggaaggtccttctcatgttcaaagtagtggattacactcacctagtgcaaaggtcagagcttccccaatctgtgctgcctttgattctaagggtaaaatttctgacaatatattgctccataagattgaagaacttaatcgatcagtgaagaatcttgagtctctactcgtaagatcacatagaagagaatgatctgatattatatcatctttgaaaattagctcaaattaaacatggaaagaacaggaggaacaagtggagtatatgaactctgtttttctatttagtccttcagatcagataccatgggaaattgcaaagctgctcatgccgtgaaggagcttctagtttgattcaagtttcacaagttatctgttgtacataggtcttgctgattcttccaagtttcacaatttgatgtacaaagaatcacagaatcagtggacagtggtctagggtcacaaagtagatcaacgtacatgtaagcttgtttactgtataaattctaaaatggtaatctgtgccaatacgtgtactgtaatgggcttaggctcagcccatatatgtttatagctatcaatacaacattctaatcctagttagggttttctattccaacatggtatcaag

SEQ ID NO: 44091 - DNA, 1786 bp, Zea Mays
cgagaacgagacgagaggattatttctgcgagagagagagagggttggggaaggtcaggttcagagggaagaggaagatctcagtcaaaagtcaagaccctcgtttccacctcctgcggcgtgattcgggcaatcgggctctgccgctcgtctctcctttcagcatccatcgccgctgcttgagctctgcctccacttatctactacagtctacaggtgaggctcttggctggaactaggaagtcatgttgagtggccacgccgtgacactgagcgagaggagcgcctccggtacgcgcttgatcgaggatgtagcgtgcgaggcaggcgatgaggaggaggcggacgccgccgcgagagttgtgtaccgggcctcgttccaagagctgatgcccaactaccttcagtacgacaccatcatctgggcactcatatccctgctgcttgtcctggcgtgggggatcgggctgctcctgcttctctacctgccgtacaagagatacgtgctgaagaaggatatcctatcccgccaactctttgtcaccgagagtaagatagtgtacaaggtattggcgactaggccttcgtacatgccattcatggggatagttaagaaagagattaaagtacctctccatttgattgttgatgttataattgagcaaggagagctgtgcatacctatataccccacttgatggattcatttgtgtgaagctataattcagctatgtacttcagccaggcattggttctttgtaaaaattcactgaatgttcaaggaaaaaatcactgatggacgtattaatgcattttactcatctaaatgttacaggaatatatgccttatcttgtactagttcgtatctcatgcataaacttgaacagaaaattgtgaaattgccttctttaaaagttaggactgtatgtgtgtatgtttctgaaaaaaaggatctattatgcaggctgtctacaatctgcttacagcttatacacatttagaatagaaagcatagcccatgggaaacctgcttcagtggatgaactgcaatttcatggtgtccataatccagattttctaagaaaggttataaccagagaagcctccaggagcatcagagaagtccaaagttggaaaaatagattgtactccgaggaaggtccttctcatgttcaaagtagtggattacactcacctagtgcaaaggtcagagcttccccaatctgtgctgcctttgattctaagggtaaaatttctgacaatatattgctccataagattgaagaacttaatcgatcagtgaagaatcttgagtctctactcgtaagatcacatagaagagaatgatctgatattatatcatctttgaaaattagctcaaattaaacatggaaagaacaggaggaacaagtggagtatatgaactctgtttttctatttagtccttcagatcagataccatgggaaattgcaaagctgctcatgccgtgaaggagcttctagtttgattcaagtttcacaagttatctgttgtacataggtcttgctgattcttccaagtttcacaatttgatgtacaaagaatcacagaatcagtggacagtggtctagggtcacaaagtagatcaacgtacatgtaagcttgtttactgtataaattctaaaatggtaatctgtgccaatacgtgtactgtaatgggcttaggctcagcccatatatgtttatagctatcaatacaacattctaatcctagttagggttttctattccaacatggtatcaag

SEQ ID NO: 44092 - DNA, 1839 bp, Zea Mays
ataaaaacgggatgatataaaaatagacaactaaaattgagagtgtaaaaatcacaaatttctccgagaacgagacgagaggattatttctgcgagagagagagagggttggggaaggtcaggttcagagggaagaggaagatctcagtcaaaagtcaagaccctcgtttccacctcctgcggcgtgattcgggcaatcgggctctgccgctcgtctctcctttcagcatccatcgccgctgcttgagctctgcctccacttatctactacagtctacaggctcttggctggaactaggaagtcatgttgagtggccacgccgtgacactgagcgagaggagcgcctccggtacgcgcttgatcgaggatgtagcgtgcgaggcaggcgatgaggaggaggcggacgccgccgcgagagttgtgtaccgggcctcgttccaagagctgatgcccaactaccttcagtacgacaccatcatctgggcactcatatccctgctgcttgtcctggcgtgggggatcgggctgctcctgcttctctacctgccgtacaagagatacgtgctgaagaaggatatcctatcccgccaactctttgtcaccgagagtaagatagtgtacaaggcgactaggccttcgtacatgccattcatggggatagttaagaaagagattaaagtacctctccatttgattgttgatgttataattgagcaaggagagctgtgcatacctatataccccacttgatggattcatttgtgtgaagctataattcagctatgtacttcagccaggcattggttctttgtaaaaattcactgaatgttcaaggaaaaaatcactgatggacgtattaatgcattttactcatctaaatgttacaggaatatatgccttatcttgtactagttcgtatctcatgcataaacttgaacagaaaattgtgaaattgccttctttaaaagttaggactgtatgtgtgtatgtttctgaaaaaaaggatctattatgcaggctgtctacaatctgcttacagcttatacacatttagaatagaaagcatagcccatgggaaacctgcttcagtggatgaactgcaatttcatggtgtccataatccagattttctaagaaaggttataaccagagaagcctccaggagcatcagagaagtccaaagttggaaaaatagattgtactccgaggaaggtccttctcatgttcaaagtagtggattacactcacctagtgcaaaggtcagagcttccccaatctgtgctgcctttgattctaagggtaaaatttctgacaatatattgctccataagattgaagaacttaatcgatcagtgaagaatcttgagtctctactcgtaagatcacatagaagagaatgatctgatattatatcatctttgaaaattagctcaaattaaacatggaaagaacaggaggaacaagtggagtatatgaactctgtttttctatttagtccttcagatcagataccatgggaaattgcaaagctgctcatgccgtgaaggagcttctagtttgattcaagtttcacaagttatctgttgtacataggtcttgctgattcttccaagtttcacaatttgatgtacaaagaatcacagaatcagtggacagtggtctagggtcacaaagtagatcaacgtacatgtaagcttgtttactgtataaattctaaaatggtaatctgtgccaatacgtgtactgtaatgggcttaggctcagcccatatatgtttatagctatcaatacaacattctaatcctagttagggttttctattccaacatggtatcaag

SEQ ID NO: 44093 - DNA, 1279 bp, Zea Mays
ccagcttccggtcacaactcacaaccggcaggcaggcggtggcgccgcggcgacaccgttccacggttccactccacgtctccacccctgacgcgcggaactggcggtggcgagcgaagctaatggccatccatgccccgctccgcctctgcctccgcctccatgcgaggaaggtaacatggatccgtatgcaattctcaagtgccgttcacaggagcagaagagcagtattgcaactggaaaaggaactacccctgagtggaatgaaaactttatcttcactgtgtctgaccggacaacagacttggtaatcaagcttatggacagtgatacaggcacagcagatgactttgttggtgaagcaacgattccattggaagcagtgtatactgaaaggagcattccaccaacactctataatgttgtgaaaggtgaaaaatactgcggggaaatcaaagttggtctcacattcactcctgaggatactcgccagcggggtctcccagaggacttcggtggatggaagcaatcatcttagagctagatgctttaagggtgcaccagagcacagcgacaattcatgcgcttggagccttcagccgtcgagtacttcatgctaatgcagaattcattcgatttggcttcttttgattgtttcagaagaagtgttattagtgagtttcaacaaaaaatagctccatattgctctatatcccgtattggaaattctaaggccgtttgtgattactgcttacaacaagaagttttgcttctagttcccactacgcttttttttgaagttttgagtggaacatctttgtgttcaacgtttggggaggtgtaggccagtaatactgcaagaaaggaataatttcccttgcagcaacattgttttttgtgatccttgaacaaaattgttcccttgacatgtcccagatgatgagatgagtgtagccatagtttatctctaacttcctgctaagaaactgacagaaagtactttttttttccttctttcgatcttcgtaagggattgaagctgcactgctgcaggacagcagaaggcttctggtgcaaaatgtgcaacctcctcgcctgttcgcctcgctttaatctgtttctacaatgtttttgttttcttgtattgtagccgtaacagtctaaatagccgcgatggcaatcgtgggaagcaattgaacgaattggtgttgttactgtcgtttcggacactgaaagaccatctttctttgcttgctttgccccgaaaggaggaattttg

SEQ ID NO: 44094 - DNA, 1460 bp, Zea Mays
ccagcttccggtcacaactcacaaccggcaggcaggcggtggcgccgcggcgacaccgttccacggttccactccacgtctccacccctgacgcgcggaactggcggtggcgagcgaagctaatggccatccatgccccgctccgcctctgcctccgcctccatgcgaggaaggtagccagacgcgtataaagggcagccagaaattcggatccacctgtatgcgtctccgttcgttcacgccacaggcaaggcacaggggcttgtgagggagagcgaggagcggaggaggacatggtgcacgggacgctggaagtgctgctcgttggggccaagggcctcgagaacaccgattacctctgtaacatggatccgtatgcaattctcaagtgccgttcacaggagcagaagagcagtattgcaactggaactacccctgagtggaatgaaaactttatcttcactgtgtctgaccggacaacagacttggtaatcaagcttatggacagtgatacaggcacagcagatgactttgttggtgaagcaacgattccattggaagcagtgtatactgaaaggagcattccaccaacactctataatgttgtgaaaggtgaaaaatactgcggggaaatcaaagttggtctcacattcactcctgaggatactcgccagcggggtctcccagaggacttcggtggatggaagcaatcatcttagagctagatgctttaagggtgcaccagagcacagcgacaattcatgcgcttggagccttcagccgtcgagtacttcatgctaatgcagaattcattcgatttggcttcttttgattgtttcagaagaagtgttattagtgagtttcaacaaaaaatagctccatattgctctatatcccgtattggaaattctaaggccgtttgtgattactgcttacaacaagaagttttgcttctagttcccactacgcttttttttgaagttttgagtggaacatctttgtgttcaacgtttggggaggtgtaggccagtaatactgcaagaaaggaataatttcccttgcagcaacattgttttttgtgatccttgaacaaaattgttcccttgacatgtcccagatgatgagatgagtgtagccatagtttatctctaacttcctgctaagaaactgacagaaagtactttttttttccttctttcgatcttcgtaagggattgaagctgcactgctgcaggacagcagaaggcttctggtgcaaaatgtgcaacctcctcgcctgttcgcctcgctttaatctgtttctacaatgtttttgttttcttgtattgtagccgtaacagtctaaatagccgcgatggcaatcgtgggaagcaattgaacgaattggtgttgttactgtcgtttcggacactgaaagaccatctttctttgcttgctttgccccgaaaggaggaattttg

SEQ ID NO: 44095 - DNA, 992 bp, Zea Mays
tcaactttcaaaaccttaattgcagttcttcaagtcattgctcattaggcctggatcatgacttcatgctattttttgctgaatcactcttcagcttgtgatatttagaacactgttcctgatgtgagcaaatccacatggcaatcacttgtggtggagagcgagcttcccgtccttgttgagttctgggcttcatggtgcggaccgtgtaagatgatagaccccatcgttggcaagctctcaaaggagtacgaaggaaagctgaaatgttacaagctaaacaccgacgagaaccctgacatcgcaacccaattcggcatccggagcatccccaccatgatgatattcaagaacggtgagaagaaggactcggtgattggagccgtgccagaaagcaccctcgtcacctgcattgacaagtatgttggtgggaggtgaaatatcaatctgaggcaactagcatgggtgggtatgggtataccgttcttattgaactgctgttgagtagctgtatgtagataataatatgattttcactccaataaatgcgatttaaggatggcaagtcatccggatgaaaggttgcttctggtctagctttaggccccatgtttcattcatctgctaagtcgtatgttgctagtggtccttatctgaatctccatctgattttgatgagttcatggattaggagctgtggctaaaggtaatgtgtaatgttgtgttggtgatagtatgtgtaactgtgtattgtcggtgatttttgtggctattggttagtgctgcttagggtgcatgcgacccactagtagtgagcccatgtgtcaatggaaaatccattgcccttttttcacacatttatatttcgtccttccttctgtcttttttctccacactcatttatttctcacacttctatcactcatcttcctgtactggctaacgttatccctctccgcatgttctactgttgttgcatcttactcgttttt

SEQ ID NO: 44096 - DNA, 551 bp, Zea Mays
cgaactcgaattgacgccgtcggcggccgtggatggcgccagggccttcggctcgctggtcacggctgcgcccgcggcctcgcgggcaatctgattccgccgcagccactgctgctgttgctgctgctgctggtgactctggtgctgctgctgttgctgctggtggttgtggctgtggcggtgctgttgctgctgcctctgcgcgtactgctggtggtgatgcgcccccgatgtctgcttctgctgctgctgctgctggtggtgctgatgcggctgttgcggcgatgggccgcggccgtagtagttaggggtcccaccgcggccgttgcccacgcccgaaggatacctggcgcgtggatccatggtcgcgaaggaggacttgcagttcggatccggaaaaggatttgggagaactagaagattggctcttggatcaggggaccgatttcgagccccttttgcccttccggcaggggtcgtgggtggggaggagcgacggaagggtagcgtggccggatcgtcgaaaccttggcaacggtgtgttaggatta

SEQ ID NO: 44097 - DNA, 1606 bp, Zea Mays
ctaaattttaactaggaggattgagacacgagggtagggatgtctacatgtctgatttattattggtataaaatgtggatatccgtagtattatatgtatgtgcttttaattatatttattctatgtctaaatttatatttatgtaattatggatgtctacatgtctgatttatcatgggtccatttcttttcatgttgcctttgcctagtaatgcagtttgtgtactgggcaaaagcacacaacgcttggtttagctccttggctttggactacccaaataaataccctaagtcacattatctcattacgcgttaattgatgaaggtatatctcatattatttcgacactttgacaactatcttatacagaggaaaccataggccgaccttgaagaaacttcagaagattaaaacctcatttttttttctgtggctgaggaacagtgtcctcttcaccaagcctgatgctttcactaactccaaagtacccatatttcttcatcacttctacgtgccccttcttcatcatcgacttttcgaagctcacatggctcggcttcgtcgagcgaatgtcggtatcatcctcttaaacttcaagttctttgccactttcttcatctgactcatcttcgtcaagatcaactacaatatattcaacatttccttctttgacctgggttatcgctttggctccagtagctagggtgctgtccagcagtcattttgattaccgccatttgcaagcgtaccaagatcaaacttcctaagctcacgaaaatcaataaagcgaataagtttcggaggcaaaaaaaatggtggtagcaacaacagaaaatgtggggcctaacccatgcgggtgagctctgttattatagttaaaaaaaacacaagagtcgaggagtcaactggtgctcactcgctgtcggtggactaccaatgctgatttccgccactcacgctacaaagcatatttgagaatatctgtttttgacaacgctctcgtggaaggtgtttttcagacctttggcacaagatattcttcgtttaatgcgtgatctgagtccattatataaaatgaattaattctgcaaggggctacttttgggagagtgcctctggccgaaggtcctcaagctaacgagttccaattatttctaagtctgttacaggacgaataatatgagcttcggatgggggacacctttgtggtgttaagaacaaggtgataacaccgtcagcatgaagcagctgaagcaagtaacaagaagacaaaggaaggctcaagcggcgtgcgcaacacgtctttaagaagaaaatattatactacactcgactagatttgtagatcatatgtataggatttaagtatataaatataattttatacgaagttttacgttgctccatcactattaatagcggtacaatgtccatgcattgcggacctttttcatcgttcgcatatgcacccaccctcggatcgctcaatatccgaagttgaaaggcataaacgtcttcaggccatcttcgagcattccaaaggtagccttgtaatcttatgaaactaaaataaagaaaataaaaaggtaaagcttatgtcttat

SEQ ID NO: 44098 - DNA, 481 bp, Zea Mays
ctcgtcgaggcccatccggcgcagctgcttcttgagtctgttacaggacgaataatatgagcttcggatgggggacacctttgtggtgttaagaacaaggtgataacaccgtcagcatgaagcagctgaagcaagtaacaagaagacaaaggaaggctcaagcggcgtgcgcaacacgtctttaagaagaaaatattatactacactcgactagatttgtagatcatatgtataggatttaagtatataaatataattttatacgaagttttacgttgctccatcactattaatagcggtacaatgtccatgcattgcggacctttttcatcgttcgcatatgcacccaccctcggatcgctcaatatccgaagttgaaaggcataaacgtcttcaggccatcttcgagcattccaaaggtagccttgtaatcttatgaaactaaaataaagaaaataaaaaggtaaagcttatgtcttat

SEQ ID NO: 44099 - DNA, 258 bp, Zea Mays
catattaatttcagatttttagtaccacttatgtcattaacattagcaatgtcatgtatcaaatccgccgttcagtcatttagtgctctgttcaagtgtggatcctgtttcccaccaagtcaaggtttgtgaattcgggagtgctagaatcttgatcttccacaagagaatgcctccagaagcaatggatacgcttctagaaaaagataaagtgccaaatccatgctatagagtatagactgaggattcaacactggc

SEQ ID NO: 44100 - DNA, 1303 bp, Zea Mays
caagtgaagtcctacgtgatgcggacgctgcaaccaaccggctccctgcgtcctgctctgcagctgctgaccccttctcccgcctccgaaggaaaacgggcgggcaaccttctcgtcccttccaaaatcccgagtttccccccgatttcgaccctccgttttccccccgcttccttctctgctccaccgcctcaggaatatagatagtcggagaaaaaaaaaactgagagagaaagagagaggaggaggaggcaggggagtggaggggaggggaagcatcgcaattccgaacccccacctcgccgctcccaccaccgcggccgggttgcgtccgtttcgattgcccaggatgagcaccgagtccggggagctgctcgggatcgaccccgtcgagctccggttcccattcgaattaaataagcagatctcctgcacgctgcagctgacgaacaagacagacaagcaggtcgcgttcaaggtgaagacgacaagcccgaaaaagtactgcgttcgcccaaacaacggcatggtggcgccccggtccaaggctgacgttgttgttacgatgcaagcgcagcgggacgtgccaccggacatgcaatgcaaggacaagttccttgtgcagagcgccactgtcgccaaggaggtcgtgccaaaggaggtcactggagacatgtttaccaaagattcaggcaatgtagtggaagaagtgaagttgaaggtagtttatgtagcaccatcgtcctctcaaagcgaaagatttgaggatggtaatctcggcagtttgagttatcaagaggaaacaaaggaacctaaagaatcagaaaaaataatcactgagccatttgctttgatttcgaaactgatggaggagaagaattctgctattgaactgaacaacaaggattttctaaggcgagacatcagcaggcggcatggtggtttctcattagttttagtactggtggttgctattctgggaatactgctagggttcctcatgaagagatgagtgtatgtaatgatttatcttgtttggccttttctgaactaaacaaaattgtatgtgctctgtgtgcttgctgttgtacaactcagtgatctgttaatcatagtatctgaggcctattgtaattttctgattcatattataaactttagtcaatctgtcatagttactaacaccagctgttatcagcttgcaagcgacttgaggtctggaggtgtggtcttttggttttcgatagattttgactaattgttggcatccttttgcacatataaacagaatggtttctttgaa

SEQ ID NO: 44101 - DNA, 1309 bp, Zea Mays
cacaagtgaagtcctacgtgatgcggacgctgcaaccaaccggctccctgcgtcctgctctgcagctgctgaccccttctcccgcctccgaaggaaaacgggcgggcaaccttctcgtcccttccaaaatcccgagtttccccccgatttcgaccctccgttttccccccgcttccttctctgctccaccgcctcaggaatatagatagtcggagaaaaaaaaaactgagagagaaagagagaggaggaggaggcaggggagtggaggggaggggaagcatcgcaattccgaacccccacctcgccgctcccaccaccgcggccgggttgcgtccgtttcgattgcccaggatgagcaccgagtccggggagctgctcgggatcgaccccgtcgagctccggttcccattcgaattaaataagcagatctcctgcacgctgcagctgacgaacaagacagacaagcaggtcgcgttcaaggtgaagacgacaagcccgaaaaagtactgcgttcgcccaaacaacggcatggtggcgccccggtccaaggctgacgttgttgttacgatgcaagcgcagcgggacgtgccaccggacatgcaatgcaaggacaagttccttgtgcagagcgccactgtcgccaaggaggtcgtgccaaaggaggtcactggagacatgtttaccaaagattcaggcaatgtagtggaagaagtgaagttgaaggtagtttatgtagcaccatcgtcctctcaaagcgaaagatttgaggatggtaatctcggcagtttgagttatcaagaggaaacaaaggaacctaaagaatcagaaaaaataatcactgagccatttgctttgatttcgaaactgatggaggagaagaattctgctattgaactgaacaacaaggttcgacaagaattggcgagacatcagcaggcggcatggtggtttctcattagttttagtactggtggttgctattctgggaatactgctagggttcctcatgaagagatgagtgtatgtaatgatttatcttgtttggccttttctgaactaaacaaaattgtatgtgctctgtgtgcttgctgttgtacaactcagtgatctgttaatcatagtatctgaggcctattgtaattttctgattcatattataaactttagtcaatctgtcatagttactaacaccagctgttatcagcttgcaagcgacttgaggtctggaggtgtggtcttttggttttcgatagattttgactaattgttggcatccttttgcacatataaacagaatggtttctttgaa

SEQ ID NO: 44102 - DNA, 3380 bp, Zea Mays
gcacccatcggacctcagatgacactagcaacagcagtcatgctttgccatcgcttctatttacaccagtcccttgccaaaaatggatggcaggtgagagattatattgttgtgccagtgatggttgctgatgtctatgaaaagcgacaagagtgcagagtttcattgccaagcatttgttggaaatatgttctccaccatgtctaacttaacattacagaatatccttcaaaccatttgaagtattttatcttgtaataatattactgtattagttttctgattacatgctaattgctgattcatcttgatgctactctacctcaagagtcatgatcacttcgtgattggacatttcaaagggatcatttacctgctacaatgtgtcaagggcaccagggctcagagtagctggaccttgactactggacctcgactacatagttcgtagtcatggccgggaatggggtgaaggtttctcccctctgcaccctatgttgagggaggagattagcagtagaaagtttaatcattgcttaatcgtcaagtgttccaatacaagatgtaaataggcacgtagcctctaacgaacaatagatggaaaagctcctcaaattgaggcaccgtagtttcctaccaactaaactatgcaggcctgacactagctgcagtgatcatgcctacagcgcgtttgacacgcgctgcgtgttcttggcggcatctctggcatgggtctggtgcgtgtaccagggattaccttcccggtcggtaaccagcaaatttcggtagtttttctcgttttcgatgtctaccgagaaatgaaaaccggtgtgattttttatgtatttcgatttcaaatttgaaaatataatagtcaaattttggtcaacaaaacggtttttgaaatcacgaaacgagaatgtaatccctggcgtgtactggtggccccacatgacacatgttattggaaaacttctttttagaacttttaagtcctgattgacttctcctagtatactaaaaagttttgaggtagttaagagttattttcagtttacctaggaagtttgtgtttgtcagatatgatactattgtgattaagtacaatacttcgtcataactgggcaaatgcattcagaactttcctattgaagttacttaaccccgaccagccaactgggttgcaacttactgttacaacttaagcaagtttgacatactttgacggatcatcttgtaaattacatattcaccaacagttgcaacagtatgtgtatttctggcgtcgaaagttgaagatactccttgtcccctggaccatgtagttagagtggcctatgaaacaatgtataggcgggacactgctgcggctcaaaggatccgtcagaaggatgtttttgagaagcagaaagcgctcattttgatcggagagagattgcttcttacaactattcgatttgatttcaacattcagcatccttatagaccacttcttgatgccatgcaaaatcttggcatcaatcaaaaagaagtgaaacaagtagcatggaactttgtgaatgactggcttaaaacaacattgtgtctacagtataaaccccagtacatagctgctggttccctttatctggctgcaaagcttcacaatatcaagcttcccttgcatggagcgcatgtttggtggcaccaatttgatgttgcaccaaagcctctggaagccgtcattcatcaaatgatggagcttgcggctttgaaaaagttgatgcctgctcgacccaatccggttaagctgaaggaaactttatgtgaagctaaactgagcttatctaatagcccagactctgtgttgaatcaatcaaacttgttaataagcagctcaagtcctgatattggcgagcccagtgacaaagtgcaggtggattcctgccaatacttgataagcagtcacatgggtgattgtagggtctcaggtcctgacagcagttcgttgaatacttgtgctaatagaaatgtctcttgtaaagcacatgatgaagagagcttggatcaggccttaataatcaaacatgacagtgggatgatgccttctagtaatcagacatcattatatgctactgtaggcactgagggcagtgctgaactgaagcaggatgtaagccattgtaatgacttcaatatcagagtcaatgacgaaagcttgaaccaggtgttaagaaatcagcatggtgatgctatcccattacctgacgtggtatcgctggatgccaaggtggacaaggaaaggagttggtgtgtggaaccattaattgcaaactctgattgctgtactgacagtgttaatgtggatagcttgtgcactgatcagagattggctgatgctccttcaggccccacagctgatgcaccatccatgctggccgaggaggaatcttatccttttagtgcaaagcttgaaaatattgatgttgccaggatcaaaggtttattgatgaagaggaagagccggagagagatccaagaccgagccattgcttcagatggtctaagtgaagaagactggatcgagagggagcttgaatctgggattgttacaaaccaagaagccaattgtgctgccatctcagacgagctaagtgacgaagcctggattgagagagaactcgagtcagggattgtggtcggaccaagaaatgagcaagcgatcacttttgatggtttgagtgaagatgattggatcgagagagagctggagtctgggatcatcgttgagccagcacctgctaccaagaagcggaagctggagtcaagctgttagctctgcattcgaaggccagattccaagcaggtgaataataacagatggttgcgagtaggaccacatcgaagccaagagatacatgtcgcacagatgggaggatcaatattatcctttttttatttctttataaccaaacaccttggagtactttgacacaaggggtgtgttcacagtgggatctccccagtttcttgaatgcagaaccgtatccgttgtatttgttccttcttgtcgtgagtgtaaatctagcgtgtccgaagttcggttttagattgtaggtgtaactgtagcagggattatctggtgttaagcccaacgagaaaatgattcagtgtaactgttactgtaaggaaagaagttattcagtgtagatttatggttaacacaagaagaggcaattactggtgtatgatgtttataaattgatgatgaatgttactggcagctcaaaagaaaagacagttactggtaactaaagaaaagtacgtttaacggagctgatcacattcaatcccctattgagctgcccttggtcgtcaattgtataacaactttctgcgtg

SEQ ID NO: 44103 - DNA, 2873 bp, Zea Mays
ttctctcgcgtcgttctcccgtagtcccgtgccctcgcgtgcgctctatctgtttctggtggcgacgacttggcggtccccgctgccgccgtgcccaggcctctacttcgggaccttcaccggcgacgagcacccatcgggttgcttcgcaaaacttccaacatccaggatacaattaattacgattccttcaactttatctcgatttataggaggttgcacagagcccatccaacagggtgtctcagacatactgatggatggggtgcccaatatccttgagaaatcatcacatgaatgcatgtactcttggtacttcaccagggaagaactagagaaattttctccatcaaggaaagatggtattactgaaaacaaggaatcagaaattcggcatttatattgttcatttatccgggatgttggcatcaggctgaagctacctcagatgacactagcaacagcagtcatgctttgccatcgcttctatttacaccagtcccttgccaaaaatggatggcaggtgagagattatattgttgtgccagtgatggttgctgatgtctatgaaaagcgacaagagtgcagagtttcattgccaagcatttgttggaaatatgttctccaccatgtctaacttaacattacagattaaccccgaccagccaactgggttgcaacttactgttacaacttaagcaagtttgacatactttgacggatcatcttgtaaattacatattcaccaacagttgcaacagtatgtgtatttctggcgtcgaaagttgaagatactccttgtcccctggaccatgtagttagagtggcctatgaaacaatgtataggcgggacactgctgcggctcaaaggatccgtcagaaggatgtttttgagaagcagaaagcgctcattttgatcggagagagattgcttcttacaactattcgatttgatttcaacattcagcatccttatagaccacttcttgatgccatgcaaaatcttggcatcaatcaaaaagaagtgaaacaagtagcatggaactttgtgaatgactggcttaaaacaacattgtgtctacagtataaaccccagtacatagctgctggttccctttatctggctgcaaagcttcacaatatcaagcttcccttgcatggagcgcatgtttggtggcaccaatttgatgttgcaccaaagcctctggaagccgtcattcatcaaatgatggagcttgcggctttgaaaaagttgatgcctgctcgacccaatccggttaagctgaaggaaactttatgtgaagctaaactgagcttatctaatagcccagactctgtgttgaatcaatcaaacttgttaataagcagctcaagtcctgatattggcgagcccagtgacaaagtgcaggtggattcctgccaatacttgataagcagtcacatgggtgattgtagggtctcaggtcctgacagcagttcgttgaatacttgtgctaatagaaatgtctcttgtaaagcacatgatgaagagagcttggatcaggccttaataatcaaacatgacagtgggatgatgccttctagtaatcagacatcattatatgctactgtaggcactgagggcagtgctgaactgaagcaggatgtaagccattgtaatgacttcaatatcagagtcaatgacgaaagcttgaaccaggtgttaagaaatcagcatggtgatgctatcccattacctgacgtggtatcgctggatgccaaggtggacaaggaaaggagttggtgtgtggaaccattaattgcaaactctgattgctgtactgacagtgttaatgtggatagcttgtgcactgatcagagattggctgatgctccttcaggccccacagctgatgcaccatccatgctggccgaggaggaatcttatccttttagtgcaaagcttgaaaatattgatgttgccaggatcaaaggtttattgatgaagaggaagagccggagagagatccaagaccgagccattgcttcagatggtctaagtgaagaagactggatcgagagggagcttgaatctgggattgttacaaaccaagaagccaattgtgctgccatctcagacgagctaagtgacgaagcctggattgagagagaactcgagtcagggattgtggtcggaccaagaaatgagcaagcgatcacttttgatggtttgagtgaagatgattggatcgagagagagctggagtctgggatcatcgttgagccagcacctgctaccaagaagcggaagctggagtcaagctgttagctctgcattcgaaggccagattccaagcaggtgaataataacagatggttgcgagtaggaccacatcgaagccaagagatacatgtcgcacagatgggaggatcaatattatcctttttttatttctttataaccaaacaccttggagtactttgacacaaggggtgtgttcacagtgggatctccccagtttcttgaatgcagaaccgtatccgttgtatttgttccttcttgtcgtgagtgtaaatctagcgtgtccgaagttcggttttagattgtaggtgtaactgtagcagggattatctggtgttaagcccaacgagaaaatgattcagtgtaactgttactgtaaggaaagaagttattcagtgtagatttatggttaacacaagaagaggcaattactggtgtatgatgtttataaattgatgatgaatgttactggcagctcaaaagaaaagacagttactggtaactaaagaaaagtacgtttaacggagctgatcacattcaatcccctattgagctgcccttggtcgtcaattgtataacaactttctgcgtg

SEQ ID NO: 44104 - DNA, 2765 bp, Zea Mays
ttctctcgcgtcgttctcccgtagtcccgtgccctcgcgtgcgctctatctgtttctggtggcgacgacttggcggtccccgctgccgccgtgcccaggcctctacttcgggaccttcaccggcgacgagcacccatcgggttgcttcgcaaaacttccaacatccaggatacaattaattacgattccttcaactttatctcgatttataggaggttgcacagagcccatccaacagggtgtctcagacatactgatggatggggtgcccaatatccttgagaaatcatcacatgaatgcatgtactcttggtacttcaccagggaagaactagagaaattttctccatcaaggaaagatggtattactgaaaacaaggaatcagaaattcggcatttatattgttcatttatccgggatgttggcatcaggctgaagctacctcagatgacactagcaacagcagtcatgctttgccatcgcttctatttacaccagtcccttgccaaaaatggatggcagaactttcctattgaagttacttaaccccgaccagccaactgggttgcaacttactgttacaacttaagcaagtttgacatactttgacggatcatcttgtaaattacatattcaccaacagttgcaacagtatgtgtatttctggcgtcgaaagttgaagatactccttgtcccctggaccatgtagttagagtggcctatgaaacaatgtataggcgggacactgctgcggctcaaaggatccgtcagaaggatgtttttgagaagcagaaagcgctcattttgatcggagagagattgcttcttacaactattcgatttgatttcaacattcagcatccttatagaccacttcttgatgccatgcaaaatcttggcatcaatcaaaaagaagtgaaacaagtagcatggaactttgtgaatgactggcttaaaacaacattgtgtctacagtataaaccccagtacatagctgctggttccctttatctggctgcaaagcttcacaatatcaagcttcccttgcatggagcgcatgtttggtggcaccaatttgatgttgcaccaaagcctctggaagccgtcattcatcaaatgatggagcttgcggctttgaaaaagttgatgcctgctcgacccaatccggttaagctgaaggaaactttatgtgaagctaaactgagcttatctaatagcccagactctgtgttgaatcaatcaaacttgttaataagcagctcaagtcctgatattggcgagcccagtgacaaagtgcaggtggattcctgccaatacttgataagcagtcacatgggtgattgtagggtctcaggtcctgacagcagttcgttgaatacttgtgctaatagaaatgtctcttgtaaagcacatgatgaagagagcttggatcaggccttaataatcaaacatgacagtgggatgatgccttctagtaatcagacatcattatatgctactgtaggcactgagggcagtgctgaactgaagcaggatgtaagccattgtaatgacttcaatatcagagtcaatgacgaaagcttgaaccaggtgttaagaaatcagcatggtgatgctatcccattacctgacgtggtatcgctggatgccaaggtggacaaggaaaggagttggtgtgtggaaccattaattgcaaactctgattgctgtactgacagtgttaatgtggatagcttgtgcactgatcagagattggctgatgctccttcaggccccacagctgatgcaccatccatgctggccgaggaggaatcttatccttttagtgcaaagcttgaaaatattgatgttgccaggatcaaaggtttattgatgaagaggaagagccggagagagatccaagaccgagccattgcttcagatggtctaagtgaagaagactggatcgagagggagcttgaatctgggattgttacaaaccaagaagccaattgtgctgccatctcagacgagctaagtgacgaagcctggattgagagagaactcgagtcagggattgtggtcggaccaagaaatgagcaagcgatcacttttgatggtttgagtgaagatgattggatcgagagagagctggagtctgggatcatcgttgagccagcacctgctaccaagaagcggaagctggagtcaagctgttagctctgcattcgaaggccagattccaagcaggtgaataataacagatggttgcgagtaggaccacatcgaagccaagagatacatgtcgcacagatgggaggatcaatattatcctttttttatttctttataaccaaacaccttggagtactttgacacaaggggtgtgttcacagtgggatctccccagtttcttgaatgcagaaccgtatccgttgtatttgttccttcttgtcgtgagtgtaaatctagcgtgtccgaagttcggttttagattgtaggtgtaactgtagcagggattatctggtgttaagcccaacgagaaaatgattcagtgtaactgttactgtaaggaaagaagttattcagtgtagatttatggttaacacaagaagaggcaattactggtgtatgatgtttataaattgatgatgaatgttactggcagctcaaaagaaaagacagttactggtaactaaagaaaagtacgtttaacggagctgatcacattcaatcccctattgagctgcccttggtcgtcaattgtataacaactttctgcgtg

SEQ ID NO: 44105 - DNA, 2827 bp, Zea Mays
ttctctcgcgtcgttctcccgtagtcccgtgccctcgcgtgcgctctatctgtttctggtggcgacgacttggcggtccccgctgccgccgtgcccaggcctctacttcgggaccttcaccggcgacgagcacccatcgggttgcttcgcaaaacttccaacatccaggatacaattaattacgattccttcaactttatctcgatttataggaggttgcacagagcccatccaacagggtgtctcagacatactgatggatggggtgcccaatatccttgagaaatcatcacatgaatgcatgtactcttggtacttcaccagggaagaactagagaaattttctccatcaaggaaagatggtattactgaaaacaaggaatcagaaattcggcatttatattgttcatttatccgggatgttggcatcaggctgaagctacctcagatgacactagcaacagcagtcatgctttgccatcgcttctatttacaccagtcccttgccaaaaatggatggcaggtgagagattatattgttgtgccagtgatggttgctgatgtctatgaaaagcgacaagagtgcagagtttcattgccaagcatttgttggaaatatccaactgggttgcaacttactgttacaacttaagcaagtttgacatactttgacggatcatcttgtaaattacatattcaccaacagttgcaacagtatgtgtatttctggcgtcgaaagttgaagatactccttgtcccctggaccatgtagttagagtggcctatgaaacaatgtataggcgggacactgctgcggctcaaaggatccgtcagaaggatgtttttgagaagcagaaagcgctcattttgatcggagagagattgcttcttacaactattcgatttgatttcaacattcagcatccttatagaccacttcttgatgccatgcaaaatcttggcatcaatcaaaaagaagtgaaacaagtagcatggaactttgtgaatgactggcttaaaacaacattgtgtctacagtataaaccccagtacatagctgctggttccctttatctggctgcaaagcttcacaatatcaagcttcccttgcatggagcgcatgtttggtggcaccaatttgatgttgcaccaaagcctctggaagccgtcattcatcaaatgatggagcttgcggctttgaaaaagttgatgcctgctcgacccaatccggttaagctgaaggaaactttatgtgaagctaaactgagcttatctaatagcccagactctgtgttgaatcaatcaaacttgttaataagcagctcaagtcctgatattggcgagcccagtgacaaagtgcaggtggattcctgccaatacttgataagcagtcacatgggtgattgtagggtctcaggtcctgacagcagttcgttgaatacttgtgctaatagaaatgtctcttgtaaagcacatgatgaagagagcttggatcaggccttaataatcaaacatgacagtgggatgatgccttctagtaatcagacatcattatatgctactgtaggcactgagggcagtgctgaactgaagcaggatgtaagccattgtaatgacttcaatatcagagtcaatgacgaaagcttgaaccaggtgttaagaaatcagcatggtgatgctatcccattacctgacgtggtatcgctggatgccaaggtggacaaggaaaggagttggtgtgtggaaccattaattgcaaactctgattgctgtactgacagtgttaatgtggatagcttgtgcactgatcagagattggctgatgctccttcaggccccacagctgatgcaccatccatgctggccgaggaggaatcttatccttttagtgcaaagcttgaaaatattgatgttgccaggatcaaaggtttattgatgaagaggaagagccggagagagatccaagaccgagccattgcttcagatggtctaagtgaagaagactggatcgagagggagcttgaatctgggattgttacaaaccaagaagccaattgtgctgccatctcagacgagctaagtgacgaagcctggattgagagagaactcgagtcagggattgtggtcggaccaagaaatgagcaagcgatcacttttgatggtttgagtgaagatgattggatcgagagagagctggagtctgggatcatcgttgagccagcacctgctaccaagaagcggaagctggagtcaagctgttagctctgcattcgaaggccagattccaagcaggtgaataataacagatggttgcgagtaggaccacatcgaagccaagagatacatgtcgcacagatgggaggatcaatattatcctttttttatttctttataaccaaacaccttggagtactttgacacaaggggtgtgttcacagtgggatctccccagtttcttgaatgcagaaccgtatccgttgtatttgttccttcttgtcgtgagtgtaaatctagcgtgtccgaagttcggttttagattgtaggtgtaactgtagcagggattatctggtgttaagcccaacgagaaaatgattcagtgtaactgttactgtaaggaaagaagttattcagtgtagatttatggttaacacaagaagaggcaattactggtgtatgatgtttataaattgatgatgaatgttactggcagctcaaaagaaaagacagttactggtaactaaagaaaagtacgtttaacggagctgatcacattcaatcccctattgagctgcccttggtcgtcaattgtataacaactttctgcgtg

SEQ ID NO: 44106 - DNA, 3792 bp, Zea Mays
ttctctcgcgtcgttctcccgtagtcccgtgccctcgcgtgcgctctatctgtttctggtggcgacgacttggcggtccccgctgccgccgtgcccaggcctctacttcgggaccttcaccggcgacgagcacccatcgggttgcttcgcaaaacttccaacatccaggatacaattaattacgattccttcaactttatctcgatttataggaggttgcacagagcccatccaacagggtgtctcagacatactgatggatggggtgcccaatatccttgagaaatcatcacatgaatgcatgtactcttggtacttcaccagggaagaactagagaaattttctccatcaaggaaagatggtattactgaaaacaaggaatcagaaattcggcatttatattgttcatttatccgggatgttggcatcaggctgaagctacctcagatgacactagcaacagcagtcatgctttgccatcgcttctatttacaccagtcccttgccaaaaatggatggcaggtgagagattatattgttgtgccagtgatggttgctgatgtctatgaaaagcgacaagagtgcagagtttcattgccaagcatttgttggaaatatgttctccaccatgtctaacttaacattacagaatatccttcaaaccatttgaagtattttatcttgtaataatattactgtattagttttctgattacatgctaattgctgattcatcttgatgctactctacctcaagagtcatgatcacttcgtgattggacatttcaaagggatcatttacctgctacaatgtgtcaagggcaccagggctcagagtagctggaccttgactactggacctcgactacatagttcgtagtcatggccgggaatggggtgaaggtttctcccctctgcaccctatgttgagggaggagattagcagtagaaagtttaatcattgcttaatcgtcaagtgttccaatacaagatgtaaataggcacgtagcctctaacgaacaatagatggaaaagctcctcaaattgaggcaccgtagtttcctaccaactaaactatgcaggcctgacactagctgcagtgatcatgcctacagcgcgtttgacacgcgctgcgtgttcttggcggcatctctggcatgggtctggtgcgtgtaccagggattaccttcccggtcggtaaccagcaaatttcggtagtttttctcgttttcgatgtctaccgagaaatgaaaaccggtgtgattttttatgtatttcgatttcaaatttgaaaatataatagtcaaattttggtcaacaaaacggtttttgaaatcacgaaacgagaatgtaatccctggcgtgtactggtggccccacatgacacatgttattggaaaacttctttttagaacttttaagtcctgattgacttctcctagtatactaaaaagttttgaggtagttaagagttattttcagtttacctaggaagtttgtgtttgtcagatatgatactattgtgattaagtacaatacttcgtcataactgggcaaatgcattcagaactttcctattgaagttacttaaccccgaccagccaactgggttgcaacttactgttacaacttaagcaagtttgacatactttgacggatcatcttgtaaattacatattcaccaacagttgcaacagtatgtgtatttctggcgtcgaaagttgaagatactccttgtcccctggaccatgtagttagagtggcctatgaaacaatgtataggcgggacactgctgcggctcaaaggatccgtcagaagaaagcgctcattttgatcggagagagattgcttcttacaactattcgatttgatttcaacattcagcatccttatagaccacttcttgatgccatgcaaaatcttggcatcaatcaaaaagaagtgaaacaagtagcatggaactttgtgaatgactggcttaaaacaacattgtgtctacagtataaaccccagtacatagctgctggttccctttatctggctgcaaagcttcacaatatcaagcttcccttgcatggagcgcatgtttggtggcaccaatttgatgttgcaccaaagcctctggaagccgtcattcatcaaatgatggagcttgcggctttgaaaaagttgatgcctgctcgacccaatccggttaagctgaaggaaactttatgtgaagctaaactgagcttatctaatagcccagactctgtgttgaatcaatcaaacttgttaataagcagctcaagtcctgatattggcgagcccagtgacaaagtgcaggtggattcctgccaatacttgataagcagtcacatgggtgattgtagggtctcaggtcctgacagcagttcgttgaatacttgtgctaatagaaatgtctcttgtaaagcacatgatgaagagagcttggatcaggccttaataatcaaacatgacagtgggatgatgccttctagtaatcagacatcattatatgctactgtaggcactgagggcagtgctgaactgaagcaggatgtaagccattgtaatgacttcaatatcagagtcaatgacgaaagcttgaaccaggtgttaagaaatcagcatggtgatgctatcccattacctgacgtggtatcgctggatgccaaggtggacaaggaaaggagttggtgtgtggaaccattaattgcaaactctgattgctgtactgacagtgttaatgtggatagcttgtgcactgatcagagattggctgatgctccttcaggccccacagctgatgcaccatccatgctggccgaggaggaatcttatccttttagtgcaaagcttgaaaatattgatgttgccaggatcaaaggtttattgatgaagaggaagagccggagagagatccaagaccgagccattgcttcagatggtctaagtgaagaagactggatcgagagggagcttgaatctgggattgttacaaaccaagaagccaattgtgctgccatctcagacgagctaagtgacgaagcctggattgagagagaactcgagtcagggattgtggtcggaccaagaaatgagcaagcgatcacttttgatggtttgagtgaagatgattggatcgagagagagctggagtctgggatcatcgttgagccagcacctgctaccaagaagcggaagctggagtcaagctgttagctctgcattcgaaggccagattccaagcaggtgaataataacagatggttgcgagtaggaccacatcgaagccaagagatacatgtcgcacagatgggaggatcaatattatcctttttttatttctttataaccaaacaccttggagtactttgacacaaggggtgtgttcacagtgggatctccccagtttcttgaatgcagaaccgtatccgttgtatttgttccttcttgtcgtgagtgtaaatctagcgtgtccgaagttcggttttagattgtaggtgtaactgtagcagggattatctggtgttaagcccaacgagaaaatgattcagtgtaactgttactgtaaggaaagaagttattcagtgtagatttatggttaacacaagaagaggcaattactggtgtatgatgtttataaattgatgatgaatgttactggcagctcaaaagaaaagacagttactggtaactaaagaaaagtacgtttaacggagctgatcacattcaatcccctattgagctgcccttggtcgtcaattgtataacaactttctgcgtg

SEQ ID NO: 44107 - DNA, 3174 bp, Zea Mays
ttctctcgcgtcgttctcccgtagtcccgtgccctcgcgtgcgctctatctgtttctggtggcgacgacttggcggtccccgctgccgccgtgcccaggcctctacttcgggaccttcaccggcgacgagcacccatcgggttgcttcgcaaaacttccaacatccaggatacaattaattacgattccttcaactttatctcgatttataggaggttgcacagagcccatccaacagggtgtctcagacatactgatggatggggtgcccaatatccttgagaaatcatcacatgaatgcatgtactcttggtacttcaccagggaagaactagagaaattttctccatcaaggaaagatggtattactgaaaacaaggaatcagaaattcggcatttatattgttcatttatccgggatgttggcatcaggctgaagctacctcagatgacactagcaacagcagtcatgctttgccatcgcttctatttacaccagtcccttgccaaaaatggatggcaggtgagagattatattgttgtgccagtgatggttgctgatgtctatgaaaagcgacaagagtgcagagtttcattgccaagcatttgttggaaatatgttctccaccatgtctaacttaacattacagattaaccccgaccagccaactgggttgcaacttactgttacaacttaagcaagtttgacatactttgacggatcatcttgtaaattacatattcaccagtaagttttatagaaatggcttacttcactgcatttcttttcttagttttgtaagatctgtttagttcatatttacaagatcacttttccagaaatcatctcactgttatcatgcaacccctagttatgtcgaacaccagtagtaatttctgttttattctgtatgttcgtaatatttactctgtttcaagtacataatctatttgtggtatgcttattgtggaccagtagttcttctggaacttacttttatttccttttactggttttaatggttccttttgtcattaccctatttcagacagttgcaacagtatgtgtatttctggcgtcgaaagttgaagatactccttgtcccctggaccatgtagttagagtggcctatgaaacaatgtataggcgggacactgctgcggctcaaaggatccgtcagaaggatgtttttgagaagcagaaagcgctcattttgatcggagagagattgcttcttacaactattcgatttgatttcaacattcagcatccttatagaccacttcttgatgccatgcaaaatcttggcatcaatcaaaaagaagtgaaacaagtagcatggaactttgtgaatgactggcttaaaacaacattgtgtctacagtataaaccccagtacatagctgctggttccctttatctggctgcaaagcttcacaatatcaagcttcccttgcatggagcgcatgtttggtggcaccaatttgatgttgcaccaaagcctctggaagccgtcattcatcaaatgatggagcttgcggctttgaaaaagttgatgcctgctcgacccaatccggttaagctgaaggaaactttatgtgaagctaaactgagcttatctaatagcccagactctgtgttgaatcaatcaaacttgttaataagcagctcaagtcctgatattggcgagcccagtgacaaagtgcaggtggattcctgccaatacttgataagcagtcacatgggtgattgtagggtctcaggtcctgacagcagttcgttgaatacttgtgctaatagaaatgtctcttgtaaagcacatgatgaagagagcttggatcaggccttaataatcaaacatgacagtgggatgatgccttctagtaatcagacatcattatatgctactgtaggcactgagggcagtgctgaactgaagcaggatgtaagccattgtaatgacttcaatatcagagtcaatgacgaaagcttgaaccaggtgttaagaaatcagcatggtgatgctatcccattacctgacgtggtatcgctggatgccaaggtggacaaggaaaggagttggtgtgtggaaccattaattgcaaactctgattgctgtactgacagtgttaatgtggatagcttgtgcactgatcagagattggctgatgctccttcaggccccacagctgatgcaccatccatgctggccgaggaggaatcttatccttttagtgcaaagcttgaaaatattgatgttgccaggatcaaaggtttattgatgaagaggaagagccggagagagatccaagaccgagccattgcttcagatggtctaagtgaagaagactggatcgagagggagcttgaatctgggattgttacaaaccaagaagccaattgtgctgccatctcagacgagctaagtgacgaagcctggattgagagagaactcgagtcagggattgtggtcggaccaagaaatgagcaagcgatcacttttgatggtttgagtgaagatgattggatcgagagagagctggagtctgggatcatcgttgagccagcacctgctaccaagaagcggaagctggagtcaagctgttagctctgcattcgaaggccagattccaagcaggtgaataataacagatggttgcgagtaggaccacatcgaagccaagagatacatgtcgcacagatgggaggatcaatattatcctttttttatttctttataaccaaacaccttggagtactttgacacaaggggtgtgttcacagtgggatctccccagtttcttgaatgcagaaccgtatccgttgtatttgttccttcttgtcgtgagtgtaaatctagcgtgtccgaagttcggttttagattgtaggtgtaactgtagcagggattatctggtgttaagcccaacgagaaaatgattcagtgtaactgttactgtaaggaaagaagttattcagtgtagatttatggttaacacaagaagaggcaattactggtgtatgatgtttataaattgatgatgaatgttactggcagctcaaaagaaaagacagttactggtaactaaagaaaagtacgtttaacggagctgatcacattcaatcccctattgagctgcccttggtcgtcaattgtataacaactttctgcgtg

SEQ ID NO: 44108 - DNA, 2553 bp, Zea Mays
ttctctcgcgtcgttctcccgtagtcccgtgccctcgcgtgcgctctatctgtttctggtggcgacgacttggcggtccccgctgccgccgtgcccaggcctctacttcgggaccttcaccggcgacgagcacccatcggacctcagatgacactagcaacagcagtcatgctttgccatcgcttctatttacaccagtcccttgccaaaaatggatggcaggtgagagattatattgttgtgccagtgatggttgctgatgtctatgaaaagcgacaagagtgcagagtttcattgccaagcatttgttggaaatatgttctccaccatgtctaacttaacattacagatgggttgcaacttactgttacaacttaagcaagtttgacatactttgacggatcatcttgtaaattacatattcaccaacagttgcaacagtatgtgtatttctggcgtcgaaagttgaagatactccttgtcccctggaccatgtagttagagtggcctatgaaacaatgtataggcgggacactgctgcggctcaaaggatccgtcagaaggatgtttttgagaagcagaaagcgctcattttgatcggagagagattgcttcttacaactattcgatttgatttcaacattcagcatccttatagaccacttcttgatgccatgcaaaatcttggcatcaatcaaaaagaagtgaaacaagtagcatggaactttgtgaatgactggcttaaaacaacattgtgtctacagtataaaccccagtacatagctgctggttccctttatctggctgcaaagcttcacaatatcaagcttcccttgcatggagcgcatgtttggtggcaccaatttgatgttgcaccaaagcctctggaagccgtcattcatcaaatgatggagcttgcggctttgaaaaagttgatgcctgctcgacccaatccggttaagctgaaggaaactttatgtgaagctaaactgagcttatctaatagcccagactctgtgttgaatcaatcaaacttgttaataagcagctcaagtcctgatattggcgagcccagtgacaaagtgcaggtggattcctgccaatacttgataagcagtcacatgggtgattgtagggtctcaggtcctgacagcagttcgttgaatacttgtgctaatagaaatgtctcttgtaaagcacatgatgaagagagcttggatcaggccttaataatcaaacatgacagtgggatgatgccttctagtaatcagacatcattatatgctactgtaggcactgagggcagtgctgaactgaagcaggatgtaagccattgtaatgacttcaatatcagagtcaatgacgaaagcttgaaccaggtgttaagaaatcagcatggtgatgctatcccattacctgacgtggtatcgctggatgccaaggtggacaaggaaaggagttggtgtgtggaaccattaattgcaaactctgattgctgtactgacagtgttaatgtggatagcttgtgcactgatcagagattggctgatgctccttcaggccccacagctgatgcaccatccatgctggccgaggaggaatcttatccttttagtgcaaagcttgaaaatattgatgttgccaggatcaaaggtttattgatgaagaggaagagccggagagagatccaagaccgagccattgcttcagatggtctaagtgaagaagactggatcgagagggagcttgaatctgggattgttacaaaccaagaagccaattgtgctgccatctcagacgagctaagtgacgaagcctggattgagagagaactcgagtcagggattgtggtcggaccaagaaatgagcaagcgatcacttttgatggtttgagtgaagatgattggatcgagagagagctggagtctgggatcatcgttgagccagcacctgctaccaagaagcggaagctggagtcaagctgttagctctgcattcgaaggccagattccaagcaggtgaataataacagatggttgcgagtaggaccacatcgaagccaagagatacatgtcgcacagatgggaggatcaatattatcctttttttatttctttataaccaaacaccttggagtactttgacacaaggggtgtgttcacagtgggatctccccagtttcttgaatgcagaaccgtatccgttgtatttgttccttcttgtcgtgagtgtaaatctagcgtgtccgaagttcggttttagattgtaggtgtaactgtagcagggattatctggtgttaagcccaacgagaaaatgattcagtgtaactgttactgtaaggaaagaagttattcagtgtagatttatggttaacacaagaagaggcaattactggtgtatgatgtttataaattgatgatgaatgttactggcagctcaaaagaaaagacagttactggtaactaaagaaaagtacgtttaacggagctgatcacattcaatcccctattgagctgcccttggtcgtcaattgtataacaactttctgcgtg

SEQ ID NO: 44109 - DNA, 4112 bp, Zea Mays
gttctctcgcgtcgttctcccgtagtcccgtgccctcgcgtgcgctctatctgtttctggtggcgacgacttggcggtccccgctgccgccgtgcccaggcctctacttcgggaccttcaccggcgacgagcacccatcgggttgcttcgcaaaacttccaacatccaggatacaattaattacgattccttcaactttatctcgatttataggaggttgcacagagcccatccaacagggtgtctcagacatactgatggatggggtgcccaatatccttgagaaatcatcacatgaatgcatgtactcttggtacttcaccagggaagaactagagaaattttctccatcaaggaaagatggtattactgaaaacaaggaatcagaaattcggcatttatattgttcatttatccgggatgttggcatcaggctgaagctacctcagatgacactagcaacagcagtcatgctttgccatcgcttctatttacaccagtcccttgccaaaaatggatggcaggtgagagattatattgttgtgccagtgatggttgctgatgtctatgaaaagcgacaagagtgcagagtttcattgccaagcatttgttggaaatatgttctccaccatgtctaacttaacattacagaatatccttcaaaccatttgaagtattttatcttgtaataatattactgtattagttttctgattacatgctaattgctgattcatcttgatgctactctacctcaagagtcatgatcacttcgtgattggacatttcaaagggatcatttacctgctacaatgtgtcaagggcaccagggctcagagtagctggaccttgactactggacctcgactacatagttcgtagtcatggccgggaatggggtgaaggtttctcccctctgcaccctatgttgagggaggagattagcagtagaaagtttaatcattgcttaatcgtcaagtgttccaatacaagatgtaaataggcacgtagcctctaacgaacaatagatggaaaagctcctcaaattgaggcaccgtagtttcctaccaactaaactatgcaggcctgacactagctgcagtgatcatgcctacagcgcgtttgacacgcgctgcgtgttcttggcggcatctctggcatgggtctggtgcgtgtaccagggattaccttcccggtcggtaaccagcaaatttcggtagtttttctcgttttcgatgtctaccgagaaatgaaaaccggtgtgattttttatgtatttcgatttcaaatttgaaaatataatagtcaaattttggtcaacaaaacggtttttgaaatcacgaaacgagaatgtaatccctggcgtgtactggtggccccacatgacacatgttattggaaaacttctttttagaacttttaagtcctgattgacttctcctagtatactaaaaagttttgaggtagttaagagttattttcagtttacctaggaagtttgtgtttgtcagatatgatactattgtgattaagtacaatacttcgtcataactgggcaaatgcattcagaactttcctattgaagttacttaaccccgaccagccaactgggttgcaacttactgttacaacttaagcaagtttgacatactttgacggatcatcttgtaaattacatattcaccagtaagttttatagaaatggcttacttcactgcatttcttttcttagttttgtaagatctgtttagttcatatttacaagatcacttttccagaaatcatctcactgttatcatgcaacccctagttatgtcgaacaccagtagtaatttctgttttattctgtatgttcgtaatatttactctgtttcaagtacataatctatttgtggtatgcttattgtggaccagtagttcttctggaacttacttttatttccttttactggttttaatggttccttttgtcattaccctatttcagacagttgcaacagtatgtgtatttctggcgtcgaaagttgaagatactccttgtcccctggaccatgtagttagagtggcctatgaaacaatgtataggcgggacactgctgcggctcaaaggatccgtcagaaggatgtttttgagaagcagaaagcgctcattttgatcggagagagattgcttcttacaactattcgatttgatttcaacattcagcatccttatagaccacttcttgatgccatgcaaaatcttggcatcaatcaaaaagaagtgaaacaagtagcatggaactttgtgaatgactggcttaaaacaacattgtgtctacagtataaaccccagtacatagctgctggttccctttatctggctgcaaagcttcacaatatcaagcttcccttgcatggagcgcatgtttggtggcaccaatttgatgttgcaccaaagcctctggaagccgtcattcatcaaatgatggagcttgcggctttgaaaaagttgatgcctgctcgacccaatccggttaagctgaaggaaactttatgtgaagctaaactgagcttatctaatagcccagactctgtgttgaatcaatcaaacttgttaataagcagctcaagtcctgatattggcgagcccagtgacaaagtgcaggtggattcctgccaatacttgataagcagtcacatgggtgattgtagggtctcaggtcctgacagcagttcgttgaatacttgtgctaatagaaatgtctcttgtaaagcacatgatgaagagagcttggatcaggccttaataatcaaacatgacagtgggatgatgccttctagtaatcagacatcattatatgctactgtaggcactgagggcagtgctgaactgaagcaggatgtaagccattgtaatgacttcaatatcagagtcaatgacgaaagcttgaaccaggtgttaagaaatcagcatggtgatgctatcccattacctgacgtggtatcgctggatgccaaggtggacaaggaaaggagttggtgtgtggaaccattaattgcaaactctgattgctgtactgacagtgttaatgtggatagcttgtgcactgatcagagattggctgatgctccttcaggccccacagctgatgcaccatccatgctggccgaggaggaatcttatccttttagtgcaaagcttgaaaatattgatgttgccaggatcaaaggtttattgatgaagaggaagagccggagagagatccaagaccgagccattgcttcagatggtctaagtgaagaagactggatcgagagggagcttgaatctgggattgttacaaaccaagaagccaattgtgctgccatctcagacgagctaagtgacgaagcctggattgagagagaactcgagtcagggattgtggtcggaccaagaaatgagcaagcgatcacttttgatggtttgagtgaagatgattggatcgagagagagctggagtctgggatcatcgttgagccagcacctgctaccaagaagcggaagctggagtcaagctgttagctctgcattcgaaggccagattccaagcaggtgaataataacagatggttgcgagtaggaccacatcgaagccaagagatacatgtcgcacagatgggaggatcaatattatcctttttttatttctttataaccaaacaccttggagtactttgacacaaggggtgtgttcacagtgggatctccccagtttcttgaatgcagaaccgtatccgttgtatttgttccttcttgtcgtgagtgtaaatctagcgtgtccgaagttcggttttagattgtaggtgtaactgtagcagggattatctggtgttaagcccaacgagaaaatgattcagtgtaactgttactgtaaggaaagaagttattcagtgtagatttatggttaacacaagaagaggcaattactggtgtatgatgtttataaattgatgatgaatgttactggcagctcaaaagaaaagacagttactggtaactaaagaaaagtacgtttaacggagctgatcacattcaatcccctattgagctgcccttggtcgtcaattgtataacaactttctgcgtg

SEQ ID NO: 44110 - DNA, 2878 bp, Zea Mays
cttgcttctgttctctcgcgtcgttctcccgtagtcccgtgccctcgcgtgcgctctatctgtttctggtggcgacgacttggcggtccccgctgccgccgtgcccaggcctctacttcgggaccttcaccggcgacgagcacccatcgggttgcttcgcaaaacttccaacatccaggatacaattaattacgattccttcaactttatctcgatttataggaggttgcacagagcccatccaacagggtgtctcagacatactgatggatggggtgcccaatatccttgagaaatcatcacatgaatgcatgtactcttggtacttcaccagggaagaactagagaaattttctccatcaaggaaagatggtattactgaaaacaaggaatcagaaattcggcatttatattgttcatttatccgggatgttggcatcaggctgaagctacctcagatgacactagcaacagcagtcatgctttgccatcgcttctatttacaccagtcccttgccaaaaatggatggcaggtgagagattatattgttgtgccagtgatggttgctgatgtctatgaaaagcgacaagagtgcagagtttcattgccaagcatttgttggaaatatgttctccaccatgtctaacttaacattacagacccgaccagccaactgggttgcaacttactgttacaacttaagcaagtttgacatactttgacggatcatcttgtaaattacatattcaccaacagttgcaacagtatgtgtatttctggcgtcgaaagttgaagatactccttgtcccctggaccatgtagttagagtggcctatgaaacaatgtataggcgggacactgctgcggctcaaaggatccgtcagaaggatgtttttgagaagcagaaagcgctcattttgatcggagagagattgcttcttacaactattcgatttgatttcaacattcagcatccttatagaccacttcttgatgccatgcaaaatcttggcatcaatcaaaaagaagtgaaacaagtagcatggaactttgtgaatgactggcttaaaacaacattgtgtctacagtataaaccccagtacatagctgctggttccctttatctggctgcaaagcttcacaatatcaagcttcccttgcatggagcgcatgtttggtggcaccaatttgatgttgcaccaaagcctctggaagccgtcattcatcaaatgatggagcttgcggctttgaaaaagttgatgcctgctcgacccaatccggttaagctgaaggaaactttatgtgaagctaaactgagcttatctaatagcccagactctgtgttgaatcaatcaaacttgttaataagcagctcaagtcctgatattggcgagcccagtgacaaagtgcaggtggattcctgccaatacttgataagcagtcacatgggtgattgtagggtctcaggtcctgacagcagttcgttgaatacttgtgctaatagaaatgtctcttgtaaagcacatgatgaagagagcttggatcaggccttaataatcaaacatgacagtgggatgatgccttctagtaatcagacatcattatatgctactgtaggcactgagggcagtgctgaactgaagcaggatgtaagccattgtaatgacttcaatatcagagtcaatgacgaaagcttgaaccaggtgttaagaaatcagcatggtgatgctatcccattacctgacgtggtatcgctggatgccaaggtggacaaggaaaggagttggtgtgtggaaccattaattgcaaactctgattgctgtactgacagtgttaatgtggatagcttgtgcactgatcagagattggctgatgctccttcaggccccacagctgatgcaccatccatgctggccgaggaggaatcttatccttttagtgcaaagcttgaaaatattgatgttgccaggatcaaaggtttattgatgaagaggaagagccggagagagatccaagaccgagccattgcttcagatggtctaagtgaagaagactggatcgagagggagcttgaatctgggattgttacaaaccaagaagccaattgtgctgccatctcagacgagctaagtgacgaagcctggattgagagagaactcgagtcagggattgtggtcggaccaagaaatgagcaagcgatcacttttgatggtttgagtgaagatgattggatcgagagagagctggagtctgggatcatcgttgagccagcacctgctaccaagaagcggaagctggagtcaagctgttagctctgcattcgaaggccagattccaagcaggtgaataataacagatggttgcgagtaggaccacatcgaagccaagagatacatgtcgcacagatgggaggatcaatattatcctttttttatttctttataaccaaacaccttggagtactttgacacaaggggtgtgttcacagtgggatctccccagtttcttgaatgcagaaccgtatccgttgtatttgttccttcttgtcgtgagtgtaaatctagcgtgtccgaagttcggttttagattgtaggtgtaactgtagcagggattatctggtgttaagcccaacgagaaaatgattcagtgtaactgttactgtaaggaaagaagttattcagtgtagatttatggttaacacaagaagaggcaattactggtgtatgatgtttataaattgatgatgaatgttactggcagctcaaaagaaaagacagttactggtaactaaagaaaagtacgtttaacggagctgatcacattcaatcccctattgagctgcccttggtcgtcaattgtataacaactttctgcgtg

SEQ ID NO: 44111 - DNA, 2673 bp, Zea Mays
cttgcttctgttctctcgcgtcgttctcccgtagtcccgtgccctcgcgtgcgctctatctgtttctggtggcgacgacttggcggtccccgctgccgccgtgcccaggcctctacttcgggaccttcaccggcgacgagcacccatcgggttgcttcgcaaaacttccaacatccaggatacaattaattacgattccttcaactttatctcgatttataggaggttgcacagagcccatccaacagggtgtctcagacatactgatggatggggtgcccaatatccttgagaaatcatcacatgaatgcatgtactcttggtacttcaccagggaagaactagagaaattttctccatcaaggaaagatggtattactgaaaacaaggaatcagaaattcggcatttatattgttcatttatccgggatgttggcatcaggctgaagctacctcagatgacactagcaacagcagtcatgctttgccatcgcttctatttacaccagtcccttgccaaaaatggatggcaggtgagagattatattgttgtgccagtgatggttgctgatgtctatgaaaagcgacaagagtgcagagtttcattgccaagcatttgttggaaatatgttctccaccatgtctaacttaacattacagatgttacaacttaagcaagtttgacatactttgacggatcatcttgtaaattacatattcaccaacagttgcaacagtatgtgtatttctggcgtcgaaagttgaagatactccttgtcccctggaccatgtagttagagtggcctatgaaacaatgtataggcgggacactgctgcggctcaaaggatccgtcagaaggcttaaaacaacattgtgtctacagtataaaccccagtacatagctgctggttccctttatctggctgcaaagcttcacaatatcaagcttcccttgcatggagcgcatgtttggtggcaccaatttgatgttgcaccaaagcctctggaagccgtcattcatcaaatgatggagcttgcggctttgaaaaagttgatgcctgctcgacccaatccggttaagctgaaggaaactttatgtgaagctaaactgagcttatctaatagcccagactctgtgttgaatcaatcaaacttgttaataagcagctcaagtcctgatattggcgagcccagtgacaaagtgcaggtggattcctgccaatacttgataagcagtcacatgggtgattgtagggtctcaggtcctgacagcagttcgttgaatacttgtgctaatagaaatgtctcttgtaaagcacatgatgaagagagcttggatcaggccttaataatcaaacatgacagtgggatgatgccttctagtaatcagacatcattatatgctactgtaggcactgagggcagtgctgaactgaagcaggatgtaagccattgtaatgacttcaatatcagagtcaatgacgaaagcttgaaccaggtgttaagaaatcagcatggtgatgctatcccattacctgacgtggtatcgctggatgccaaggtggacaaggaaaggagttggtgtgtggaaccattaattgcaaactctgattgctgtactgacagtgttaatgtggatagcttgtgcactgatcagagattggctgatgctccttcaggccccacagctgatgcaccatccatgctggccgaggaggaatcttatccttttagtgcaaagcttgaaaatattgatgttgccaggatcaaaggtttattgatgaagaggaagagccggagagagatccaagaccgagccattgcttcagatggtctaagtgaagaagactggatcgagagggagcttgaatctgggattgttacaaaccaagaagccaattgtgctgccatctcagacgagctaagtgacgaagcctggattgagagagaactcgagtcagggattgtggtcggaccaagaaatgagcaagcgatcacttttgatggtttgagtgaagatgattggatcgagagagagctggagtctgggatcatcgttgagccagcacctgctaccaagaagcggaagctggagtcaagctgttagctctgcattcgaaggccagattccaagcaggtgaataataacagatggttgcgagtaggaccacatcgaagccaagagatacatgtcgcacagatgggaggatcaatattatcctttttttatttctttataaccaaacaccttggagtactttgacacaaggggtgtgttcacagtgggatctccccagtttcttgaatgcagaaccgtatccgttgtatttgttccttcttgtcgtgagtgtaaatctagcgtgtccgaagttcggttttagattgtaggtgtaactgtagcagggattatctggtgttaagcccaacgagaaaatgattcagtgtaactgttactgtaaggaaagaagttattcagtgtagatttatggttaacacaagaagaggcaattactggtgtatgatgtttataaattgatgatgaatgttactggcagctcaaaagaaaagacagttactggtaactaaagaaaagtacgtttaacggagctgatcacattcaatcccctattgagctgcccttggtcgtcaattgtataacaactttctgcgtg

SEQ ID NO: 44112 - DNA, 2548 bp, Zea Mays
cttgcttctgttctctcgcgtcgttctcccgtagtcccgtgccctcgcgtgcgctctatctgtttctggtggcgacgacttggcggtccccgctgccgccgtgcccaggcctctacttcgggaccttcaccggcgacgagcacccatcggacctcagatgacactagcaacagcagtcatgctttgccatcgcttctatttacaccagtcccttgccaaaaatggatggcaggtgagagattatattgttgtgccagtgatggttgctgatgtctatgaaaagcgacaagagtgcagagtttcattgccaagcatttgttggaaatatgttctccaccatgtctaacttaacattacagatgttacaacttaagcaagtttgacatactttgacggatcatcttgtaaattacatattcaccaacagttgcaacagtatgtgtatttctggcgtcgaaagttgaagatactccttgtcccctggaccatgtagttagagtggcctatgaaacaatgtataggcgggacactgctgcggctcaaaggatccgtcagaaggatgtttttgagaagcagaaagcgctcattttgatcggagagagattgcttcttacaactattcgatttgatttcaacattcagcatccttatagaccacttcttgatgccatgcaaaatcttggcatcaatcaaaaagaagtgaaacaagtagcatggaactttgtgaatgactggcttaaaacaacattgtgtctacagtataaaccccagtacatagctgctggttccctttatctggctgcaaagcttcacaatatcaagcttcccttgcatggagcgcatgtttggtggcaccaatttgatgttgcaccaaagcctctggaagccgtcattcatcaaatgatggagcttgcggctttgaaaaagttgatgcctgctcgacccaatccggttaagctgaaggaaactttatgtgaagctaaactgagcttatctaatagcccagactctgtgttgaatcaatcaaacttgttaataagcagctcaagtcctgatattggcgagcccagtgacaaagtgcaggtggattcctgccaatacttgataagcagtcacatgggtgattgtagggtctcaggtcctgacagcagttcgttgaatacttgtgctaatagaaatgtctcttgtaaagcacatgatgaagagagcttggatcaggccttaataatcaaacatgacagtgggatgatgccttctagtaatcagacatcattatatgctactgtaggcactgagggcagtgctgaactgaagcaggatgtaagccattgtaatgacttcaatatcagagtcaatgacgaaagcttgaaccaggtgttaagaaatcagcatggtgatgctatcccattacctgacgtggtatcgctggatgccaaggtggacaaggaaaggagttggtgtgtggaaccattaattgcaaactctgattgctgtactgacagtgttaatgtggatagcttgtgcactgatcagagattggctgatgctccttcaggccccacagctgatgcaccatccatgctggccgaggaggaatcttatccttttagtgcaaagcttgaaaatattgatgttgccaggatcaaaggtttattgatgaagaggaagagccggagagagatccaagaccgagccattgcttcagatggtctaagtgaagaagactggatcgagagggagcttgaatctgggattgttacaaaccaagaagccaattgtgctgccatctcagacgagctaagtgacgaagcctggattgagagagaactcgagtcagggattgtggtcggaccaagaaatgagcaagcgatcacttttgatggtttgagtgaagatgattggatcgagagagagctggagtctgggatcatcgttgagccagcacctgctaccaagaagcggaagctggagtcaagctgttagctctgcattcgaaggccagattccaagcaggtgaataataacagatggttgcgagtaggaccacatcgaagccaagagatacatgtcgcacagatgggaggatcaatattatcctttttttatttctttataaccaaacaccttggagtactttgacacaaggggtgtgttcacagtgggatctccccagtttcttgaatgcagaaccgtatccgttgtatttgttccttcttgtcgtgagtgtaaatctagcgtgtccgaagttcggttttagattgtaggtgtaactgtagcagggattatctggtgttaagcccaacgagaaaatgattcagtgtaactgttactgtaaggaaagaagttattcagtgtagatttatggttaacacaagaagaggcaattactggtgtatgatgtttataaattgatgatgaatgttactggcagctcaaaagaaaagacagttactggtaactaaagaaaagtacgtttaacggagctgatcacattcaatcccctattgagctgcccttggtcgtcaattgtataacaactttctgcgtg

SEQ ID NO: 44113 - DNA, 2864 bp, Zea Mays
cttgcttctgttctctcgcgtcgttctcccgtagtcccgtgccctcgcgtgcgctctatctgtttctggtggcgacgacttggcggtccccgctgccgccgtgcccaggcctctacttcgggaccttcaccggcgacgagcacccatcgggttgcttcgcaaaacttccaacatccaggatacaattaattacgattccttcaactttatctcgatttataggaggttgcacagagcccatccaacagggtgtctcagacatactgatggatggggtgcccaatatccttgagaaatcatcacatgaatgcatgtactcttggtacttcaccagggaagaactagagaaattttctccatcaaggaaagatggtattactgaaaacaaggaatcagaaattcggcatttatattgttcatttatccgggatgttggcatcaggctgaagctacctcagatgacactagcaacagcagtcatgctttgccatcgcttctatttacaccagtcccttgccaaaaatggatggcaggtgagagattatattgttgtgccagtgatggttgctgatgtctatgaaaagcgacaagagtgcagagtttcattgccaagcatttgttggaaatatgttctccaccatgtctaacttaacattacagatgggttgcaacttactgttacaacttaagcaagtttgacatactttgacggatcatcttgtaaattacatattcaccaacagttgcaacagtatgtgtatttctggcgtcgaaagttgaagatactccttgtcccctggaccatgtagttagagtggcctatgaaacaatgtataggcgggacactgctgcggctcaaaggatccgtcagaaggatgtttttgagaagcagaaagcgctcattttgatcggagagagattgcttcttacaactattcgatttgatttcaacattcagcatccttatagaccacttcttgatgccatgcaaaatcttggcatcaatcaaaaagaagtgaaacaagtagcatggaactttgtgaatgactggcttaaaacaacattgtgtctacagtataaaccccagtacatagctgctggttccctttatctggctgcaaagcttcacaatatcaagcttcccttgcatggagcgcatgtttggtggcaccaatttgatgttgcaccaaagcctctggaagccgtcattcatcaaatgatggagcttgcggctttgaaaaagttgatgcctgctcgacccaatccggttaagctgaaggaaactttatgtgaagctaaactgagcttatctaatagcccagactctgtgttgaatcaatcaaacttgttaataagcagctcaagtcctgatattggcgagcccagtgacaaagtgcaggtggattcctgccaatacttgataagcagtcacatgggtgattgtagggtctcaggtcctgacagcagttcgttgaatacttgtgctaatagaaatgtctcttgtaaagcacatgatgaagagagcttggatcaggccttaataatcaaacatgacagtgggatgatgccttctagtaatcagacatcattatatgctactgtaggcactgagggcagtgctgaactgaagcaggatgtaagccattgtaatgacttcaatatcagagtcaatgacgaaagcttgaaccaggtgttaagaaatcagcatggtgatgctatcccattacctgacgtggtatcgctggatgccaaggtggacaaggaaaggagttggtgtgtggaaccattaattgcaaactctgattgctgtactgacagtgttaatgtggatagcttgtgcactgatcagagattggctgatgctccttcaggccccacagctgatgcaccatccatgctggccgaggaggaatcttatccttttagtgcaaagcttgaaaatattgatgttgccaggatcaaaggtttattgatgaagaggaagagccggagagagatccaagaccgagccattgcttcagatggtctaagtgaagaagactggatcgagagggagcttgaatctgggattgttacaaaccaagaagccaattgtgctgccatctcagacgagctaagtgacgaagcctggattgagagagaactcgagtcagggattgtggtcggaccaagaaatgagcaagcgatcacttttgatggtttgagtgaagatgattggatcgagagagagctggagtctgggatcatcgttgagccagcacctgctaccaagaagcggaagctggagtcaagctgttagctctgcattcgaaggccagattccaagcaggtgaataataacagatggttgcgagtaggaccacatcgaagccaagagatacatgtcgcacagatgggaggatcaatattatcctttttttatttctttataaccaaacaccttggagtactttgacacaaggggtgtgttcacagtgggatctccccagtttcttgaatgcagaaccgtatccgttgtatttgttccttcttgtcgtgagtgtaaatctagcgtgtccgaagttcggttttagattgtaggtgtaactgtagcagggattatctggtgttaagcccaacgagaaaatgattcagtgtaactgttactgtaaggaaagaagttattcagtgtagatttatggttaacacaagaagaggcaattactggtgtatgatgtttataaattgatgatgaatgttactggcagctcaaaagaaaagacagttactggtaactaaagaaaagtacgtttaacggagctgatcacattcaatcccctattgagctgcccttggtcgtcaattgtataacaactttctgcgtg

SEQ ID NO: 44114 - DNA, 3823 bp, Zea Mays
ggccttgcttctgttctctcgcgtcgttctcccgtagtcccgtgccctcgcgtgcgctctatctgtttctggtggcgacgacttggcggtccccgctgccgccgtgcccaggcctctacttcgggaccttcaccggcgacgagcacccatcgggttgcttcgcaaaacttccaacatccaggatacaattaattacgattccttcaactttatctcgatttataggaggttgcacagagcccatccaacagggtgtctcagacatactgatggatggggtgcccaatatccttgagaaatcatcacatgaatgcatgtactcttggtacttcaccagggaagaactagagaaattttctccatcaaggaaagatggtattactgaaaacaaggaatcagaaattcggcatttatattgttcatttatccgggatgttggcatcaggctgaagctacctcagatgacactagcaacagcagtcatgctttgccatcgcttctatttacaccagtcccttgccaaaaatggatggcaggtgagagattatattgttgtgccagtgatggttgctgatgtctatgaaaagcgacaagagtgcagagtttcattgccaagcatttgttggaaatatgttctccaccatgtctaacttaacattacagaatatccttcaaaccatttgaagtattttatcttgtaataatattactgtattagttttctgattacatgctaattgctgattcatcttgatgctactctacctcaagagtcatgatcacttcgtgattggacatttcaaagggatcatttacctgctacaatgtgtcaagggcaccagggctcagagtagctggaccttgactactggacctcgactacatagttcgtagtcatggccgggaatggggtgaaggtttctcccctctgcaccctatgttgagggaggagattagcagtagaaagtttaatcattgcttaatcgtcaagtgttccaatacaagatgtaaataggcacgtagcctctaacgaacaatagatggaaaagctcctcaaattgaggcaccgtagtttcctaccaactaaactatgcaggcctgacactagctgcagtgatcatgcctacagcgcgtttgacacgcgctgcgtgttcttggcggcatctctggcatgggtctggtgcgtgtaccagggattaccttcccggtcggtaaccagcaaatttcggtagtttttctcgttttcgatgtctaccgagaaatgaaaaccggtgtgattttttatgtatttcgatttcaaatttgaaaatataatagtcaaattttggtcaacaaaacggtttttgaaatcacgaaacgagaatgtaatccctggcgtgtactggtggccccacatgacacatgttattggaaaacttctttttagaacttttaagtcctgattgacttctcctagtatactaaaaagttttgaggtagttaagagttattttcagtttacctaggaagtttgtgtttgtcagatatgatactattgtgattaagtacaatacttcgtcataactgggcaaatgcattcagaactttcctattgaagttacttaaccccgaccagccaactgggttgcaacttactgttacaacttaagcaagtttgacatactttgacggatcatcttgtaaattacatattcaccaacagttgcaacagtatgtgtatttctggcgtcgaaagttgaagatactccttgtcccctggaccatgtagttagagtggcctatgaaacaatgtataggcgggacactgctgcggctcaaaggatccgtcagaaggatgtttttgagaagcagaaagcgctcattttgatcggagagagattgcttcttacaactattcgatttgatttcaacattcagcatccttatagaccacttcttgatgccatgcaaaatcttggcatcaatcaaaaagaagtgaaacaagtagcatggaactttgtgaatgactggcttaaaacaacattgtgtctacagtataaaccccagtacatagctgctggttccctttatctggctgcaaagcttcacaatatcaagcttcccttgcatggagcgcatgtttggtggcaccaatttgatgttgcaccaaagcctctggaagccgtcattcatcaaatgatggagcttgcggctttgaaaaagttgatgcctgctcgacccaatccggttaagctgaaggaaactttatgtgaagctaaactgagcttatctaatagcccagactctgtgttgaatcaatcaaacttgttaataagcagctcaagtcctgatattggcgagcccagtgacaaagtgcaggtggattcctgccaatacttgataagcagtcacatgggtgattgtagggtctcaggtcctgacagcagttcgttgaatacttgtgctaatagaaatgtctcttgtaaagcacatgatgaagagagcttggatcaggccttaataatcaaacatgacagtgggatgatgccttctagtaatcagacatcattatatgctactgtaggcactgagggcagtgctgaactgaagcaggatgtaagccattgtaatgacttcaatatcagagtcaatgacgaaagcttgaaccaggtgttaagaaatcagcatggtgatgctatcccattacctgacgtggtatcgctggatgccaaggtggacaaggaaaggagttggtgtgtggaaccattaattgcaaactctgattgctgtactgacagtgttaatgtggatagcttgtgcactgatcagagattggctgatgctccttcaggccccacagctgatgcaccatccatgctggccgaggaggaatcttatccttttagtgcaaagcttgaaaatattgatgttgccaggatcaaaggtttattgatgaagaggaagagccggagagagatccaagaccgagccattgcttcagatggtctaagtgaagaagactggatcgagagggagcttgaatctgggattgttacaaaccaagaagccaattgtgctgccatctcagacgagctaagtgacgaagcctggattgagagagaactcgagtcagggattgtggtcggaccaagaaatgagcaagcgatcacttttgatggtttgagtgaagatgattggatcgagagagagctggagtctgggatcatcgttgagccagcacctgctaccaagaagcggaagctggagtcaagctgttagctctgcattcgaaggccagattccaagcaggtgaataataacagatggttgcgagtaggaccacatcgaagccaagagatacatgtcgcacagatgggaggatcaatattatcctttttttatttctttataaccaaacaccttggagtactttgacacaaggggtgtgttcacagtgggatctccccagtttcttgaatgcagaaccgtatccgttgtatttgttccttcttgtcgtgagtgtaaatctagcgtgtccgaagttcggttttagattgtaggtgtaactgtagcagggattatctggtgttaagcccaacgagaaaatgattcagtgtaactgttactgtaaggaaagaagttattcagtgtagatttatggttaacacaagaagaggcaattactggtgtatgatgtttataaattgatgatgaatgttactggcagctcaaaagaaaagacagttactggtaactaaagaaaagtacgtttaacggagctgatcacattcaatcccctattgagctgcccttggtcgtcaattgtataacaactttctgcgtg

SEQ ID NO: 44115 - DNA, 2863 bp, Zea Mays
ttacacactgcggccttgcttctgttctctcgcgtcgttctcccgtagtcccgtgccctcgcgtgcgctctatctgtttctggtggcgacgacttggcggtccccgctgccgccgtgcccaggcctctacttcgggaccttcaccggcgacgagcacccatcgggttgcttcgcaaaacttccaacatccaggatacaattaattacgattccttcaactttatctcgatttataggaggttgcacagagcccatccaacagggtgtctcagacatactgatggatggggtgcccaatatccttgagaaatcatcacatgaatgcatgtactcttggtacttcaccagggaagaactagagaaattttctccatcaaggaaagatggtattactgaaaacaaggaatcagaaattcggcatttatattgttcatttatccgggatgttggcatcaggctgaagctacctcagatgacactagcaacagcagtcatgctttgccatcgcttctatttacaccagtcccttgccaaaaatggatggcaggtgagagattatattgttgtgccagtgatggttgctgatgtctatgaaaagcgacaagagtgcagagtttcattgccaagcatttgttggaaatatgttctccaccatgtctaacttaacattacagatgttacaacttaagcaagtttgacatactttgacggatcatcttgtaaattacatattcaccaacagttgcaacagtatgtgtatttctggcgtcgaaagttgaagatactccttgtcccctggaccatgtagttagagtggcctatgaaacaatgtataggcgggacactgctgcggctcaaaggatccgtcagaaggatgtttttgagaagcagaaagcgctcattttgatcggagagagattgcttcttacaactattcgatttgatttcaacattcagcatccttatagaccacttcttgatgccatgcaaaatcttggcatcaatcaaaaagaagtgaaacaagtagcatggaactttgtgaatgactggcttaaaacaacattgtgtctacagtataaaccccagtacatagctgctggttccctttatctggctgcaaagcttcacaatatcaagcttcccttgcatggagcgcatgtttggtggcaccaatttgatgttgcaccaaagcctctggaagccgtcattcatcaaatgatggagcttgcggctttgaaaaagttgatgcctgctcgacccaatccggttaagctgaaggaaactttatgtgaagctaaactgagcttatctaatagcccagactctgtgttgaatcaatcaaacttgttaataagcagctcaagtcctgatattggcgagcccagtgacaaagtgcaggtggattcctgccaatacttgataagcagtcacatgggtgattgtagggtctcaggtcctgacagcagttcgttgaatacttgtgctaatagaaatgtctcttgtaaagcacatgatgaagagagcttggatcaggccttaataatcaaacatgacagtgggatgatgccttctagtaatcagacatcattatatgctactgtaggcactgagggcagtgctgaactgaagcaggatgtaagccattgtaatgacttcaatatcagagtcaatgacgaaagcttgaaccaggtgttaagaaatcagcatggtgatgctatcccattacctgacgtggtatcgctggatgccaaggtggacaaggaaaggagttggtgtgtggaaccattaattgcaaactctgattgctgtactgacagtgttaatgtggatagcttgtgcactgatcagagattggctgatgctccttcaggccccacagctgatgcaccatccatgctggccgaggaggaatcttatccttttagtgcaaagcttgaaaatattgatgttgccaggatcaaaggtttattgatgaagaggaagagccggagagagatccaagaccgagccattgcttcagatggtctaagtgaagaagactggatcgagagggagcttgaatctgggattgttacaaaccaagaagccaattgtgctgccatctcagacgagctaagtgacgaagcctggattgagagagaactcgagtcagggattgtggtcggaccaagaaatgagcaagcgatcacttttgatggtttgagtgaagatgattggatcgagagagagctggagtctgggatcatcgttgagccagcacctgctaccaagaagcggaagctggagtcaagctgttagctctgcattcgaaggccagattccaagcaggtgaataataacagatggttgcgagtaggaccacatcgaagccaagagatacatgtcgcacagatgggaggatcaatattatcctttttttatttctttataaccaaacaccttggagtactttgacacaaggggtgtgttcacagtgggatctccccagtttcttgaatgcagaaccgtatccgttgtatttgttccttcttgtcgtgagtgtaaatctagcgtgtccgaagttcggttttagattgtaggtgtaactgtagcagggattatctggtgttaagcccaacgagaaaatgattcagtgtaactgttactgtaaggaaagaagttattcagtgtagatttatggttaacacaagaagaggcaattactggtgtatgatgtttataaattgatgatgaatgttactggcagctcaaaagaaaagacagttactggtaactaaagaaaagtacgtttaacggagctgatcacattcaatcccctattgagctgcccttggtcgtcaattgtataacaactttctgcgtg

SEQ ID NO: 44116 - DNA, 610 bp, Zea Mays
ttcctgacctctgcatcaagagaataagctttgggctgaaattttaggccaatatacatgaaggatcaccaaaataaaatatttgcaacttgtggggttatctctcggagcttccaaaatttcgattaagctatagcaaaatgacaaaatatcaaccattgaagaaaatttctaaaatgttctagtcgatgttacttacttgatcgaacaaaaaatatgagatgcaacacacaataactctagttgtattcatgttggttgcatcttatgtttttcatcatggaaattggaatgtttcaaaccatctttagacactaattacagttctttatgaattcctttgtttttggatgtttcccctcttcaaagctaaacatattttttggaagcttaaggaaaaaattaataagtttaaaagatttgatttgggtttctcttatcctagtatatctctagagttattatcggatatttttgaagtttgaagattttttttgtgttttaaatgcatcatcatctagtgtttaccaaatttgtttttaactaaaaatgacaccatcacaaaaggtgtgaaactatgacgagtacataagggtcaaatgaatctcac

SEQ ID NO: 44117 - DNA, 1406 bp, Zea Mays
ggaaaaataacatataaatctatagaatcaatttccatctctcaccccatgaatttgagataaacttatatgataactttggaaagtggtggaatgccacattctaaaaaaatagcctattccactagtaagatttcaattcctcaaaatgaaaagaaaaaaacgggacctaagagtttaggaactaagacggcacaacactataagtttaaaagactgataaacagacaccgctgctcggacagcttaaagagcccaagcaggtagtgaatctctaattctctatccccggcaaaatcaatgtgacgatagctgtagttacggtacgagctcgacggccgtcgtgcttttcacgaagacgataaaaattgttagcgactgctgcgcgcggtcggtgcgagcccttcttcatctctgccttgtgggggtagctagcttgagcctgcgaagaaatgaagcgcagacagatcagatactccttccgtctccttactcgaagtctcgaaagaagaaacagggtgtgagagctagtgtgcctcacatgcttttctgaggaaagagatgaacactacgagtgctgctaccccggccgagataccaattgctattgccagtgtcctcccagcgtcatcctccggattatctgacaccaaacgacgcagaatttataatcaaaagaaaactggactagcgcagggctgtatacaacggcactatatatacagagctctaattaggtctggtttggtaataaacaaattaaagggattctatgagaggaaacccttgaaccattagctccatgaaaactatatatctagagctaaatatacatttaggccccatttgtttcctttcattttgaagaatttgaatcttactaatggaatatgctatttttttagaatgtgacattccactactttccaaagttatcatataagcctatctcaaatttatggggtgagagatgaaaattgattatatagatttacatgttatttttccgatgtataacttatattacactcttctacttgcgccgctataacataaatgtagtatataactatctctcttatatgatttaggataatatacaaatatattacatatataaatatataaacttaattagttttgtctaaattataattattgaaatggaattcaatttcaacgaaacaaactggaccttagagtatttagatgatttatttctatagtttagattaaatataaatatttaaaccacttcagcttaatttataattatagattcaacatgggtctcagaaataaattgtcttgactagggcattgcatcctgtttacgcttatgcttctcgagtgaccgatagcactcgtcgggaaatggatcctctacattttgaaatggataaagt

SEQ ID NO: 44118 - DNA, 850 bp, Zea Mays
cacagttattagaaacagtttgaaattgttgccaagctaagctgatgctatccttcactgcttcaaagatgccacacaagaaacaataaattaaggacactaaggatgaatctggcaggttctctggtgtcttctcttctagtggttcaccaagacatggtttctcaagaagttcaagcagattgtccatgcaggatgatactgatgatgcagattttccttttgctgtggatgatgtttatccagattcacggccagggagtagtagtggaaaggacacaggggatcaggctggttcgtcatcccataaatcccaagatgctgctgttgggtatctcgtccacctgctgaaatctgcacgtccactgagagattctacctactcatctcatacatcaaggggtgaatctaccgaagcaggaagcaccagctctttcttgtcccgcaggacatccgacgcactggaggagtttgaatctttcaaggaaacaagggagaacctgctagcacgtagtagatctcggctgcaagattcattggataagccctagtgttgatgcagtctgtggttcgattcctcaaaaggtgaagggtccaaactgtagagtaaagatcatatggcgagcctgggtaaactctttatttcagactagtccgtgtgtaaatagctaattaactggcgcttgattccgaaagagaatacacaggtcgccgttgattctattgttggaaacttgtcattcttaaactcaaagcaggaatatcgtgtgcctttgttcatagtgtttgtttacaagtgaaatcaacatgataatccatctttatcaaaatagaattcgttttgcttatt

SEQ ID NO: 44119 - DNA, 2391 bp, Zea Mays
gaagcgtcctcacaaatcggggaaaccacgcgcagtcccgggacgcgatcgcagtggttgttgggtccgccgtccgcgacagcgaagctacaaatccctcgccgctagttgctacacaccaaatcattcgaaacgccaaaataaataaattcgtgcttcagtgacggcaccaacagcgacccgttcgatacccggattcaaaaccggagaggaatccatccccaattcccttcctccccccaccccgtcgcccaacagatctggttctccttcccaaacagttcgaattcgatcgcgccacggtccgtcacccgcgccggccagatttatgcagccatgcagagcggcggggcccggtgcagtttgactactgccgctgccgctgctacggggctgaggagggaccactttcgggatccgcaatggcgagcctgtcggactcggcgggcgcaggcggcggccgcgccggcgcggagctgatggtgccacagttcctactcaaggcgctgcacgccatcctcgccgtgcggtcgccgcgcccgcacgcgccgccggccccggcggcgtcggcgtcggcgttccggaggcgtgaccggtggttccacctgccgatccacgcgccgccgccgccgcccgcggcggagcacctgccggacccgtcccccggggagccgctcgtggtggacgtgtacctggccccatcgggcggcgggccagaggaggtgctcgagaggtggaccgtggcgtgcgagccctggccgtcgcccgccgcggccgccgccgtcggggaggggctggcggtcaacagggcgtacaagcgatgcatcacgctgctcaggtcgctctacgccgcgctccgcttcctcccggcgtaccgcgccttccgcaggctctgcgcgtctggccaggtgtacaactactgcatgggccaccgcgtcggctccttcgccgcgcccttctcccgcgccgaggaggcggccatgcgcaccaaacgcctcgcccccgtcgagacccagctcggccgcctcgtcgtctccgtccagtacctccccagcctcgccgccttcaacttcgaggtcacttccctcgcgtccgccgcgatcatcacggattacgtcggcagccccgcggccgagcctatgcgtgccttcccaccttcgctcacggaggccaccggctcgccctttccgcagccctcgcggcgccccaacagctgggcgtcgccagcgccctggccgcacacgctcgggcaaccggctaaattctcgcctccgccggcccattacgcgtcgcccacgccctcgccaccgacgtttggctatctgcactcgcggtttagcggtgagactgcaccaatgaccataccgcaggccggcggtggcaggggcactgtgcaccatcggaacatgtcggaacccagtagagccttcatgtttcctccaccttcgccaaagaatgtgcgaggggaggcagggatgcaggagtcaccgacagagatcaatcggtccttcaagagggcggatggcatccgcatgggagatctctattcaaacttgccgtctggttctaagtcgtgcttcacaacctgcccttgtgcttgtgtgtaacccagtttcctgttctgactctgattaaggacactaaggatgaatctggcaggttctctggtgtcttctcttctagtggttcaccaagacatggtttctcaagaagttcaagcagattgtccatgcaggatgatactgatgatgcagattttccttttgctgtggatgatgtttatccagattcacggccagggagtagtagtggaaaggacacaggggatcaggctggttcgtcatcccataaatcccaagatgctgctgttgggtatctcgtccacctgctgaaatctgcacgtccactgagagattctacctactcatctcatacatcaaggggtgaatctaccgaagcaggaagcaccagctctttcttgtcccgcaggacatccgacgcactggaggagtttgaatctttcaaggaaacaagggagaacctgctagcacgtagtagatctcggctgcaagattcattggataagccctagtgttgatgcagtctgtggttcgattcctcaaaaggtgaagggtccaaactgtagagtaaagatcatatggcgagcctgggtaaactctttatttcagactagtccgtgtgtaaatagctaattaactggcgcttgattccgaaagagaatacacaggtcgccgttgattctattgttggaaacttgtcattcttaaactcaaagcaggaatatcgtgtgcctttgttcatagtgtttgtttacaagtgaaatcaacatgataatccatctttatcaaaatagaattcgttttgcttatt

SEQ ID NO: 44120 - DNA, 2460 bp, Zea Mays
cacggacccacccgaaacagaagcgtcctcacaaatcggggaaaccacgcgcagtcccgggacgcgatcgcagtggttgttgggtccgccgtccgcgacagcgaagctacaaatccctcgccgctagttgctacacaccaaatcattcgaaacgccaaaataaataaattcgtgcttcagtgacggcaccaacagcgacccgttcgatacccggattcaaaaccggagaggaatccatccccaattcccttcctccccccaccccgtcgcccaacagatctggttctccttcccaaacagttcgaattcgatcgcgccacggtccgtcacccgcgccggccagatttatgcagccatgcagagcggcggggcccggtgcagtttgactactgccgctgccgctgctacggggctgaggagggaccactttcgggatccgcaatggcgagcctgtcggactcggcgggcgcaggcggcggccgcgccggcgcggagctgatggtgccacagttcctactcaaggcgctgcacgccatcctcgccgtgcggtcgccgcgcccgcacgcgccgccggccccggcggcgtcggcgtcggcgttccggaggcgtgaccggtggttccacctgccgatccacgcgccgccgccgccgcccgcggcggagcacctgccggacccgtcccccggggagccgctcgtggtggacgtgtacctggccccatcgggcggcgggccagaggaggtgctcgagaggtggaccgtggcgtgcgagccctggccgtcgcccgccgcggccgccgccgtcggggaggggctggcggtcaacagggcgtacaagcgatgcatcacgctgctcaggtcgctctacgccgcgctccgcttcctcccggcgtaccgcgccttccgcaggctctgcgcgtctggccaggtgtacaactactgcatgggccaccgcgtcggctccttcgccgcgcccttctcccgcgccgaggaggcggccatgcgcaccaaacgcctcgcccccgtcgagacccagctcggccgcctcgtcgtctccgtccagtacctccccagcctcgccgccttcaacttcgaggtcacttccctcgcgtccgccgcgatcatcacggattacgtcggcagccccgcggccgagcctatgcgtgccttcccaccttcgctcacggaggccaccggctcgccctttccgcagccctcgcggcgccccaacagctgggcgtcgccagcgccctggccgcacacgctcgggcaaccggctaaattctcgcctccgccggcccattacgcgtcgcccacgccctcgccaccgacgtttggctatctgcactcgcggtttagcggtgagactgcaccaatgaccataccgcaggccggcggtggcaggggcactgtgcaccatcggaacatgtcggaacccagtagagccttcatgtttcctccaccttcgccaaagaatgtgcgaggggaggcagggatgcaggagtcaccgacagagatcaatcggtccttcaagagggcggatggcatccgcatgggagatctctattcaaacttgccgtctggttctaaggaatagtgattacaaagctgcacagatattagaaacagtttgaaattgttgccaagctaaactgatgctatccttcactgcttcaaagatgccacacaagaaacaataaattaaggacactaaggatgaatctggcaggttctctggtgtcttctcttctagtggttcaccaagacatggtttctcaagaagttcaagcagattgtccatgcaggatgatactgatgatgcagattttccttttgctgtggatgatgtttatccagattcacggccagggagtagtagtggaaaggacacaggggatcaggctggttcgtcatcccataaatcccaagatgctgctgttgggtatctcgtccacctgctgaaatctgcacgtccactgagagattctacctactcatctcatacatcaaggggtgaatctaccgaagcaggaagcaccagctctttcttgtcccgcaggacatccgacgcactggaggagtttgaatctttcaaggaaacaagggagaacctgctagcacgtagtagatctcggctgcaagattcattggataagccctagtgttgatgcagtctgtggttcgattcctcaaaaggtgaagggtccaaactgtagagtaaagatcatatggcgagcctgggtaaactctttatttcagactagtccgtgtgtaaatagctaattaactggcgcttgattccgaaagagaatacacaggtcgccgttgattctattgttggaaacttgtcattcttaaactcaaagcaggaatatcgtgtgcctttgttcatagtgtttgtttacaagtgaaatcaacatgataatccatctttatcaaaatagaattcgttttgcttatt

SEQ ID NO: 44121 - DNA, 3859 bp, Zea Mays
cgtccacatgcgaagccgaaggtaacactatcgcaacggtctgctggggctggtggcaaaacaaaaggaacaaaagaaaagagaaaaagaatcggcaccgtctcctgcactccagagtcatcagaagaccctccccaagtcaccgaacaagatcgtcgtgggcagcactcgccactcgctctcgcaggcggtgaggcggcgctatcagagcggacttcgccctccccccacccccacccccacgtccccctacaggtagccctgcaaccatggccgcggcggccgggctcagccgccggtgcaccgtccgctgacaagtcgacctttctcctacgacagcaaccgtcttcgtccggtcctggctgtttaaaaggagaggaaaggcaggaggaggggaggagttagtgttaagccaatgggggctattggaggcaatgagtcggtgcagtgggataaagtggctggagctgatgctgttaatggcggcggaacaagtgtgggcaggatggacaggatacaggtgctggtcaggctgaggccactgagcgagaaggaggttgcgaggggagagcctgcagaatgggagtgcatcaatgacaccactgtcatgttccggagcacgttccctgatcgacccaccgctccgacggcatacacatttgatcgggtttttcattctgactgtagtactaaagaagtctacgaggaaggggttagggaagttgccctctctgtagttagtggcattaactcaagtgtttttgcatatggacaaacgagtagtggaaagacttataccatgaatggagtaacagaatatacagtagcagacatatatgattacattaataagcatgaagagagagcatttgttctgaaattctcagcaattgaaatatacaatgaagctgtaagggatcttctgagtgcagaaaacactcctcttagactctgggacgatgcagagaagggcacctatgtggagaaccttacagaggttgtgttaagggactggaaccacctcaaggggcttatttctgtatgtgaagctcaaagaaggacaggggagaccttcttgaatgaaaaaagctccagatctcatcagatactgagattgacaattgaaagttctgcacgggagttcctagggaaggacaagtcaactacacttgtcgctagtgctaactttgttgatctagcaggaagtgagcgtgcatctcaggcgttgtctgctggcacgaggctaaaagaaggctgccatattaacagaagtttgcttgcccttggcactgtcattaggaaactaagcatggggagtaatgcacacataccatacagagattcaaagctcacacgcatattacaaccatctttaggaggtaatgcaagaacggctattatctgtacactgagccctgccactagccatattgagcattcaagaaatactttattatttggaagttgtgcaaaggaagtagttacaaatgctcaggtaaatgtggtcatgtctgataaagcactagtaaagcatttgcaaaaggaagttgctaggttggagagtgagttgcggcaaccagcttcaaattccagtcttgaagcattagtaaaggaaaaggataaccaaattagaaagatggagaaagaaattaaagaactcaagtcacagcgtgatttggctcagtctagattgcagaatttgctggagactgttggggaccaagtgaagcactcgggctcagggaagcgttcagcccgcagtcctccatcaattggaatatccccaggcatcagcagggatgatagttctcagatctctcacgatgattcagatcttttcaaggacgtgcgatgcattgggaccagtggaacaggaggaaatgaacagttggacctgtcagctggtgaaagcagtagccttcaaggtttaaacatgaattctagtttgcatggaagcggttcaaatgcatcagtgaattctaggcgctcaaggctccttagtgaatctcctatcacattggagcagcatttggagaatatcaaaaggccttttgttagtcttggcagagatctaggatcgtcgacacataactcatcaggctccagaatacttggtagaagcaggagctgtagatcacttatgggttctaccatgtttgatggcatggagatggatgatggcacccctctgcatagaagtttggttggtttccctggaaggcctgaagggaatcatagaaggggatcaacaccgaaccatgacgcagaaagtgaaactctttcaagagcaggatccgtagtttcaaccaagacaaatgctgcatgcgatgcagagtttactggtataggtgaatttgttgctgaactgaaagagatggctcaggttcattaccagaaacagttaggcaatcagattacaaatggagaatttgtagacataaagaacattggtttggacccgattgctgatgcttcgcaatcaccttctcgctggccattagaattcgagaagaaacagcaagagatcatcgggctttggcacgcgtgctgtatttccttagtccacaggacctactttttcttgctattcaagggagaacaagctgattcaatctacatggaagtggagctccggaggctatcattcctcagagatacctactctcggggaaacacccctagcaatgcggtggtaggcagcttgaactcttcccccgctgcgagcgccaagaagctgcagcgtgaacgggagatgcttgcgaggcagatgcagaagcggctcacggcagaggaaagggagcgcctgtacaccaaatggggcatttcgctggactccaagaagaggaagctccaggtcgctcgccggctctggaccgaggccgaggacctagaacatgtcagggagagtgcctcccttgtcgccaagctgatcgggctccaggagccagggcaagtcctcagggagatgttcgggctcagctttgcgccgcagcagcagccgccccctcgccggcgatcctccaatggctggagatacgggatcccttcgttcggctgatcggatcggatgaacggtgcgagcgactgacctaagagatattaaggacactaaggatgaatctggcaggttctctggtgtcttctcttctagtggttcaccaagacatggtttctcaagaagttcaagcagattgtccatgcaggatgatactgatgatgcagattttccttttgctgtggatgatgtttatccagattcacggccagggagtagtagtggaaaggacacaggggatcaggctggttcgtcatcccataaatcccaagatgctgctgttgggtatctcgtccacctgctgaaatctgcacgtccactgagagattctacctactcatctcatacatcaaggggtgaatctaccgaagcaggaagcaccagctctttcttgtcccgcaggacatccgacgcactggaggagtttgaatctttcaaggaaacaagggagaacctgctagcacgtagtagatctcggctgcaagattcattggataagccctagtgttgatgcagtctgtggttcgattcctcaaaaggtgaagggtccaaactgtagagtaaagatcatatggcgagcctgggtaaactctttatttcagactagtccgtgtgtaaatagctaattaactggcgcttgattccgaaagagaatacacaggtcgccgttgattctattgttggaaacttgtcattcttaaactcaaagcaggaatatcgtgtgcctttgttcatagtgtttgtttacaagtgaaatcaacatgataatccatctttatcaaaatagaattcgttttgcttatt

SEQ ID NO: 44122 - DNA, 3464 bp, Zea Mays
agaagaccctccccaagtcaccgaacaagatcgtcgtgggcagcactcgccactcgctctcgcaggcggtgaggcggcgctatcagagcggacttcgccctccccccacccccacccccacgtccccctacaggtagccctgcaaccatggccgcggcggccgggctcagccgccggtgcaccgtccgctgacaagtcgacctttctcctacgacagcaaccgtcttcgtccggtcctggctgtttaaaaggagaggaaaggcaggaggaggggaggagttagtgttaagccaatgggggctattggaggcaatgagtcggtgcagtgggataaagtggctggagctgatgctgttaatggcggcggaacaagtgtgggcaggatggacaggatacaggtgctggtcaggctgaggccactgagcgagaaggaggttgcgaggggagagcctgcagaatgggagtgcatcaatgacaccactgtcatgttccggagcacgttccctgatcgacccaccgctccgacggcatacacatttgaaatgctctaattgcagatcgggtttttcattctgactgtagtactaaagaagtctacgaggaaggggttagggaagttgccctctctgtagttagtggcattaactgtgagcataggccattcaacaaacaaatttctatttctgaaatgacaaagtgttttccctaaattagagctttttttctctgacagcaagtgtttttgcatatggacaaacgagtagtggaaagacttataccatgaatggagtaacagaatatacagtagcagacatatatgattacattaataagcatgaagagagagcatttgttctgaaattctcagcaattgaaatatacaatgaagctgtaagggatcttctgagtgcagaaaacactcctcttagactctgggacgatgcagagaagggcacctatgtggagaaccttacagaggttgtgttaagggactggaaccacctcaaggggcttatttctgtatgtgaagctcaaagaaggacaggggagaccttcttgaatgaaaaaagctccagatctcatcagatactgagattgacaattgaaagttctgcacgggagttcctagggaaggacaagtcaactacacttgtcgctagtgctaactttgttgatctagcaggaagtgagcgtgcatctcaggcgttgtctgctggcacgaggctaaaagaaggctgccatattaacagaagtttgcttgcccttggcactgtcattaggaaactaagcatggggagtaatgcacacataccatacagagattcaaagctcacacgcatattacaaccatctttaggaggtaatgcaagaacggctattatctgtacactgagccctgccactagccatattgagcattcaagaaatactttattatttggaagttgtgcaaaggaagtagttacaaatgctcaggtaaatgtggtcatgtctgataaagcactagtaaagcatttgcaaaaggaagttgctaggttggagagtgagttgcggcaaccagcttcaaattccagtcttgaagcattagtaaaggaaaaggataaccaaattagaaagatggagaaagaaattaaagaactcaagtcacagcgtgatttggctcagtctagattgcagaatttgctggagactgttggggaccaagtgaagcactcgggctcagggaagcgttcagcccgcagtcctccatcaattggaatatccccaggcatcagcagggatgatagttctcagatctctcacgatgattcagatcttttcaaggacgtgcgatgcattgggaccagtggaacaggaggaaatgaacagttggacctgtcagctggtgaaagcagtagccttcaaggtttaaacatgaattctagtttgcatggaagcggttcaaatgcatcagtgaattctaggcgctcaaggctccttagtgaatctcctatcacattggagcagcatttggagaatatcaaaaggccttttgttagtcttggcagagatctaggatcgtcgacacataactcatcaggctccagaatacttggtagaagcaggagctgtagatcacttatgggttctaccatgtttgatggcatggagatggatgatggcacccctctgcatagaagtttggttggtttccctggaaggcctgaagggaatcatagaaggggatcaacaccgaaccatgacgcagaaagtgaaactctttcaagagcaggatccgtagtttcaaccaagacaaatgctgcatgcgatgcagagtttactggtataggtgaatttgttgctgaactgaaagagatggctcaggttcattaccagaaacagttaggcaatcagattacaaatggagaatttgtagacataaagaacattggtttggacccgattgctgatgcttcgcaatcaccttctcgctggccattagaattcgagaagaaacagcaagagatcatcgggctttggcacgcgtgctgtatttccttagtccacaggacctactttttcttgctattcaagggagaacaagctgattcaatctacatggaagtggagctccggaggctatcattcctcagagatacctactctcggggaaacacccctagcaatgcggtggtaggcagcttgaactcttcccccgctgcgagcgccaagaagctgcagcgtgaacgggagatgcttgcgaggcagatgcagaagcggctcacggcagaggaaagggagcgcctgtacaccaaatggggcatttcgctggactccaagaagaggaagctccaggtcgctcgccggctctggaccgaggccgaggacctagaacatgtcagggagagtgcctcccttgtcgccaagctgatcgggctccaggagccagggcaagtcctcagggagatgttcgggctcagctttgcgccgcagcagcagccgccccctcgccggcgatcctccaatggctggagatacgggatcccttcgttcggctgatcggatcggatgaacggtgcgagcgactgacctaagagatgtaactaccctcccccccactttttttttattatcttggtgtggtgtacggtaccttctgatttctgtagttttttagtaggatacctaccgggccatcatttgtttgtgcggctggcttcgtgcatgcttttctgcctagccgccgccgatcaggcctcaattgctgacgacatcgtcctatcctacgaccgtaattgtaattcctgactcttctgtgttatcgtgttgacgtgcgctgcaacagcgcaatagtaacgtgatgttccattccatcaggaaaaaaaatcactgggactggtccctatagctaatcatggtcatctaccgtgaactcatgatatttgtctgtctgcatattgaattactgcataaatttagaagta

SEQ ID NO: 44123 - DNA, 3507 bp, Zea Mays
agaagaccctccccaagtcaccgaacaagatcgtcgtgggcagcactcgccactcgctctcgcaggcggtgaggcggcgctatcagagcggacttcgccctccccccacccccacccccacgtccccctacaggtagccctgcaaccatggccgcggcggccgggctcagccgccggtgcaccgtccgctgacaagtcgacctttctcctacgacagcaaccgtcttcgtccggtcctggctgtttaaaaggagaggaaaggcaggaggaggggaggagttagtgttaagccaatgggggctattggaggcaatgagtcggtgcagtgggataaagtggctggagctgatgctgttaatggcggcggaacaagtgtgggcaggatggacaggatacaggtgctggtcaggctgaggccactgagcgagaaggaggttgcgaggggagagcctgcagaatgggagtgcatcaatgacaccactgtcatgttccggagcacgttccctgatcgacccaccgctccgacggcatacacatttgatcgggtttttcattctgactgtagtactaaagaagtctacgaggaagggcaagtgtttttgcatatggacaaacgagtagtggaaagacttataccatgaatggagtaacagaatatacagtagcagacatatatgattacattaataagcatgaagagagagcatttgttctgaaattctcagcaattgaaatatacaatgaagctgtaagggatcttctgagtgcagaaaacactcctcttagactctgggacgatgcagagaagggcacctatgtggagaaccttacagaggttgtgttaagggactggaaccacctcaaggggcttatttctctcaaagaaggacaggggagaccttcttgaatgaaaaaagctccagatctcatcagatactgagattggtttgtccttgtttacattaagaaattgcttggaactatgcttttttccctgaaatctttgtgtattttattaatgcagacaattgaaagttctgcacgggagttcctagggaaggacaagtcaactacacttgtcgctagtgctaactttgttgatctagcaggaagtgagcgtgcatctcaggcgttgtctgctggcacgaggctaaaagaaggctgccatattaacagaagtttgcttgcccttggcactgtcattaggaaactaagcatggggagtaatgcacacataccatacagagattcaaagctcacacgcatattacaaccatctttaggaggtaatgcaagaacggctattatctgtacactgagccctgccactagccatattgagcattcaagaaatactttattatttggaagttgtgcaaaggaagtagttacaaatgctcaggtaaatgtggtcatgtctgataaagcactagtaaagcatttgcaaaaggaagttgctaggttggagagtgagttgcggcaaccagcttcaaattccagtcttgaagcattagtaaaggaaaaggataaccaaattagaaagatggagaaagaaattaaagaactcaagtcacagcgtgatttggctcagtctagattgcagaatttgctggagactgttggggaccaagtgaagcactcgggctcagggaagcgttcagcccgcagtcctccatcaattggaatatccccaggcatcagcagggatgatagttctcagatctctcacgatgattcagatcttttcaaggacgtgcgatgcattgggaccagtggaacaggaggaaatgaacagttggacctgtcagctggtgaaagcagtagccttcaaggtttaaacatgaattctagtttgcatggaagcggttcaaatgcatcagtgaattctaggcgctcaaggctccttagtgaatctcctatcacattggagcagcatttggagaatatcaaaaggccttttgttagtcttggcagagatctaggatcgtcgacacataactcatcaggctccagaatacttggtagaagcaggagctgtagatcacttatgggttctaccatgtttgatggcatggagatggatgatggcacccctctgcatagaagtttggttggtttccctggaaggcctgaagggaatcatagaaggggatcaacaccgaaccatgacgcagaaagtgaaactctttcaagagcaggatccgtagtttcaaccaagacaaatgctgcatgcgatgcagagtttactggtataggtgaatttgttgctgaactgaaagagatggctcaggttcattaccagaaacagttaggcaatcagattacaaatggagaatttgtagacataaagaacattggtttggacccgattgctgatgcttcgcaatcaccttctcgctggccattagaattcgagaagaaacagcaagagatcatcgggctttggcacgcgtgctgtatttccttagtccacaggacctactttttcttgctattcaagggagaacaagctgattcaatctacatggaagtggagctccggaggctatcattcctcagagatacctactctcggggaaacacccctagcaatgcggtggtaggcagcttgaactcttcccccgctgcgaggtaagcgaatatatttatatatatacttgcactttcctgtatcataacttgatgacaattgtcgcaacgtcttctcttagaatgagaaatgattctccaatgaaccgcttcatgcagcgccaagaagctgcagcgtgaacgggagatgcttgcgaggcagatgcagaagcggctcacggcagaggaaagggagcgcctgtacaccaaatggggcatttcgctggactccaagaagaggaagctccaggtcgctcgccggctctggaccgaggccgaggacctagaacatgtcagggagagtgcctcccttgtcgccaagctgatcgggctccaggagccagggcaagtcctcagggagatgttcgggctcagctttgcgccgcagcagcagccgccccctcgccggcgatcctccaatggctggagatacgggatcccttcgttcggctgatcggatcggatgaacggtgcgagcgactgacctaagagatgtaactaccctcccccccactttttttttattatcttggtgtggtgtacggtaccttctgatttctgtagttttttagtaggatacctaccgggccatcatttgtttgtgcggctggcttcgtgcatgcttttctgcctagccgccgccgatcaggcctcaattgctgacgacatcgtcctatcctacgaccgtaattgtaattcctgactcttctgtgttatcgtgttgacgtgcgctgcaacagcgcaatagtaacgtgatgttccattccatcaggaaaaaaaatcactgggactggtccctatagctaatcatggtcatctaccgtgaactcatgatatttgtctgtctgcatattgaattactgcataaatttagaagta

SEQ ID NO: 44124 - DNA, 3336 bp, Zea Mays
agaagaccctccccaagtcaccgaacaagatcgtcgtgggcagcactcgccactcgctctcgcaggcggtgaggcggcgctatcagagcggacttcgccctccccccacccccacccccacgtccccctacaggtagccctgcaaccatggccgcggcggccgggctcagccgccggtgcaccgtccgctgacaagtcgacctttctcctacgacagcaaccgtcttcgtccggtcctggctgtttaaaaggagaggaaaggcaggaggaggggaggagttagtgttaagccaatgggggctattggaggcaatgagtcggtgcagtgggataaagtggctggagctgatgctgttaatggcggcggaacaagtgtgggcaggatggacaggatacaggtgctggtcaggctgaggccactgagcgagaaggaggttgcgaggggagagcctgcagaatgggagtgcatcaatgacaccactgtcatgttccggagcacgttccctgatcgacccaccgctccgacggcatacacatttgtactaaagaagtctacgaggaaggggttagggaagttgccctctctgtagttagtggcattaactcaagtgtttttgcatatggacaaacgagtagtggaaagacttataccatgaatggagtaacagaatatacagtagcagacatatatgattacattaataagcatgaagagagagcatttgttctgaaattctcagcaattgaaatatacaatgaagctgtaagggatcttctgagtgcagaaaacactcctcttagactctgggacgatgcagagaagggcacctatgtggagaaccttacagaggttgtgttaagggactggaaccacctcaaggggcttatttctgtatgtgaagctcaaagaaggacaggggagaccttcttgaatgaaaaaagctccagatctcatcagatactgagattgacaattgaaagttctgcacgggagttcctagggaaggacaagtcaactacacttgtcgctagtgctaactttgttgatctagcaggaagtgagcgtgcatctcaggcgttgtctgctggcacgaggctaaaagaaggctgccatattaacagaagtttgcttgcccttggcactgtcattaggaaactaagcatggggagtaatgcacacataccatacagagattcaaagctcacacgcatattacaaccatctttaggaggtaatgcaagaacggctattatctgtacactgagccctgccactagccatattgagcattcaagaaatactttattatttggaagttgtgcaaaggaagtagttacaaatgctcaggtaaatgtggtcatgtctgataaagcactagtaaagcatttgcaaaaggaagttgctaggttggagagtgagttgcggcaaccagcttcaaattccagtcttgaagcattagtaaaggaaaaggataaccaaattagaaagatggagaaagaaattaaagaactcaagtcacagcgtgatttggctcagtctagattgcagaatttgctggagactgttggggaccaagtgaagcactcgggctcagggaagcgttcagcccgcagtcctccatcaattggaatatccccaggcatcagcagggatgatagttctcagatctctcacgatgattcagatcttttcaaggacgtgcgatgcattgggaccagtggaacaggaggaaatgaacagttggacctgtcagctggtgaaagcagtagccttcaaggtttaaacatgaattctagtttgcatggaagcggttcaaatgcatcagtgaattctaggcgctcaaggctccttagtgaatctcctatcacattggagcagcatttggagaatatcaaaaggccttttgttagtcttggcagagatctaggatcgtcgacacataactcatcaggctccagaatacttggtagaagcaggagctgtagatcacttatgggttctaccatgtttgatggcatggagatggatgatggcacccctctgcatagaagtttggttggtttccctggaaggcctgaagggaatcatagaaggggatcaacaccgaaccatgacgcagaaagtgaaactctttcaagagcaggatccgtagtttcaaccaagacaaatgctgcatgcgatgcagagtttactggtataggtgaatttgttgctgaactgaaagagatggctcaggttcattaccagaaacagttaggcaatcagattacaaatggagaatttgtagacataaagaacattggtttggacccgattgctgatgcttcgcaatcaccttctcgctggccattagaattcgagaagaaacagcaagagatcatcgggctttggcacgcgtgctgtatttccttagtccacaggacctactttttcttgctattcaagggagaacaagctgattcaatctacatggaagtggagctccggaggctatcattcctcagagatacctactctcggggaaacacccctagcaatgcggtggtaggcagcttgaactcttcccccgctgcgagcgccaagaagctgcagcgtgaacgggagatgcttgcgaggcagatgcagaagcggctcacggcagaggaaagggagcgcctgtacaccaaatggggcatttcgctggactccaagaagaggaagctccaggtcgctcgccggctctggaccgaggccgaggacctagaacatgtcagggagagtgcctcccttgtcgccaagctgatcgggctccaggagccagggcaagtcctcagggagatgttcgggctcagctttgcgccgcagcagcagccgccccctcgccggcgatcctccaatggctggagatacgggatcccttcgttcggctgatcggatcggatgaacggtgcgagcgactgacctaagagatgtaactaccctcccccccactttttttttattatcttggtgtggtgtacggtaccttctgatttctgtagttttttagtaggatacctaccgggccatcatttgtttgtgcggctggcttcgtgcatgcttttctgcctagccgccgccgatcaggcctcaattgctgacgacatcgtcctatcctacgaccgtaattgtaattcctgactcttctgtgttatcgtgttgacgtgcgctgcaacagcgcaatagtaacgtgatgttccattccatcaggaaaaaaaatcactgggactggtccctatagctaatcatggtcatctaccgtgaactcatgatatttgtctgtctgcatattgaattactgcataaatttagaagta

SEQ ID NO: 44125 - DNA, 3342 bp, Zea Mays
agaagaccctccccaagtcaccgaacaagatcgtcgtgggcagcactcgccactcgctctcgcaggcggtgaggcggcgctatcagagcggacttcgccctccccccacccccacccccacgtccccctacaggtagccctgcaaccatggccgcggcggccgggctcagccgccggtgcaccgtccgctgacaagtcgacctttctcctacgacagcaaccgtcttcgtccggtcctggctgtttaaaaggagaggaaaggcaggaggaggggaggagttagtgttaagccaatgggggctattggaggcaatgagtcggtgcagtgggataaagtggctggagctgatgctgttaatggcggcggaacaagtgtgggcaggatggacaggatacaggtgctggtcaggctgaggccactgagcgagaaggaggttgcgaggggagagcctgcagaatgggagtgcatcaatgacaccactgtcatgttccggagcacgttccctgatcgacccaccgctccgacggcatacacatttgatcgggtttttcattctgactgtagtactaaagaagtctacgaggaaggggttagggaagttgccctctctgtagttagtggcattaactcaagtgtttttgcatatggacaaacgagtagtggaaagacttataccatgaatggagtaacagaatatacagtagcagacatatatgattacattaataagcatgaagagagagcatttgttctgaaattctcagcaattgaaatatacaatgaagctgtaagggatcttctgagtgcagaaaacactcctcttagactctgggacgatgcagagaagggcacctatgtggagaaccttacagaggttgtgttaagggactggaaccacctcaaggggcttatttctgtatgtgaagctcaaagaaggacaggggagaccttcttgaatgaaaaaagctccagatctcatcagatactgagattgacaattgaaagttctgcacgggagttcctagggaaggacaagtcaactacacttgtcgctagtgctgaagtgagcgtgcatctcaggcgttgtctgctggcacgaggctaaaagaaggctgccatattaacagaagtttgcttgcccttggcactgtcattaggaaactaagcatggggagtaatgcacacataccatacagagattcaaagctcacacgcatattacaaccatctttaggaggtaatgcaagaacggctattatctgtacactgagccctgccactagccatattgagcattcaagaaatactttattatttggaagttgtgcaaaggaagtagttacaaatgctcaggtaaatgtggtcatgtctgataaagcactagtaaagcatttgcaaaaggaagttgctaggttggagagtgagttgcggcaaccagcttcaaattccagtcttgaagcattagtaaaggaaaaggataaccaaattagaaagatggagaaagaaattaaagaactcaagtcacagcgtgatttggctcagtctagattgcagaatttgctggagactgttggggaccaagtgaagcactcgggctcagggaagcgttcagcccgcagtcctccatcaattggaatatccccaggcatcagcagggatgatagttctcagatctctcacgatgattcagatcttttcaaggacgtgcgatgcattgggaccagtggaacaggaggaaatgaacagttggacctgtcagctggtgaaagcagtagccttcaaggtttaaacatgaattctagtttgcatggaagcggttcaaatgcatcagtgaattctaggcgctcaaggctccttagtgaatctcctatcacattggagcagcatttggagaatatcaaaaggccttttgttagtcttggcagagatctaggatcgtcgacacataactcatcaggctccagaatacttggtagaagcaggagctgtagatcacttatgggttctaccatgtttgatggcatggagatggatgatggcacccctctgcatagaagtttggttggtttccctggaaggcctgaagggaatcatagaaggggatcaacaccgaaccatgacgcagaaagtgaaactctttcaagagcaggatccgtagtttcaaccaagacaaatgctgcatgcgatgcagagtttactggtataggtgaatttgttgctgaactgaaagagatggctcaggttcattaccagaaacagttaggcaatcagattacaaatggagaatttgtagacataaagaacattggtttggacccgattgctgatgcttcgcaatcaccttctcgctggccattagaattcgagaagaaacagcaagagatcatcgggctttggcacgcgtgctgtatttccttagtccacaggacctactttttcttgctattcaagggagaacaagctgattcaatctacatggaagtggagctccggaggctatcattcctcagagatacctactctcggggaaacacccctagcaatgcggtggtaggcagcttgaactcttcccccgctgcgagcgccaagaagctgcagcgtgaacgggagatgcttgcgaggcagatgcagaagcggctcacggcagaggaaagggagcgcctgtacaccaaatggggcatttcgctggactccaagaagaggaagctccaggtcgctcgccggctctggaccgaggccgaggacctagaacatgtcagggagagtgcctcccttgtcgccaagctgatcgggctccaggagccagggcaagtcctcagggagatgttcgggctcagctttgcgccgcagcagcagccgccccctcgccggcgatcctccaatggctggagatacgggatcccttcgttcggctgatcggatcggatgaacggtgcgagcgactgacctaagagatgtaactaccctcccccccactttttttttattatcttggtgtggtgtacggtaccttctgatttctgtagttttttagtaggatacctaccgggccatcatttgtttgtgcggctggcttcgtgcatgcttttctgcctagccgccgccgatcaggcctcaattgctgacgacatcgtcctatcctacgaccgtaattgtaattcctgactcttctgtgttatcgtgttgacgtgcgctgcaacagcgcaatagtaacgtgatgttccattccatcaggaaaaaaaatcactgggactggtccctatagctaatcatggtcatctaccgtgaactcatgatatttgtctgtctgcatattgaattactgcataaatttagaagta

SEQ ID NO: 44126 - DNA, 3309 bp, Zea Mays
aaaagaatcggcaccgtctcctgcactccagagtcatcagaagaccctccccaagtcaccgaacaagatcgtcgtgggcagcactcgccactcgctctcgcaggcggtgaggcggcgctatcagagcggacttcgccctccccccacccccacccccacgtccccctacaggtagccctgcaaccatggccgcggcggccgggctcagccgccggtgcaccgtccgctgacaagtcgacctttctcctacgacagcaaccgtcttcgtccggtcctggctgtttaaaaggagaggaaaggcaggaggaggggaggagttagtgttaagccaatgggggctattggaggcaatgagtcggtgcagtgggataaagtggctggagctgatgctgttaatggcggcggaacaagtgtgggcaggatggacaggatacaggtgctggtcaggctgaggccactgagcgagaaggaggttgcgaggggagagcctgcagaatgggagtgcatcaatgacaccactgtcatgttccggagcacgttccctgatcgacccaccgctccgacggcatacacatttgcaagtgtttttgcatatggacaaacgagtagtggaaagacttataccatgaatggagtaacagaatatacagtagcagacatatatgattacattaataagcatgaagagagagcatttgttctgaaattctcagcaattgaaatatacaatgaagctgtaagggatcttctgagtgcagaaaacactcctcttagactctgggacgatgcagagaagggcacctatgtggagaaccttacagaggttgtgttaagggactggaaccacctcaaggggcttatttctgtatgtgaagctcaaagaaggacaggggagaccttcttgaatgaaaaaagctccagatctcatcagatactgagattgacaattgaaagttctgcacgggagttcctagggaaggacaagtcaactacacttgtcgctagtgctaactttgttgatctagcaggaagtgagcgtgcatctcaggcgttgtctgctggcacgaggctaaaagaaggctgccatattaacagaagtttgcttgcccttggcactgtcattaggaaactaagcatggggagtaatgcacacataccatacagagattcaaagctcacacgcatattacaaccatctttaggaggtaatgcaagaacggctattatctgtacactgagccctgccactagccatattgagcattcaagaaatactttattatttggaagttgtgcaaaggaagtagttacaaatgctcaggtaaatgtggtcatgtctgataaagcactagtaaagcatttgcaaaaggaagttgctaggttggagagtgagttgcggcaaccagcttcaaattccagtcttgaagcattagtaaaggaaaaggataaccaaattagaaagatggagaaagaaattaaagaactcaagtcacagcgtgatttggctcagtctagattgcagaatttgctggagactgttggggaccaagtgaagcactcgggctcagggaagcgttcagcccgcagtcctccatcaattggaatatccccaggcatcagcagggatgatagttctcagatctctcacgatgattcagatcttttcaaggacgtgcgatgcattgggaccagtggaacaggaggaaatgaacagttggacctgtcagctggtgaaagcagtagccttcaaggtttaaacatgaattctagtttgcatggaagcggttcaaatgcatcagtgaattctaggcgctcaaggctccttagtgaatctcctatcacattggagcagcatttggagaatatcaaaaggccttttgttagtcttggcagagatctaggatcgtcgacacataactcatcaggctccagaatacttggtagaagcaggagctgtagatcacttatgggttctaccatgtttgatggcatggagatggatgatggcacccctctgcatagaagtttggttggtttccctggaaggcctgaagggaatcatagaaggggatcaacaccgaaccatgacgcagaaagtgaaactctttcaagagcaggatccgtagtttcaaccaagacaaatgctgcatgcgatgcagagtttactggtataggtgaatttgttgctgaactgaaagagatggctcaggttcattaccagaaacagttaggcaatcagattacaaatggagaatttgtagacataaagaacattggtttggacccgattgctgatgcttcgcaatcaccttctcgctggccattagaattcgagaagaaacagcaagagatcatcgggctttggcacgcgtgctgtatttccttagtccacaggacctactttttcttgctattcaagggagaacaagctgattcaatctacatggaagtggagctccggaggctatcattcctcagagatacctactctcggggaaacacccctagcaatgcggtggtaggcagcttgaactcttcccccgctgcgagcgccaagaagctgcagcgtgaacgggagatgcttgcgaggcagatgcagaagcggctcacggcagaggaaagggagcgcctgtacaccaaatggggcatttcgctggactccaagaagaggaagctccaggtcgctcgccggctctggaccgaggccgaggacctagaacatgtcagggagagtgcctcccttgtcgccaagctgatcgggctccaggagccagggcaagtcctcagggagatgttcgggctcagctttgcgccgcagcagcagccgccccctcgccggcgatcctccaatggctggagatacgggatcccttcgttcggctgatcggatcggatgaacggtgcgagcgactgacctaagagatgtaactaccctcccccccactttttttttattatcttggtgtggtgtacggtaccttctgatttctgtagttttttagtaggatacctaccgggccatcatttgtttgtgcggctggcttcgtgcatgcttttctgcctagccgccgccgatcaggcctcaattgctgacgacatcgtcctatcctacgaccgtaattgtaattcctgactcttctgtgttatcgtgttgacgtgcgctgcaacagcgcaatagtaacgtgatgttccattccatcaggaaaaaaaatcactgggactggtccctatagctaatcatggtcatctaccgtgaactcatgatatttgtctgtctgcatattgaattactgcataaatttagaagta

SEQ ID NO: 44127 - DNA, 3414 bp, Zea Mays
aacaaaaggaacaaaagaaaagagaaaaagaatcggcaccgtctcctgcactccagagtcatcagaagaccctccccaagtcaccgaacaagatcgtcgtgggcagcactcgccactcgctctcgcaggcggtgaggcggcgctatcagagcggacttcgccctccccccacccccacccccacgtccccctacaggtagccctgcaaccatggccgcggcggccgggctcagccgccggtgcaccgtccgctgacaagtcgacctttctcctacgacagcaaccgtcttcgtccggtcctggctgtttaaaaggagaggaaaggcaggaggaggggaggagttagtgttaagccaatgggggctattggaggcaatgagtcggtgcagtgggataaagtggctggagctgatgctgttaatggcggcggaacaagtgtgggcaggatggacaggatacaggtgctggtcaggctgaggccactgagcgagaaggaggttgcgaggggagagcctgcagaatgggagtgcatcaatgacaccactgtcatgttccggagcacgttccctgatcgacccaccgctccgacggcatacacatttgatcgggtttttcattctgactgtagtactaaagaagtctacgaggaaggggttagggaagttgccctctctgtagttagtggcattaactcaagtgtttttgcatatggacaaacgagtagtggaaagacttataccatgaatggagtaacagaatatacagtagcagacatatatgattacattaataagcatgaagagagagcatttgttctgaaattctcagcaattgaaatatacaatgaagctgtaagggatcttctgagtgcagaaaacactcctcttagactctgggacgatgcagagaagggcacctatgtggagaaccttacagaggttgtgttaagggactggaaccacctcaaggggcttatttctctcaaagaaggacaggggagaccttcttgaatgaaaaaagctccagatctcatcagatactgagattgacaattgaaagttctgcacgggagttcctagggaaggacaagtcaactacacttgtcgctagtgctaactttgttgatctagcaggaagtgagcgtgcatctcaggcgttgtctgctggcacgaggctaaaagaaggctgccatattaacagaagtttgcttgcccttggcactgtcattaggaaactaagcatggggagtaatgcacacataccatacagagattcaaagctcacacgcatattacaaccatctttaggaggtaatgcaagaacggctattatctgtacactgagccctgccactagccatattgagcattcaagaaatactttattatttggaagttgtgcaaaggaagtagttacaaatgctcaggtaaatgtggtcatgtctgataaagcactagtaaagcatttgcaaaaggaagttgctaggttggagagtgagttgcggcaaccagcttcaaattccagtcttgaagcattagtaaaggaaaaggataaccaaattagaaagatggagaaagaaattaaagaactcaagtcacagcgtgatttggctcagtctagattgcagaatttgctggagactgttggggaccaagtgaagcactcgggctcagggaagcgttcagcccgcagtcctccatcaattggaatatccccaggcatcagcagggatgatagttctcagatctctcacgatgattcagatcttttcaaggacgtgcgatgcattgggaccagtggaacaggaggaaatgaacagttggacctgtcagctggtgaaagcagtagccttcaaggtttaaacatgaattctagtttgcatggaagcggttcaaatgcatcagtgaattctaggcgctcaaggctccttagtgaatctcctatcacattggagcagcatttggagaatatcaaaaggccttttgttagtcttggcagagatctaggatcgtcgacacataactcatcaggctccagaatacttggtagaagcaggagctgtagatcacttatgggttctaccatgtttgatggcatggagatggatgatggcacccctctgcatagaagtttggttggtttccctggaaggcctgaagggaatcatagaaggggatcaacaccgaaccatgacgcagaaagtgaaactctttcaagagcaggatccgtagtttcaaccaagacaaatgctgcatgcgatgcagagtttactggtataggtgaatttgttgctgaactgaaagagatggctcaggttcattaccagaaacagttaggcaatcagattacaaatggagaatttgtagacataaagaacattggtttggacccgattgctgatgcttcgcaatcaccttctcgctggccattagaattcgagaagaaacagcaagagatcatcgggctttggcacgcgtgctgtatttccttagtccacaggacctactttttcttgctattcaagggagaacaagctgattcaatctacatggaagtggagctccggaggctatcattcctcagagatacctactctcggggaaacacccctagcaatgcggtggtaggcagcttgaactcttcccccgctgcgagcgccaagaagctgcagcgtgaacgggagatgcttgcgaggcagatgcagaagcggctcacggcagaggaaagggagcgcctgtacaccaaatggggcatttcgctggactccaagaagaggaagctccaggtcgctcgccggctctggaccgaggccgaggacctagaacatgtcagggagagtgcctcccttgtcgccaagctgatcgggctccaggagccagggcaagtcctcagggagatgttcgggctcagctttgcgccgcagcagcagccgccccctcgccggcgatcctccaatggctggagatacgggatcccttcgttcggctgatcggatcggatgaacggtgcgagcgactgacctaagagatgtaactaccctcccccccactttttttttattatcttggtgtggtgtacggtaccttctgatttctgtagttttttagtaggatacctaccgggccatcatttgtttgtgcggctggcttcgtgcatgcttttctgcctagccgccgccgatcaggcctcaattgctgacgacatcgtcctatcctacgaccgtaattgtaattcctgactcttctgtgttatcgtgttgacgtgcgctgcaacagcgcaatagtaacgtgatgttccattccatcaggaaaaaaaatcactgggactggtccctatagctaatcatggtcatctaccgtgaactcatgatatttgtctgtctgcatattgaattactgcataaatttagaagta

SEQ ID NO: 44128 - DNA, 3520 bp, Zea Mays
cgtccacatgcgaagccgaaggtaacactatcgcaacggtctgctggggctggtggcaaaacaaaaggaacaaaagaaaagagaaaaagaatcggcaccgtctcctgcactccagagtcatcagaagaccctccccaagtcaccgaacaagatcgtcgtgggcagcactcgccactcgctctcgcaggcggtgaggcggcgctatcagagcggacttcgccctccccccacccccacccccacgtccccctacaggtagccctgcaaccatggccgcggcggccgggctcagccgccggtgcaccgtccgctgacaagtcgacctttctcctacgacagcaaccgtcttcgtccggtcctggctgtttaaaaggagaggaaaggcaggaggaggggaggagttagtgttaagccaatgggggctattggaggcaatgagtcggtgcagtgggataaagtggctggagctgatgctgttaatggcggcggaacaagtgtgggcaggatggacaggatacaggtgctggtcaggctgaggccactgagcgagaaggaggttgcgaggggagagcctgcagaatgggagtgcatcaatgacaccactgtcatgttccggagcacgttccctgatcgacccaccgctccgacggcatacacatttgatcgggtttttcattctgactgtagtactaaagaagtctacgaggaaggggttagggaagttgccctctctgtagttagtggcattaactcaagtgtttttgcatatggacaaacgagtagtggaaagacttataccatgaatggagtaacagaatatacagtagcagacatatatgattacattaataagcatgaagagagagcatttgttctgaaattctcagcaattgaaatatacaatgaagctgtaagggatcttctgagtgcagaaaacactcctcttagactctgggacgatgcagagaagggcacctatgtggagaaccttacagaggttgtgttaagggactggaaccacctcaaggggcttatttctgtatgtgaagctcaaagaaggacaggggagaccttcttgaatgaaaaaagctccagatctcatcagatactgagattgacaattgaaagttctgcacgggagttcctagggaaggacaagtcaactacacttgtcgctagtgctaactttgttgatctagcaggaagtgagcgtgcatctcaggcgttgtctgctggcacgaggctaaaagaaggctgccatattaacagaagtttgcttgcccttggcactgtcattaggaaactaagcatggggagtaatgcacacataccatacagagattcaaagctcacacgcatattacaaccatctttaggaggtaatgcaagaacggctattatctgtacactgagccctgccactagccatattgagcattcaagaaatactttattatttggaagttgtgcaaaggaagtagttacaaatgctcaggtaaatgtggtcatgtctgataaagcactagtaaagcatttgcaaaaggaagttgctaggttggagagtgagttgcggcaaccagcttcaaattccagtcttgaagcattagtaaaggaaaaggataaccaaattagaaagatggagaaagaaattaaagaactcaagtcacagcgtgatttggctcagtctagattgcagaatttgctggagactgttggggaccaagtgaagcactcgggctcagggaagcgttcagcccgcagtcctccatcaattggaatatccccaggcatcagcagggatgatagttctcagatctctcacgatgattcagatcttttcaaggacgtgcgatgcattgggaccagtggaacaggaggaaatgaacagttggacctgtcagctggtgaaagcagtagccttcaaggtttaaacatgaattctagtttgcatggaagcggttcaaatgcatcagtgaattctaggcgctcaaggctccttagtgaatctcctatcacattggagcagcatttggagaatatcaaaaggccttttgttagtcttggcagagatctaggatcgtcgacacataactcatcaggctccagaatacttggtagaagcaggagctgtagatcacttatgggttctaccatgtttgatggcatggagatggatgatggcacccctctgcatagaagtttggttggtttccctggaaggcctgaagggaatcatagaaggggatcaacaccgaaccatgacgcagaaagtgaaactctttcaagagcaggatccgtagtttcaaccaagacaaatgctgcatgcgatgcagagtttactggtataggtgaatttgttgctgaactgaaagagatggctcaggttcattaccagaaacagttaggcaatcagattacaaatggagaatttgtagacataaagaacattggtttggacccgattgctgatgcttcgcaatcaccttctcgctggccattagaattcgagaagaaacagcaagagatcatcgggctttggcacgcgtgctgtatttccttagtccacaggacctactttttcttgctattcaagggagaacaagctgattcaatctacatggaagtggagctccggaggctatcattcctcagagatacctactctcggggaaacacccctagcaatgcggtggtaggcagcttgaactcttcccccgctgcgagaatgagaaatgattctccaatgaaccgcttcatgcagcgccaagaagctgcagcgtgaacgggagatgcttgcgaggcagatgcagaagcggctcacggcagaggaaagggagcgcctgtacaccaaatggggcatttcgctggactccaagaagaggaagctccaggtcgctcgccggctctggaccgaggccgaggacctagaacatgtcagggagagtgcctcccttgtcgccaagctgatcgggctccaggagccagggcaagtcctcagggagatgttcgggctcagctttgcgccgcagcagcagccgccccctcgccggcgatcctccaatggctggagatacgggatcccttcgttcggctgatcggatcggatgaacggtgcgagcgactgacctaagagatgtaactaccctcccccccactttttttttattatcttggtgtggtgtacggtaccttctgatttctgtagttttttagtaggatacctaccgggccatcatttgtttgtgcggctggcttcgtgcatgcttttctgcctagccgccgccgatcaggcctcaattgctgacgacatcgtcctatcctacgaccgtaattgtaattcctgactcttctgtgttatcgtgttgacgtgcgctgcaacagcgcaatagtaacgtgatgttccattccatcaggaaaaaaaatcactgggactggtccctatagctaatcatggtcatctaccgtgaactcatgatatttgtctgtctgcatattgaattactgcataaatttagaagta

SEQ ID NO: 44129 - DNA, 3402 bp, Zea Mays
cgtccacatgcgaagccgaaggtaacactatcgcaacggtctgctggggctggtggcaaaacaaaaggaacaaaagaaaagagaaaaagaatcggcaccgtctcctgcactccagagtcatcagaagaccctccccaagtcaccgaacaagatcgtcgtgggcagcactcgccactcgctctcgcaggcggtgaggcggcgctatcagagcggacttcgccctccccccacccccacccccacgtccccctacaggtagccctgcaaccatggccgcggcggccgggctcagccgccggtgcaccgtccgctgacaagtcgacctttctcctacgacagcaaccgtcttcgtccggtcctggctgtttaaaaggagaggaaaggcaggaggaggggaggagttagtgttaagccaatgggggctattggaggcaatgagtcggtgcagtgggataaagtggctggagctgatgctgttaatggcggcggaacaagtgtgggcaggatggacaggatacaggtgctggtcaggctgaggccactgagcgagaaggaggttgcgaggggagagcctgcagaatgggagtgcatcaatgacaccactgtcatgttccggagcacgttccctgatcgacccaccgctccgacggcatacacatttgatcgggtttttcattctgactgtagtactaaagaagtctacgaggaaggggttagggaagttgccctctctgtagttagtggcattaactcaagtgtttttgcatatggacaaacgagtagtggaaagacttataccatgaatggagtaacagaatatacagtagcagacatatatgattacattaataagcatgaagagagagcatttgttctgaaattctcagcaattgaaatatacaatgaagctgtaagggatcttctgagtgcagaaaacactcctcttagactctgggacgatgcagagaagggcacctatgtggagaaccttacagaggttgtgttaagggactggaaccacctcaaggggcttatttctgtatgtgaagctcaaagaaggacaggggagaccttcttgaatgaaaaaagctccagatctcatcagatactgagattgacaattgaaagttctgcacgggagttcctagggaaggacaagtcaactacacttgtcgctagtgctaactttgttgatctagcaggaagtgagcgtgcatctcaggcgttgtctgctggcacgaggctaaaagaaggctgccatattaacagaagtttgcttgcccttggcactgtcattaggaaactaagcatggggagtaatgcacacataccatacagagattcaaagctcacacgcatattacaaccatctttaggaggtaatgcaagaacggctattatctgtacactgagccctgccactagccatattgagcattcaagaaatactttattatttggaagttgtgcaaaggaagtagttacaaatgctcaggtaaatgtggtcatgtctgataaagcactagtaaagcatttgcaaaaggaagttgctaggttggagagtgagttgcggcaaccagcttcaaattccagtcttgaagcattagtaaaggaaaaggataaccaaattagaaagatggagaaagaaattaaagaactcaagtcacagcgtgatttggctcagtctagattgcagaatttgctggagactgttggggaccaagtgaagcactcgggctcagggaagcgttcagcccgcagtcctccatcaattggaatatccccaggcatcagcagggatgatagttctcagatctctcacgatgattcagatcttttcaaggacgtgcgatgcattgggaccagtggaacaggaggaaatgaacagttggacctgtcagctggtgaaagcagtagccttcaaggtttaaacatgaattctagtttgcatggaagcggttcaaatgcatcagtgaattctaggcgctcaaggctccttagtgaatctcctatcacattggagcagcatttggagaatatcaaaaggccttttgttagtcttggcagagatctaggatcgtcgacacataactcatcaggctccagaatacttggtagaagcaggagctgtagatcacttatgggttctaccatgtttgatggcatggagatggatgatggcacccctctgcatagaagtttggttggtttccctggaaggcctgaagggaatcatagaaggggatcaacaccgaaccatgacgcagaaagtgaaactctttcaagagcaggatccgtagtttcaaccaagacaaatgctgcatgcgatgcagagtttactggtataggtgaatttgttgctgaactgaaagagatggctcaggttcattaccagaaacagttaggcaatcagattacaaatggagaatttgtagacataaagaacattggtttggacccgattgctgatgcttcgcaatcaccttctcgctggccattagaattcgagaagaaacagcaagagatcatcgggctttggcacgcgtgctgtatttccttagtccacaggacctactttttcttgctattcaagggagaacaagctgattcaatctacatggaagtggagctccggaggctatcattcctcagagatacctactctcggggaaacacccctagcaatgcggtggtaggcagcttgaactcttcccccgctgcgagcgccaagaagctgcagcgtgaacgggagatgcttgcgaggcagatgcagaagcggctcacggcagaggaaagggagcgcctgtacaccaaatggggcatttcgctggactccaagaagaggaagctccaggtcgctcgccggctctggaccgaggccgaggacctagaacatgtcagggagagtgcctcccttgtcgccaagctgatcgggctccaggagccagggcaagtcctcagggagatgttcgggctcagctttgcgccgcagcagcagccgccccctcgccggcgatcctccaatggctggagatacgggatcccttcgttcggctgatcggatcggatgaacggtgcgagcgactgacctaagagatgatacctaccgggccatcatttgtttgtgcggctggcttcgtgcatgcttttctgcctagccgccgccgatcaggcctcaattgctgacgacatcgtcctatcctacgaccgtaattgtaattcctgactcttctgtgttatcgtgttgacgtgcgctgcaacagcgcaatagtaacgtgatgttccattccatcaggaaaaaaaatcactgggactggtccctatagctaatcatggtcatctaccgtgaactcatgatatttgtctgtctgcatattgaattactgcataaatttagaagta

SEQ ID NO: 44130 - DNA, 1676 bp, Zea Mays
tcatctccctgtcgcactcgcccccgctgaggccctcctcccccgcaccagagtcgtcgtcgtcgtcgtccgagtcgtactctgagtcggactcggacatcgacgagaagctgaggtccggcaggccggcgacggcggcagggcccagcaccgtagggcccgccgtccatgccatttccatcggctgatgagggccagcttgcaccgtggtcatgcccgagggcgggggcggcagaggcggcgccgaggcgtgcagcgcctcgagctgcgagaagaagcggtagctcttgccgtcctggcgcccggcgcgggcgtccttggtgcgcctgtagtacttgtccacgttctcgaacttctccttgcacttcttggcgctccggtggtaacccagccctgcaagcttcctgcagaaagaatgtgccccagcacggccgcgcctgttagctctttctcgcgttcacgtctcaacgagcaggagtcatgaagaggtgatgacttggttgtgtgcgcggaggagtatctttcattcttcctctttccctgaaagggactggacggacgctgaaggaattggaatttttagaagcggatcggagacagacatgtaaagcgacgatggcggaagcatcagccaccagcagttttaggaatcagcacagagatgtggtgatgatgtcaagttgatggcatcgtgtccgaggaacaaagataaactaattcaagtgacgatgacagcgaaaacttggtgcatccatccaagtccaagtgtgttttaaaaggaagagagggaatagaagaaaaaaaagcattgcagctatatagcctgcaacaggcggcagctgctgccatagtctgtgcggccggcctgcgcctgtacgcagcacaatcacggcgcggcatacggctgcccgggcgccgagatccttatcgtgatgcctgcggctgcgctggctgcacctaccacttcactacgctccaatctcacatacaccggggaggagcattacgccaaaagcgtcgggggaaaaaaaagcagtgggcaaaagatagatggcaggatagctcgccatcatttcaccggcgacgccggacggagcagaggtgaaattccgtgaaaccgttagccgcattccgcagcaaaagagaggaaaagcttacggcttgctaatgctttctcaccttgcgacgttctcccagagcggcgctttgagcggggagctccggaagtcggcgtccatctccgtccggatcctgatgagcgccagcgtctcctcgcgcggccaccggttgccggacgctcccgcgccgctggcgcccaagtcggcctgcatgtcttcgtcctggagtctgaccgccacaccggcgccggagccgcccgctgccaattcctcgaaattagcgctcgaccccgccggctgcaactgcatcgtcggcagggctgggatggcggcggtgacagacacggcgagccccgtcggcgtcggcgagaacggggccgtgcccgtgcccgtgccagccgtctccggggccatgtacggggacccggcgccaccgtggtggtgcagcatggccgccgccacctttggttccggcccctctggacgacgggttatgacggaaactggcagcgagggggctgtgcagctagggggaggaggaagaaggggcagtggtga

SEQ ID NO: 44131 - DNA, 1205 bp, Zea Mays
tcatctccctgtcgcactcgcccccgctgaggccctcctcccccgcaccagagtcgtcgtcgtcgtcgtccgagtcgtactctgagtcggactcggacatcgacgagaagctgaggtccggcaggccggcgacggcggcagggcccagcaccgtagggcccgccgtccatgccatttccatcggctgatgagggccagcttgcaccgtggtcatgcccgagggcgggggcggcagaggcggcgccgaggcgtgcagcgcctcgagctgcgagaagaagcggtagctcttgccgtcctggcgcccggcgcgggcgtccttggtgcgcctgtagtacttgtccacgttctcgaacttctccttgcacttcttggcgctccggtggtaacccagccctgcaagcttccttgcgacgttctcccagagcggcgctttgagcggggagctccggaagtcggcgtccatctccgtccggatcctgatgagcgccagcgtctcctcgcgcggccaccggttgccggacgctcccgcgccgctggcgcccaagtcggcctgcatgtcttcgtcctggagtctgaccgccacaccggcgccggagccgcccgctgccaattcctcgaaattagcgctcgaccccgccggctgcaactgcatcgtcggcagggctgggatggcggcggtgacagacacggcgagccccgtcggcgtcggcgagaacggggccgtgcccgtgcccgtgccagccgtctccggggccatgtacggggacccggcgccaccgtggtggtgcagcatggccgccgccacctttggttccctgcacaaaacaagaaattccgttgatccaccagctcgcaagacctagggaatagaaaattgcagcatcacttcaccggtactgcgactaagctagcacacagtccctctcctggctgtggactgtgtgtggtctacaactacgtactaccaactaacaattgtccaggaaaacaacccagggacagaattggggagaattcttgcttctacacccggccatctctctcagtccccttttccctcccgtctctcttctaggaacagagtgagtgagtgccacaagcaagattagagagacttacggcccctctggacgacgggttatgacggaaactggcagcgagggggctgtgcagctagggggaggaggaagaaggggcagtggtga

SEQ ID NO: 44132 - DNA, 2038 bp, Zea Mays
taccatatctcttagttcaaatatccaatcactaaactgattttagatatatgttcttaacatttttataaacaaaactagaacacatttgttatataaatattgaagatttatttatttatttatttatttgatctttgttcttattcaaacaaccaaacactagctatatctaacctgaatatactaatgcgaacaaccaaacaaaagtccacgtatgtatctagccagtacataaggaacttgactctacatactggccaagccgaccagtctgctaccataccacaacctgtatatctctatcatagtccacgtatgtatctagccagtacataaggaacttgactctttacatactggccaagccgaccagtctgctaccataccacaacctgtatatctctatcatagcttcataagtgagagcgtcgccaacaaattaaagttaatgccatcgatcacttggatgtgaatatgttttgtatgcacatcgtcttctctgcttgttccaattctctgcaaatctgctcagtctaccaaataatttcgcaaaacatctctttatatgatccaaatgcaatgtcatatatatatgtaggctctctactgcatgcatgctacacattcatggaaatgtttcataaaaacctgtgcagttggaatatataaatcagaacatgcatggaggcagagttgtaaagttacagctttatggagctctcgctagctagctccatgcatgggacgacacgacgatcagtggcatgcatgtgtcctgctttgatgtatgaggaaacaaggggaaggagacaactactcatgaaccttaacttttggcctagctagccttccgatcgaaaaaacaaaatatatatgacatctgttcgtagatggcagcagtatttatttatttgcatctatatatcgagatagatagtccataatcttcaggccaaagggtgagcatatttttatctgtttactcctaatagcttgtagtctgcccccaatcgaaaagaacacatgtagatgtagagcagtagtatctttgagattactgcccttggttctaatttgtggaaattaacatatagaactagctagaaacacttgtttgtgtacgatcattgatcgatttatgagcaaaatcatttgatactcaggagatatatatgcagactgatcatacatatgagaccaccgttaattagatggggatttggccaacaaatctcttagattaagatgaactagaaacaaagaagtcatgtctaggagagagaaaggtaagcaaaagagaagataagaagatccttcatgcatgcgaaaagggatagcgatgatacacaaccttttctcctcatctttctcctgtcagatcagctagagatcagaaaaagaagtggggacaggccggcggagaaaagaaagaccgcaacaagggagacgatgccatattgccatgcgatagtttaaaggaagaaagcatgcatttgttgacagtgttgttgggtcaagaatccttatgattgcaccaatctgctgcatgtgttgaccgcgcgaaacccaagtacacaacacaggaaacactcgccgagataatcatatcctaatcatgcatgattctgtctgcgcgcggggggcataatctaggcccgagccatagtcaaacgagccaggaggacagaaagatcgagtcgccgcatcgatgatgcccaagaaaactcaccatgcatgcgcgcgagaggcaagaacgagagagatcgatggagccgggagctctacttgaggggaatgaagcctggtccgagatcaacaacaaccaagacgacctcgatgagatctgcgtgtttctgcacctcgagccagacaacattcccctcaaagtaagaaagcttcctccttttcttcctcgtgatctgttgcatgcgactccggatccggccttcttcttcaattcctcctgttctcaggaatcaggatccggccttttctttctcctgttctcccctcgcaagactcggcttgtttcagg

SEQ ID NO: 44133 - DNA, 1543 bp, Zea Mays
tggtttgattgattgagaagtgcactgcccacttttaagttaattatcagcaacagtagacacacccattttgttctgttctattctgcttcatttacaggggatctccgccaagttattggtcatattttaggacgttatcctcagtccaatgtctatgctaccggttggtctcttggagcgaatattcttgtgcgctaccttggcgaggaaactgataaatgccctttatctggcgcggtctccttgtgcaatccttttaatttggtaattgcagatgaagatttccacaaaggatttaacaacgtttatgataaagcattggctagggctttgacgactatatttaagaaggatttgaacaaaatttaggcatgctctccttttcgaagggctggagggtgaatatgatatacccaaggcagcgaatgcaagaactgttagagattttgatgaggggttaacccgagtttcatttggtttcaagtcagtggatgattattactccaattcaagcagctcggattctatcaaggatgtttgcatacccttactgtgcatacagtatgtgcaggctgataatgacccaattgcaccatccaggggaattcctagagatgatatcaaggcaaataagaactgtctacttatagtaacaccacagggtggccatcttggatgggtagcaggcgacgaagctccattcggatgtccttggacagacccaatagtgatggaatatctagaacatctcgagaatgagaaggactctagtaccaaaaataacacatcctatgagggtgtttcagaggcatcagtatcccatctaactgtgcatggccaaagataataatatctctcttctcatagtactcattcgccacattatgttttatatggaaatagtttagtagagttcatttagccgtgttgtctgctgctgcctgctggttaattgagtacatggctcttcgtctacaggtctagtggtctacacatgtgcgagaagatttctgtgtcaaataagatgtctggttctgagatcaaaatagaacatgcgttatccaattgttcgttcttagggggtttcactttcatcccgtgtttgaaagggattctctgtaaatgcatgagctgttacggagttggcctttgtatccctcttctgcaacgcgtgaaagttgatggcgatgagcacggcagtgcatcatgtaaatttgacaatgtcattcagcgcaaaaaaaaaaaaaccccccgaaaaatgtgttggaagagtttttgtgtgcgcatgctaacaaatatctcatgtggtaaacatcatcttggattaacatatggcaatgtgatgaaatagtaacagttgttgaaattttatatgatcctactattccttttacagatggtaccagatatagatgatttcattgaaccctttgcgccagaaaaattaatatatcttactactactgtgtctagattttccatatacaacagtcctttatggtactactactttggaccccccagcgtgactacaccgatg

SEQ ID NO: 44134 - DNA, 1602 bp, Zea Mays
ccacaaaagaattttcacctgaagcaaagcaaaaggcctggtcttacaggtggaagtgatgatacatatgtaaggcatatgcttatgagagctagaagcaagggatggcgtgttgtggtgtttaatagccgtggatgtgcagatagtcctgtgactacacccaagttctattctgcttcatttacaggggatctccgccaagttattggtcatattttaggacgttatcctcagtccaatgtctatgctaccggttggtctcttggagcgaatattcttgtgcgctaccttggcgaggaaactgataaatgccctttatctggcgcggtctccttgtgcaatccttttaatttggtaattgcagatgaagatttccacaaaggatttaacaacgtttatgataaagcattggctagggctttgacgactatatttaagaagcatgctctccttttcgaagggctggagggtgaatatgatatacccaaggcagcgaatgcaagaactgttagagattttgatgaggggttaacccgagtttcatttggtttcaagtcagtggatgattattactccaattcaagcagctcggattctatcaaggatgtttgcatacccttactgtgcatacaggctgataatgacccaattgcaccatccaggggaattcctagagatgatatcaaggcaaataagaactgtctacttatagtaacaccacagggtggccatcttggatgggtagcaggcgacgaagctccattcggatgtccttggacagacccaatagtgatggaatatctagaacatctcgagaatgagaaggactctagtaccaaaaataacacatcctatgagggtgtttcagaggcatcagtatcccatctaactgtgcatggccaaagataataatatctctcttctcatagtactcattcgccacattatgttttatatggaaatagtttagtagagttcatttagccgtgttgtctgctgctgcctgctggttaattgagtacatggctcttcgtctacaggtctagtggtctacacatgtgcgagaagatttctgtgtcaaataagatgtctggttctgagatcaaaatagaacatgcgttatccaattgttcgttcttagggggtttcactttcatcccgtgtttgaaagggattctctgtaaatgcatgagctgttacggagttggcctttgtatccctcttctgcaacgcgtgaaagttgatggcgatgagcacggcagtgcatcatgtaaatttgacaatgtcattcagcgcaaaaaaaaaaaaaccccccgaaaaatgtgttggaagagtttttgtgtgcgcatgctaacaaatatctcatgtggtaaacatcatcttggattaacatatggcaatgtgatgaaatagtaacagttgttgaaattttatatgatcctactattccttttacagatggtaccagatatagatgatttcattgaaccctttgcgccagaaaaattaatatatcttactactactgtgtctagattttccatatacaacagtcctttatggtactactactttggaccccccagcgtgactacaccgatg

SEQ ID NO: 44135 - DNA, 1643 bp, Zea Mays
agatacaaatgaaattaaatgaccacaaaagaattttcacctgaagcaaagcaaaaggcctggtcttacaggtggaagtgatgatacatatgtaaggcatatgcttatgagagctagaagcaagggatggcgtgttgtggtgtttaatagccgtggatgtgcagatagtcctgtgactacacccaagttctattctgcttcatttacaggggatctccgccaagttattggtcatattttaggacgttatcctcagtccaatgtctatgctaccggttggtctcttggagcgaatattcttgtgcgctaccttggcgaggaaactgataaatgccctttatctggcgcggtctccttgtgcaatccttttaatttggtaattgcagatgaagatttccacaaaggatttaacaacgtttatgataaagcattggctagggctttgacgactatatttaagaaggatttgaacaaaatttaggcatgctctccttttcgaagggctggagggtgaatatgatatacccaaggcagcgaatgcaagaactgttagagattttgatgaggggttaacccgagtttcatttggtttcaagtcagtggatgattattactccaattcaagcagctcggattctatcaaggatgtttgcatacccttactgtgcatacaggctgataatgacccaattgcaccatccaggggaattcctagagatgatatcaaggcaaataagaactgtctacttatagtaacaccacagggtggccatcttggatgggtagcaggcgacgaagctccattcggatgtccttggacagacccaatagtgatggaatatctagaacatctcgagaatgagaaggactctagtaccaaaaataacacatcctatgagggtgtttcagaggcatcagtatcccatctaactgtgcatggccaaagataataatatctctcttctcatagtactcattcgccacattatgttttatatggaaatagtttagtagagttcatttagccgtgttgtctgctgctgcctgctggttaattgagtacatggctcttcgtctacaggtctagtggtctacacatgtgcgagaagatttctgtgtcaaataagatgtctggttctgagatcaaaatagaacatgcgttatccaattgttcgttcttagggggtttcactttcatcccgtgtttgaaagggattctctgtaaatgcatgagctgttacggagttggcctttgtatccctcttctgcaacgcgtgaaagttgatggcgatgagcacggcagtgcatcatgtaaatttgacaatgtcattcagcgcaaaaaaaaaaaaaccccccgaaaaatgtgttggaagagtttttgtgtgcgcatgctaacaaatatctcatgtggtaaacatcatcttggattaacatatggcaatgtgatgaaatagtaacagttgttgaaattttatatgatcctactattccttttacagatggtaccagatatagatgatttcattgaaccctttgcgccagaaaaattaatatatcttactactactgtgtctagattttccatatacaacagtcctttatggtactactactttggaccccccagcgtgactacaccgatg

SEQ ID NO: 44136 - DNA, 3105 bp, Zea Mays
gagagacagtcagacagcagctcgaacctcgaaaagcaggagagtccaaagccgaatggacaactggcaacaaatcaacagagccacagaggaaatgaatccgatagccaccgccgccctcacgccatcctcatttttcgcctcaaaccgccgcttcgcccctcgcctccgctccgtcctccccgccgctgccatgtcttacgccgccgtatccgcctccgccccaagccccagctccggcactggggaacaggtgaaggcggccccgctcccgcactcgaccctcgagatcgcgggcgcccgccggggcctcctctcaggcttcgccagcctccgcgccccgtaccgtgccttccccgtactcgcgtcgaaccgacacgtcgagaccatcttcgctgcgctcacgcgatcgctccccgccgttaagctgcggcgcgagtgcctccgcgcccctgacgacggagccgtcgcgctcgactgggtctctggcgacgaccgtgtgcttccgaatgatgctccggtgcttatactcttgcctggtcttacaggtggaagtgatgatacatatgtaaggcatatgcttatgagagctagaagcaagggatggcgtgttgtggtgtttaatagccgtggatgtgcagatagtcctgtgactacacccaaggtacttcaaataccttttccaattcttttattagcactgtaaagcttatttatagctcctatagctcttacaaagcttcgaagctatgcagtggaccatattttcccttttgatacttgtcagggaaaagtgctaagatctcatttatatggtttgattgattgagaagtgcactgcccacttttaagttaattatcagcaacagtagacacacccattttgttctggtaagctacacagaactgaacctctttctggcttatagcataacatgtgctgcctaaaagttggctcatcccagttcatatgtgcaaactgtccaaatatatattttttccatgttggcatctggtgtgataaatgcactctatatgatattgcttctgtgtactttttcctacttagggtgtaaccagaaactgactaaagggtgagtgaactggctcttactgtaaaacttgacagaattggagttttgaactgaaagtaggaaaaggttaaagaacattgaagtgtattattaacaataaattgcattgttgctcaatgttgaagggtttttttggtttttattttgtggctacttgctgccctagtaaaatacgacatattgtgtccttaaactgaattgtctgtcataaatttctaagcttcaccctgatgtgtacagcatatcaataaagtgtcgatatgcatgttggcaatcaacgtctttaaccatggggccttgaatcaaactcaatggataaacctttggaaacctaggggttaagtggttaacaaagagtacataataagtaaggagataaagatagcaaatgaaatcgaggctcgaagctgtaggggtccatcttctttttaggacatacgttgacttgcatcttctgtcatgtgcagttctattctgcttcatttacaggggatctccgccaagttattggtcatattttaggacgttatcctcagtccaatgtctatgctaccggttggtctcttggagcgaatattcttgtgcgctaccttggcgaggaaactgataaatgccctttatctggcgcggtctccttgtgcaatccttttaatttggtaattgcagatgaagatttccacaaaggatttaacaacgtttatgataaagcattggctagggctttgacgactatatttaagaaggatttgaacaaaatttaggcatgctctccttttcgaagggctggagggtgaatatgatatacccaaggcagcgaatgcaagaactgttagagattttgatgaggggttaacccgaggtttgcagcaacgtctaacccaactgtactagctgtaatttctatagtttcctgttcacattcaagaggacacttcaatggtttgcagtttcatttggtttcaagtcagtggatgattattactccaattcaagcagctcggattctatcaaggatgtttgcatacccttactgtgcatacaggctgataatgacccaattgcaccatccaggggaattcctagagatgatatcaaggcaaataagaactgtctacttatagtaacaccacagggtggccatcttggatgggtagcaggcgacgaagctccattcggatgtccttggacagacccaatagtgatggaatatctagaacatctcgagaatgagaaggactctagtaccaaaaataacacatcctatgagggtgtttcagaggcatcagtatcccatctaactgtgcatggccaaagataataatatctctcttctcatagtactcattcgccacattatgttttatatggaaatagtttagtagagttcatttagccgtgttgtctgctgctgcctgctggttaattgagtacatggctcttcgtctacaggtctagtggtctacacatgtgcgagaagatttctgtgtcaaataagatgtctggttctgagatcaaaatagaacatgcgttatccaattgttcgttcttagggggtttcactttcatcccgtgtttgaaagggattctctgtaaatgcatgagctgttacggagttggcctttgtatccctcttctgcaacgcgtgaaagttgatggcgatgagcacggcagtgcatcatgtaaatttgacaatgtcattcagcgcaaaaaaaaaaaaaccccccgaaaaatgtgttggaagagtttttgtgtgcgcatgctaacaaatatctcatgtggtaaacatcatcttggattaacatatggcaatgtgatgaaatagtaacagttgttgaaattttatatgatcctactattccttttacagatggtaccagatatagatgatttcattgaaccctttgcgccagaaaaattaatatatcttactactactgtgtctagattttccatatacaacagtcctttatggtactactactttggaccccccagcgtgactacaccgatg

SEQ ID NO: 44137 - DNA, 2579 bp, Zea Mays
gagagacagtcagacagcagctcgaacctcgaaaagcaggagagtccaaagccgaatggacaactggcaacaaatcaacagagccacagaggaaatgaatccgatagccaccgccgccctcacgccatcctcatttttcgcctcaaaccgccgcttcgcccctcgcctccgctccgtcctccccgccgctgccatgtcttacgccgccgtatccgcctccgccccaagccccagctccggcactggggaacaggtgaaggcggccccgctcccgcactcgaccctcgagatcgcgggcgcccgccggggcctcctctcaggcttcgccagcctccgcgccccgtaccgtgccttccccgtactcgcgtcgaaccgacacgtcgagaccatcttcgctgcgctcacgcgatcgctccccgccgttaagctgcggcgcgagtgcctccgcgcccctgacgacggagccgtcgcgctcgactgggtctctggcgacgaccgtgtgcttccgaatgatgctccggtgcttatactcttgcctggtcttacaggtggaagtgatgatacatatgtaaggcatatgcttatgagagctagaagcaagggatggcgtgttgtggtgtttaatagccgtggatgtgcagatagtcctgtgactacacccaagttctattctgcttcatttacaggggatctccgccaagttattggtcatattttaggacgttatcctcagtccaatgtctatgctaccggttggtctcttggagcgaatattcttgtgcgctaccttggcgaggaaactgataaatgccctttatctggcgcggtctccttgtgcaatccttttaatttggtaattgcagatgaagatttccacaaaggatttaacaacgtttatgataaagcattggctagggctttgacgactatatttaagaaggatttgaacaaaatttaggcatgctctccttttcgaagggctggagggtgaatatgatatacccaaggcagcgaatgcaagaactgttagagattttgatgaggggttaacccgagtttcatttggtttcaagtcagtggatgattattactccaattcaagcagctcggattctatcaaggatgtttgcatacccttactgtgcatacaggtcaaacttcactctatctgttctgtgcttcattagacgccaggacattaggaacaacagatacagtttaagagcctgatgtgtaccaccacttcttagttttggatcacgcgttactcagtactatgactgagctttaacccaaagctgttaaactacttaaattaagaatatggaagttcagttaatctgtggccttttggttctatcattggaataaaacctggagaaacatttcaacaccagcttaggtcttgcatatttagaaccctgacttgagaaagctggatcattttgcggtaaagttgtttgtaaaactctagaaagcagtatgcgtggtaattttagccaaaaaagagatttgtcagattcaattattagtgtgcctatgtgcatatattgtgaaggtcaaagcatgtcttttctgttataacttcaatcataatttagtatgtgcaggctgataatgacccaattgcaccatccaggggaattcctagagatgatatcaaggcaaataagaactgtctacttatagtaacaccacagggtggccatcttggatgggtagcaggcgacgaagctccattcggatgtccttggacagacccaatagtgatggaatatctagaacatctcgagaatgagaaggactctagtaccaaaaataacacatcctatgagggtgtttcagaggcatcagtatcccatctaactgtgcatggccaaagataataatatctctcttctcatagtactcattcgccacattatgttttatatggaaatagtttagtagagttcatttagccgtgttgtctgctgctgcctgctggttaattgagtacatggctcttcgtctacaggtctagtggtctacacatgtgcgagaagatttctgtgtcaaataagatgtctggttctgagatcaaaatagaacatgcgttatccaattgttcgttcttagggggtttcactttcatcccgtgtttgaaagggattctctgtaaatgcatgagctgttacggagttggcctttgtatccctcttctgcaacgcgtgaaagttgatggcgatgagcacggcagtgcatcatgtaaatttgacaatgtcattcagcgcaaaaaaaaaaaaaccccccgaaaaatgtgttggaagagtttttgtgtgcgcatgctaacaaatatctcatgtggtaaacatcatcttggattaacatatggcaatgtgatgaaatagtaacagttgttgaaattttatatgatcctactattccttttacagatggtaccagatatagatgatttcattgaaccctttgcgccagaaaaattaatatatcttactactactgtgtctagattttccatatacaacagtcctttatggtactactactttggaccccccagcgtgactacaccgatg

SEQ ID NO: 44138 - DNA, 2979 bp, Zea Mays
gagagacagtcagacagcagctcgaacctcgaaaagcaggagagtccaaagccgaatggacaactggcaacaaatcaacagagccacagaggaaatgaatccgatagccaccgccgccctcacgccatcctcatttttcgcctcaaaccgccgcttcgcccctcgcctccgctccgtcctccccgccgctgccatgtcttacgccgccgtatccgcctccgccccaagccccagctccggcactggggaacaggtgaaggcggccccgctcccgcactcgaccctcgagatcgcgggcgcccgccggggcctcctctcaggcttcgccagcctccgcgccccgtaccgtgccttccccgtactcgcgtcgaaccgacacgtcgagaccatcttcgctgcgctcacgcgatcgctccccgccgttaagctgcggcgcgagtgcctccgcgcccctgacgacggagccgtcgcgctcgactgggtctctggcgacgaccgtgtgcttccgaatgatgctccggtgcttatactcttgcctggtcttacaggtggaagtgatgatacatatgtaaggcatatgcttatgagagctagaagcaagggatggcgtgttgtggtgtttaatagccgtggatgtgcagatagtcctgtgactacacccaagttctattctgcttcatttacaggggatctccgccaagttattggtcatattttaggacgttatcctcagtccaatgtctatgctaccggttggtctcttggagcgaatattcttgtgcgctaccttggcgaggaaactgataaatgccctttatctggcgcggtctccttgtgcaatccttttaatttggtaattgcagatgaagatttccacaaaggatttaacaacgtttatgataaagcattggctagggctttgacgactatatttaagaaggatttgaacaaaatttaggcatgctctccttttcgaagggctggagggtgaatatgatatacccaaggcagcgaatgcaagaactgttagagattttgatgaggggttaacccgaggtttgcagcaacgtctaacccaactgtactagctgtaatttctatagtttcctgttcacattcaagaggacacttcaatggtttgcagtttcatttggtttcaagtcagtggatgattattactccaattcaagcagctcggattctatcaaggatgtttgcatacccttactgtgcatacaggctgataatgacccaattgcaccatccaggggaattcctagagatgatatcaaggtatctgctattgtacacccctttttcacctaataatactcagagatggtgtgttgcataaggcctacgcagtacgcacttattttatttcactctaatccatgaattaacctgttgagttaatttgaatcaacaaattgtaggcatacctgtttgttaattacttaattgtatattcctgtgctgtttttttttgtctaagcttctttgcctgatgactgaaccccctccccccctgtttttactttagtagttttttgagtccggcttcttttggactctttcacttatgtgtggtactggcctccgtaaggagttcaatgttgtaacctctggtctgctatagaccttttcttcttaatatatttaaggcgcagttcccctgcgctttcgagaaaaaaaacaataacttggaactaggagttcattaacgccacgtgcattgactacagattagattataggctttggtttggtttcgagaggatgctttgctatttaatctccgtaatccataagctgtgtacatctttgttcagatttggtaaattgctccccccaccctccccctgcacttaacttctggctccgccactgcatccaaaaacaccaaacatgccctatgttttgactaatatccagatatgtgtgctaaaattggacaaattatttcaagctgataactatacatgttaagttagttagctccttgtttgattctgctttagagcaagaaaccgactaattaagtctcgttccctatggtttcaggcaaataagaactgtctacttatagtaacaccacagggtggccatcttggatgggtagcaggcgacgaagctccattcggatgtccttggacagacccaatagtgatggaatatctagaacatctcgagaatgagaaggactctagtaccaaaaataacacatcctatgagggtgtttcagaggcatcagtatcccatctaactgtgcatggccaaagataataatatctctcttctcatagtactcattcgccacattatgttttatatggaaatagtttagtagagttcatttagccgtgttgtctgctgctgcctgctggttaattgagtacatggctcttcgtctacaggtctagtggtctacacatgtgcgagaagatttctgtgtcaaataagatgtctggttctgagatcaaaatagaacatgcgttatccaattgttcgttcttagggggtttcactttcatcccgtgtttgaaagggattctctgtaaatgcatgagctgttacggagttggcctttgtatccctcttctgcaacgcgtgaaagttgatggcgatgagcacggcagtgcatcatgtaaatttgacaatgtcattcagcgcaaaaaaaaaaaaaccccccgaaaaatgtgttggaagagtttttgtgtgcgcatgctaacaaatatctcatgtggtaaacatcatcttggattaacatatggcaatgtgatgaaatagtaacagttgttgaaattttatatgatcctactattccttttacagatggtaccagatatagatgatttcattgaaccctttgcgccagaaaaattaatatatcttactactactgtgtctagattttccatatacaacagtcctttatggtactactactttggaccccccagcgtgactacaccgatg

SEQ ID NO: 44139 - DNA, 3545 bp, Zea Mays
gagagacagtcagacagcagctcgaacctcgaaaagcaggagagtccaaagccgaatggacaactggcaacaaatcaacagagccacagaggaaatgaatccgatagccaccgccgccctcacgccatcctcatttttcgcctcaaaccgccgcttcgcccctcgcctccgctccgtcctccccgccgctgccatgtcttacgccgccgtatccgcctccgccccaagccccagctccggcactggggaacaggtgaaggcggccccgctcccgcactcgaccctcgagatcgcgggcgcccgccggggcctcctctcaggcttcgccagcctccgcgccccgtaccgtgccttccccgtactcgcgtcgaaccgacacgtcgagaccatcttcgctgcgctcacgcgatcgctccccgccgttaagctgcggcgcgagtgcctccgcgcccctgacgacggagccgtcgcgctcgactgggtctctggcgacgaccgtgtgcttccgaatgatgctccggtgcttatactcttgcctggtcttacaggtggaagtgatgatacatatgtaaggcatatgcttatgagagctagaagcaagggatggcgtgttgtggtgtttaatagccgtggatgtgcagatagtcctgtgactacacccaaggtacttcaaataccttttccaattcttttattagcactgtaaagcttatttatagctcctatagctcttacaaagcttcgaagctatgcagtggaccatattttcccttttgatacttgtcagggaaaagtgctaagatctcatttatatggtttgattgattgagaagtgcactgcccacttttaagttaattatcagcaacagtagacacacccattttgttctggtaagctacacagaactgaacctctttctggcttatagcataacatgtgctgcctaaaagttggctcatcccagttcatatgtgcaaactgtccaaatatatattttttccatgttggcatctggtgtgataaatgcactctatatgatattgcttctgtgtactttttcctacttagggtgtaaccagaaactgactaaagggtgagtgaactggctcttactgtaaaacttgacagaattggagttttgaactgaaagtaggaaaaggttaaagaacattgaagtgtattattaacaataaattgcattgttgctcaatgttgaagggtttttttggtttttattttgtggctacttgctgccctagtaaaatacgacatattgtgtccttaaactgaattgtctgtcataaatttctaagcttcaccctgatgtgtacagcatatcaataaagtgtcgatatgcatgttggcaatcaacgtctttaaccatggggccttgaatcaaactcaatggataaacctttggaaacctaggggttaagtggttaacaaagagtacataataagtaaggagataaagatagcaaatgaaatcgaggctcgaagctgtaggggtccatcttctttttaggacatacgttgacttgcatcttctgtcatgtgcagttctattctgcttcatttacaggggatctccgccaagttattggtcatattttaggacgttatcctcagtccaatgtctatgctaccggttggtctcttggagcgaatattcttgtgcgctaccttggcgaggaaactgataaatgccctttatctggcgcggtctccttgtgcaatccttttaatttggtaattgcagatgaagatttccacaaaggatttaacaacgtttatgataaagcattggctagggctttgacgactatatttaagaagcatgctctccttttcgaagggctggagggtgaatatgatatacccaaggcagcgaatgcaagaactgttagagattttgatgaggggttaacccgaggtttgcagcaacgtctaacccaactgtactagctgtaatttctatagtttcctgttcacattcaagaggacacttcaatggtttgcagtttcatttggtttcaagtcagtggatgattattactccaattcaagcagctcggattctatcaaggatgtttgcatacccttactgtgcatacaggtcaaacttcactctatctgttctgtgcttcattagacgccaggacattaggaacaacagatacagtttaagagcctgatgtgtaccaccacttcttagttttggatcacgcgttactcagtactatgactgagctttaacccaaagctgttaaactacttaaattaagaatatggaagttcagttaatctgtggccttttggttctatcattggaataaaacctggagaaacatttcaacaccagcttaggtcttgcatatttagaaccctgacttgagaaagctggatcattttgcggtaaagttgtttgtaaaactctagaaagcagtatgcgtggtaattttagccaaaaaagagatttgtcagattcaattattagtgtgcctatgtgcatatattgtgaaggtcaaagcatgtcttttctgttataacttcaatcataatttagtatgtgcaggctgataatgacccaattgcaccatccaggggaattcctagagatgatatcaaggcaaataagaactgtctacttatagtaacaccacagggtggccatcttggatgggtagcaggcgacgaagctccattcggatgtccttggacagacccaatagtgatggaatatctagaacatctcgagaatgagaaggactctagtaccaaaaataacacatcctatgagggtgtttcagaggcatcagtatcccatctaactgtgcatggccaaagataataatatctctcttctcatagtactcattcgccacattatgttttatatggaaatagtttagtagagttcatttagccgtgttgtctgctgctgcctgctggttaattgagtacatggctcttcgtctacaggtctagtggtctacacatgtgcgagaagatttctgtgtcaaataagatgtctggttctgagatcaaaatagaacatgcgttatccaattgttcgttcttagggggtttcactttcatcccgtgtttgaaagggattctctgtaaatgcatgagctgttacggagttggcctttgtatccctcttctgcaacgcgtgaaagttgatggcgatgagcacggcagtgcatcatgtaaatttgacaatgtcattcagcgcaaaaaaaaaaaaaccccccgaaaaatgtgttggaagagtttttgtgtgcgcatgctaacaaatatctcatgtggtaaacatcatcttggattaacatatggcaatgtgatgaaatagtaacagttgttgaaattttatatgatcctactattccttttacagatggtaccagatatagatgatttcattgaaccctttgcgccagaaaaattaatatatcttactactactgtgtctagattttccatatacaacagtcctttatggtactactactttggaccccccagcgtgactacaccgatg

SEQ ID NO: 44140 - DNA, 2894 bp, Zea Mays
gagagacagtcagacagcagctcgaacctcgaaaagcaggagagtccaaagccgaatggacaactggcaacaaatcaacagagccacagaggaaatgaatccgatagccaccgccgccctcacgccatcctcatttttcgcctcaaaccgccgcttcgcccctcgcctccgctccgtcctccccgccgctgccatgtcttacgccgccgtatccgcctccgccccaagccccagctccggcactggggaacaggtgaaggcggccccgctcccgcactcgaccctcgagatcgcgggcgcccgccggggcctcctctcaggcttcgccagcctccgcgccccgtaccgtgccttccccgtactcgcgtcgaaccgacacgtcgagaccatcttcgctgcgctcacgcgatcgctccccgccgttaagctgcggcgcgagtgcctccgcgcccctgacgacggagccgtcgcgctcgactgggtctctggcgacgaccgtgtgcttccgaatgatgctccggtgcttatactcttgcctggtcttacaggtggaagtgatgatacatatgtaaggcatatgcttatgagagctagaagcaagggatggcgtgttgtggtgtttaatagccgtggatgtgcagatagtcctgtgactacacccaaggtacttcaaataccttttccaattcttttattagcactgtaaagcttatttatagctcctatagctcttacaaagcttcgaagctatgcagtggaccatattttcccttttgatacttgtcagggaaaagtgctaagatctcatttatatggtttgattgattgagaagtgcactgcccacttttaagttaattatcagcaacagtagacacacccattttgttctgttctattctgcttcatttacaggggatctccgccaagttattggtcatattttaggacgttatcctcagtccaatgtctatgctaccggttggtctcttggagcgaatattcttgtgcgctaccttggcgaggaaactgataaatgccctttatctggcgcggtctccttgtgcaatccttttaatttggtaattgcagatgaagatttccacaaaggatttaacaacgtttatgataaagcattggctagggctttgacgactatatttaagaaggatttgaacaaaatttaggcatgctctccttttcgaagggctggagggtgaatatgatatacccaaggcagcgaatgcaagaactgttagagattttgatgaggggttaacccgaggtttgcagcaacgtctaacccaactgtactagctgtaatttctatagtttcctgttcacattcaagaggacacttcaatggtttgcagtttcatttggtttcaagtcagtggatgattattactccaattcaagcagctcggattctatcaaggatgtttgcatacccttactgtgcatacaggtcaaacttcactctatctgttctgtgcttcattagacgccaggacattaggaacaacagatacagtttaagagcctgatgtgtaccaccacttcttagttttggatcacgcgttactcagtactatgactgagctttaacccaaagctgttaaactacttaaattaagaatatggaagttcagttaatctgtggccttttggttctatcattggaataaaacctggagaaacatttcaacaccagcttaggtcttgcatatttagaaccctgacttgagaaagctggatcattttgcggtaaagttgtttgtaaaactctagaaagcagtatgcgtggtaattttagccaaaaaagagatttgtcagattcaattattagtgtgcctatgtgcatatattgtgaaggtcaaagcatgtcttttctgttataacttcaatcataatttagtatgtgcaggctgataatgacccaattgcaccatccaggggaattcctagagatgatatcaaggcaaataagaactgtctacttatagtaacaccacagggtggccatcttggatgggtagcaggcgacgaagctccattcggatgtccttggacagacccaatagtgatggaatatctagaacatctcgagaatgagaaggactctagtaccaaaaataacacatcctatgagggtgtttcagaggcatcagtatcccatctaactgtgcatggccaaagataataatatctctcttctcatagtactcattcgccacattatgttttatatggaaatagtttagtagagttcatttagccgtgttgtctgctgctgcctgctggttaattgagtacatggctcttcgtctacaggtctagtggtctacacatgtgcgagaagatttctgtgtcaaataagatgtctggttctgagatcaaaatagaacatgcgttatccaattgttcgttcttagggggtttcactttcatcccgtgtttgaaagggattctctgtaaatgcatgagctgttacggagttggcctttgtatccctcttctgcaacgcgtgaaagttgatggcgatgagcacggcagtgcatcatgtaaatttgacaatgtcattcagcgcaaaaaaaaaaaaaccccccgaaaaatgtgttggaagagtttttgtgtgcgcatgctaacaaatatctcatgtggtaaacatcatcttggattaacatatggcaatgtgatgaaatagtaacagttgttgaaattttatatgatcctactattccttttacagatggtaccagatatagatgatttcattgaaccctttgcgccagaaaaattaatatatcttactactactgtgtctagattttccatatacaacagtcctttatggtactactactttggaccccccagcgtgactacaccgatg

SEQ ID NO: 44141 - DNA, 2334 bp, Zea Mays
gagagacagtcagacagcagctcgaacctcgaaaagcaggagagtccaaagccgaatggacaactggcaacaaatcaacagagccacagaggaaatgaatccgatagccaccgccgccctcacgccatcctcatttttcgcctcaaaccgccgcttcgcccctcgcctccgctccgtcctccccgccgctgccatgtcttacgccgccgtatccgcctccgccccaagccccagctccggcactggggaacaggtgaaggcggccccgctcccgcactcgaccctcgagatcgcgggcgcccgccggggcctcctctcaggcttcgccagcctccgcgccccgtaccgtgccttccccgtactcgcgtcgaaccgacacgtcgagaccatcttcgctgcgctcacgcgatcgctccccgccgttaagctgcggcgcgagtgcctccgcgcccctgacgacggagccgtcgcgctcgactgggtctctggcgacgaccgtgtgcttccgaatgatgctccggtgcttatactcttggtggaagtgatgatacatatgtaaggcatatgcttatgagagctagaagcaagggatggcgtgttgtggtgtttaatagccgtggatgtgcagatagtcctgtgactacacccaaggtacttcaaataccttttccaattcttttattagcactgtaaagcttatttatagctcctatagctcttacaaagcttcgaagctatgcagtggaccatattttcccttttgatacttgtcagggaaaagtgctaagatctcatttatatggtttgattgattgagaagtgcactgcccacttttaagttaattatcagcaacagtagacacacccattttgttctgttctattctgcttcatttacaggggatctccgccaagttattggtcatattttaggacgttatcctcagtccaatgtctatgctaccggttggtctcttggagcgaatattcttgtgcgctaccttggcgaggaaactgataaatgccctttatctggcgcggtctccttgtgcaatccttttaatttggtaattgcagatgaagatttccacaaaggatttaacaacgtttatgataaagcattggctagggctttgacgactatatttaagaaggatttgaacaaaatttaggcatgctctccttttcgaagggctggagggtgaatatgatatacccaaggcagcgaatgcaagaactgttagagattttgatgaggggttaacccgagtttcatttggtttcaagtcagtggatgattattactccaattcaagcagctcggattctatcaaggatgtttgcatacccttactgtgcatacaggctgataatgacccaattgcaccatccaggggaattcctagagatgatatcaaggcaaataagaactgtctacttatagtaacaccacagggtggccatcttggatgggtagcaggcgacgaagctccattcggatgtccttggacagacccaatagtgatggaatatctagaacatctcgagaatgagaaggactctagtaccaaaaataacacatcctatgagggtgtttcagaggcatcagtatcccatctaactgtgcatggccaaagataataatatctctcttctcatagtactcattcgccacattatgttttatatggaaatagtttagtagagttcatttagccgtgttgtctgctgctgcctgctggttaattgagtacatggctcttcgtctacaggtctagtggtctacacatgtgcgagaagatttctgtgtcaaataagatgtctggttctgagatcaaaatagaacatgcgttatccaattgttcgttcttagggggtttcactttcatcccgtgtttgaaagggattctctgtaaatgcatgagctgttacggagttggcctttgtatccctcttctgcaacgcgtgaaagttgatggcgatgagcacggcagtgcatcatgtaaatttgacaatgtcattcagcgcaaaaaaaaaaaaaccccccgaaaaatgtgttggaagagtttttgtgtgcgcatgctaacaaatatctcatgtggtaaacatcatcttggattaacatatggcaatgtgatgaaatagtaacagttgttgaaattttatatgatcctactattccttttacagatggtaccagatatagatgatttcattgaaccctttgcgccagaaaaattaatatatcttactactactgtgtctagattttccatatacaacagtcctttatggtactactactttggaccccccagcgtgactacaccgatg

SEQ ID NO: 44142 - DNA, 2409 bp, Zea Mays
ccaatctcctcttccgtcgctctccaagaacctttggtttgactgctcctgatttcttatcatttcctgcacaggcttacgagcgtgatctacgcttccatttacctccgtccctatcagcttcctcgcttccctatgcctacgagaaagagagaagcgtgggctaattcctctgtgtttcccagcttcctgttcaccatggactcgagggagtgcatcgtcccgtcaaacaatcctgctccaatcttttgacgtcttcgctgggcctgtgccgcctccccgtacccgccgttcctgcaccgtcaaaccgccagccaagagtccatttttttttcttatcaaaagtttgcgtttgatcggtttcgtttctaagagctgcgcgagatgtccttgttccgggaagggaggaaacgagaggctctgttcctgtcgcgattgttggaggacctcaccatagtttgaggcggtgaggtggaggcgatagagaagacgagacaagaagcagccgccaggagctgagctgaggccctgccgccgtcttgccccaactccaagcgatgtcttgcttccgctgcttcagcggctgcaggaccaagaggggcaagggcgagaagcgccgggaggggtcgacggcgccggcgtccccggcggccgcctcgttcccgtccaccgtctccacgggcgcgccatccaacctcaccttctccacggcgtcgtcggccgtcgtcacgagccactccgaggactccagcgcggtcatgcggccggaggcgaccaagtcatcgggctcggcctcggtgtcgtcggcgcggagcatcccggagctgtacgaggagaggggagccagcagcctccgggagttcgggttccgggagctccgggccgccaccagcgacttcagccgcctgctcaaggtcggcgagggcggcttcgggagcgtttacaagggcgtcgtccgccttcctggcgggcccgccggcggcacggtagttgccataaaaaaactcaatcccaatggtcatcagaagttcaaggttatctcattctggcatatctatctgcatccaagtctcaagagttttctgttcctgctcccgacttgatcagggccacaagcaatggttggcagaagtccatttcctgggggttgttgagcacccaaatctcgtcaggctcattggctactgcgctgctcaaggcgagcgaggtccgctgaggctactggtctacgagttcatgacgaacaagaccctggacgatcatctattcaataaagcataccccgtccttccatgggacatcaggttggagatagcgctggatgccgctgagggattgctgtacctccatgagggattggaagttcaggtcatatatcgcgatttcaaagcttcaaatgtcctgctggacgaggagtttagagcgaaactttcagatttcggattggcaagggaagggccatcagctggtgatacccacgtctctacagcagttatggggaccttgggctatgcagctccagattatgtcgagacaggccatctcactacaaaaagtgatgtgtggagctttggagtagttctatatgagatcctcactggacgtcgctcaatagagaggaaccggcccaagaacgagcagaaacttctggaatgggtcaggctgtatcccgttgaaagcaagcagttcagcaagattatagatgcaaggcttgagggccactactctaagcagggcactagaaaaattgccaagttggccaatagttgccttgcaaagcacagaagggaccgtccaacgatgagagaagtggtcgagagcctgaaacaagcaatgcagcacaaggagttggatgggaaagcaggggctttgaatgagacttcaccaccagaggaaatgtctggaaaaccaagcacagaggatgttgccgtggcatcagcaaggcggaggatgcttcatttggctgccctaggtgagaatgcaaacagcattgcgaggaggagattcatgttcatgaggactgcggcttctccaactcctacgtaattttgagttgtagttgtgatcttttctctctctttttgaacaaatgtgatcttttcttttgactttgtactttttgaagtggttatgaaggtaggatcattggggatgttttcaccatgtcatgtataaatctattagatggccagacattgtttttttacttgtgttctttgtataggtagggtagatctgagacccaagagttactatgtaaaaaggtttcactgctataaggatcataggtgtgaaatgtaattcagttctctatgtttgactgcaactttgaacatcataagggtagatagtattaaaggtgtcaaatccttcctttctatactggattttgctttttaccattgactg

SEQ ID NO: 44143 - DNA, 2669 bp, Zea Mays
cgagggttgattgcagtttgcagttgcatccccaccaatctcctcttccgtcgctctccaagaacctttggtttgactgctcctgatttcttatcatttcctgcacaggcttacgagcgtgatctacgcttccatttacctccgtccctatcagcttcctcgcttccctatgcctacgagaaagagagaagcgtgggctaattcctctgtgtttcccagcttcctgttcaccatggactcgagggagtgcatcgtcccgtcaaacaatcctgctccaatcttttgacgtcttcgctgggcctgtgccgcctccccgtacccgccgttcctgcaccgtcaaaccgccagccaagagtccatttttttttcttatcaaaagtttgcgtttgatcggtttcgtttctaagagctgcgcgagatgtccttgttccgggaagggaggaaacgagaggctctgttcctgtcgcgattgttggaggacctcaccatagtttgaggcggtgaggtggaggcgatagagaagacgagacaagaagcagccgccaggagctgagctgaggccctgccgccgtcttgccccaactccaagcgatgtcttgcttccgctgcttcagcggctgcaggaccaagaggggcaagggcgagaagcgccgggaggggtcgacggcgccggcgtccccggcggccgcctcgttcccgtccaccgtctccacgggcgcgccatccaacctcaccttctccacggcgtcgtcggccgtcgtcacgagccactccgaggactccagcgcggtcatgcggccggaggcgaccaagtcatcgggctcggcctcggtgtcgtcggcgcggagcatcccggagctgtacgaggagaggggagccagcagcctccgggagttcgggttccgggagctccgggccgccaccagcgacttcagccgcctgctcaaggtcggcgagggcggcttcgggagcgtttacaagggcgtcgtccgccttcctggcgggcccgccggcggcacggtagttgccataaaaaaactcaatcccaatggtcatcaggtatggtcgtgtggatcggtggtttcttggctcacctgtgtcaataccatcttgtcgttgttgatcacgaattcgtcagcatttttacagcatatttgcctaccatatacattatctccctctgtgtgtgggtgaaatggaccgtaccttgcatgactctgtacaattcatttcgctaatgggtctgtgaagtatctatcattttgctatccctatttcatttcagaagttcaaggttatctcattctggcatatctatctgcatccaagtctcaagagttttctgttcctgctcccgacttgatcagggccacaagcaatggttggcagaagtccatttcctgggggttgttgagcacccaaatctcgtcaggctcattggctactgcgctgctcaaggcgagcgaggtccgctgaggctactggtctacgagttcatgacgaacaagaccctggacgatcatctattcaataaagcataccccgtccttccatgggacatcaggttggagatagcgctggatgccgctgagggattgctgtacctccatgagggattggaagttcaggtcatatatcgcgatttcaaagcttcaaatgtcctgctggacgaggagtttagagcgaaactttcagatttcggattggcaagggaagggccatcagctggtgatacccacgtctctacagcagttatggggaccttgggctatgcagctccagattatgtcgagacaggccatctcactacaaaaagtgatgtgtggagctttggagtagttctatatgagatcctcactggacgtcgctcaatagagaggaaccggcccaagaacgagcagaaacttctggaatgggtcaggctgtatcccgttgaaagcaagcagttcagcaagattatagatgcaaggcttgagggccactactctaagcagggcactagaaaaattgccaagttggccaatagttgccttgcaaagcacagaagggaccgtccaacgatgagagaagtggtcgagagcctgaaacaagcaatgcagcacaaggagttggatgggaaagcaggggctttgaatgagacttcaccaccagaggaaatgtctggaaaaccaagcacagaggatgttgccgtggcatcagcaaggcggaggatgcttcatttggctgccctaggtgagaatgcaaacagcattgcgaggaggagattcatgttcatgaggactgcggcttctccaactcctacgtaattttgagttgtagttgtgatcttttctctctctttttgaacaaatgtgatcttttcttttgactttgtactttttgaagtggttatgaaggtaggatcattggggatgttttcaccatgtcatgtataaatctattagatggccagacattgtttttttacttgtgttctttgtataggtagggtagatctgagacccaagagttactatgtaaaaaggtttcactgctataaggatcataggtgtgaaatgtaattcagttctctatgtttgactgcaactttgaacatcataagggtagatagtattaaaggtgtcaaatccttcctttctatactggattttgctttttaccattgactg

SEQ ID NO: 44144 - DNA, 882 bp, Zea Mays
cgagctttaggttcagagcacctcgcctcattccatcccacgtcaagctagatctgccggctctaggcttagaacacatccggataatggtggatgcatcgttctttctgttcgtcgtaagcagttctttgtatcaagtgagatggcagtgacgactcggtaaaattcaagctcaacagaccaaatcacaggatttgtaagagtatgcaggctttgtgggaagattttataagaacatgcgaggttcgtttgaagaatttaactggtttctatggataaaagccagcttgtgtggactgtttcatctgcaatctctgtagaagcaaccaacagagtacggattaaaagccaagtgaatagactgtatgatgtaaattctgttgtagatcttcataggtcccattgttaacactataaatatgttaatcctccatgcggctttcctaaaaactttatccagttgtttacgctacttcaccgaacttactgtagcctctcccaccaagtacaatgacatgttcatgaagctgaaaaacttaacaatcagtgagtgttcagaatcatcatgcatgttacatgctctgctttggtggaggatgaaaaccaacggacagcttgacattggccggatcactgaacttctgctgttgcctgatttcagaatggatcatggatttgagcattgatggagtacagccaaatccaccgttactggcatccaacgcttgtgcttaccgaccaaaacaataaaaaacagacgcagaatcggtctaagaaataggatagacactgctgccttctctgatctcatatcaaaattctctgatactgtaatctcaaaaattctgctgccttctcagaatccggaaatataagctcaaa

SEQ ID NO: 44145 - DNA, 2303 bp, Zea Mays
cgagctttaggttcagagcacctcgcctcattccatcccacgtcaagctagatctgccggctctaggcttagaacacatccggataatggtggatgcatcgttctttctgttcgtcgtaagcagttctttgtatcaagtgagatggcagtgacgactcggtaaaattcaagctcaacagaccaaatcacaggtctctctctacatgagatcgatctgtatgccgattttcccgctgaactgagccatctaatttttctctgcttatttgctattcggaatattttctctctacatgaaatccccgtttgctttttttccccatcggagggtggaacatattgttgcgatgaggataccaagctccctcttctgaaagcagtgaggacacttgccggcagaatcgaaccaataaccttattgccaccactgagtaacagcagatctccaatcttgttttgtttgtttttcttggtccgtattttggctttggatggtgaagatctactgatgcataatccaacacttgatccgatgccggcttctgccgagcgtgtgatgcacggacatctctgcatctgaatccttgacatcttttgctgtaatggttttcattgttttggtctctctcggtgcttttgacgttgtgtcgttgaactgtcctttttttaccctttgtatcaaatgatgaaacatcagaacaatcttaggacaccttctgacacaatgctggtagcactgtgagtgagaaggcaattctttgctgatggtactgcaaccactccatgattctgcccttcattttcgtttttgtctctctggtcttcagcattgattgctcgagatagttatctttacaaccttgcattgccacctgatctgtacataagccaatgatgattagctattacatctggaattaccgtcagatttactcgtgacgaaaatcgtctggctttctgaggcatattaagtgtatacgtatcatacttaaatctgatcgtgtagacgtagttgcagtccaataatcccaatgaggatctcaagaccgaccgataggaagtgccgtttgacactgtaagcaacagctgcttcctccggctgcaggtgtctatcctccgaccataacctttgtggtttggtctgggatggagcacccatctgtggttcttggattctggctgtggtgtgtgatttaaatcgggtctctgagggattagagcaactattcaatacctttcagtttgtgaactgtaatgaaatggaatttgggcctgatgccacgtctctgttaaccacggcattgaccagagatgctatgattgggccgaaacgaagttttttttaacgtttcacgtgttgataggaacctgggactgcttctctatctgtccgcagggccggttaatgtgattataatgtcatgcgccattttttttgaattttgtttggatgcatagtgtatggcgatgatgaaaaagctaaggcttgtttctcaacattcgcagtagccgcccaagagctttcgccttgccgggcttgagagctagtgctgttaattccttccttggatgtctgagccatacatatttctgtttgtggtttgtttctcttaattccagttggtgcttatggtgcaaagcaacagtaagtttttctgcgtaagatttgttatttgatttggccgaataacttcgagaaccatacagactaatctgtgtatggtgtgcccgatgatgatagaagtcaaggcttgtttctctacattcgcagttgccgcctaagagctttcgccctgccaggcttgagagctaatgctgctaattccttccttggatgtctgagggcacaataatgccagataattttgctttgaaatctgtttaactgttgttaccctggttttatagttttaattattaaattttattttatttgaaggatttgtaagagtatgcaggctttgtgggaagattttataagaacatgcgaggttcgtttgaagaatttaactggtttctatggataaaagccagcttgtgtggactgtttcatctgcaatctctgtagaagcaaccaacagaaatggatcatggatttgagcattgatggagtacagccaaatccaccgttactggcatccaacgcttgtgcttaccgaccaaaacaataaaaaacagacgcagaatcggtctaagaaataggatagacactgctgccttctctgatctcatatcaaaattctctgatactgtaatctcaaaaattctgctgccttctcagaatccggaaatataagctcaaa

SEQ ID NO: 44146 - DNA, 1144 bp, Zea Mays
tgccacagtgccataagtgagtgttgccccgtcaatgtcgctggagccaagaaaagcaaggcggctgcaatgggaggtagcggaacgctgatctcggtgtaccccgatgagctcaccttcctgtttgagctggagaagccgtgctattgcaatctcaaggtggtgaacaacagcgagcaccacgtcgcattcaaggtcaaaacgacatcaccgaggaagtattttgtccggccgaacgcgagcatcgtccagccatgggattcttgcacaataacgattacgctgcaggcacagaaagagtacccaccagatatgcaatgcaaggacaagttcttgattcagagcaccaaggtggctgccagcaccgacatggatgagatcccccctgatacgttcaacaaggaaaccgacaaggtaatcgaggaaatgaagctcagggttgtttacacgttacctagtggtggaggttcagatgactctagcgtatcgtctttaggaagccggagcttcaaagcagcgtctgacgatctgatgatgctgaagaatgcaagcatcgaagagatccagacaattcagcgggtgaaggaagaaagagataacatgcttcagcaaaaccagcaaatgcaacgtgaattggatgtgcttcggaggcgtaggagccgcaaaggtgacgcaggtttctccttgacgtttgctgcgtttgctgggctaataggtgtcctggtggggctcctgatgagcctcatcttctcttcgccgccggttgatgcataagatgcgagaaaaaggttgcagcctatggaagcattaattgttcagaccgacatggggagaaagctcgctcggcaaaagaagaagatgaaacttttgtctagtctccattttcattcttttgttgtttgcaccgtagttatatgaaacgatgataacgggttgcagatctttgatctttccacccgtgcttggttcatcctccatttgtatttgcccctcgttttcttattctttctgtatagtaagtatatcaggacggaagctgtatccattcagcgatttgggtagtgaggaactagtccaggagtatcaagaaagagcgttgatcatgtctactgtattagcagcctctttggaacaaagagaagcc

SEQ ID NO: 44147 - DNA, 2176 bp, Zea Mays
aaaacgtccacggtccacagggcacaagccaccaacactgacccaatccgaatatacagcccgaaaagcaactatttttttccgtgttcttctctcctcttccgctccccaccgaaagcataaacagcacaccggcaacgggaaaggaagggataccgacgcgagcacgcgccgagcaacgtctcgaaaaggccatgcaggacggcggcgaggtgctgttcctggacggcgtcggggaggtcgccgtcaccatcggccgcaacggcctctctgcacggcccctccacccggaactgatctcttcatgttggtcgtccattacactgcagcctaaattagacagcaaaatcaacttttcagatgtttatgccatagagatgcttgataagggtcgtatctgtgggccttggaatacaaagactgctattcaaggcaagaaaaatattgagatgcaccggtttgtcgtacatgggattaccagaagaaggaaacacccttctccgtgggtaccttgtgaatatatttttggtcacaaagacttgaagatctgcaaagattggtttcagcatctcatttcgtgcataaacaatgaaagtggtagaccaaagaacttaatggtatttgttcatccattgtgtggaaaaggtagaggggtcagtaactgggaaacagtgtatccgttatttgctagagcaaagataaaaacaaaggtgatagtgacagagagagcagggcatgcatatgacacactatcatcattatcagatatagaactgaaggcatttgatggtgttgttgcagtgggtggcgacggtctatttaatgaaattctgaatgggatacttagttctaggcacaaggtttcatatcccccaactcctgaggggtttggatatgttggaagcagtgataactgtgaagaacagacaagaaattgggttaactttagtaaacccacaccagattctgggaatgccgtgtttctagggaatccaagtaaatgtgatgaccaagaacctcttctttcaacttcacatcctaccgagctagagataccatcaaattctactaaagaaccatgtattggagatcaggataacccagtttccttcccaaatgactggtttaggcttggcataattccttctggctcaactgatgctattgttctcagcacaactggggagagagatcctgtcacctctgctctgcttattattcttggcagaaaggtgtcacttgatatagctcaagtcgttagatggaaaactagcccaacagctgaggttttgcctactgtacgctatgctgcttcatttgcaggttatggcttttatggagaagttatcagggagagcgaaaagtaccggtggatgggtcctgcacgttatgacttttctggaacaatggtctttctgaagcacaggtcatatggggcaaaggttgcttttctcgatactccatacactcattcgcttacagcatcagcacaggatgatataactggagcacaaccactacaatctcgttggaagaaacctcgcaaaataatctgcagaacaaattgctttgtatgcaaagaggcttcaacatctggacaaaatccagaagatgttgcagacaactccagaacaatatgcgagaaccagaagtgggtctggtccgaaggacatttcctcagcgtcggtgcagctgtcatttcatgtcgtaacgaaagagcccctgatggcctggtagctgacgcacacctttcggatggttttcttcatctcttgctcataagagactgccctcttcccctttacttgtggcatctaacacaatttaccaagaagggttcagatcccctgtccttcaagttcgttgagcatcacaagacacaagcgtttacctttatctcatcacatgacgaaagtgtttggaacttggatggagagatgtttcaggcatgtgaggtatctgtccaagcgtgccgggggcttgtcaacttctttgcttcggggccagagctgtagtaatgatactcgggaaccaggcattaccttcaattctgttgcaagtctggaaggccagatatggcggcacatttaggtagtcagcattgtcgaggaaccctactaatgtctaatacttcctctgttttttatttgtcatgttttagtaaaaaataaattag

SEQ ID NO: 44148 - DNA, 2227 bp, Zea Mays
aagcaactatttttttccgtgttcttctctcctcttccgctccccaccgaaagcataaacagcacaccggcaacgggaaaggaagggataccgacgcgagcacgcgccgagcaacgtctcgaaaaggccatgcaggacggcggcgaggtgctgttcctggacggcgtcggggaggtcgccgtcaccatcggccgcaacggcctctctgcacggcccctccacccggaactgatctcttcatgttggtcgtccattacactgcagcctaaattagacagcaaaatcaacttttcagatgtttatgccatagagatgcttgataagggtcgtatctgtgggccttggaatacaaagactgctattcaagatgcaccggtttgtcgtacatgggattaccagaagaaggaaacacccttctccgtgggtaccttgtgaatatatttttggtcacaaagacttgaagatctgcaaagattggtttcagcatctcatttcgtgcataaacaatgaaagtggtagaccaaagaacttaatggtatttgttcatccattgtgtggaaaaggtagaggggtcagtaactgggaaacagtgtatccgttatttgctagagcaaagataaaaacaaaggtgatagtgacagagagagcagggcatgcatatgacacactatcatcattatcagatatagaactgaaggcatttgatggtgttgttgcagtgggtggcgacggtctatttaatgaaattctgaatgggatacttagttctaggcacaaggtttcatatcccccaactcctgaggggtttggatatgttggaagcagtgataactgtgaagaacagacaagaaattgggttaactttagtaaacccacaccagattctgggaatgccgtgtttctagggaatccaagtaaatgtgatgaccaagaacctcttctttcaacttcacatcctaccgagctagagataccatcaatggtttcattttgcagattctactaaagaaccatgtattggagatcaggataacccagtttccttcccaaatgactggtttaggcttggcataattccttctggctcaactgatgctattgttctcagcacaactggggagagagatcctgtcacctctgctctgcttattattcttggcagaaaggtgtcacttgatatagctcaagtcgttagatggaaaactagcccaacagctgaggttttgcctactgtacgctatgctgcttcatttgcaggttatggcttttatggagaagttatcagggagagcgaaaagtaccggtggatgggtcctgcacgttatgacttttctggaacaatggtctttctgaagcacaggtcatatggggcaaaggttgcttttctcgatactccatacactcattcgcttacagcatcagcacaggatgatataactggagcacaaccactacaatctcgttggaagaaacctcgcaaaataatctgcagaacaaattgctttgtatgcaaagaggcttcaacatctggacaaaatccagaagatgttgcagacaactccagaacaatatgcgagaaccagaagtgggtctggtccgaaggacatttcctcagcgtcggtgcagctgtcatttcatgtcgtaacgaaagagcccctgatggcctggtagctgacgcacacctttcggatggttttcttcatctcttgctcataagagactgccctcttcccctttacttgtggcatctaacacaatttaccaagaagggttcagatcccctgtccttcaagttcgttgagcatcacaagacacaagcgtttacctttatctcatcacatgacgaaagtgtttggaacttggatggagagatgtttcaggcatgtgaggtatctgtccaagcgtgccgggggcttgtcaacttctttgcttcggggccagagctgtagtaatgatactcgtaagttcctctttgcatgaacgaaggatgccaggagttcatattttttatttagagagtcccttatttcgacatgttgacatgttgacatgttgtgatgttgtacactcttatttgtattttagtggagacctagaacactttgttgatagatatactgttaatatttgttgatagctatgtggcatggaaactacaacccatttgtgctatagaatagaggaacaaaaggttttgattgaattaatgaagtaaaagtttactttc

SEQ ID NO: 44149 - DNA, 2976 bp, Zea Mays
aagcaactatttttttccgtgttcttctctcctcttccgctccccaccgaaagcataaacagcacaccggcaacgggaaaggaagggataccgacgcgagcacgcgccgagcaacgtctcgaaaaggccatgcaggacggcggcgaggtgctgttcctggacggcgtcggggaggtcgccgtcaccatcggccgcaacggcctctctgcacggcccctccacccggtatgccccagccccgtgatgacatccatgtcccttcgccgttttggaatcgctcaaggcttccttcagatcctactggtttaaacctcatctggagtctggacgcttgattgaaagggttttgtgcgtgcttgagtcggaatgtgtgacagggctggatatttgttgctctgggtgctcgatcgaagagattggaagatgataggaaggcggtgagaagatgaccagatgagtatggttccccaaccaccgtcactatacttggtttataattgggagaggattcacgaaaaagtggatggaaactctgagtttgcataatgcacatgatcactgtcttgggcagtctaggtatctgtacaacctaccagaagaggctgctttaggtgcttgcgatatgagtgctttgttggctgaaagacatccttttgcaagagaagaaaacatgcaaatcctagttaagtactccaaactagaaacagaatcctcatctgtgtctgaaggttagcctgataaatggttttaagggagtgcccttggaatatgtgtggtcagcaccattgcatagatcaccaagtggaaagataacaccactgatatgatatgtgccaccgagccgcacatataatcatcacaccggattgatggggattaaatccctttctattcaaatttgactagcaatccctccaatccactcctaaccgacacaagcctgtaatgtgctcaaattgccttttttttacaggaactgatctcttcatgttggtcgtccattacactgcagcctaaattagacagcaaaatcaacttttcagatgtttatgccatagagatgcttgataagggtcgtatctgtgggccttggaatacaaagactgctattcaaggcaagaaaaatattgagatgcaccggtttgtcgtacatgggattaccagaagaaggaaacacccttctccgtgggtaccttgtgaatatatttttggtcacaaagacttgaagatctgcaaagattggtttcagcatctcatttcgtgcataaacaatgaaagtggtagaccaaagaacttaatggtatttgttcatccattgtgtggaaaaggtagaggggtcagtaactgggaaacagtgtatccgttatttgctagagcaaagataaaaacaaaggtgatagtgacagagagagcagggcatgcatatgacacactatcatcattatcagatatagaactgaaggcatttgatggtgttgttgcagtgggtggcgacggtctatttaatgaaattctgaatgggatacttagttctaggcacaaggtttcatatcccccaactcctgaggggtttggatatgttggaagcagtgataactgtgaagaacagacaagaaattgggttaactttagtaaacccacaccagattctgggaatgccgtgtttctagggaatccaagtaaatgtgatgaccaagaacctcttctttcaacttcacatcctaccgagctagagataccatcaaattctactaaagaaccatgtattggagatcaggataacccagtttccttcccaaatgactggtttaggcttggcataattccttctggctcaactgatgctattgttctcagcacaactggggagagagatcctgtcacctctgctctgcttattattcttggcagaaaggtgtcacttgatatagctcaagtcgttagatggaaaactagcccaacagctgaggttttgcctactgtacgctatgctgcttcatttgcaggttatggcttttatggagaagttatcagggagagcgaaaagtaccggtggatgggtcctgcacgttatgacttttctggaacaatggtctttctgaagcacaggtcatatggggcaaaggttgcttttctcgatactccatacactcattcgcttacagcatcagcacaggatgatataactggagcacaaccactacaatctcgttggaagaaacctcgcaaaataatctgcagaacaaattgctttgtatgcaaagaggcttcaacatctggacaaaatccagaagatgttgcagacaactccagaacaatatgcgagaaccagaagtgggtctggtccgaaggacatttcctcagcgtcggtgcagctgtcatttcatgtcgtaacgaaagagcccctgatggcctggtagctgacgcacacctttcggatggttttcttcatctcttgctcataagagactgccctcttcccctttacttgtggcatctaacacaatttaccaagaagggttcagatcccctgtccttcaagttcgttgagcatcacaagacacaagcgtttacctttatctcatcacatgacgaaagtgtttggaacttggatggagagatgtttcaggcatgtgaggtatctgtccaagcgtgccgggggcttgtcaacttctttgcttcggggccagagctgtagtaatgatactcgtaagttcctctttgcatgaacgaaggatgccaggagttcatattttttatttagagagtcccttatttcgacatgttgacatgttgacatgttgtgatgttgtacactcttatttgtattttagtggagacctagaacactttgttgatagatatactgttaatatttgttgatagctatgtggcatggaaactacaacccatttgtgctatagaatagaggaacaaaaggttttgattgaattaatgaagtaaaagtttactttc

SEQ ID NO: 44150 - DNA, 2143 bp, Zea Mays
aagcaactatttttttccgtgttcttctctcctcttccgctccccaccgaaagcataaacagcacaccggcaacgggaaaggaagggataccgacgcgagcacgcgccgagcaacgtctcgaaaaggccatgcaggacggcggcgaggtgctgttcctggacggcgtcggggaggtcgccgtcaccatcggccgcaacggcctctctgcacggcccctccacccggaactgatctcttcatgttggtcgtccattacactgcagcctaaattagacagcaaaatcaacttttcagatgtttatgccatagagatgcttgataagggtcgtatctgtgggccttggaatacaaagactgctattcaaggcaagaaaaatattgagatgcaccggtttgtcgtacatgggattaccagaagaaggaaacacccttctccgtgggtaccttgtgaatatatttttggtcacaaagacttgaagatctgcaaagattggtttcagcatctcatttcgtgcataaacaatgaaagtggtagaccaaagaacttaatggtatttgttcatccattgtgtggaaaaggtagaggggtcagtaactgggaaacagtgtatccgttatttgctagagcaaagataaaaacaaaggtgatagtgacagagagagcagggcatgcatatgacacactatcatcattatcagatatagaactgaaggcatttgatggtgttgttgcagtgggtggcgacggtctatttaatgaaattctgaatgggatacttagttctaggcacaaggtttcatatcccccaactcctgaggggtttggatatgttggaagcagtgataactgtgaagaacagacaagaaattgggttaactttagtaaacccacaccagattctgggaatgccgtgtttctagggaatccaagtaaatgtgatgaccaagaacctcttctttcaacttcacatcctaccgagctagagataccatcaaattctactaaagaaccatgtattggagcacaactggggagagagatcctgtcacctctgctctgcttattattcttggcagaaaggtgtcacttgatatagctcaagtcgttagatggaaaactagcccaacagctgaggttttgcctactgtacgctatgctgcttcatttgcaggttatggcttttatggagaagttatcagggagagcgaaaagtaccggtggatgggtcctgcacgttatgacttttctggaacaatggtctttctgaagcacaggtcatatggggcaaaggttgcttttctcgatactccatacactcattcgcttacagcatcagcacaggatgatataactggagcacaaccactacaatctcgttggaagaaacctcgcaaaataatctgcagaacaaattgctttgtatgcaaagaggcttcaacatctggacaaaatccagaagatgttgcagacaactccagaacaatatgcgagaaccagaagtgggtctggtccgaaggacatttcctcagcgtcggtgcagctgtcatttcatgtcgtaacgaaagagcccctgatggcctggtagctgacgcacacctttcggatggttttcttcatctcttgctcataagagactgccctcttcccctttacttgtggcatctaacacaatttaccaagaagggttcagatcccctgtccttcaagttcgttgagcatcacaagacacaagcgtttacctttatctcatcacatgacgaaagtgtttggaacttggatggagagatgtttcaggcatgtgaggtatctgtccaagcgtgccgggggcttgtcaacttctttgcttcggggccagagctgtagtaatgatactcgtaagttcctctttgcatgaacgaaggatgccaggagttcatattttttatttagagagtcccttatttcgacatgttgacatgttgacatgttgtgatgttgtacactcttatttgtattttagtggagacctagaacactttgttgatagatatactgttaatatttgttgatagctatgtggcatggaaactacaacccatttgtgctatagaatagaggaacaaaaggttttgattgaattaatgaagtaaaagtttactttc

SEQ ID NO: 44151 - DNA, 2480 bp, Zea Mays
gcagtatcagttttttcttatgcataattcattgactatcattaatgagttcctattgatgttgtttcttgaatcataggattgttctgtgtaccttatggtactttgtgttgtagggactgttatagaacattagatcagctctatgaagaattataattggaaccatgggtatttgagaatcctcttggactggattcagatacaactgacagacaaacagcactgctgtctgcatcaggacattcatctggcaattcatcaggatcagatgactggattgaacctgctgcctatgttcttaactcaactgctcttctttcaagggaacataggagtgttttggatgcttttcgtctgttgcaaaaggatcccaccgttcagaaaatggttatgtctttgtcatgcgataaggctgtttgggatgctgtcatgaataatgaggcagttcaagatttcaggagacctttacatgatggaaaagaaagcgatagaaagggaaacactggtggtcctgctgaagtgcttaagtgggtcctggaaagtgcccaggcaaaaataattgaattcattgagaatgctatgaagataatcaacatgttgatccaccctgaagaggatgaagacaagccagatgcatacagcgatgcagttaaggtgtcgttcatgctcacgatattcgtcttcatcgtggtggacattgctcgtaccaattatgaacgttgggataacaaagtgtggtgaggagaaattctggcattctacaagctcgtctgtatatacatcggttggaattgttttgtagaatacaccaagcttcataggttacacaaaaaaaattacctatactttggttgtatcatttaaccctggcagatcagacatgggaatgttgttgttctgggtcatatttacgcttcctagtccagcgtcagaaaaattatgtttgcagtccttcatttgaaggatatacagtactaactgttgaaatggccagcataataaaattatttgtataataaataaagttacatgctgactttgatttgattcgttccttgaacaacataaatctcagatatctcatggaaagacacttatatttggttgagtttaaaagctcatatttcgtttgcgaaaaaacagaccgttgggtgcgttgtgcaaaacaattccaaccgatgtcaatgtgtcgcacaaaccccctcttgcaaacaaataacaaggcagctttatccggtgatcatggtgccggtgccctcgtccgtgaggatctcgagcagcagcgagtgcgggacgcggccgtcgatgatgctggcggtgcgcaccccctgggcgatggcacggatgcagcactccaccttgggaatcatcccgccgccgaccttctcctcggccaccatccgtctcaccccggcgacgtccacctccctcaccaggctccctggatcatcgcggtccgccagtatgccggacacgtccgtgaggagcagaagcttctcggctcccaccgctgccgcgatctccccggcggcggtgtcggcgttgatgttgtaagcctgcccggcctcgtcggccgctacggtggcgatgaccgggatgtgcccggacgcgatgatggggtggagtacggcggggtccacgcgcgtcacttcgccgacgaagccgagggaggcggcgtcaggggagggccgcgcggtgaggaggcgcgcgtccttgccgcacagcccgacggcggtggcacccgcgaggctgatgagggacacgagctgcttgttgaccttgcccacaagcaccatctccacgacctccatggtgaccgcgtcggtgacgcggagcccgttgcggaactgaggctccacgccgacgcgcgccagccaggagttgatctcgggcccgccgccgtggacgagaatggggcggaggccgacgcaagacagcaggaccaggtcgcggatcaccgacgcctgcagctccggcgacttcatcgccgcgccaccgtacttgaccaccaccgtcttgcccttgaacctctggatgaacgggagcgcctccgacagcacgtccacgcggctcagtgccgccgcagcgcccgctgcaggtgacgccggtgtgggctgcgccgccgccaccgaggcggcggagacccggagaccgccgctgcggtgggacgccgacggggtcagggccacaacgcggtttgcgttcaggctatgcttcggggtcagcgtggaggcggcggcgagggaggggtggagcttcgtgagcggcatggtttggaacggggggtcgttatgttcgatgaaatgcctcgccttgggcgtatgcggaaacgagcttgttgctcggcactggaagtgtgccgctgcggcacaacggaagtgtgtaattgtagatagggatgcctgcggagtaggtggcgactggcgagtgtgacaccggagctggtcaggtggagcagccggcgggcacgtgttttc

SEQ ID NO: 44152 - DNA, 2314 bp, Zea Mays
caggggtatttgagaatcctcttggactggattcagatacaactgacagacaaacagcactgctgtctgcatcaggacattcatctggcaattcatcaggatcagatgactggattgaacctgctgcctatgttcttaactcaactgctcttctttcaagggaacataggagtgttttggatgcttttcgtctgttgcaaaaggatcccaccgttcagaaaatggttatgtctttgtcatgcgataaggctgtttgggatgctgtcatgaataatgaggcagttcaagatttcaggagacctttacatgatggaaaagaaagcgatagaaagggaaacactggtggtcctgctgaagtgcttaagtgggtcctggaaagtgcccaggcaaaaataattgaattcattgagaatgctatgaagataatcaacatgttgatccaccctgaagaggatgaagacaagccagatgcatacagcgatgcagttaaggtgtcgttcatgctcacgatattcgtcttcatcgtggtggacattgctcgtaccaattatgaacgttgggataacaaagtgtggtgaggagaaattctggcattctacaagctcgtctgtatatacatcggttggaattgttttgtagaatacaccaagcttcataggttacacaaaaaaaattacctatactttggttgtatcatttaaccctggcagatcagacatgggaatgttgttgttctgggtcatatttacgcttcctagtccagcgtcagaaaaattatgtttgcagtccttcatttgaaggatatacagtactaactgttgaaatggccagcataataaaattatttgtataataaataaagttacatgctgactttgatttgattcgttccttgaacaacataaatctcagatatctcatggaaagacacttatatttggttgagtttaaaagctcatatttcgtttgcgaaaaaacagaccgttgggtgcgttgtgcaaaacaattccaaccgatgtcaatgtgtcgcacaaaccccctcttgcaaacaaataacaaggcagctttatccggtgatcatggtgccggtgccctcgtccgtgaggatctcgagcagcagcgagtgcgggacgcggccgtcgatgatgctggcggtgcgcaccccctgggcgatggcacggatgcagcactccaccttgggaatcatcccgccgccgaccttctcctcggccaccatccgtctcaccccggcgacgtccacctccctcaccaggctccctggatcatcgcggtccgccagtatgccggacacgtccgtgaggagcagaagcttctcggctcccaccgctgccgcgatctccccggcggcggtgtcggcgttgatgttgtaagcctgcccggcctcgtcggccgctacggtggcgatgaccgggatgtgcccggacgcgatgatggggtggagtacggcggggtccacgcgcgtcacttcgccgacgaagccgagggaggcggcgtcaggggagggccgcgcggtgaggaggcgcgcgtccttgccgcacagcccgacggcggtggcacccgcgaggctgatgagggacacgagctgcttgttgaccttgcccacaagcaccatctccacgacctccatggtgaccgcgtcggtgacgcggagcccgttgcggaactgaggctccacgccgacgcgcgccagccaggagttgatctcgggcccgccgccgtggacgagaatggggcggaggccgacgcaagacagcaggaccaggtcgcggatcaccgacgcctgcagctccggcgacttcatcgccgcgccaccgtacttgaccaccaccgtcttgcccttgaacctctggatgaacgggagcgcctccgacagcacgtccacgcggctcagtgccgccgcagcgcccgctgcaggtgacgccggtgtgggctgcgccgccgccaccgaggcggcggagacccggagaccgccgctgcggtgggacgccgacggggtcagggccacaacgcggtttgcgttcaggctatgcttcggggtcagcgtggaggcggcggcgagggaggggtggagcttcgtgagcggcatggtttggaacggggggtcgttatgttcgatgaaatgcctcgccttgggcgtatgcggaaacgagcttgttgctcggcactggaagtgtgccgctgcggcacaacggaagtgtgtaattgtagatagggatgcctgcggagtaggtggcgactggcgagtgtgacaccggagctggtcaggtggagcagccggcgggcacgtgttttc

SEQ ID NO: 44153 - DNA, 1666 bp, Zea Mays
ccacgcagcgtttcccccgtgctccgtgtatgtctgcctccctcccccgctccgcgcgggcgagctgagcgcctgagccccataataaataggcggccagccacgtagcagcaccggccggacgcgacgcaatgcaacacgaagaagtgtgcgatactactacctgcggtgaaggcaatggtcgaggaggtgaggaagaactcgagatggaggggcactcgttgatgaggatgaagaggagggatcacttgctgctcactgacggcgccggcgccggcgccggggcggggcctcttgcggtgcagacgccgatggagcccatggagttcctgtcgcggtcgtggagcgtgtcggcgtcggagatctccaaggtgctggctggcggcgtcggcgggaggcggagctccaacttcgtcgtcgaccgcctgtccgggatgctcatgccggagacgctcgcgctcgcagcctcctcctcctccgccggcaccaacaacatcagcccccgcaagcgcaccctcaggagcaggagcgcgatctccgcgcaccaggtccaccacacggtccacgcgatcggcaagtggttccaccactgggacgcgggcagcagcaaggtggacaaggcccgcgccgagcgggcgcgcgtgcacgccgcggtctccgtggcgagcgtggcggccgcggtcgccgccgtggccgtggccgcgggcgcgagccccgaggtggacgtcaccgacgacggcgccaggatggggagcgcgctggcgtccgcgacgcagctgctggcgtcgcactgcgtcgaggccgccgagctcgcgggggccgaccacgaccaggtggcgtccgccgtggagaccgcggtcgacgtgcggagcccaggggatctgctcaccctcaccgccgcagcggccacagctctcagaggggccgcggcgatgcggcacagggcgcagcgggaggcgaggagcagggcggccgtagcgccgtacgacaaggcctgcagctaccgcgcggacgtctggtgcaaggaaggcgcgctcctcaaacgcaaccgcaaaggcgctctgcactggaagcaggtggccgtgtacatcagcaagaagtcgcaggtgatagtgaagctgaagagcaagcacatcggcggcgccttctccaagaagaagaaaggcgtcgtctacggcgtctacgacgacatcccggcgtggccggcgcgcgagggcgtcgccgcgcaaagctcggcgccggagacgtgccacttcgggctgaggacggcgcatggcctgctcgagttccagtgcgaaagcagggcacagaggcgggactgggtggaggcggtgaaggacctgatccggcaggtggccggcgggactgctctgctcgagcactccttcgagtcgctaaggctgagcgcgtcttgatttaagtttggccgtgtagtctggcatgtaaatccgcctccatttgtccaatcggtagggagaaatcgaggtgcaaatttgcagaataatgtgcagagatgtagttttttgctttttcctgggaaggtaatatgaagcgcttagagtgctggtgtatgtaacgacgtgtgtctcaaaactatctcaccttgtttaacttgaaaatagcaagccaacttaaaagagagagccacccatcagactagtttttt

SEQ ID NO: 44154 - DNA, 1597 bp, Zea Mays
caaagagtagacgcaacggcacaacgcaagcgcgcgctctgcaactaaccaagaagaggggagaggcaaagcgcagagcgaagccaagaagatggccgcggctgccgccgtcccggacggcgtctcctcctgcgggagcaccaacatgcgccgcgccgaccaccttcctcgtcctacggcagctgcgccgcgtggagcgccgggtcgctcaccaggcaccgccccgcatcgccgtccccgatctgcagccccgcgaacagccacgacggcggcggcgaggaggaggaggaccgcgaaccgcacggcggtgacgacgcctcctcgtttgtcacgccacgggtggaagaagagcaaggcaggaccagagcagatttcatgaatccttctgctatgccacggaatatcagactgcagacacccaggcacccttctctgctggataggagagttgaaggcgccaatcaaatgcctccgagattcatccacaagaccacaccagctagatttatgcgccgagttcgctcctcacgtaatttccgacagcgcgtggatgcattagatgctaccaatgaatggagattgcccaaagtcagtgaaggggatgacgagggaggtgataaaaaagactggcagagcaataccgtgtcatctcgcgtatcttcagcccgtgattggaattttgagtctgacggtgcctatcagggtagcaatcgtagtgatcgtgcatttggcgattcagatggtgagaactgtccagttgaagtgcaaaggacagagagatggaccccgagctccgtgttaaaaccccaaggcaatttagtccatgctaagttggttgcctggaaggatgcgcagattgcaaagctcatagaaaagctgaaaaagaaagaagccgatattgatgattggcagaggaagaagaccataaaggccaggcagaagatgagaagcgctgagttgaagctggagaagaagagagcggaaatcgcagaaaagatgcaaaaggcaataaagcgtgcacaaaaaaaggctgataagaagaaagtcaaggagcaggtagccactaaagttcagattgatggtgttgagagagcattggataagatgtcaaggacaggaaaactcccctggtcactggcttttctgtgatccagctcttcgtatgtgcctgtcctagataagctggtttgccgaactgtggaagctactggtggtggcagcatggcaagagcaatacgagtgaaatcagctgctaaatgattgaaatcggcaaattgcgtattaaggaaaagagaagaggatatgctggtgattgaccattctttggcaatgaaagttttggcttatgtaacactatgatttgtttgaggcaatagttactagcaatcgaacactgtttttgaacacgacatggataactcgaggtgaattttttggtacattactgtatgttgtccgataactcttctagtgttctgacatctgagacaaacattcttgatccttacagctgtgctgtgatagtgtacatcacttcaactttgtgagtatgatgcgatgaacaaatgaacaatgctatgcttattcatatttgttt

SEQ ID NO: 44155 - DNA, 1552 bp, Zea Mays
caaagagtagacgcaacggcacaacgcaagcgcgcgctctgcaactaaccaagaagaggggagaggcaaagcgcagagcgaagccaagaagatggccgcggctgccgccgtcccggacggcgtctcctcctgcgggagcaccaacatgcgccgcgccgaccaccttcctcgtcctacggcagctgcgccgcgtggagcgccgggtcgctcaccaggcaccgccccgcatcgccgtccccgatctgcagccccgcgaacagccacgacggcggcggcgaggaggaggaggaccgcgaaccgcacggcggtgacgacgcctcctcgtttgtcacgccacgggtggaagaagagcaaggcaggaccagagcagatttcatgaatccttctgctatgccacggaatatcagactgcagacacccaggcacccttctctgctggataggagagttgaaggcgccaatcaaatgcctccgagattcatccacaagaccacaccagctagatttatgcgccgagttcgctcctcacgtaatttccgacagcgcgtggatgcattagatgctaccaatgaatggagattgcccaaagtcagtgaaggggatgacgagggaggtgataaaaaagactggcagagcaataccgtgtcatctcgcgtatcttcagcccgtgattggaattttgagtctgacggtgcctatcagggtagcaatcgtagtgatcgtgcatttggcgattcagatggtgagaactgtccagttgaagtgcaaaggacagagagatggaccccgagctccgtgttaaaaccccaaggcaatttagtccatgctaagttggttgcctggaaggatgcgcagattgcaaagctcatagaaaacctgaaattgtgttttgaagttacaagctcaattcattactggtgttatggtgtgggtatgaaaacatggactcctgctgaaaaagaaagaagccgatattgatgattggcagaggaagaagaccataaaggccaggcagaagatgagaagcgctgagttgaagctggagaagaagagagcggaaatcgcagaaaagatgcaaaaggcaataaagcgtgcacaaaaaaaggctgataagaagaaagtcaaggagcagataagctggtttgccgaactgtggaagctactggtggtggcagcatggcaagagcaatacgagtgaaatcagctgctaaatgattgaaatcggcaaattgcgtattaaggaaaagagaagaggatatgctggtgattgaccattctttggcaatgaaagttttggcttatgtaacactatgatttgtttgaggcaatagttactagcaatcgaacactgtttttgaacacgacatggataactcgaggtgaattttttggtacattactgtatgttgtccgataactcttctagtgttctgacatctgagacaaacattcttgatccttacagctgtgctgtgatagtgtacatcacttcaactttgtgagtatgatgcgatgaacaaatgaacaatgctatgcttattcatatttgttt

SEQ ID NO: 44156 - DNA, 2061 bp, Zea Mays
caaagagtagacgcaacggcacaacgcaagcgcgcgctctgcaactaaccaagaagaggggagaggcaaagcgcagagcgaagccaagaagatggccgcggctgccgccgtcccggacggcgtctcctcctgcgggagcaccaacatgcgccgcgccgaccaccttcctcagctcccgattccgctgccctgcatgggcgagcccaccgccgcctcccgcgtctcgccgggctcctccccggcccgctccgaggcctcgcgaggcgccccctgctacaacgccgacgccgagccggacccggacccggagccggagcccgaggcgtccgtggggcggagcacgcagatgctgctcgcgatggccgccatgggcgggcacggcgggcactacggccgccgcccggcctcgtcctacggcagctgcgccgcgtggagcgccgggtcgctcaccaggcaccgccccgcatcgccgtccccgatctgcagccccgcgaacagccacgacggcggcggcgaggaggaggaggaccgcgaaccgcacggcggtgacgacgcctcctcgtttgtcacgccacgggaagaagagcaaggcaggaccagagcagatttcatgaatccttctgctatgccacggaatatcagactgcagacacccaggcacccttctctgctggataggagagttgaaggcgccaatcaaatgcctccgagattcatccacaagaccacaccagctagatttatgcgccgagttcgctcctcacgtaatttccgacagcgcgtggatgcattagatgctaccaatgaatggagattgcccaaagtcagtgaaggggatgacgagggaggtgataaaaaagactggcagagcaataccgtgtcatctcgcgtatcttcagcccgtgattggaattttgagtctgacggtgcctatcagggtagcaatcgtagtgatcgtgcatttggcgattcagatggtgagaactgtccagttgaagtgcaaaggacagagagatggaccccgagctccgtgttaaaaccccaaggcaatttagtccatgctaagttggttgcctggaaggatgcgcagattgcaaagctcatagaaaagtaatccttcttatcccatttttcataacatccaaacttgatattcattaccaattaattttggacgtgttcagagagagaatcatagtataagaatattgtattgctacggtggtcagatttgaatttttgacatgtacaatatcacttcagcctgaaattgtgttttgaagttacaagctcaattcattactggtgttatggtgtgggtatgaaaacatggactcctgctgaaaaagaaagaagccgatattgatgattggcagaggaagaagaccataaaggccaggcagaagatgagaagcgctgagttgaagctggagaagaagagagcggaaatcgcagaaaagatgcaaaaggcaataaagcgtgcacaaaaaaaggctgataagaagaaagtcaaggagcaggtagccactaaagttcagattgatggtgttgagagagcattggataagatgtcaaggacaggaaaactcccctggtcactggcttttctgtgatccagctcttcgtatgtgcctgtcctagataagctggtttgccgaactgtggaagctactggtggtggcagcatggcaagagcaatacgagtgaaatcagctgctaaatgattgaaatcggcaaattgcgtattaaggaaaagagaagaggatatgctggtgattgaccattctttggcaatgaaagttttggcttatgtaacactatgatttgtttgaggcaatagttactagcaatcgaacactgtttttgaacacgacatggataactcgaggtgaattttttggtacattactgtatgttgtccgataactcttctagtgttctgacatctgagacaaacattcttgatccttacagctgtgctgtgatagtgtacatcacttcaactttgtgagtatgatgcgatgaacaaatgaacaatgctatgcttattcatatttgttt

SEQ ID NO: 44157 - DNA, 865 bp, Zea Mays
cctaaagtcatcccaatccaattacgccacgcctgcgccgccagcccgccacatctgtcacaccgcccaaagttcggagggaagtcctcaacgacgtcgcggccatttgcagctcggacgatggcgtccaattccgcggccccggctgccgccgacgggggcgacgacctcgaccagctcctcgacagcgcgctcgacgacttcaccagcctcgacctctccgcatctgccgcccccaaaaggatatggactccattgttgaaacaatgatgcagcagcttttgtccaaggagattcttcatgagcccatgaaggacattgtggaaaaatatccaaaatggctggaggataataaaaacaagataagcaaagaagaatatgagcgttataataatcagctagaactcatggtgaagcttattgaggtctatgaaaatgatcctgagaacatgactaagatttttgacatcatgcaaaacatgcaagaatgtggtcagccccccagtgatcttgtccaagatactgtacctgatctggatctgagcaagttgggacagctgtctcctgagatgcttgaatcagcaccaaattgttgcgtaatgtgaagacaaaaaacattccacttgggattcaattccatgaagtttcttagcctgtacgaaccgcctcccccctttctggcttgagtagattcaagataatttccatctggataatctgtaaagccttgcaaatatataatgggctcaatgttctttctggttctttctgttatttttctgtaacactcccgtcgttcctatatacataccttacgtgtcgaagccccttacgtttttgtgacgcatttctattaccactatcg

SEQ ID NO: 44158 - DNA, 1130 bp, Zea Mays
cacgaacaccgtcaccacacggcgcacccaaacatggccgctccgaccaccgccgtcgacaccaccgccccgcctcctcctcctcccacggcagagcccgcggctgcacccgcaccggatcaaaaggtgtctccgcctcctcctgcccctcagcctgataccgctgctcccccgcccgttcccgcgccagcgccgaggaagcggggttgcacacctccgaatgctacaagatccgtgccgtcgtcgccgacctgcgtgtccgcttcgtccagaaataaatgtggtcatggatctatccaagaaaatgaggctcaagcttggtgctacttctgagcctgtgaaaccacttgagaaaccttcagctgggtctgtgaaggatgagcttgtgaaaccatcagagaagccttcagctggacctgtgaacgacgagcctgtgaaaccatcggagaagccttctgctggacctgtgaaaaatgaacccactgagccagctccagctggagaaaacaatcaagctcccactgtcggtcagactacagtttctccaaataatgcaggtgttggtgcaccagtagtcaagcatgataattcagaggcgcaaaagtgaaggtgatagaggaaacctgaagtcccgatccattgagatggcatatcgtgcacatctgctcgacaaaaatgtagagtggccggttgatcccctgtgggctcatattatctttcttctactgtaggtaaaattgtttgctttgggctaatcgaagaagagtggtgggcatatcatggtccaaatttggttgtgttcagttgttaacatccatccattctgtactatgtcgctaattgcccatgaatagtttaatctttaaatagttactctataataactggatcattctatacatcgtattgccctgttgtacgaagtattagccaggcaatttcaagtcgtgcttgagaagaggtgatggaactgcaggcggagtgttcagtgtctcatcaagattttgtccgtgtcacttattttgtctgtcgcatgtacggttgcgaccagccaacgcaaccgatacgataactatgagctattgcaagcacttaccctgtttggaacctttagatccaacacttaggcg

SEQ ID NO: 44159 - DNA, 3673 bp, Zea Mays
aaaaaacccaccgtcagaacacgaacaccgtcaccacacggcgcacccaaacatggccgctccgaccaccgccgtcgacaccaccgccccgcctcctcctcctcccacggcagagcccgcggctgcacccgcaccggatcaaaaggtgtctccgcctcctcctgcccctcagcctgataccgctgctcccccgcccgttcccgcgccagcgccgaggaagcggggttgcacacctccgaatgctacaagatccgtgccgtcgtcgccgacctgcgtgtccgcttcgtccaggtttgccaagctactgatttccgcaacacggatgcagctcgtgagattttgaaaggtcaatgagccatggggcccaggtggagagccataccaagtctacaagtgccaaggaccagacaaaagagccagcacagaaaatatttcagaaacgtgaaacgaggtcaaaaaggctatcttcctcctggttactggagtctggagatcccctcctgtgattgctcacgtcaccggtttgatgttgccggcggccatgggtgtgacattgactcagttgtgtccttggtgctgatccatgccagtgctgatcaggctgttgcagtgagcgaaagggcctctagcttagttggtgctagagttggttaggtggtctagtctaagtagcactcctcaagtcctgaattcgacttctagtggaaatgaattttaggctgaggttaaaaaaatctcctcgtctgtcccacgctaaagcacaggtctaagatccggacccagtcgcggtgacctgcatggggaaggtcatgtacatgagaaggtcttcttaatgtaatggccgaggcctgtcttacccccgcccgtaggtcgagtttttaggctgttgctgtgaaggccatttaggttgaaatgttgtccttttaatacttggcatagcaatggaggtgaggacgtcaggtgaaggagagccattctatttagtcttactaaaaattgtagcaatcatgaagcgtaaatagtcgggtcagttgagaggggtctgcaggcccttggaacttggtggtcttggtattcataatttggaagcgctaggctggtctttgaacatgcgcaaggacggagggaccatggagagaattgcagtttaaggttcactcaactgtggcagctctctttgctgcatcggtggtgaccattgttggagatggagtactttcttttcgactgataagtggttgcatgggcagttcctctccattcttgctccagcactggttggtgcaattcctcaacgattggttaaaatgagaacagtttaggacgccctgcaacattcactttggattggtgacatccaagggcatttgtcagtctaggtcctaagcgactttctctggctttgggatgtgctgcaagacttccatcttcaaccaggagtggcagatcaccattcctggagcttgaccgcttcgggatcatattcatctagatcggcttaccaagccttcttcatgggggcgataagttttgatccgtctagccggatttggcacagctgggcccctgcgagatcaagaggaggaagatataaaccacttgctatttcagtgtgtcttctcaaggacggtctggattgaaatgcttaacctgattcattacccgcatttgagtcctgggccggaggaccacttgctgcaagattggtggcgtgcggtggagagcaaggtgccaaagtatcaaaaaagggcataaactccttaattattcttgtagcttggtgtatttgcaaagctaggaatgcctgcatctttgatgaagcctctcctagggttcctgatgttgttcaaaacataaggatgaggctgaaatctggtgcagggctggtgctaagggacttgctgcaatctggtcaggttagtgtggggtgtggggtccctttttctttctgtaatgggtgtttgctagtgtgtgtgttcttgccctcctgggcttttgtacttcggtccattttggaacttctctccttaatataatgatgcacaactctcccgtccgttcgagaaaaaaagaccctactggcaaagtttgaaaccagttttttttttctagaatcactgctaggcaatgaactagttgaagagggagatgcaccaatgcggctacttgtaatcttagtgttttataatgtgtaaacagtcgatgcgttgcagtttgcgttccatttgcctagttgtatacacaatggtgtcttaggagatgtttgttaatcaattgtgtcgtgaggcactttctgctgttgatttgttgctatcgcattctatgttttatgtagcctctgccttgtgtagcagcattgtgcatcaaatgatataacccattcacgtatcttcttatgacttggctttcataacttctcgtatgacatgcaaaatcttgcatgcaaacacatgaattgcacacattgtacatccttcttccctagttttttactagtaaaaacataaaatagaaatttgtagtggtgtcacttgaaaaatcaattatgtgttttatccttttaaatggtcagcattgttttaaataaattctccacagaactgttaagcatacgatagatcttcgttacctatatttcagcaagtaatttctttgtcactcaatttagtaatgatgtttgtcaaactttgtagttcattgtgaaaataagcaacctgaagtctcatgttcagttcaatatgtactatgtacatttggtctgttactctgttgacatggcttgatcttatacacatatttttgtcatgtgttttagaaataaatgtggtcatggatctatccaagaaaatgaggctcaagcttggtgctacttctgagcctgtgaaaccacttgagaaaccttcagctgggtctgtgaaggatgagcttgtgaaaccatcagagaagccttcagctggacctgtgaacgacgagcctgtgaaaccatcggagaagccttctgctggacctgtgaaaaatgaacccactgagccagctccagctggagaaaacaatcaagctcccactgtcggtcagactacagtttctccaaataatgcaggtgttggtgcaccagtagtcaagcatgataattcagaggcgcaaaagtgaaggtgatagaggaaacctgaagtcccgatccattgagatggcatatcgtgcacatctgctcgacaaaaatgtagagtggccggttgatcccctgtgggctcatattatctttcttctactgtaggtaaaattgtttgctttgggctaatcgaagaagagtggtgggcatatcatggtccaaatttggttgtgttcagttgttaacatccatccattctgtactatgtcgctaattgcccatgaatagtttaatctttaaatagttactctataataactggatcattctatacatcgtattgccctgttgtacgaagtattagccaggcaatttcaagtcgtgcttgagaagaggtgatggaactgcaggcggagtgttcagtgtctcatcaagattttgtccgtgtcacttattttgtctgtcgcatgtacggttgcgaccagccaacgcaaccgatacgataactatgagctattgcaagcacttaccctgtttggaacctttagatccaacacttaggcg

SEQ ID NO: 44160 - DNA, 2812 bp, Zea Mays
gtcttcttcaaagcccaagcccacaaacttcaaaaaaaaaaaaacccaccgtcagaacacgaacaccgtcaccacacggcgcacccaaacatggccgctccgaccaccgccgtcgacaccaccgccccgcctcctcctcctcccacggcagagcccgcggctgcacccgcaccggatcaaaaggtgtctccgcctcctcctgcccctcagcctgataccgctgctcccccgcccgttcccgcgccagcgccgaggaagcggggttgcacacctccgaatgctacaagatccgtgccgtcgtcgccgacctgcgtgtccgcttcgtccaggtttgccaagctactgatttccgcaacacggatgcagctcgtgagattttgaaaggtcaatgagccatggggcccaggtggagagccataccaagtctacaagtgccaaggaccagacaaaagagccagcacagaaaatatttcagaaacgtgaaacgaggtcaaaaaggctatcttcctcctggttactggagtctggagatcccctcctgtgattgctcacgtcaccggtttgatgttgccggcggccatgggtgtgacattgactcagttgtgtccttggtgctgatccatgccagtgctgatcaggctgttgcagtgagcgaaagggcctctagcttagttggtgctagagttggttaggtggtctagtctaagtagcactcctcaagtcctgaattcgacttctagtggaaatgaattttaggctgaggttaaaaaaatctcctcgtctgtcccacgctaaagcacaggtctaagatccggacccagtcgcggtgacctgcatggggaaggtcatgtacatgagaaggtcttcttaatgtaatggccgaggcctgtcttacccccgcccgtaggtcgagtttttaggctgttgctgtgaaggccatttaggttgaaatgttgtccttttaatacttggcatagcaatggaggtgaggacgtcaggtgaaggagagccattctatttagtcttactaaaaattgtagcaatcatgaagcgtaaatagtcgggtcagttgagaggggtctgcaggcccttggaacttggtggtcttggtattcataatttggaagcgctaggctggtctttgaacatgcgcaaggacggagggaccatggagagaattgcagtttaaggttcactcaactgtggcagctctctttgctgcatcggtggtgaccattgttggagatggagtactttcttttcgactgataagtggttgcatgggcagttcctctccattcttgctccagcactggttggtgcaattcctcaacgattggttaaaatgagaacagtttaggacgccctgcaacattcactttggattggtgacatccaagggcatttgtcagtctaggtcctaagcgactttctctggctttgggatgtgctgcaagacttccatcttcaaccaggagtggcagatcaccattcctggagcttgaccgcttcgggatcatattcatctagatcggcttaccaagccttcttcatgggggcgataagttttgatccgtctagccggatttggcacagctgggcccctgcgagatcaagaggaggaagatataaaccacttgctatttcagtgtgtcttctcaaggacggtctggattgaaatgcttaacctgattcattacccgcatttgagtcctgggccggaggaccacttgctgcaagattggtggcgtgcggtggagagcaaggtgccaaagtatcaaaaaagggcataaactccttaattattcttgtagcttggtgtatttgcaaagctaggaatgcctgcatctttgatgaagcctctcctagggttcctgatgttgttcaaaacataaggatgaggctgaaatctggtgcagggctggtgctaagggacttgctgcaatctggtcagaaataaatgtggtcatggatctatccaagaaaatgaggctcaagcttggtgctacttctgagcctgtgaaaccacttgagaaaccttcagctgggtctgtgaaggatgagcttgtgaaaccatcagagaagccttcagctggacctgtgaacgacgagcctgtgaaaccatcggagaagccttctgctggacctgtgaaaaatgaacccactgagccagctccagctggagaaaacaatcaagctcccactgtcggtcagactacagtttctccaaataatgcaggtgttggtgcaccagtagtcaagcatgataattcagaggcgcaaaagtgaaggtgatagaggaaacctgaagtcccgatccattgagatggcatatcgtgcacatctgctcgacaaaaatgtagagtggccggttgatcccctgtgggctcatattatctttcttctactgtaggtaaaattgtttgctttgggctaatcgaagaagagtggtgggcatatcatggtccaaatttggttgtgttcagttgttaacatccatccattctgtactatgtcgctaattgcccatgaatagtttaatctttaaatagttactctataataactggatcattctatacatcgtattgccctgttgtacgaagtattagccaggcaatttcaagtcgtgcttgagaagaggtgatggaactgcaggcggagtgttcagtgtctcatcaagattttgtccgtgtcacttattttgtctgtcgcatgtacggttgcgaccagccaacgcaaccgatacgataactatgagctattgcaagcacttaccctgtttggaacctttagatccaacacttaggcg

SEQ ID NO: 44161 - DNA, 1288 bp, Zea Mays
tggagacagcctaaggaaacatggtatgtcagaactcacaagacatgtcttcttcaaagcccaagcccacaaacttcaaaaaaaaaaaaacccaccgtcagaacacgaacaccgtcaccacacggcgcacccaaacatggccgctccgaccaccgccgtcgacaccaccgccccgcctcctcctcctcccacggcagagcccgcggctgcacccgcaccggatcaaaaggtgtctccgcctcctcctgcccctcagcctgataccgctgctcccccgcccgttcccgcgccagcgccgaggaagcggggttgcacacctccgaatgctacaagatccgtgccgtcgtcgccgacctgcgtgtccgcttcgtccaggtttgccaagctactgatttccgcaacacggatgcagctcgtgagattttgaaagaaataaatgtggtcatggatctatccaagaaaatgaggctcaagcttggtgctacttctgagcctgtgaaaccacttgagaaaccttcagctgggtctgtgaaggatgagcttgtgaaaccatcagagaagccttcagctggacctgtgaacgacgagcctgtgaaaccatcggagaagccttctgctggacctgtgaaaaatgaacccactgagccagctccagctggagaaaacaatcaagctcccactgtcggtcagactacagtttctccaaataatgcaggtgttggtgcaccagtagtcaagcatgataattcagaggcgcaaaagtgaaggtgatagaggaaacctgaagtcccgatccattgagatggcatatcgtgcacatctgctcgacaaaaatgtagagtggccggttgatcccctgtgggctcatattatctttcttctactgtaggtaaaattgtttgctttgggctaatcgaagaagagtggtgggcatatcatggtccaaatttggttgtgttcagttgttaacatccatccattctgtactatgtcgctaattgcccatgaatagtttaatctttaaatagttactctataataactggatcattctatacatcgtattgccctgttgtacgaagtattagccaggcaatttcaagtcgtgcttgagaagaggtgatggaactgcaggcggagtgttcagtgtctcatcaagattttgtccgtgtcacttattttgtctgtcgcatgtacggttgcgaccagccaacgcaaccgatacgataactatgagctattgcaagcacttaccctgtttggaacctttagatccaacacttaggcg

SEQ ID NO: 44162 - DNA, 1123 bp, Zea Mays
gttccctttctccatcgcttcctccaccatctcaccgatcccttgctgcgatcgccctgtcagtaggcgaaggatggtgacgccgaacgagttcacgtcggaccacagcatgagctccgctgccgacttgaatccaccgccctgctccgtgtagcggagtgttcccttactacggtctgctgctgaagggcggcttcgcaggctggtggccgttatgtcgtcttcaccaccacctagaagaaggcagcagatgcccaagcctcccagcttgctgacgaaattggcgtcaaggaggatgtttcccaggttcagatcgccgtgaacgatcggatatggcttgtgtgagtggatgaaggccaaggctgagcatatctccccgacgatccttgtgcgcgccttccatgtcagaggcggcatgcttttcttgcacgagagccaatcctcgagactgccgtttgggaggaattcggacaccagcgcgaagtcgtcgggacatactcctaccagcgtgacaatgttaggatgcctcaccctactgaggacagcaacctgcaggagcgagtgagtagtgatgtcactgctcgttcgaaaaagggggcggtaagaacttgaaggtctttaatctgcacgagcaatcaccacttccatgaccacctgtgatttgtattaaggaccaatggtgcagaaaaggaagaagaaaacataccctttgaagcggcgcgttgcttttttcaggtgatgcaagtatggcaggaaggctttcatttgcttccctggggagagttcttgtttaatgacacagtagattgggttcccagctgaaatggaatgtactattcgtagatatatagaagtctggaagtgctaaaaatttctggtgtcagctggacctcgccctttacctggtacatatcaaatgacctttacaagtaaaccacatcttgcatgatggagctgctgtcttgaaaagcttgagcgctgtcatcgactttggcgtgttcatttctctacagtttgagagcatctgttagaatgcgcgattgcaagggcaataatggacatgagctatggcaagcttggatccgtccttgaccagattgcgcagcgcccacagaagggtgct

SEQ ID NO: 44163 - DNA, 1553 bp, Zea Mays
gttccctttctccatcgcttcctccaccatctcaccgatcccttgctgcgatcgccctgtcagtaggcgaaggatggtgacgccgaacgagttcacgtcggaccacagcatgagctccgctgccgacttgaatccaccgccctgctccgtgtagcggagtgttcccttactacggtctgctgctgaagggcggcttcgcaggctggtggccgttatgtcgtcttcaccaccacctagaagaaggcagcagatgcccaagcctcccagcttgctgacgaaattggcgtcaaggaggatgtttcccaggttcagatcgccgtgaacgatcggatatggcttgtgtgagtggatgaaggccaaggctgagcatatctccccgacgatccttgtgcgcgccttccatgtcagaggcggcatgcttttcttgcacgagagccaatcctcgagactgccgtttgggaggaattcggacaccagcgcgaagtcgtcgggacatactcctaccagcgtgacaatgttaggatgcctcaccctactgaggacagcaacctgcaggagcgagtgagtagtgatgtcactgctcgttcgaaaaagggggcggtaagaacttgaaggtctttaatctgcacgagcaatcaccacttccatgaccacctgtgatttgtattaaggaccaatggtgcagaaaaggaagaagaaaacataccctttgaaggtgatgcaagtatggcaggaaggctttcatttgcttccctggggagagttcttgtttaatgacacagtagattgggttcccagctgaaatggaatgtactattcgtagatatatagaagtctggaagtgctaaaaatttctggtgtcagctggacctcgccctttacctggtacatatcaaatgacctttacaagtaaaccacatcttgcatgatggagctgctgtcttgaaaagcttgagcgctgtcatcgactttggcgtgttcatttctctacagtttgagagcatctgttagaatgcgcgattgcaaggtcctcaagtgtgagagagtatggtgacgttctggttaatcattcagaatcatggaagtaagatgtgcatccaatttaaggaagtagagcgattttgttagtctgatccgtacctagagaagtgtcggtctgcagctgctcccatgacaaactcagttacgttattaagagagatgagctcctcaagtccttcagctacatcatccgtctcgattattactttcgcacaggcaacctgaaatgtaacagcctttgccatctgcacatacgcatctagactcttctcggcctttgctcgcttctgctttctgtactccttgatttcttctggtttcatgctggtatgactcctgtctgaaatgtaacggaaatcacaagctgctgcagagtgcaagttaagaaaactgtgacagatgcaacgaattccgagccgtacgtgctaggggggtgtaaaacgaatgcaattgctttcgaaattcagatacagagacatgtttcctagttctaaaaatatcttagagctaag

SEQ ID NO: 44164 - DNA, 1573 bp, Zea Mays
gttccctttctccatcgcttcctccaccatctcaccgatcccttgctgcgatcgccctgtcagtaggcgaaggatggtgacgccgaacgagttcacgtcggaccacagcatgagctccgctgccgacttgaatccaccgccctgctccgtgtagcggagtgttcccttactacggtctgctgctgaagggcggcttcgcaggctggtggccgttatgtcgtcttcaccaccacctagaagaaggcagcagatgcccaagcctcccagcttgctgacgaaattggcgtcaaggaggatgtttcccaggttcagatcgccgtgaacgatcggatatggcttgtgtgagtggatgaaggccaaggctgagcatatctccccgacgatccttgtgcgcgccttccatgtcagaggcggcatgcttttcttgcacgagagccaatcctcgagactgccgtttgggaggaattcggacaccagcgcgaagtcgtcgggacatactcctaccagcgtgacaatgttaggatgcctcaccctactgaggacagcaacctgcaggagcgagtgagtagtgatgtcactgctcgttcgaaaaagggggcggtaagaacttgaaggtctttaatctgcacgagcaatcaccacttccatgaccacctgtgatttgtattaaggaccaatggtgcagaaaaggaagaagaaaacataccctttgaagcggcgcgttgcttttttcaggtgatgcaagtatggcaggaaggctttcatttgcttccctggggagagttcttgtttaatgacacagtagattgggttcccagctgaaatggaatgtactattcgtagatatatagaagtctggaagtgctaaaaatttctggtgtcagctggacctcgccctttacctggtacatatcaaatgacctttacaagtaaaccacatcttgcatgatggagctgctgtcttgaaaagcttgagcgctgtcatcgactttggcgtgttcatttctctacagtttgagagcatctgttagaatgcgcgattgcaaggtcctcaagtgtgagagagtatggtgacgttctggttaatcattcagaatcatggaagtaagatgtgcatccaatttaaggaagtagagcgattttgttagtctgatccgtacctagagaagtgtcggtctgcagctgctcccatgacaaactcagttacgttattaagagagatgagctcctcaagtccttcagctacatcatccgtctcgattattactttcgcacaggcaacctgaaatgtaacagcctttgccatctgcacatacgcatctagactcttctcggcctttgctcgcttctgctttctgtactccttgatttcttctggtttcatgctggtatgactcctgtctgaaatgtaacggaaatcacaagctgctgcagagtgcaagttaagaaaactgtgacagatgcaacgaattccgagccgtacgtgctaggggggtgtaaaacgaatgcaattgctttcgaaattcagatacagagacatgtttcctagttctaaaaatatcttagagctaag

SEQ ID NO: 44165 - DNA, 1606 bp, Zea Mays
gttccctttctccatcgcttcctccaccatctcaccgatcccttgctgcgatcgccctgtcagtaggcgaaggatggtgacgccgaacgagttcacgtcggaccacagcatgagctccgctgccgacttgaatccaccgccctgctccgtgtagcggagtgttcccttactacggtctgctgctgaagggcggcttcgcaggctggtggccgttatgtcgtcttcaccaccacctagaagaaggcagcagatgcccaagcctcccagcttgctgacgaaattggcgtcaaggaggatgtttcccaggttcagatcgccgtgaacgatcggatatggcttgtgtgagtggatgaaggccaaggctgagcatatctccccgacgatccttgtgcgcgccttccatgtcagaggcggcatgcttttcttgcacgagagccaatcctcgagactgccgtttgggaggaattcggacaccagcgcgaagtcgtcgggacatactcctaccagcgtgacaatgttaggatgcctcaccctactgaggacagcaacctgcaggagcgagtgagtagtgatgtcactgctcgttcgaaaaagggggcggtaagaacttgaagcggcgcgttgcttttttcaggtgatgcaagtatggcaggaaggctttcatttgcttccctggggagagttcttgtttaatgacacagtagattgggttcccagctgaaatggaatgtactattcgtagatatatagaagtctggaagtgctaaaaatttctggtgtcagctggacctcgccctttacctggtacatatcaaatgacctttacaagtaaaccacatcttgcatgatggagctgctgtcttgaaaagcttgagcgctgtcatcgactttggcgtgttcatttctctacagtttgagagcatctgttagaatgcgcgattgcaaggtatgctcttaagaaattgcttggtctgagtatgctatagcttcctatccatttcttgttagaagagaaaatagagtattctgttactgcaaccacataaccagcttgtaagaaaacttgtttaagtatcccaggtcctcaagtgtgagagagtatggtgacgttctggttaatcattcagaatcatggaagtaagatgtgcatccaatttaaggaagtagagcgattttgttagtctgatccgtacctagagaagtgtcggtctgcagctgctcccatgacaaactcagttacgttattaagagagatgagctcctcaagtccttcagctacatcatccgtctcgattattactttcgcacaggcaacctgaaatgtaacagcctttgccatctgcacatacgcatctagactcttctcggcctttgctcgcttctgctttctgtactccttgatttcttctggtttcatgctggtatgactcctgtctgaaatgtaacggaaatcacaagctgctgcagagtgcaagttaagaaaactgtgacagatgcaacgaattccgagccgtacgtgctaggggggtgtaaaacgaatgcaattgctttcgaaattcagatacagagacatgtttcctagttctaaaaatatcttagagctaag

SEQ ID NO: 44166 - DNA, 586 bp, Zea Mays
catggggctgggtggttgttgtttgcctctttagctcttgactcttgtaaaaatcagatcccaccctcaccaccgccagcgggatagccactgctgtcgcgctcctcggttatccctggcggtgagccggtgaccgagtttgcaattccaccctcagcatctttgctagcggtgaggctgccattgttgctcgcttgacgacgctcttcaaggaaacacatggtacatgggcaagttcgtcgtgcggcaacccgcgaagctgggcaacagatcgccatcgcatccaccatggtaggtcttgtggagtgcaaggtgtacgcgtacaaggtcggtctggatgtgatcaagttgctggagcgcatgcagattcgacaagaggtatacgaaatcttgagtgagttgtacatccatttggaagtagcaaagaagcaactcctgatgatgcaactttcgaatatattggttcctgattattgtttctcgtcatggatttattgcgttcattgaactagaaaattgcatcgcagtgtctacatttgtattctagtttaccaaggtatgttctgtcagtgtatgattctttcag

SEQ ID NO: 44167 - DNA, 723 bp, Zea Mays
catggggctgggtggttgttgtttgcctctttagctcttgactcttgtaaaaatcagatcccaccctcaccaccgccagcgggatagccactgctgtcgcgctcctcggttatccctggcggtgagccggtgaccgagtttgcaattccaccctcagcatctttgctagcggtgaggctgccattgttgctcgcttgacgacgctcttcaaggaaacacatggtacatgggcaagttcgtcgtgcggcaacccgcgaagctgggcaacagatcgccatcgcatccaccatggtaggtcttgtggagtgcaaggtgtacgcgtacaaggtcggtctggatgtgatcaagttgctggagcgcatgcagattcgacaagagtttcgccctattcacccccccctctaggcgactatcacctctccacatcaagcactgcgcatgaggatcggtcttctccacgtgaccatgttgagcactgcgccggacattgccagctcgcccagcaggtctaattttatattgctcgctgtatgccttaatgcatgtgttagatttgatttgctggacaaattttgtatggttgtatgtttttatcatacttaaatttggtggacaattttgctggacaaatatttgaatttggcggatttaaaaatattgtatgtgtagtggatatcccttacctgtgggtaatggatgtggatactgtttttttatccatag

SEQ ID NO: 44168 - DNA, 803 bp, Zea Mays
catggggctgggtggttgttgtttgcctctttagctcttgactcttgtaaaaatcagatcccaccctcaccaccgccagcgggatagccactgctgtcgcgctcctcggttatccctggcggtgagccggtgaccgagtttgcaattccaccctcagcatctttgctagcggtgaggctgccattgttgctcgcttgacgacgctcttcaaggaaacacatggtacatgggcaagttcgtcgtgcggcaacccgcgaagctgggcaacagatcgccatcgcatccaccatggtaggtcttgtggagtgcaaggtgtacgcgtacaaggtcggtctggatgtgatcaagttgctggagcgcatgcagattcgacaagaggtagatttaaggtttttctttatctgcttcttttttcaccaaaccagattgatttcttgtatacttgattgaacctttacaaaaagaaattaaagcaaagtccccccctatttgttaagtgtataaaagggtttcttttttgatatatagttatgtctacagctggaaacattggttagtcctatgtaccggtggcaatggatgtgatttatttttgtacccgcggataaaaaatctgttggacacggtttcggatacgagtctgtacatggatacagatacgagtagcagcatttgatatccatagatatttataaaactggtatgaaaaatcagtatccatatccaaatactcgaatatccgtttaagtaacctaacaagtgggtcgctagggtttagaaccaattcacagaccatagatagt

SEQ ID NO: 44169 - DNA, 3729 bp, Zea Mays
ctctccgacccctcacccctccagattcctcccgcctacgctcgcgggcctctcctgcccgcccgatttcgcctcgaagctcgtcgtcgcgggtgtgctttttcttcgtgccgatttgctgcgcctcgtcgccggcgacctcggcgcttgcaggcggccaggtgcagcaggacaggtctgcttccacagacttcttcgttgtttcgcaggtggcgcccacctccaccttctcttctctgccgccgccctgctctagtggttccggacctggggtggagcggagatccacccgggcttcgattgctttcgtcgtcttgttggctttggggtggagacgacactaagttggaatttttatcacacaaggaagcaagaacaggaaaaattcacatttcagtgttgcactctgtggagggttcattgtcagttcaccaaaatactacagtactggagggtttttgttgaagtgctcctcatgttcaccatctctaaattgtcataggctcagtctgcatgatcttgctatgagtgcatagataaatcatctccgtatctgtgttcagtatgccaccatggtggggaaaatcttcatccaaagaagtgaagaagactgccaaagaaaacctcattgacacatttcagcgtctcataagttcaaatgaacaaaagggaagcaaaaaatcacgaggtagtcgtagacatggtaaagacacagctggtgacaaaggttgctggtctactgcccaatcccgctcaacatccccttcaaaagaagtctctcggtgtcagagctttgcagcagatagaccacatgcacaaccacttcctcttcctaaatcacgtgctagggtgtcgcgttcttcttctgatattaccaactcaaagtccactttggaaaagcatggaaaaggacaactgcttccactccccccaattcagcctaaaaaaacacctgaggctactgaacctgttactgaagtagctactgcttctgtctccagcaactgttctattgatagtgatgatcctggtgattctcggcttcagatccctgtgggaaatgagactgaaaatgcgactagaatcactgcaacaagtagttcaagtgttgtgcacaaagagcgttctagtgccatcaccagaaagaacaccaaggaagttgcaaagccaaacaatgtttttctcagtaaccaaatcctgtcaacatctccaagaggtaccgttgctgatggttatcaatccaatttacagagcccccgacagattgccctggagagtgctccgaatagtttgatgtcaagcccttctcgaagcccaagaattatatgtcctgatcagattccaacttcagctttttgggcagtaaagcctcatactgacgtaactttccttgggtctggtcaatgctccagtccaggttctggtcagacatctgggcataattcagtgggaggagatatgttaggcccgatcttttggcagcctagccgaggtagcccagagtgttcaccaattccaagcccaagaatgacaagtcctggtccaagttctagggtgcatagtggaagtgtctctcctttgcatccaagagctggaggggtcactcctgagtctccaacaaatcgacatgctgaagggaacaagaagcaaacccacagattgccacttccaccattaagcattgctaatagttctacctttttgccaaacagctctaccccagctagccctatatctcgtagtcctggtagaacagagaatccaccgagtcctggttcacggtggaagaagggaaaactgattggccgtgggacatttggccatgtatatgctggttttaacagtgacaaaggtgaaatgtgtgcgatgaaggaggttactcttttctcagatgatcctaaatcaaaagaaagtgcaaaacagctgtgccaggaaatatcacttctgagccgactgcagcacccaaacattgtgcgatactatggatctgaaactgttgatgataagctttacatatacctggagtatgtttctggtggatctatacataagcttctccaagagtatggtcagtttggtgaacaggccattcgcagttatactaaacaaatacttttgggcctagcttttttgcatgcaaagaatacagtacacagagacatcaaaggtgcaaacatattggtagaccctaatggccgtgtaaagcttgctgactttgggatggcaaaacatatcaatgggcagcagtgccctttctcatttaagggtagcccatactggatggctcctgaggttataaaaaatgctagtggatgtaaccttgcagttgatatatggagtttaggatgcacagtcctagagatggctacttcaaaaccaccatggagccaatatgaagggattgccgcaatgtttaagataggaaacagtaaggagcttccgccaataccggatcacctctcagaagagggtaaagacttcataagacagtgcttacaacgtgatccatccagccgtccaacagcagtggatcttttgcagcatccatttgtaggaaatgcaccaccacttgaaaaatcatctgcctctaatccactggaacagttgacgactatatcatgcagaacaaattggaaggtggttgagcatgccagaaatatgtcctcgcttggtttggaaggccgataccaatcaattttgcagagaagagctgccaaattttctttgccaaatagtgatatccgtatacagagtaatatatcttgtcccgtatctccatgtggaagtcctcttctaagatcaagatctccacaacatcaaaatggtagaatgtcgccttctccaatttctagccccagaactacttcgggtgcttcaactcctctgactggtggtagtggagctgttcctttaaaccacctgaggcaaccagcttacagaaacgagggcttcacagtcacatcaagaggttttgatgaccacatacctagccggcttgttgatccagtacatggacgttttattcgggtgcagcaactttctgcgggtcgtcaggagagggtggtctctgaagctgacattctgagctctcaatttggaaagatgagacatgcaaacgtgtgggatccgcatgatagaccgttgccttctgagagatcctctcagcagtgttttggggatcatgcgaagctaaaaccttcgctggacttgaggtctggccctctgcaccctgggcgcaaccatggccattgattctctaagcaaaagttaatggagtcgtgtctatgtgatagctagtggtcctaagctggttcactgaaacctttaattgtatcatagaagaagacatgttcgttaattatttcagttgctgacagttggcagtggataaagattctccaatgtcaatcccatattcccattactctaaaaaagatgagacatgccctaccaggaagaggggatgttgtatactagactgtccagataccgaagggaccccaaagcagtgactcttgaacctgtatactcttttactctcgtcgtgccgacaacaatttagttctcgttttcttatgggtttggaaggccattgtacagagggggggaactctcaacaagaaaaatccagattagaaggcacaggagaaagcaagacactgatgagtgactcgaggaggtgcttctggaatggaattattacggaagaggaggtggcgagcacgggag

SEQ ID NO: 44170 - DNA, 3818 bp, Zea Mays
ccgccccccgcatcctgcattaccccccttgcgcgtccctctccgacccctcacccctccagattcctcccgcctacgctcgcgggcctctcctgcccgcccgatttcgcctcgaagctcgtcgtcgcgggtgtgctttttcttcgtgccgatttgctgcgcctcgtcgccggcgacctcggcgcttgcaggcggccaggtgcagcaggacaggtctgcttccacagacttcttcgttgtttcgcaggtggcgcccacctccaccttctcttctctgccgccgccctgctctagtggttccggacctggggtggagcggagatccacccgggcttcgattgctttcgtcgtcttgttggctttggggtggagacgacactaagttggaatttttatcacacaaggaagcaagaacaggaaaaattcacatttcagtgttgcactctgtggagggttcattgtcagttcaccaaaatactacagtactggagggtttttgttgaagtgctcctcatgttcaccatctctaaattgtcataggctcagtctgcatgatcttgctatgagtgcatagataaatcatctccgtatctgtgttcagtatgccaccatggtggggaaaatcttcatccaaagaagtgaagaagactgccaaagaaaacctcattgacacatttcagcgtctcataagttcaaatgaacaaaagggaagcaaaaaatcacgaggtagtcgtagacatggtaaagacacagctggtgacaaaggttgctggtctactgcccaatcccgctcaacatccccttcaaaagaagtctctcggtgtcagagctttgcagcagatagaccacatgcacaaccacttcctcttcctaaatcacgtgctagggtgtcgcgttcttcttctgatattaccaactcaaagtccactttggaaaagcatggaaaaggacaactgcttccactccccccaattcagcctaaaaaaacacctgaggctactgaacctgttactgaagtagctactgcttctgtctccagcaactgttctattgatagtgatgatcctggtgattctcggcttcagatccctgtgggaaatgagactgaaaatgcgactagaatcactgcaacaagtagttcaagtgttgtgcacaaagagcgttctagtgccatcaccagaaagaacaccaaggaagttgcaaagccaaacaatgtttttctcagtaaccaaatcctgtcaacatctccaagaggtaccgttgctgatggttatcaatccaatttacagagcccccgacagattgccctggagagtgctccgaatagtttgatgtcaagcccttctcgaagcccaagaattatatgtcctgatcagattccaacttcagctttttgggcagtaaagcctcatactgacgtaactttccttgggtctggtcaatgctccagtccaggttctggtcagacatctgggcataattcagtgggaggagatatgttaggcccgatcttttggcagcctagccgaggtagcccagagtgttcaccaattccaagcccaagaatgacaagtcctggtccaagttctagggtgcatagtggaagtgtctctcctttgcatccaagagctggaggggtcactcctgagtctccaacaaatcgacatgctgaagggaacaagaagcaaacccacagattgccacttccaccattaagcattgctaatagttctacctttttgccaaacagctctaccccagctagccctatatctcgtagtcctggtagaacagagaatccaccgagtcctggttcacggtggaagaagggaaaactgattggccgtgggacatttggccatgtatatgctggttttaacagtgacaaaggtgaaatgtgtgcgatgaaggaggttactcttttctcagatgatcctaaatcaaaagaaagtgcaaaacagctgtgccaggaaatatcacttctgagccgactgcagcacccaaacattgtgcgatactatggatctgaaactgttgatgataagctttacatatacctggagtatgtttctggtggatctatacataagcttctccaagagtatggtcagtttggtgaacaggccattcgcagttatactaaacaaatacttttgggcctagcttttttgcatgcaaagaatacagtacacagagacatcaaaggtgcaaacatattggtagaccctaatggccgtgtaaagcttgctgactttgggatggcaaaacatatcaatgggcagcagtgccctttctcatttaagggtagcccatactggatggctcctgaggttataaaaaatgctagtggatgtaaccttgcagttgatatatggagtttaggatgcacagtcctagagatggctacttcaaaaccaccatggagccaatatgaagggattgccgcaatgtttaagataggaaacagtaaggagcttccgccaataccggatcacctctcagaagagggtaaagacttcataagacagtgcttacaacgtgatccatccagccgtccaacagcagtggatcttttgcagcatccatttgtaggaaatgcaccaccacttgaaaaatcatctgcctctaatccactggaacagttgacgactatatcatgcagaacaaattggaaggtggttgagcatgccagaaatatgtcctcgcttggtttggaaggccgataccaatcaattttgcagagaagagctgccaaattttctttgccaaatagtgatatccgtatacagagtaatatatcttgtcccgtatctccatgtggaagtcctcttctaagatcaagatctccacaacatcaaaatggtagaatgtcgccttctccaatttctagccccagaactacttcgggtgcttcaactcctctgactggtggtagtggagctgttcctttaaaccacctgaggcaaccagcttacagaaacgagggcttcacagtcacatcaagaggttttgatgaccacatacctagccggcttgttgatccagtacatggacgttttattcgggtgcagcaactttctgcgggtcgtcaggagagggtggtctctgaagctgacattctgagctctcaatttggaaagatgagacatgcaaacgtgtgggatccgcatgatagaccgttgccttctgagagatcctctcagcagtgttttggggatcatgcgaagctaaaaccttcgctggacttgaggtctggccctctgcaccctgggcgcaaccatggccattgattctctaagcaaaagttaatggagtcgtgtctatgtgatagctagtggtcctaagctggttcactgaaacctttaattgtatcatagaagaagacatgttcgttaattatttcagttgctgacagttggcagtggataaagattctccaatgtcaatcccatattcccattactctaaaaaagatgagacatgccctaccaggaagaggggatgttgtatactagactgtccagataccgaagggaccccaaagcagtgactcttgaacctagggggggaactctcaacaagaaaaatccagattagaaggcacaggagaaagcaagtgagccattcaccaaccttttttcccttttttttttcttttcaagtcttagcagatacatatatgccggctgctcgctgtaaagtgctgattcagctgtggctgtgataccggttcaatccgttaaacgtgtccgttactctgggaaaaatcatgtgaagagtctaatcgttaatcgaattaactggtgcagttcgaaacc

SEQ ID NO: 44171 - DNA, 505 bp, Zea Mays
gccctcccaacccctaccgaagatctgccctccatagattccagcttttgctggatacaagatttccggcttgttgagaggagcatttttcagtggtggctcagagggtgaagttgaagatgagaagacccgaaagaaaagggagaagatggagaagaaggcatctagggggaagatgatcaaaactaggactcgctgatgtgacatctgtggcctgttgcttgaaagttaggttaggttggtttatcatagctgtccgaccgagttccaaactgtttgtcaatatttatatcgtgaatttgttatagcgttcagcgacaacttgtttgaacttttaaacagctagtattatgtaggaaaaatgccagctaatctccaacatgtccgatcaataagaatttcatgtgtaatttctgacttttttacccataattcaaacatcaacattgtggcatagcaaatgggaaatcgtgacacacaatagtgtacttttcacagaaagctt

SEQ ID NO: 44172 - DNA, 793 bp, Zea Mays
cccgccttcaatctccctcccctcccctccgtcgggctttgcgcgggttatttacatagtggtgaggatggctataatgcattcatccttcacctggaagcattggattggccttatggtaacatcggccggatattttcttccatataagcaactcgccagtatggcaaagccagtttactctgataacggagaactactggatggtggcttcgatttgagcactggtggggtttgcgagtatttatatgatgtgatctacatcactgtctttgtgcaattgatgtctatcatttctgaaaaattttggtggacatatttagtgattccagcttttgctggatacaagatttccggcttgttgagaggagcatttttcagtggtggctcagagggtgaagttgaagatgagaagacccgaaagaaaagggagaagatggagaagaaggcatctagggggaagatgatcaaaactaggactcgctgatgtgacatctgtggcctgttgcttgaaagttaggttaggttggtttatcatagctgtccgaccgagttccaaactgtttgtcaatatttatatcgtgaatttgttatagcgttcagcgacaacttgtttgaacttttaaacagctagtattatgtaggaaaaatgccagctaatctccaacatgtccgatcaataagaatttcatgtgtaatttctgacttttttacccataattcaaacatcaacattgtggcatagcaaatgggaaatcgtgacacacaatagtgtacttttcacagaaagctt

SEQ ID NO: 44173 - DNA, 1059 bp, Zea Mays
cggtaaaatcgaacggacgtgagcactcccgttctcttgcgcgatcgggctagcctccctctgcttcgttctctcccgcgtggtcggcggtccaacctccctctcctccatcccgccgccgtcgtgaggagcttcgtcgtcgttcgtgccgcacctcttctccttcctaaccaccccaccggtctgccttgtctgctccttccttcacgctagattagaggcagcaacacactattgggctccgccattcaacgacattcagcagcacgccactgtcgcctagggaaggagtagtaggagtcaacgacaacatgtatgagtaggctccagtgccaggcttccatttaaggctggctctgccactggggaaaggtgcggaggcaggaggagcagcacactactgctattggtgtaatcatgcagtgtgtttgcacaaagactttgagaactgaagcataggaaagtaggccagcagaagtgtaggtcatggacaagaaggcaagcagtgcaaaaccttgtggtcgactgtgtcaatggacaccaactcagtccacatttgtgctcatctttcttagcaattgttactgatggaattaagacctccactggcttcaagaaagttcatctcaatgcttgtgctaaggctctcaacaacaactttaagctcacaaagacaagtgatcaagttgctaatcacttgaagacatggaagaagtacatcacgataaactatcttaagaatttgactgctgctctttggaatgaaaatgaattcattgtttctcaagatcatgagcactacaaaggacatatggcagcatgaattttactatttttgtatttaataagcgtagatcaagagtaaattaagttattaattggttccttatgattacttcaatatgttttcgtttggctatcattgtagtttgtgttgagtaattcaatgtcgtaaaataagtaattcattgtagtttgtgttgattacttcaatatgttggctaccgtttttagctacaatctatgttccttgaaccacacttctaatacactctcctg

SEQ ID NO: 44174 - DNA, 1255 bp, Zea Mays
atcttgtaatttcttagaactcatgatatccaataagagtgtgtttgtttggagagcagaagagagtggagccgctcggctcatattttctagtgtttggttacgagtcgaccaagagcacagcgattcttagaatctcaagatgccaaaatacgttcgattcccaggatgagcccgctcggtaaaatcgaacggacgtgagcactcccgttctcttgcgcgatcgggctagcctccctctgcttcgttctctcccgcgtggtcggcggtccaacctccctctcctccatcccgccgccgtcgtgaggagcttcgtcgtcgttcgtgccgcacctcttctccttcctaaccaccccaccggtctgccttgtctgctccttccttcacgctagattagaggcagcaacacactattgggctccgccattcaacgacattcagcagcacgccactgtcgcctagggaaggagtagtaggagtcaacgacaacatgtatgagtaggctccagtgccaggcttccatttaaggctggctctgccactggggaaaggtgcggaggcaggaggagcagcacactactgctattgtcttatttgtgaagcaggtgtaatcatgcagtgtgtttgcacaaagactttgagaactgaagcataggaaagtaggccagcagaagtgtaggtcatggacaagaaggcaagcagtgcaaaaccttgtggtcgactgtgtcaatggacaccaactcagtccacatttgtgctcatctttcttagcaattgttactgatggaattaagacctccactggcttcaagaaagttcatctcaatgcttgtgctaaggctctcaacaacaactttaagctcacaaagacaagtgatcaagttgctaatcacttgaagacatggaagaagtacatcacgataaactatcttaagaatttgactgctgctctttggaatgaaaatgaattcattgtttctcaagatcatgagcactacaaaggacatatggcagcatgaattttactatttttgtatttaataagcgtagatcaagagtaaattaagttattaattggttccttatgattacttcaatatgttttcgtttggctatcattgtagtttgtgttgagtaattcaatgtcgtaaaataagtaattcattgtagtttgtgttgattacttcaatatgttggctaccgtttttagctacaatctatgttccttgaaccacacttctaatacactctcctg

SEQ ID NO: 44175 - DNA, 1459 bp, Zea Mays
atttaattaaatatattgattaagagatatatttgaacagagtgtatataaacaatatacaatttgtttatggtggacaactcacagcagtttgaatcaaatgacttttaacttttttcacatcagttttttcgctataagcaaatgacttttaactttttttcacagtagatagctcacaacagttttttcaccgctcatagctaaatcaaacacattcttaatcttgtaatttcttagaactcatgatatccaataagagtgtgtttgtttggagagcagaagagagtggagccgctcggctcatattttctagtgtttggttacgagtcgaccaagagcacagcgattcttagaatctcaagatgccaaaatacgttcgattcccaggatgagcccgctcggtaaaatcgaacggacgtgagcactcccgttctcttgcgcgatcgggctagcctccctctgcttcgttctctcccgcgtggtcggcggtccaacctccctctcctccatcccgccgccgtcgtgaggagcttcgtcgtcgttcgtgccgcacctcttctccttcctaaccaccccaccggtctgccttgtctgctccttccttcacgctagattagaggcagcaacacactattgggctccgccattcaacgacattcagcagcacgccactgtcgcctagggaaggagtagtaggagtcaacgacaacatgtatgagtaggctccagtgccaggcttccatttaaggctggctctgccactggggaaaggtgcggaggcaggaggagcagcacactactgctattgtcttatttgtgaagcaggtgtaatcatgcagtgtgtttgcacaaagactttgagaactgaagcataggaaagtaggccagcagaaggcaagttctacctaattgacgccaaatatggagctaaaccaggatttttgcctgcttttcgtggtgtacgataccacttgaatgagtgggggcaacaatcttgttcaaaatgagaaggaattattcaatcataggcactcatctctaagagtttcagtagagtggacattttattcattgaagcgaagatttaaaattcttgatgatgctacaccattctttcccttctctacaaaagtagaaattgtggttgcgtgttgtattattcacaactgggttatacaagatggaggagatgaatttaccattcctgagagtgagaaattgcctaccattaatcatcaaacatcttcgcatggacaagcaatgaaacatgccattatggttaatctcaggcaggaactagctaatgctatgtgggaagactataatgcaaacactatttgattgttatttattttccattgttatgtgacaagatgtatggacatgtatcttttattcgtatggacatgtatcttcctgaaatttggacatatatcttgctgaaattgggacatat

SEQ ID NO: 44176 - DNA, 1442 bp, Zea Mays
atttaattaaatatattgattaagagatatatttgaacagagtgtatataaacaatatacaatttgtttatggtggacaactcacagcagtttgaatcaaatgacttttaacttttttcacatcagttttttcgctataagcaaatgacttttaactttttttcacagtagatagctcacaacagttttttcaccgctcatagctaaatcaaacacattcttaatcttgtaatttcttagaactcatgatatccaataagagtgtgtttgtttggagagcagaagagagtggagccgctcggctcatattttctagtgtttggttacgagtcgaccaagagcacagcgattcttagaatctcaagatgccaaaatacgttcgattcccaggatgagcccgctcggtaaaatcgaacggacgtgagcactcccgttctcttgcgcgatcgggctagcctccctctgcttcgttctctcccgcgtggtcggcggtccaacctccctctcctccatcccgccgccgtcgtgaggagcttcgtcgtcgttcgtgccgcacctcttctccttcctaaccaccccaccggtctgccttgtctgctccttccttcacgctagattagaggcagcaacacactattgggctccgccattcaacgacattcagcagcacgccactgtcgcctagggaaggagtagtaggagtcaacgacaacatgtatgagtaggctccagtgccaggcttccatttaaggctggctctgccactggggaaaggtgcggaggcaggaggagcagcacactactgctattggtgtaatcatgcagtgtgtttgcacaaagactttgagaactgaagcataggaaagtaggccagcagaaggcaagttctacctaattgacgccaaatatggagctaaaccaggatttttgcctgcttttcgtggtgtacgataccacttgaatgagtgggggcaacaatcttgttcaaaatgagaaggaattattcaatcataggcactcatctctaagagtttcagtagagtggacattttattcattgaagcgaagatttaaaattcttgatgatgctacaccattctttcccttctctacaaaagtagaaattgtggttgcgtgttgtattattcacaactgggttatacaagatggaggagatgaatttaccattcctgagagtgagaaattgcctaccattaatcatcaaacatcttcgcatggacaagcaatgaaacatgccattatggttaatctcaggcaggaactagctaatgctatgtgggaagactataatgcaaacactatttgattgttatttattttccattgttatgtgacaagatgtatggacatgtatcttttattcgtatggacatgtatcttcctgaaatttggacatatatcttgctgaaattgggacatat

SEQ ID NO: 44177 - DNA, 571 bp, Zea Mays
gccgctttctccgcctccactcgcgggcctcctcccgggctgcccctcctccgcccccgcggccccgcccccgtcctctcctcggcgcgacaccgttgccgcccccagacccttccccgttgctggttgctgtctctcccgcacgcagccttgtgaacaagccccagcgggccgagcagacgaggagcaaaggagcgagcggagagagaggagtaggcagcggccgtcgacagcacctggcggaaaggcggcggagcagacgcacatcccagcggtggtgcggtagtaagttgcttgctgggaggtttcacatggattgaccattacttggcattaagttgttcttcaatggcgtatttcatggatttacgggctttcatcctgcgtacacatgtcttgaagctttatagacaggcattgcgtatcactcaccgagccccggtacatgctcgagatgagttgaggcagaccgcaagggccgagtttgagaaatatcgccattgtgatgacaaacaaaagattaggtttttgattagtgaagggaagcagagactaaaaggtgtaatcatgc

SEQ ID NO: 44178 - DNA, 755 bp, Zea Mays
gccgctttctccgcctccactcgcgggcctcctcccgggctgcccctcctccgcccccgcggccccgcccccgtcctctcctcggcgcgacaccgttgccgcccccagacccttccccgttgctggttgctgtctctcccgcacgcagccttgtgaacaagccccagcgggccgagcagacgaggagcaaaggagcgagcggagagagaggagtaggcagcggccgtcgacagcacctggcggaaaggcggcggagcagacgcacatcccagcggtggtgcggtacttgctgggaggtttcacatggattgaccattacttggcattaagttgttcttcaatggcgtatttcatggatttacgggctttcatcctgcgtacacatgtcttgaagctttatagacaggcattgcgtatcactcaccgagccccggtacatgctcgagatgagttgaggcagaccgcaagggccgagtttgagaaatatcgccattgtgatgacaaacaaaagattaggtttttgattagtgaagggaagcagagactaaaaggtcttgatgaactgcttgacatgacagggaacagctaatctgagttgcatctttgtctttgcttctgcaatcagctcgctccagaaaccattcctgatatgtaaacaactacattgtttgaaaaaaaaatgttttgataaggaacaacactatatgaacaattttttgtgccttttttataataatataatgtgaatgttttcc

SEQ ID NO: 44179 - DNA, 1094 bp, Zea Mays
gtattaaagaaaataaaaaccgatggccgcttgtagtttgggcttttcgctcggctttttggactgctgtaatccatagctatagctttgccgccatgctgtggctgccgtggattctgtacgtactgcgctgtatagggatttcgaatcaaaaaaataaggagagcagatacataaacctactagcgcactagctagctagctagcgcctgccatcgtcgctttctgttacgcgctgatggactttatttggagttcacaagtagtacaaaaggcgttgtagtatcgcatgatcttagttttctacgatcttttaggtagcctctgggtttaaagcgtatataaaaaatgggttcgctggaaatgtctttctgtcagaatcatgtatattctcctattcctactccgcatcattgcatgtgctaattcggtatgcttcacgcctacacggcctcgactagtcttgtgaatttgctatgtttttttcttcttctgtgaaaatggactgattcttgtgaaatgtctgtataatgtatgattcagcatgtgaaatgactctgtaacgagcctaaccagcgggctacagactggcagacctgtgaattcaagtttggcaaacacatcccatcctgaaccgcctcactagaacatcttctagaatttaaaatgtacataatataacttagaagtttcaatattgtaccagtttacttcagtctcttctaaactttcagtctcttctaaactttttttctggtttgtagcctccccgctatcaatctctgatagcaccatcaggcccgtcagacctccatcaatcactgcatgaagtcatgaaccaccgctctgctgccggccaagctctgagcagcgattcagtgagtgcccttgcgttgcaacggggcctctacattgtaaccttcaaatacaaggattttccacttgcaacggggtcagaagttccaatgtctaggaacaattcagaagaggcagaaatcaaaaagcgaattgagtccttcggaagggcaacaaattattggttaggttgcttggtgcttgtgaaattaatcgaaatgcaaaggacattgacttga

SEQ ID NO: 44180 - DNA, 1140 bp, Zea Mays
gtaagccaccctcacccgtgggagctccatcatcccgctgagcaagcaggtggagcagttcgcctccgtgcggcgcaacatctcgtcgcgcgtcggcaacgggtctgctgctgccgacgccctgctgtcgcggtccctgttcctcgtcagcaccggcggcaacgacctgttcgccttcttcgcgcggaacagcacgccgtcggacgccgacaagcggcggttcgtcgccaacctcgtcgcgctgtaccagaaccatgtgaaggctctgtacgtgctcggggctcggaagttcgccgtgatcgacgtcccgccggtcgggtgctgcccctacccgaggagcctgcacccgctgggcgcctgcatcgacgtgctcaacgagctggcgcgcgggttcaacgagggcgtcagggcggccatgcacggcctcggcgtgagcttccaggggctcaggtactccgtcgggagctcccacgccgtcgtgcagagcatcatgaagcaccctcaaaggctggggttcaaggacgtgacgaacgcgtgctgcgggtcgggccggttcaacggcaagtccgggtgcacgcccaacgcgacgctgtgcgacaaccgacaccagtacctgttctgggacctgctgcaccccacgcacgccgcctccaagatcgccgccgccgccatctacaacggctcgctccacttcgccgcgccgatgaacttcaggcagctggccgaagacgaccggtgctagctagctagcacagctagagctagcacgaggacgtagggacgtgtctctgttctctgctgcggactgtggtgaatatggtcgttggtgtgtagaggacgacggatgcgtgcatggctgctgtgttcgctgtatgtttctcgaccgtggtttggtttagatgatgatgaccgacgccgccggcgtagtttggactgtgaacgaatttacatcatgctgctgcagaggtacgggtgtaccgtgtacgtgacatcgtctacacctctcctggacaactttaactgaatctttttttacgcgtcctcgactaaaaattccggagagcgcgcccagaaatacctggtgtaggagccagtgagagcgtcacgctcacgccctttggatccgagcgcaggctctaa

SEQ ID NO: 44181 - DNA, 1595 bp, Zea Mays
ggcttgccacccctctctatcttctctctctctctctttaaagcgcggagccgtgccgatccatctcggctgaccctttctttcccaaagccgagcagcgaccagcgaccagcgagggtgccactcaccgcccgccccccagtaccccactcactagctagctagctagctgcgcactacgagtccggcgatcacagcccggcaggccggccatggccaccgtgcccgtcctagtcgtcctgcatgttctgctactcgctgctgcggccgcctgcgccgcggcgggggggagtagcagcaaggtgccggcgctctacgtgttcggcgactccacggcggacgtgggcacgaacaactacttgccgggcggcgccgaagtgccgcgtgccaacttcccccacaacggcgtcgacttccccacggcgcgccccaccggcaggttcagcaacgggtacaacggcgtcgacttcttgggggagctccatcatcccgctgagcaagcaggtggagcagttcgcctccgtgcggcgcaacatctcgtcgcgcgtcggcaacgggtctgctgctgccgacgccctgctgtcgcggtccctgttcctcgtcagcaccggcggcaacgacctgttcgccttcttcgcgcggaacagcacgccgtcggacgccgacaagcggcggttcgtcgccaacctcgtcgcgctgtaccagaaccatgtgaaggctctgtacgtgctcggggctcggaagttcgccgtgatcgacgtcccgccggtcgggtgctgcccctacccgaggagcctgcacccgctgggcgcctgcatcgacgtgctcaacgagctggcgcgcgggttcaacgagggcgtcagggcggccatgcacggcctcggcgtgagcttccaggggctcaggtactccgtcgggagctcccacgccgtcgtgcagagcatcatgaagcaccctcaaaggctggggttcaaggacgtgacgaacgcgtgctgcgggtcgggccggttcaacggcaagtccgggtgcacgcccaacgcgacgctgtgcgacaaccgacaccagtacctgttctgggacctgctgcaccccacgcacgccgcctccaagatcgccgccgccgccatctacaacggctcgctccacttcgccgcgccgatgaacttcaggcagctggccgaagacgaccggtgctagctagctagcacagctagagctagcacgaggacgtagggacgtgtctctgttctctgctgcggactgtggtgaatatggtcgttggtgtgtagaggacgacggatgcgtgcatggctgctgtgttcgctgtatgtttctcgaccgtggtttggtttagatgatgatgaccgacgccgccggcgtagtttggactgtgaacgaatttacatcatgctgctgcagaggtacgggtgtaccgtgtacgtgacatcgtctacacctctcctggacaactttaactgaatctttttttacgcgtcctcgactaaaaattccggagagcgcgcccagaaatacctggtgtaggagccagtgagagcgtcacgctcacgccctttggatccgagcgcaggctctaa

SEQ ID NO: 44182 - DNA, 464 bp, Zea Mays
ccgtgccgatccatctcggctgaccctttctttcccaaagccgagcagcgaccagcgaccagcgagggtgccactcaccgcccgccccccagtaccccactcactagctagctagctagctgcgcactacgagtccggcgatcacagcccggcaggccggccatggccaccgtgcccgtcctagtcgtcctgcatgttctgctactcgctgctgcggccgcctgcgccgcggcgggggggagtagcagcaaggtgccggcgctctacgtgttcggcgactccacggcggacgtgggcacgaacaactacttgccgggcggcgccgaagtgccgcgtgccaacttcccccacaacggcgtcgacttccccacggcgcgccccaccggcaggttcagcaacgggtacaacggcgtcgacttcttgggcttgtgcggagatgagagagaagacgtcgagaaagggag

SEQ ID NO: 44183 - DNA, 947 bp, Zea Mays
tttttcccaattcccaccacttgagcagaagctgcacaaccaagagccaacagagcaacgcccaggcacacacgacacgaaccaggcagctgcggagggaggaaccctagcggaacaggtgacggcggcgcgctaccggtgacgggggatacggcggcatcgtcccctcctccatccccggcgcggcggcgccagcagccggcctgcaggctgtttgaagagctcgccatttaatctcaatggaagccaagtttttccgtttcctgaagctcgttggggtcggcttcaaagcgaggtcagagagccaaggccgtgagttgttccttaaactgggcttcagccatgagggtgcaccagttcgccggcgccatccggagctctaaggctccagaggtgtacaaggggaaggggatcctgtacattgacgaggttatcaagctgaagcccggaaagaagcgaaaaaataagtgacgatccgaaggcgttacaactttgtctctgtcttttaaccccatgcttcgcatttgtagtgatctggatctggggtctgctgtgttgtgttgtgtacttgcgttgtgctacacagatcaccattatcttacctttacctcagctgcatgtaggaccatgagtgggaataagttaccagtttgttgatatgagctggaacgttgctttgcgaattggattggattaccgagtgggatgttttgtttcaaacttgaagtctttcaatagattgttgcaaatcaagtgtgaactgtgaacatgacccgagaactgaagctaggactgcttgggcacccaatacccaaatttaaaccattatccatcttattagatcgtatagataatttctatgtatatatctggccaaactatcctgtacggctgtacaaagtagccgctcatgaaaattgtactccagctgtttcaaaatataattg

SEQ ID NO: 44184 - DNA, 1043 bp, Zea Mays
cccgcacctaaggcgagtgggagaggccagcggcggctccaacagtggcgcagcggctcttccagcagcggcacgccacctcgtactcggcactgccatgactgtgataaatgcgtccttcaatttgatcatcactgcatatggcttggaacatgcattggcaaaaagaaccattgtcgtttttggtggtacatatctgaagaaacaatcttgtgtatctggactgctgttctctacattgagtcattgcgtttagatgtcgacaaggcctggtggaaggattttgtcggtgtgatcctgttggcagtgcttatctttatcctgatattcctactactattgtggttgtttcattcgtacattgctgtaacaaatcaaacaacctacgaagttgccagaaggaagcgaatattctacctaaggggagtacctgaaagagtccacccattcagtagaggcatatgcagaaatctctatgacttctgctgttctagccagaagggatatattctggaagctgtgcccccaagggaggagctggaagctagagctgctcgttacacgtgccgagacgtcatttgctgccgttgctgctgatagctgtactaccatagcattgtgcccatatagccagttccactgttctttgttcaaacctttcgttaatggaagcaaattttagtgacctgcggccgttagtgaactctcggagttcactatttgtgcatatgtcatttaaacagtgagaaaaatgtgtgccctttggtccagctgttcacagtttgtctgtaaaattctgtgtggccttgcatccaaataggttttcaggacaggtagaattgatctgcacattcgaggtctggttggtaatttcggaatttagtctaccgttttaaagcctttcttatttgtgttactagcgaaatattttatttatcttgataggtttttgtaacgttgtactgatacatcatgtggtactatttgcataatttgttgtttcggcattttagatgatgaatatagctgcaggctgtaaagca

SEQ ID NO: 44185 - DNA, 1582 bp, Zea Mays
gtctgccaggtaggacccgccggaacggatcccctgcttcttctaccgaaaatccgaaatcggcgccggtgaccttcccgtggcccttgtacaaaactgacccccgtcggagcaccgccatcggatgcgacggagacggcgtcaatggcgtcctcatctgctgtcgagcccagtttccgcctctctgatcgaggtcatcgctgggactcagattcacggtgctcctgatgcacgtcatgttcgttggcgctgtcttcatcctcgatccgactctcgactggcgaatccacgaggagccgtggtatatagggttgtatggagtgctggttctgctcacgctagtgcaatacttctacacagctggctcatctccagggtatgttattgatgtaatgagagctggttccatgatgcatgcaaccttcgtcaacactgctgctctttcaaagcagtcaaattcaagaaatggaaacacaaattctccaacgagtcatgctcaactacagaaacttagcgcgatgactcctacatcatgggcacagatggttgtggatctttatcctccagggtcaaacagcagggattggacttgcactcactgcagggttgttcagccacctcgtactcggcactgccatgactgtgataaatgcgtccttcaatttgatcatcactgcatatggcttggaacatgcattggcaaaaagaaccattgtcgtttttggtggtacatatctgaagaaacaatcttgtgtatctggactgctgttctctacattgagtcattgcgtttagatgtcgacaaggcctggtggaaggattttgtcggtgtgatcctgttggcagtgcttatctttatcctgatattcctactactattgtggttgtttcattcgtacattgctgtaacaaatcaaacaacctacgaagttgccagaaggaagcgaatattctacctaaggggagtacctgaaagagtccacccattcagtagaggcatatgcagaaatctctatgacttctgctgttctagccagaagggatatattctggaagctgtgcccccaagggaggagctggaagctagagctgctcgttacacgtgccgagacgtcatttgctgccgttgctgctgatagctgtactaccatagcattgtgcccatatagccagttccactgttctttgttcaaacctttcgttaatggaagcaaattttagtgacctgcggccgttagtgaactctcggagttcactatttgtgcatatgtcatttaaacagtgagaaaaatgtgtgccctttggtccagctgttcacagtttgtctgtaaaattctgtgtggccttgcatccaaataggttttcaggacaggtagaattgatctgcacattcgaggtctggttggtaatttcggaatttagtctaccgttttaaagcctttcttatttgtgttactagcgaaatattttatttatcttgataggtttttgtaacgttgtactgatacatcatgtggtactatttgcataatttgttgtttcggcattttagatgatgaatatagctgcaggctgtaaagca

SEQ ID NO: 44186 - DNA, 1585 bp, Zea Mays
gtctgccaggtaggacccgccggaacggatcccctgcttcttctaccgaaaatccgaaatcggcgccggtgaccttcccgtggcccttgtacaaaactgacccccgtcggagcaccgccatcggatgcgacggagacggcgtcaatggcgtcctcatctgctgtcgagcccagtttccgcctctctgatcgagagaggaggtcatcgctgggactcagattcacggtgctcctgatgcacgtcatgttcgttggcgctgtcttcatcctcgatccgactctcgactggcgaatccacgaggagccgtggtatatagggttgtatggagtgctggttctgctcacgctagtgcaatacttctacacagctggctcatctccagggtatgttattgatgtaatgagagctggttccatgatgcatgcaaccttcgtcaacactgctgctctttcaaatcaaattcaagaaatggaaacacaaattctccaacgagtcatgctcaactacagaaacttagcgcgatgactcctacatcatgggcacagatggttgtggatctttatcctccagggtcaaacagcagggattggacttgcactcactgcagggttgttcagccacctcgtactcggcactgccatgactgtgataaatgcgtccttcaatttgatcatcactgcatatggcttggaacatgcattggcaaaaagaaccattgtcgtttttggtggtacatatctgaagaaacaatcttgtgtatctggactgctgttctctacattgagtcattgcgtttagatgtcgacaaggcctggtggaaggattttgtcggtgtgatcctgttggcagtgcttatctttatcctgatattcctactactattgtggttgtttcattcgtacattgctgtaacaaatcaaacaacctacgaagttgccagaaggaagcgaatattctacctaaggggagtacctgaaagagtccacccattcagtagaggcatatgcagaaatctctatgacttctgctgttctagccagaagggatatattctggaagctgtgcccccaagggaggagctggaagctagagctgctcgttacacgtgccgagacgtcatttgctgccgttgctgctgatagctgtactaccatagcattgtgcccatatagccagttccactgttctttgttcaaacctttcgttaatggaagcaaattttagtgacctgcggccgttagtgaactctcggagttcactatttgtgcatatgtcatttaaacagtgagaaaaatgtgtgccctttggtccagctgttcacagtttgtctgtaaaattctgtgtggccttgcatccaaataggttttcaggacaggtagaattgatctgcacattcgaggtctggttggtaatttcggaatttagtctaccgttttaaagcctttcttatttgtgttactagcgaaatattttatttatcttgataggtttttgtaacgttgtactgatacatcatgtggtactatttgcataatttgttgtttcggcattttagatgatgaatatagctgcaggctgtaaagca

SEQ ID NO: 44187 - DNA, 2564 bp, Zea Mays
gaacatccccacgcaaggcccaagcgcccaactatcatttctccctctctcccacctttccctccccaccaccacctacctacctctttattcgccgtcgcctaccacctccccctcctctccgtgcagacctccgctccgcaccaccaatccgtcgtaaccctagcccagcctggtctcggctggccccgctccgttcatgtgcggcaccaccgcctccccgtgttcgtagtagccgccgcggggaatttccctcccatgggttccgcatacgcccctgagaggacgccgatcgagggagaatgaggtgctgcatctgccgcgtatcctccgccgggtgccgggccatgggcgttgcgggacgggcgaacccgacgtcgtcgctgcgcagccgacgctgcctccgcatgcggccgtcgtacgccccgttctccgagcccttcactgaacgcccggcacccgccgccccgtcctccccttcatcccccgctgctgcgcctagggcgtaggagccgcgggcggaccgccgatatctccgtcgatctcgctggctcctctctctctctgcttcctctctctctccctctcgctcgtagagtcagttgattgtcggggctgatccggaatggaggtgtttggttgtggggatggggtggtcgatgctgaattcgcggaagtagatccaactgggcgatacatgcgctataatttgattttggggaggggagctttcaagactgtttacaaggcatttgatgaggtcgaaggtattgaagttgcatggaatcaaatcaacgtagatgaggtgatgcagtgtccagataatctagacaggctctacagagaagttcatcttttgaagtctctcaagcatggaaatgttatgaagttttattattcgtggattgatgaccagaataagactattaatgtcatcacagagctgttcacgtctggaagtctcaggctttaccgtcagaaacatccacatgttaacttgaaggcaataaagaattgggcaaggcagattcttcatgggttggattacctgcatagccaccaacctccaattatccatagagacttgaagtgtgataatatttttgttaacggaaaccatggggaagttaagattggagatcttggactagctacggtactccagaattcatggcacctgaactttatgatgaaagttatgatgaactagttgatatatactcatttggaatgtgcttgttggagatctttactcttgaatatccatacagtgaatgtacaaatccagctcagatttttaaaaaagtatccacaggtgttaaacctgctgcattggctaagatttctgatcctcaagtaaagcagttcattgagaaatgtttagttcctgcttctgagaggtcgtctgccaaagaactcttgcaagacccatttctttgtcctgacaatgcacatgattctgctggcactaagtttacatctccagcacctaataaaacagtagatatggtgtctttgcatatggaagttgacacttttggatccagccctactaattcaggcaaggaaaatggttgtgttgctccacatacacctgtcctggagttcacaagaaccaacaaaaatacagagctaaagctgaagggtcatgcaagaaatattcatttcctcttctacttggactctgatacagctttgtctgtagctgctgaaatggttgaacaattggagttagcagactgcgatgttaccttcattgctgattttattgatcttttgatagtgaatcttattccgggttggagacctgtaaatgatgcggcaacaaactcgtatacgcaatctgaaagtgaacttgcaatcacttcccataacaatctatcgaagttggtgcctgattatgcattaattgatggtatgatgcatccaaaagatgtgaatgtatcaactggttttcttgattctgtatcaagtgcaactaatataggaggatcaccatgctctgaaggttcggtcatttctgtacagcgtgctgagagtttcaaaagtgtgagtgactatgagcctgaggattatggtactatggactgtggtgggtacaaagagggaatcagtaaagaaaattgcagccatgttgtagatgatggatcgaggttaattttccatacagatcaagatcacttctcttggagttggccaatggccagcagtgcttcgatcatctactcctgataatcaggatgtgctgaatggggagcttgtcttgattgaacctcagtttggttgagatgaattgacaagggtgcgagaagaggctatggaaggagctcgaaataagtgggttgccagataaatgatgtttttgttcaaatctggcatttcatctgaacaatcataagctatgttcgatttatgttagaagtgtaagaaactatactgatcttttttagttaaaacataatatataggtagattgtcgtgaaatcttgtttttttgcaatcgctgacaatcagactaataaaaagtcgtgaaaattatataaaaagttaaaatatatttaatt

SEQ ID NO: 44188 - DNA, 2621 bp, Zea Mays
gaacatccccacgcaaggcccaagcgcccaactatcatttctccctctctcccacctttccctccccaccaccacctacctacctctttattcgccgtcgcctaccacctccccctcctctccgtgcagacctccgctccgcaccaccaatccgtcgtaaccctagcccagcctggtctcggctggccccgctccgttcatgtgcggcaccaccgcctccccgtgttcgtagtagccgccgcggggaatttccctcccatgggttccgcatacgcccctgagaggacgccgatcgagggagaatgaggtgctgcatctgccgcgtatcctccgccgggtgccgggccatgggcgttgcgggacgggcgaacccgacgtcgtcgctgcgcagccgacgctgcctccgcatgcggccgtcgtacgccccgttctccgagcccttcactgaacgcccggcacccgccgccccgtcctccccttcatcccccgctgctgcgcctagggcgtaggagccgcgggcggaccgccgatatctccgtcgatctcgctggctcctctctctctctgcttcctctctctctccctctcgctcgtagagtcagttgattgtcggggctgatccggaatggaggtgtttggttgtggggatggggtggtcgatgctgaattcgcggaagtagatccaactgggcgatacatgcgctataatttgattttggggaggggagctttcaagactgtttacaaggcatttgatgaggtcgaaggtattgaagttgcatggaatcaaatcaacgtagatgaggtgatgcagtgtccagataatctagacaggctctacagagaagttcatcttttgaagtctctcaagcatggaaatgttatgaagttttattattcgtggattgatgaccagaataagactattaatgtcatcacagagctgttcacgtctggaagtctcaggctttaccgtcagaaacatccacatgttaacttgaaggcaataaagaattgggcaaggcagattcttcatgggttggattacctgcatagccaccaacctccaattatccatagagacttgaagtgtgataatatttttgttaacggaaaccatggggaagttaagattggagatcttggactagctacggtactccagaattcatggcacctgaactttatgatgaaagttatgatgaactagttgatatatactcatttggaatgtgcttgttggagatctttactcttgaatatccatacagtgaatgtacaaatccagctcagatttttaaaaaagtatccacaggtgttaaacctgctgcattggctaagatttctgatcctcaagtaaagcagttcattgagaaatgtttagttcctgcttctgagaggtcgtctgccaaagaactcttgcaagacccatttctttgtcctgacaatgcacatgattctgctggcactaagtttacatctccagcacctaataaaacagtagatatggtgtctttgcatatggaagttgacacttttggatccagccctactaattcaggcaaggaaaatggttgtgttgctccacatacacctgtcctggagttcacaagaaccaacaaaaatacagagctaaagctgaagggtgagaaacttgataacaactctgtctcactggttttgcgaatagctgatttgtctggtcatgcaagaaatattcatttcctcttctacttggactctgatacagctttgtctgtagctgctgaaatggttgaacaattggagttagcagactgcgatgttaccttcattgctgattttattgatcttttgatagtgaatcttattccgggttggagacctgtaaatgatgcggcaacaaactcgtatacgcaatctgaaagtgaacttgcaatcacttcccataacaatctatcgaagttggtgcctgattatgcattaattgatggtatgatgcatccaaaagatgtgaatgtatcaactggttttcttgattctgtatcaagtgcaactaatataggaggatcaccatgctctgaaggttcggtcatttctgtacagcgtgctgagagtttcaaaagtgtgagtgactatgagcctgaggattatggtactatggactgtggtgggtacaaagagggaatcagtaaagaaaattgcagccatgttgtagatgatggatcgaggttaattttccatacagatcaagatcacttctcttggagttggccaatggccagcagtgcttcgatcatctactcctgataatcaggatgtgctgaatggggagcttgtcttgattgaacctcagtttggttgagatgaattgacaagggtgcgagaagaggctatggaaggagctcgaaataagtgggttgccagataaatgatgtttttgttcaaatctggcatttcatctgaacaatcataagctatgttcgatttatgttagaagtgtaagaaactatactgatcttttttagttaaaacataatatataggtagattgtcgtgaaatcttgtttttttgcaatcgctgacaatcagactaataaaaagtcgtgaaaattatataaaaagttaaaatatatttaatt

SEQ ID NO: 44189 - DNA, 2599 bp, Zea Mays
agaacatccccacgcaaggcccaagcgcccaactatcatttctccctctctcccacctttccctccccaccaccacctacctacctctttattcgccgtcgcctaccacctccccctcctctccgtgcagacctccgctccgcaccaccaatccgtcgtaaccctagcccagcctggtctcggctggccccgctccgttcatgtgcggcaccaccgcctccccgtgttcgtagtagccgccgcggggaatttccctcccatgggttccgcatacgcccctgagaggacgccgatcgagggagaatgaggtgctgcatctgccgcgtatcctccgccgggtgccgggccatgggcgttgcgggacgggcgaacccgacgtcgtcgctgcgcagccgacgctgcctccgcatgcggccgtcgtacgccccgttctccgagcccttcactgaacgcccggcacccgccgccccgtcctccccttcatcccccgctgctgcgcctagggcgtaggagccgcgggcggaccgccgatatctccgtcgatctcgctggctcctctctctctctgcttcctctctctctccctctcgctcgtagagtcagttgattgtcggggctgatccggaatggaggtgtttggttgtggggatggggtggtcgatgctgaattcgcggaagtagatccaactgggcgatacatgcgctataatttgattttggggaggggagctttcaagactgtttacaaggcatttgatgaggtcgaaggtattgaagttgcatggaatcaaatcaacgtagatgaggtgatgcagtgtccagataatctagacaggctctacagagaagttcatcttttgaagtctctcaagcatggaaatgttatgaagttttattattcgtggattgatgaccagaataagactattaatgtcatcacagagctgttcacgtctggaagtctcaggctttaccgtcagaaacatccacatgttaacttgaaggcaataaagaattgggcaaggcagattcttcatgggttggattacctgcatagccaccaacctccaattatccatagagacttgaagtgtgataatatttttgttaacggaaaccatggggaagttaagattggagatcttggactagctacggtaatgcaaacacctagggctaggagtgttattggtactccagaattcatggcacctgaactttatgatgaaagttatgatgaactagttgatatatactcatttggaatgtgcttgttggagatctttactcttgaatatccatacagtgaatgtacaaatccagctcagatttttaaaaaagtatccacaggtgttaaacctgctgcattggctaagatttctgatcctcaagtaaagcagttcattgagaaatgtttagttcctgcttctgagaggtcgtctgccaaagaactcttgcaagacccatttctttgtcctgacaatgcacatgattctgctggcactaagtttacatctccagcacctaataaaacagtagatatggtgtctttgcatatggaagttgacacttttggatccagccctactaattcaggcaaggaaaatggttgtgttgctccacatacacctgtcctggagttcacaagaaccaacaaaaatacagagctaaagctgaagggtcatgcaagaaatattcatttcctcttctacttggactctgatacagctttgtctgtagctgctgaaatggttgaacaattggagttagcagactgcgatgttaccttcattgctgattttattgatcttttgatagtgaatcttattccgggttggagacctgtaaatgatgcggcaacaaactcgtatacgcaatctgaaagtgaacttgcaatcacttcccataacaatctatcgaagttggtgcctgattatgcattaattgatggtatgatgcatccaaaagatgtgaatgtatcaactggttttcttgattctgtatcaagtgcaactaatataggaggatcaccatgctctgaaggttcggtcatttctgtacagcgtgctgagagtttcaaaagtgtgagtgactatgagcctgaggattatggtactatggactgtggtgggtacaaagagggaatcagtaaagaaaattgcagccatgttgtagatgatggatcgaggttaattttccatacagatcaagatcacttctcttggagttggccaatggccagcagtgcttcgatcatctactcctgataatcaggatgtgctgaatggggagcttgtcttgattgaacctcagtttggttgagatgaattgacaagggtgcgagaagaggctatggaaggagctcgaaataagtgggttgccagataaatgatgtttttgttcaaatctggcatttcatctgaacaatcataagctatgttcgatttatgttagaagtgtaagaaactatactgatcttttttagttaaaacataatatataggtagattgtcgtgaaatcttgtttttttgcaatcgctgacaatcagactaataaaaagtcgtgaaaattatataaaaagttaaaatatatttaatt

SEQ ID NO: 44190 - DNA, 2561 bp, Zea Mays
agaacatccccacgcaaggcccaagcgcccaactatcatttctccctctctcccacctttccctccccaccaccacctacctacctctttattcgccgtcgcctaccacctccccctcctctccgtgcagacctccgctccgcaccaccaatccgtcgtaaccctagcccagcctggtctcggctggccccgctccgttcatgtgcggcaccaccgcctccccgtgttcgtagtagccgccgcggggaatttccctcccatgggttccgcatacgcccctgagaggacgccgatcgagggagaatgaggtgctgcatctgccgcgtatcctccgccgggtgccgggccatgggcgttgcgggacgggcgaacccgacgtcgtcgctgcgcagccgacgctgcctccgcatgcggccgtcgtacgccccgttctccgagcccttcactgaacgcccggcacccgccgccccgtcctccccttcatcccccgctgctgcgcctagggcgtaggagccgcgggcggaccgccgatatctccgtcgatctcgctggctcctctctctctctgcttcctctctctctccctctcgctcgtagagtcagttgattgtcggggctgatccggaatggaggtgtttggttgtggggatggggtggtcgatgctgaattcgcggaagtagatccaactgggcgatacatgcgcttacaaggcatttgatgaggtcgaaggtattgaagttgcatggaatcaaatcaacgtagatgaggtgatgcagtgtccagataatctagacaggctctacagagaagttcatcttttgaagtctctcaagcatggaaatgttatgaagttttattattcgtggattgatgaccagaataagactattaatgtcatcacagagctgttcacgtctggaagtctcaggctttaccgtcagaaacatccacatgttaacttgaaggcaataaagaattgggcaaggcagattcttcatgggttggattacctgcatagccaccaacctccaattatccatagagacttgaagtgtgataatatttttgttaacggaaaccatggggaagttaagattggagatcttggactagctacggtaatgcaaacacctagggctaggagtgttattggtactccagaattcatggcacctgaactttatgatgaaagttatgatgaactagttgatatatactcatttggaatgtgcttgttggagatctttactcttgaatatccatacagtgaatgtacaaatccagctcagatttttaaaaaagtatccacaggtgttaaacctgctgcattggctaagatttctgatcctcaagtaaagcagttcattgagaaatgtttagttcctgcttctgagaggtcgtctgccaaagaactcttgcaagacccatttctttgtcctgacaatgcacatgattctgctggcactaagtttacatctccagcacctaataaaacagtagatatggtgtctttgcatatggaagttgacacttttggatccagccctactaattcaggcaaggaaaatggttgtgttgctccacatacacctgtcctggagttcacaagaaccaacaaaaatacagagctaaagctgaagggtcatgcaagaaatattcatttcctcttctacttggactctgatacagctttgtctgtagctgctgaaatggttgaacaattggagttagcagactgcgatgttaccttcattgctgattttattgatcttttgatagtgaatcttattccgggttggagacctgtaaatgatgcggcaacaaactcgtatacgcaatctgaaagtgaacttgcaatcacttcccataacaatctatcgaagttggtgcctgattatgcattaattgatggtatgatgcatccaaaagatgtgaatgtatcaactggttttcttgattctgtatcaagtgcaactaatataggaggatcaccatgctctgaaggttcggtcatttctgtacagcgtgctgagagtttcaaaagtgtgagtgactatgagcctgaggattatggtactatggactgtggtgggtacaaagagggaatcagtaaagaaaattgcagccatgttgtagatgatggatcgaggttaattttccatacagatcaagatcacttctcttggagttggccaatggccagcagtgcttcgatcatctactcctgataatcaggatgtgctgaatggggagcttgtcttgattgaacctcagtttggttgagatgaattgacaagggtgcgagaagaggctatggaaggagctcgaaataagtgggttgccagataaatgatgtttttgttcaaatctggcatttcatctgaacaatcataagctatgttcgatttatgttagaagtgtaagaaactatactgatcttttttagttaaaacataatatataggtagattgtcgtgaaatcttgtttttttgcaatcgctgacaatcagactaataaaaagtcgtgaaaattatataaaaagttaaaatatatttaatt

SEQ ID NO: 44191 - DNA, 2734 bp, Zea Mays
atggatagacagaccatccgcggcgccgaggcagggacccgggcaagcatgagcgatcccggtgctttccccaataaatcctgcgcttttcgggaaagaaccctgaaccccagcgccgagaggaagaggagggatctcgtcgacacgccgtcgggaacgcgccccccgttccctcgccgctgccccgacacggtgccattctcgcccgaatcggcgaatccctcccaccgcttcgcctataaatctccccctctatggccctaatcctcccgtacaacagtgcccagtgcccaccgcggcagatcttcgatgcctccaagggcgatggaggaggacggcggctccggcagcgacagcatggagttcgtcgcgggagcggagactggcgctggtgtaggcacaagcgccggcaggaaccgcggtgtgggtgcaggaccagcgcaggcggtggcggcggcacgaagctgccgcatgtgctgcaaaagagtttcggcgaggtgcaagggattctggagcacaaccgcgtcctgatttaggagatcagctagaaccaggagacgcgcgacgcggacggcctcagccgcaacgtggcgctaatctgggagctcaacactaatatcgcccgcgtcgtggacatctacggcgacatgtcaggctccttcgcccgcgccgtcgccaccaagaaagacgccgcaggctacaagtcgggccctaaggggccatggcatccgagttggcgttggacggcggctgcgggatggggaacagcgaccctccgtcggctgtgagtgagcccatgagaccacccagagccccgccctgcaccgccccaacgaccgtggtcaccgcggcctcgatgtggatgggctgcttcgccatccatgcacggaacctggcctcaatcgcttttacgcggccgctccactcctctagagggttactaccgccgcgcaatccgcgagccatcggcactgacggcgaggtcttcaatgccacgaccgaattcccccttcccttgccgtccgccatctccttgcaacctcgcgtctgccactccctctcgagtctcgatggccactgtgccactcttcattatcccctcggaatcttcttcgcttaaccccttagcaaatcatcatgcggtcctcctcgcacggccggcccaacgtttcgtttcattaggcccagctagacggggggagcacgcggagagaagggcggggcagtctacactaacgtcttaatagttagtagagatttatttaaacatgatccaaaatcatatattcccctccaaaggaactcaaccgtggaacataacaaggtaaacacacaccagtagtcagcgcaccttcggatcgagccaaaccaatactgaactagacatgtggcgatgccatcgttgtcagtatggcggatcccacgatgcacctcacaaagatttgaatgcgtggcggcacgccactggagttggtatgattcaaagtgggactgtgtcggtccaaaacgagaaccctggagctgatatgacttagtgtgtgtgtatatataatatactaggtgtgtgcccgtgcgttgcaacgggagtacgctgggatgagcatcgacacatatctgatcgaatcttatatttccttggggtctggagaaagttcgctcggaagccaaacatgttaagacctgagcatgtgttacccttgtgcctcatcagcacactgttccgcgcttgtatgagtctaatttgcatgcctcgggcatagcctctcaccatctattcactataatatatagaatccgtgtgataaacattatcaatatcgcacaaactattttaaagagtcaatatagaatttttgataataggcaaatatgtcgacaatcgtacattaatctaatcctttttagcgatattgataagtctttgttgtatgtttgcagggttgacatagcgacatgaattgtcctcgtaacttaacagttcaatcacaaagttacttcgaaaaatctttgcatcctacacacaaagacataagagaacaaaacgtcaaatttatattatgtacctgaaatgtatgtttgaacatgaaacaaacgtactccactcaccctatcaaatttcattcgtctatcatttccccacatgaccatagattgtagaacgaagtagctggtattaacactatagaataatgtttgaccaactatattatatacatggttatcatagaaaaaatttaagctgttgagaacttggtattgagaaaatacccttttaagtcaattggaacaccagaccgaattgtatgttcccacttaaaaatatcctctacccatccagaatgtttcttgttgtaagcaatcttatatttctttgaggccctgataattgcttccgcaaacctcttgtatggcatgtgtttacaccaatcttagccattgatgcttcgtcccaaataatgagcgacgctttctgtagcaaagagcgacccatgctaacaaatagtcgagttctagtgatgactgcaactacagccactaagcttgctggtttgataagaatatatcaatgattgtgatgttttcagttatgcatgacattttcctgttttgcctttgtttttaactgctttgtattattagcatcttgtcagatgcacttggaagggagcttatgaagcatctcactataaactccagaactgaaatggagttttgattagtgtgcccaacagct

SEQ ID NO: 44192 - DNA, 1825 bp, Zea Mays
tttctcatatggaggagagtagtagctttactctctccacgccttgcatcaaaagagcggccatgtcttgggtgatggagtgattagaggtgctactacgccacaagcgcaaccctacaagagcacaaacaaagtggagttttacgtacgtggtgctgtgttgtgcttctctctcatcttttgcttgccctttttttcaccttttaatttgcctttcaatctcactttgtatccatttgtttggttcttttgttgcactgcgctgcagttgcgccataagaatccaaagagacctccacgctcataacccccctctgctaagactgctatgggccgctagggctaggcaagcccatggaggagatgctcatggctggaaacgccgcgaatccaaacccaccgccagctgctgcgccctcggcacccggggcccagacccagaggggtggtggcgctcctcctcccgctgcgggtgcggcagcgcctagggctggcgcgaccggaggggcggcgccggcgggcacggagcggcggccgcggccgcagaaggagaaggcgctcaactgcccgcggtgcaactccaccaacaccaagttctgctattacaacaactacagcctgcagcagccgcgctacttctgcaagacctgccgccgctactggaccgagggcggctcgctccgcaacgtcccggtgggcggcggctccaggaagaacaagcgcagctcgtcctcggccgcctcctccacctccgcggcgatgtccggcacggtctccgtgaagaaccccaagctggtgcacgagggcgcgcaccacgacctcaacctggctttccctcaccacaacaacggccgcgctctgcagccaccggagttcccgtcgtcgttcccgagcctggagagcagcagcgtgtgctaccccggacccgccatgctgggcaacggcgccgccggcaggggcatgggcgcgctctcggctatggagctgctcaggagcaccggctgctacgtccccctgcagcacgttcagctagggatgcccgccgagtacgcagcacccgcgggattcacgcttggcgagttccgcattcccccgccgccgccgccgcagtctcagagtgtgctcgggttctcgctggacacgcacggcacggggggttacagcgccggcgggttgcaggagagcgcggtgggcaggatgctcttccccttcgaggacttgaagccggcggtgaccacagctggcggcggtgcaagcaacgacggagctgatcatcgtcaaaacgaccacaggaaagatcaagctgcaggcgacggcagcagcgtcaccggtggccacgagactccagggttctggagcaatagcttgatcggaaatggcagcagcaatggtggtggaggcccttggtaaggcggcgcggcatgcatggctcatgcacgcgcgcgccgttgtcagcatgcggagatagggatagagtcatagagacaaggatccaagttatcaagagggtacggtggaggaggtgattagtgttcacatatatggcgtttgatttttctctggttgtttaatttttctcggatcttcgtgttcttgtgtgtaaatcgacttgggggggctaacacagcaggatatacagattgttaaggtggtgaaccggtgatttacagctagcttctcttatccaatggatctcttgtttctgattgtgcaatatataagcggtcaatcccgtgtcaatttgttgtgcattgcatgcatgcatgtagagtatgcatcagcatcactacttgagcagctctgttgcagctctgttgcagtgttg

SEQ ID NO: 44193 - DNA, 1761 bp, Zea Mays
aaggagcgcacacacacggccgggccgccccctttttttccccctccctttgttcctacctttctttctatcttatccatcccctcctttccgagctctctcttcccttttatccctcctttttctcatatggaggagagtagtagctttactctctccacgccttgcatcaaaagagcggccatgtcttgggtgatggagtgattagaggtgctactacgccacaagcgcaaccctacaagagcacaaacaaagtggagttttacgggccgctagggctaggcaagcccatggaggagatgctcatggctggaaacgccgcgaatccaaacccaccgccagctgctgcgccctcggcacccggggcccagacccagaggggtggtggcgctcctcctcccgctgcgggtgcggcagcgcctagggctggcgcgaccggaggggcggcgccggcgggcacggagcggcggccgcggccgcagaaggagaaggcgctcaactgcccgcggtgcaactccaccaacaccaagttctgctattacaacaactacagcctgcagcagccgcgctacttctgcaagacctgccgccgctactggaccgagggcggctcgctccgcaacgtcccggtgggcggcggctccaggaagaacaagcgcagctcgtcctcggccgcctcctccacctccgcggcgatgtccggcacggtctccgtgaagaaccccaagctggtgcacgagggcgcgcaccacgacctcaacctggctttccctcaccacaacaacggccgcgctctgcagccaccggagttcccgtcgtcgttcccgagcctggagagcagcagcgtgtgctaccccggacccgccatgctgggcaacggcgccgccggcaggggcatgggcgcgctctcggctatggagctgctcaggagcaccggctgctacgtccccctgcagcacgttcagctagggatgcccgccgagtacgcagcacccgcgggattcacgcttggcgagttccgcattcccccgccgccgccgccgcagtctcagagtgtgctcgggttctcgctggacacgcacggcacggggggttacagcgccggcgggttgcaggagagcgcggtgggcaggatgctcttccccttcgaggacttgaagccggcggtgaccacagctggcggcggtgcaagcaacgacggagctgatcatcgtcaaaacgaccacaggaaagatcaagctgcaggcgacggcagcagcgtcaccggtggccacgagactccagggttctggagcaatagcttgatcggaaatggcagcagcaatggtggtggaggcccttggtaaggcggcgcggcatgcatggctcatgcacgcgcgcgccgttgtcagcatgcggagatagggatagagtcatagagacaaggatccaagttatcaagagggtacggtggaggaggtgattagtgttcacatatatggcgtttgatttttctctggttgtttaatttttctcggatcttcgtgttcttgtgtgtaaatcgacttgggggggctaacacagcaggatatacagattgttaaggtggtgaaccggtgatttacagctagcttctcttatccaatggatctcttgtttctgattgtgcaatatataagcggtcaatcccgtgtcaatttgttgtgcattgcatgcatgcatgtagagtatgcatcagcatcactacttgagcagctctgttgcagctctgttgcagtgttg

SEQ ID NO: 44194 - DNA, 842 bp, Zea Mays
gtttttcttagctacttatgtttctcttattatgcattgaaaagctagatcatatggagaacttctgtgagctaaacatctggagtctgctaacacaatgttctcatttgtgtggtggataattggattttattgggtatctgctggtggagaagttcttacccgtgatgcgcctcaactttactggctttgcatcgtatttttggcgtttgatgttttctttgtcgtcttctgtgtggctttggcctgcatcattggtattgctgtttgttgctgccttccttgtatcatagcaattttatatgcagtgtcggatcaggagggagcatctgaagatgacattcgtcaaattccaaaatacaaatttcggaagatggaagagcctgaaaagcagtctgttggtgtgcctggatcttctggtggaataatgatagaatgtggaaccaatcaacctattgaaaaagtacttgcagctgaagatgcggagtgctgcatttgcctctcagcttatgatgatggcgcagagctccgtgaactcccttgtggccaccattttcattgtgtttgcatcgataaatggctgcacatcaatgccacgtgccccctatgcaagtacaatgttcgaaaaaacagcagcagcagtggcagcgaagaagtataaatctctatacgagaatattgagaattcatacccaacagttctggcttctcgcagcaaattttttatcccataatcccatgagttcgcattcgtatctgtggcagtgtgatgaagaaaatgatccatgtcaggttttccatgatgccgctggcacccacttgactggtgatggagtagagcc

SEQ ID NO: 44195 - DNA, 1106 bp, Zea Mays
gttacttttgcaatccagagaagaaaaaaaaatggtggcacaggagcaaaaccctttgtgagagtgctgtgagagtagtttttcttagctacttatgtttctcttattatgcattgaaaagctagatcatatggagaacttctgtgagtatagctaaacatctggagtctgctaacacaatgttctcatttgtgtggtggataattggattttattgggtatctgctggtggagaagttcttacccgtgatgcgcctcaactttactggctttgcatcgtatttttggcgtttgatgttttctttgtcgtcttctgtgtggctttggcctgcatcattggtattgctgtttgttgctgccttccttgtatcatagcaattttatatgcagtgtcggatcaggagggagcatctgaagatgacattcgtcaaattccaaaatacaaatttcggaagatggaagagcctgaaaagcagtctgttggtgtgcctggatcttctggtggaataatgatagaatgtggaaccaatcaacctattgaaaaagtacttgcagctgaagatgcggagtgctgcatttgcctctcagcttatgatgatggcgcagagctccgtgaactcccttgtggccaccattttcattgtgtttgcatcgataaatggctgcacatcaatgccacgtgccccctatgcaagtacaatgttcgaaaaaacagcagcagcagtggcagcgaagaagtataaatctctatacgagaatattgagaattcatacccaacagttctggcttctcgcagcaaattttttatcccataatcccatgagttcgcattcgtatctgtggcagtgtgatgaagaaaatgatccatgtaaattctcttgttcgtaatacggctatagcaataattctgtgtcaactttgctcgtgctgttctcggtgtgtttagatttttatagtatgtgtacttgttatagaatttctgtagagcagcttgtttgtgtagtctaatgttttataataatcatactagcagtacatgttcttgctcaggtcaggttttccatgatgccgctggcacccacttgactggtgatggagtagagcc

SEQ ID NO: 44196 - DNA, 1182 bp, Zea Mays
ctcatctccaccacctttggcagcaaggacaaagccctcctgagtgagccagctaacgacgtcagctgcttccatcgagatattgagcagcagtaccagtctagctggggagtgacaccggaggaaagttgctgggtgatctggatctggatgctgctaagcaagggggttgtagccttgaaggtggggttggcatacgatggtggccatggactctactgctatatagctaaacatctggagtctgctaacacaatgttctcatttgtgtggtggataattggattttattgggtatctgctggtggagaagttcttacccgtgatgcgcctcaactttactggctttgcatcgtatttttggcgtttgatgttttctttgtcgtcttctgtgtggctttggcctgcatcattggtattgctgtttgttgctgccttccttgtatcatagcaattttatatgcagtgtcggatcaggagggagcatctgaagatgacattcgtcaaattccaaaatacaaatttcggaagatggaagagcctgaaaagcagtctgttggtgtgcctggatcttctggtggaataatgatagaatgtggaaccaatcaacctattgaaaaagtacttgcagctgaagatgcggagtgctgcatttgcctctcagcttatgatgatggcgcagagctccgtgaactcccttgtggccaccattttcattgtgtttgcatcgataaatggctgcacatcaatgccacgtgccccctatgcaagtacaatgttcgaaaaaacagcagcagcagtggcagcgaagaagtataaatctctatacgagaatattgagaattcatacccaacagttctggcttctcgcagcaaattttttatcccataatcccatgagttcgcattcgtatctgtggcagtgtgatgaagaaaatgatccatgtaaattctcttgttcgtaatacggctatagcaataattctgtgtcaactttgctcgtgctgttctcggtgtgtttagatttttatagtatgtgtacttgttatagaatttctgtagagcagcttgtttgtgtagtctaatgttttataataatcatactagcagtacatgttcttgctcaggtcaggttttccatgatgccgctggcacccacttgactggtgatggagtagagcc

SEQ ID NO: 44197 - DNA, 1700 bp, Zea Mays
ttcttttaattctcactttttcctatcttatgttgttacgcgagaacggaattatgttttataacttttttctcgaatgttaaaaagtagagacaatcccatatataccatcggaatttatacttatttttatgtgccattggccacatatatcatacacaaataatatcccttagattataaaatctgatgacatacaatttatttttacttaaaaaaatattgactcatacctcgtcatctctgctttggctcttcactgcttcccgagacccgagggtccaatttacgcgagggggagaaagaggctacacggaaccacgcgctcacggagtcacggctcatcttcggaccttccccagttccccgcgatatcgctagggtttccgcgatggcgacacttcgctccccgagcccccgcggagacgttctcctcgactcggcgccgctcctcggtggtgtcgggcggcgccgcgcgggcgcgctgcgccggccgtctctccggggcgcggcgcggctgctgcggcgtggcgggcgccgagcgatgcgggagccgtcactgctggtgcgggaggccgcggcggagcagctggaggaacggcaggcggattgggcctactcccgccccgtggtggcgctcgacttcctttggaacctcgccttcatcctcgtctccgccgtcgtgctcgtgctcagccaccacgagagcccctccatgccgcttcgtttctggatcgctgggtacaccgcccagtgcgtcgtccacatggtctgcgttgccatcgagtatcgtttgcgatacggccagctcggcgggtcgccaattcctgtcgacgaggagagcggaagtggtagtgcatcatcgtcctccagcgacgacgacagagagcacggctcccatagtcgaagtggtgactgcctcagtatagctaaacatctggagtctgctaacacaatgttctcatttgtgtggtggataattggattttattgggtatctgctggtggagaagttcttacccgtgatgcgcctcaactttactggctttgcatcgtatttttggcgtttgatgttttctttgtcgtcttctgtgtggctttggcctgcatcattggtattgctgtttgttgctgccttccttgtatcatagcaattttatatgcagtgtcggatcaggagggagcatctgaagatgacattcgtcaaattccaaaatacaaatttcggaagatggaagagcctgaaaagcagtctgttggtgtgcctggatcttctggtggaataatgatagaatgtggaaccaatcaacctattgaaaaagtacttgcagctgaagatgcggagtgctgcatttgcctctcagcttatgatgatggcgcagagctccgtgaactcccttgtggccaccattttcattgtgtttgcatcgataaatggctgcacatcaatgccacgtgccccctatgcaagtacaatgttcgaaaaaacagcagcagcagtggcagcgaagaagtataaatctctatacgagaatattgagaattcatacccaacagttctggcttctcgcagcaaattttttatcccataatcccatgagttcgcattcgtatctgtggcagtgtgatgaagaaaatgatccatgtcaggttttccatgatgccgctggcacccacttgactggtgatggagtagagcc

SEQ ID NO: 44198 - DNA, 3767 bp, Zea Mays
gccagtagactagtagagtagtactctgcctttctggggtggctttgcgcggtaccgacgtaccgtcgcggtcggcagtaaaaaggaccccgttgcgttgagatgaaagattgacgagtacctgcggcagtgtacaaagagcacacagggtactgtacacggtttgattggcgcgggctggggtgtaccgccgctgcagccaggcggacccgacccacgtgcgccaccgccagccagccagcagcctgccccgtccccttgcctgccttgcccagtaggtgcgacgtcacggtggaaaccaaaaatctagcccgtactagatcttcttcgtatagccattgtttatacttttcgcctcggcgaatgtttccaaaccagcgccgcgccgcgctcctttttcgtttcctcgaaagggtcagccagccaagacagacaaacagaggaacgtgaggaagatgcggcatgtcacgtgacatgacacgagcgccgagattgggatggatggcgtcacgggctcaacaaatccattcaattccccccgtctaccctgccctggataggtggaatggggaaacccgacgactgatgcagtgtgtttagactctgtgctcgtgtcacacgcactctcgccaccgtgtctgtgccagtagtagtagtcgtagctccagctcagctattgtccctgctaatcacctcccgtaactgtcagcacccgtccaaatctactactcctacaatagtcctattatacaaaactcatcagctcatgcccaggagagcgcacgctcttaagcagcgggcggcagtggcacggagcacactccccagtccccagtcccccgctgggagcggcagccagcacgaggcaggagcagcgcgagggcaggcgccatgggggtccggtcggcggccacaaagctgcacatcccaccatccgccgcccgccgacccacgttcctgccattcgtggccgtcctcctcctctgctctgcctcctatctcatcggcgtctggcagcacggcggcttcgccactccatccgacaaacccgccgccgtctccaccgctacggccgtcgcctgcaccaacgtcgccgccgccccgaagaggaggacccggtccggcgccagctccccgtccctcgacttctccgcgcgccacgcggccgcggcggacgacgcgctcgacgctagcaccgccaccgccgcctcctcggccgcgccgcggaggtcgtcgtacccggcgtgccccgccaggtactccgagtacacgccgtgcgaggacgtggagcggtcgctgcggttcccgcgggaccgtctggtgtaccgcgagcggcactgcccggcgtcggagcgggagcggctgcggtgccttgtgcccgcgccgcccgggtaccgcaccccgttcccgtggcccgccagccgcgacgtcgcctggttcgccaacgcgccgcacaaggagctcaccgtcgagaaggcggtgcagaactggatccgcgtcgacggcgacaggctcaggttccccggcggcgggaccatgttccccaacggcgccgacgcctacatcgacgacattgccaagctcgtcccgctccacgacggctccatccgcaccgcgctcgacaccggatgcggggtaagcagtagacgctcacgctctcgcccaccgcgttggttagctttagctagtacagaaaaaataagtggatttggtcgactgacgagcgtcgacagggttagattggagaatttagttccaattaaggccttgttcggttattcccaatgcacatggattggatgggattggaaaaaaataagaagaagtttgacttgtttgggattcaaacccatccaatcccgctcaatccacatggattgagagctaaccgaacaagctctaagcattgacttgagatcaaggccagtctcttgctagttccagtcccaactcccaaagggcactggacattggaaaagcgagtactactctgctccgcttctttcagagacgttctttttgtgtcggaaattttgcgcaggtggcgagctggggcgcgtacctgctgtcgcgggacatcctggccatgtcgttcgcgccgcgggactctcacgaggcgcaggtgcagttcgcgctggagcgaggcgtgccggccatgatcggcgtgctcgcgtccaaccgcctcacctacccggcccgcgccttcgacatggcgcactgctcccgctgcctcatcccctggcaactctacgatggactgtacctgatcgaggtcgaccgggtgctgcgtcccggagggtactggatcctgtccgggccgccgatcaactggaacaagtactggaaggggtgggagcggaccaaggaggacctcaacgccgagcagcaggccatcgaggccgtcgccaggagcctctgctggaccaaggtcaaggaggccggcgacatcgccgtctggcagaagccctacaaccacgccggctgcaaggcctccaagtcgtcccggcccttctgctcgcgcaagaaccctgacgcggcatggtacgacaagatggaggcctgcataacgccgctgccggagatctccaaggccagcgacgtcgccggcggcgcggtgaagagatggccgcagcggctcacggccgtgccgcccagggtctcccgcggcactgtcaggggcgtcacggccaggtcgttcgcgcaggacacggagctgtggcggaggagggtccggcactacaagtcggtggccagccagctcgagcagaaggggcggtaccgcaacgtgctggacatgaacgcgcgcctgggcgggttcgccgcggcgctggcgctggccggcgacccgctgtgggtcatgaacatggtcccgaccgtggcgaacgcgaccacgctcggggccatctacgagcgcggcctcatcggaagctaccaggactggtgcgagggcatgtctacctacccgaggacctacgacctcatccatgcggattcggtgttcaccctgtacaaggacaggtgtgagatggaccgcatcctcctggagatggacaggatcctgaggcccaggggcacggtgatcgtcagggaagacgtggacatgctggtgaaggtcaagagcctggcggacgggatgaggtgggagagccagatcgtcgaccacgaagacggcccgctcgtcagggagaagatcctcctggtcgtcaagacgtactggactgcccaggaccaagaccagtagcaggaccggacttgtcaagcgaagttcagcaatgttgataagcatttttcttgcttcgaattgcattggatcgccatttctagctccttgagctagtagtgttctctgtttgtttgctgttccttttggactgtacttgctcagataggaaatttgtatcctaaggtgtaacagggggaaatggaagggcttaggtaaaacccctggcccctgcaaagtttttttttgttttccttcaattgcgaaattgtggcaagtggtaaatagaaagtcactgttgcgagtcatcccggataagcacagctgggttcgttctagcattacagttttgttgtatgcaatcccccccttcccttcagatcttatttatgtgctgtgtttgtgctggattcaaggtttcagatctatttatgatatgaaataacactgtttctggtccccaacagtcgtgacagctaatgggcccaggaatttattggtaatgaatggtacagaaacatttgacaggacaataggccatgtaaac

SEQ ID NO: 44199 - DNA, 659 bp, Zea Mays
ccgaagccgatcaccgtggtcaccagattcagcccggaccccagcatctccgccgccccttccctcgcggcgccgccacggccgcactacccagtccagccgctgacagccaacgccccgccctctcccaaaaacgcgcacgcgaaccgagccgcagcggattaagcagcgagcagctgcggccggggcggcgtataataagagcggcgcggcgggcggctggggtcgggcagcggagggctggtgggcatcggcgcggggtttgggatttgggatttgcgtgggccgctggcaaggaatgatgcgccgcggcgcggcgcggggcgggccggggcgggcggcgggagttggcggattcccggagttggtgagcgaggtcctgggagaaacaagtatctccctcgtctcgtctcctcctgtgcgtgacttgcgagggtgggggtgcctgccttgcgctgcgcgacgctagtcgcctcagctcagcagctcagcgcctcagcacagcagggatctgccgctgggctgctgctgctgcttcttctctggcgactgagccttgcccagggaacttcgcttcgactgcgtacgtatgacgcgcgggaccggcgtcacagcggggtcagctgtcatggacggaccacggcttgtgatgggtgccg

SEQ ID NO: 44200 - DNA, 221 bp, Zea Mays
aaaaagactgatatcgtgtggacactaaatgatatgccacatattctttgcatcaaatttcattgacaatcgtacaaatgggttatcatataagtaatcccctctgcctctgagaataggcaatttggttgaaggagcaatggtacgttcacaaacatggaggtaaactaactatagatcatgcattatgtacttactgggcatcatcttttgaatggaag

SEQ ID NO: 44201 - DNA, 1392 bp, Zea Mays
cgccatatttacccgttcctttcccaaaacccagaacaaatatgtggagtgcactgacagtgacaaggcgatgccccctcacagaacatatttacccgttcatgagccgaaatgctcccttgagcaccggcaattaattggcgggcggagccgctgcaaatatctccgcagctccaaatctgaacagtttaccatttctttacagaatacaatgacaatacatcaaaaaaagaaagaaaagcccaaaggcaggtaccgagactgcgaaagggaaccgctatgctacagctcgaaatgtacaaagaatgctgctacacaccaggcccgtcctgttcctgtacccccaaccaactaccgtgctgcaggacgaacagcccagccagctagcatggtttctgcaacgccggattccttctgacgcctgacaggagtatagtagcttcaccacagtctcaaccttgtaccctcctcattgtctctgtggctggatctcgatgatcacctccaacgattcctgcgaggctgggctgttctgtctgcctccagcacgatcgcgatggatcgggagtatccaatggggcgatctattgactgggctgccggcatgtcccagtatctgagggagtggggtacggagaggggatgctgtaggtttcgcgccaggctggtccttcaatgagacgcggcatattgggcaggtagtctgtttctgcaaccatacatctatgcattcgagatggaagttgtgttggcatgtaggcattatacgcagtatctctttatcgctgtattcacctaaacatatggagcacctgccaaatgaaaatgagggacacattattttcttttcgagttacaagtaaacataccacataaaggtaacctatgcaattcctttggtttccatgatgctcatcaacaatcatcaggtggtgatatagttctatcagaaatatttctctcttaacttgctaaattatcatataggatatatatatatatataatctaataatccatatctcatttcagatattttcattttttttcaataacagataaaactacaacgcaagcaatatctgctgggcaattaattaggtgcccgccatgaaactgctaatatcaggcaagagctgtgtatactagttgtggctgttcaacaaaagatgctagtcaactatttgatcaaagattaatatagtcatgaataaatatcttcctcagcatgtacataaatttctgcccaccttcccatacttacaagagacaaaatacagacaagaggtagctgtacatcttgttcaagaaaaatatggttctagatcagataatttataaatacaactaaaaatctgtccattaaagtgcttcactcagttatagaatcttt

SEQ ID NO: 44202 - DNA, 997 bp, Zea Mays
gtgtgggccaacaagggggctccatgtttgacgctggctcaagagctagatcaagcgggagatttagactatgaagttgatcaaacatcccaatatggtccaactgcatgaggtatactattgttttttgtcagatgtgatgatgcaagtttcgttattaccttttgatgatcccactgttatgcgtgcatttgataggttatggcgagcagaacgaagatatacatggtccttgaatttgttgatggaggtgagctattcgataagatcgtaaggctctcaaaactttcaatggctcattgttgttactcttttactctgtgggcattactgttaacatgttgtggttttagttctcaaaccctggaatgtatatagatagttacgaccatattatttaggtgttaggttcatatgaatgcttgcaattaggcagctcgtccatcacatggtcttaataatttatcaggtcaattctggaaggctaggagaggatgaatctaggatatattttcatcaacttataaatgcaattgattattgccatagccgaggagtgtaccatagagacctgaagccacagaatttgcttctggattcaaatggagctcttaaagtttcaaacttcggcctaagtgcatttgcaccacaaacaaatgtatgatctctagtcagtaactagaaacaaatgtactatctaggcactctgtgtcacgcatgtgacccggtcccggattcatgacccatagtcatacgagtgtaccctctttctaaccatccaagcactccatgtcatgtatgttgtacccagaatgcacgatccatagtcatatgagttagaacaacccacatagtactggatgatgagatgtgtcttattatgactatggatgagacttttgtgatgtaattaatgagactatggatttaaatactgttatgtgattgtgtgtgagatgttttatgtgaaaatatgttgtgctatatagcttttgat

SEQ ID NO: 44203 - DNA, 849 bp, Zea Mays
cctcaagttagtgtgggccaacaagggggctccatgtttgacgctggctcaagagctagccttgccgatcactgagggcctgacctcctccggggctcaccggttttgtgcccgcatgagaccctccatagtctaggcgaccaatggccgggcagcacccacacccagcctgggtggcgcccaaagatcaagcgggagatttagactatgaagttgatcaaacatcccaatatggtccaactgcatgaggttatggcgagcagaacgaagatatacatggtccttgaatttgttgatggaggtgagctattcgataagatcgtcaattctggaaggctaggagaggatgaatctaggatatattttcatcaacttataaatgcaattgattattgccatagccgaggagtgtaccatagagacctgaagccacagaatttgcttctggattcaaatggagctcttaaagtttcaaacttcggcctaagtgcatttgcaccacaaacaaatgtatgatctctagtcagtaactagaaacaaatgtactatctaggcactctgtgtcacgcatgtgacccggtcccggattcatgacccatagtcatacgagtgtaccctctttctaaccatccaagcactccatgtcatgtatgttgtacccagaatgcacgatccatagtcatatgagttagaacaacccacatagtactggatgatgagatgtgtcttattatgactatggatgagacttttgtgatgtaattaatgagactatggatttaaatactgttatgtgattgtgtgtgagatgttttatgtgaaaatatgttgtgctatatagcttttgat

SEQ ID NO: 44204 - DNA, 829 bp, Zea Mays
cctcaagttagtgtgggccaacaagggggctccatgtttgacgctggctcaagagctagccttgccgatcactgagggcctgacctcctccggggctcaccggttttgtgcccgcatgagaccctccatagtctaggcgaccaatggccgggcagcacccacacccagcctgggtggcgcccaaagatcaagcgggagatttagactatgaagttgatcaaacatcccaatatggtccaactgcatgaggttatggcgagcagaacgaagatatacatggtccttgaatttgttgatggaggtcaattctggaaggctaggagaggatgaatctaggatatattttcatcaacttataaatgcaattgattattgccatagccgaggagtgtaccatagagacctgaagccacagaatttgcttctggattcaaatggagctcttaaagtttcaaacttcggcctaagtgcatttgcaccacaaacaaatgtatgatctctagtcagtaactagaaacaaatgtactatctaggcactctgtgtcacgcatgtgacccggtcccggattcatgacccatagtcatacgagtgtaccctctttctaaccatccaagcactccatgtcatgtatgttgtacccagaatgcacgatccatagtcatatgagttagaacaacccacatagtactggatgatgagatgtgtcttattatgactatggatgagacttttgtgatgtaattaatgagactatggatttaaatactgttatgtgattgtgtgtgagatgttttatgtgaaaatatgttgtgctatatagcttttgat

SEQ ID NO: 44205 - DNA, 1179 bp, Zea Mays
atattttttttatcttaaacccctactcaatcttatcctcttctcattcttctttctccctcccatgtcttccaccaggaccgaagtcgtgcgccgccgcccgcctccaccggcgcgcccgctgcgaccgaccccgacccgccctcttggcagcggacagcggagttcaccactcttggcgaagcgaaatccaccgtacaccgctgcctccctctccctgtctcgtcgaaccagccgagcaagccaacgcacacccagcgatcctcgtcgtgcgtcctcctcccccacggagggaaggatggcttggtccgaggacatggcggaagccgacgagatggagagcaggggtgtgcagagctcggctagcccgtgtcgccgccacaagcgggagattggagacgacgacgacgacacggaggaggagggctagcccgtcccaccgccacaagcgagagatcggagatggcgaggacgcggaggcctcggcgtcgttgtcggcgtccgccgcagtcctccccgcggccgaggtcgagcagatcaagcgggagatttagactatgaagttgatcaaacatcccaatatggtccaactgcatgaggttatggcgagcagaacgaagatatacatggtccttgaatttgttgatggaggtcaattctggaaggctaggagaggatgaatctaggatatattttcatcaacttataaatgcaattgattattgccatagccgaggagtgtaccatagagacctgaagccacagaatttgcttctggattcaaatggagctcttaaagtttcaaacttcggcctaagtgcatttgcaccacaaacaaatgtatgatctctagtcagtaactagaaacaaatgtactatctaggcactctgtgtcacgcatgtgacccggtcccggattcatgacccatagtcatacgagtgtaccctctttctaaccatccaagcactccatgtcatgtatgttgtacccagaatgcacgatccatagtcatatgagttagaacaacccacatagtactggatgatgagatgtgtcttattatgactatggatgagacttttgtgatgtaattaatgagactatggatttaaatactgttatgtgattgtgtgtgagatgttttatgtgaaaatatgttgtgctatatagcttttgat

SEQ ID NO: 44206 - DNA, 1915 bp, Zea Mays
  misc_feature (1914)..(1915): n is a, c, g, or t
atctccagttgcagatgctcacttcggcttggcgcaaataattccggcacacaaaaaaaaaacgcaaggatttctcggttcctcttcctcctcgcgcagtcgcgctccccacttcaccgagcatcccgaaaaaaagctcggccactgcgccatctcgcccaccaagcaccagccaccagcagcggcgccatggccaccgcgccctacgcctcctccctcttcctggcttcctcccccatctcaactgcgccacgagccagcgccgggtccttccctccctccgcgcagccgttctccatgcgcctccggcctaggccgtcaccagccgtcgcggccgccgtccaggcggagcaccagcccgcggtggccgcgacgccgaagccgcccgcgctaccgttccgcgtgggccacggcttcgacctccaccgcctggagcccaacctcccgctcatcatcggcggcatcgacatcccccacgaccgcggctgcgaggctcactctgacggagacgtgctgctgcactgcgtggtggacgcgattctcggcgcgctggggctgccggacatcgggcagattttcccggattccgacccccgttggaagggcgccgattcttcggtgttcatgagggaagctgtgagtttctcttctttccagtgcgttatctctagttcatttgatgcgatcaattccatcctgtttccctaaccatgttagtatctgcagtgttttgtgtaagtaacgtggtttcaagacctatttgaatgatttatcacaacaaaatgtagagtttcgtagagaaattttggggttctcagaaaacggttgggtaatctctacagattaatgattgatatgtaccatgtcaggatgttgatatcataagtaaattggacggtttctctattgctggatcaattatcagagcatattatagattgattacctaacatttggtgaaccattcgtaattccaagtcattcttttaaatgaataactatacatcttatagtataccatgttgtttacttgttttttcgtgctcatatttgttagtatagactcatagctttatatcaaaatgtaatatgtaggtgccttgtggtatgtggagtggagaacatccttgagaacgcgttagtactgtttcaatggtctattctattgctcctggaccattagatgctcagtcgtcattatgtcacaagatgtcttggcagttctcacacgagttgctgactgaaaaatgtgttcttgacctttggactcttcaagggcagaaagtattccacgttttagattttgtacaaggcatggtccacgtgcatagaatgctgactgcacatttactattggtacttctggaggagctggacagaaatcttccccatgcctctctttctgcataaatccgttgactagtgaaattggtcttatgtcgcttatttatgcagggtgttatatctaatctgagcacgggtgttctctttttctcgtcttattgaaaacacttgcttccattttaccattgaagtctttgtagtcccattatacaacactttaagctccttcaattgccatgtcatttcaggtgaaattgatgcatgaagcaggctacgagctgggcaaccttgatgctacgctgatcttgcaaaaaccaaaaattagcccgttcaaggagacaatcagattgaatctgtgcaacctacttggggcagatccatctgtggtcaatctcaaggccaaaacgcacgagaaagttgacagtctaggggaaaacaggagcatagctgctcataccgtagttctcctgatgcggaagtagaaaaaaaaacaaatagtacctaattgtatcgtgctacaagaaaaaggtcgttaagttatacttgcccttgttaaatgctctagccagnn

SEQ ID NO: 44207 - DNA, 2563 bp, Zea Mays
  misc_feature (2562)..(2563): n is a, c, g, or t
gtgattcacaagctgaatatggagtacagctttgaccgtgactggaagaagatagaggcttttgttggctccaagaccgtcatccaggagtcacgcacaaaagtactttttgaaggttcagaaaaatggaaccagtgaacatgtcccacctccacgaccaaagcgaaaagctgcccatccatatcctcagaaagcttccaagaatgaaccaaactatggtctcaagacagattcatcttccatacataggaactctggcatgaatgtgtctgtttcttcatggcctcataggtctatcccgcaagctgttgcttcatcgatggtgaaagaagatttaggtgctggaacactaggtccaaacaatttttgctcaagcagtactgaaggccctccaagaacttggcaacctggtgaaacaaatggtccaataaatcaaattccgtcactccgccttatgccggattttgcgggagtgtacagcttcttaggtagtgttttcgatccaagcacaagtgatcatctgcagaaactgaaggagatgaatccaattgatgttgagacggcgctgttgttgatgaggaatctctccatcaatttgaccagtcctgattttgaagatcaaaggaaattgttgtctttatatagcgcttctgatggacctgagctagggagctccaggagttcggctctagcaacgagtgcacctttcatgattaagggtggatagtgtggccaggtctgtccgcatataatttcagttggacagacctcaggatggtgccctggcgtagcaccgatgagtgacgaaggaggcgcctgcaccttttcgcttctcgctagcttcatgactgctgattgtgtaagggtgcggccatgaaaggtgagattggtctgcggtcatgaaaggtgagattggtctgcggcctgatgtgtatataaaatttttgccacgaaggaggcgcctgcacctatcccaaaagctcggccatctagggcattggatgctgcttcagttcagataatcaaggctgtccttggaaatgggacgagaggaaagatcccttccccattcgttgagttcagttctctgattggtttcttgctgccctcttgatacggggacctgtgcgccatgtggccgtctcgctgtttatgtgggcaagtttcacttgaggagttgagagggcttgaggcgatcgtggttttgtagagcaacgagtgcaccttccgaatattccttgttcctgtgtgaatcgtctatattgcatcaggcgtcgttgccattgtgtaaaagggaaataaaatcacaatgtaaaggatacactaccatttgaattgtattcagtatcgaagcaacctggcgacgagttcattgcaagggtggatatgttatttgaagtggcctttccaaatgctttcggtttattagttcaaaatatgatttagttttttttttttgcaatgctacccatataaatttgaagtgagaaacagcaaagtctgggttaccaatttccaattaaacttttttgagagaattagaggcagtttccaggaaccctaccagacggggtctaatcttttttaagagaataagccatcgcatctccagttgcagatgctcacttcggcttggcgcaaataattccggcacacaaaaaaaaaacgcaaggatttctcggttcctcttcctcctcgcgcagtcgcgctccccacttcaccgagcatcccgaaaaaaagctcggccactgcgccatctcgcccaccaagcaccagccaccagcagcggcgccatggccaccgcgccctacgcctcctccctcttcctggcttcctcccccatctcaactgcgccacgagccagcgccgggtccttccctccctccgcgcagccgttctccatgcgcctccggcctaggccgtcaccagccgtcgcggccgccgtccaggcggagcaccagcccgcggtggccgcgacgccgaagccgcccgcgctaccgttccgcgtgggccacggcttcgacctccaccgcctggagcccaacctcccgctcatcatcggcggcatcgacatcccccacgaccgcggctgcgaggctcactctgacggagacgtgctgctgcactgcgtggtggacgcgattctcggcgcgctggggctgccggacatcgggcagattttcccggattccgacccccgttggaagggcgccgattcttcggtgttcatgagggaagctgtgaaattgatgcatgaagcaggctacgagctgggcaaccttgatgctacgctgatcttgcaaaaaccaaaaattagcccgttcaaggagacaatcagattgaatctgtgcaacctacttggggcagatccatctgtggtcaatctcaaggccaaaacgcacgagaaagttgacagtctaggggaaaacaggagcatagctgctcataccgtagttctcctgatgcggaagtagaaaaaaaaacaaatagtacctaattgtatcgtgctacaagaaaaaggtcgttaagttatacttgcccttgttaaatgctctagccagnn

SEQ ID NO: 44208 - DNA, 2545 bp, Zea Mays
  misc_feature (2544)..(2545): n is a, c, g, or t
gttgaggcagttcagctactgtgattcacaagctgaatatggagtacagctttgaccgtgactggaagaagatagaggcttttgttggctccaagaccgtcatccagattaggagtcacgcacaaaagtactttttgaaggttcagaaaaatggaaccagtgaacatgtcccacctccacgaccaaagcgaaaagctgcccatccatatcctcagaaagcttccaagaatggaactctggcatgaatgtgtctgtttcttcatggcctcataggtctatcccgcaagctgttgcttcatcgatggtgaaagaagatttaggtgctggaacactaggtccaaacaatttttgctcaagcagtactgaaggccctccaagaacttggcaacctggtgaaacaaatggtccaataaatcaaattccgtcactccgccttatgccggattttgcgggagtgtacagcttcttaggtagtgttttcgatccaagcacaagtgatcatctgcagaaactgaaggagatgaatccaattgatgttgagacggcgctgttgttgatgaggaatctctccatcaatttgaccagtcctgattttgaagatcaaaggaaattgttgtctttatatagcgcttctgatggacctgagctagggagctccaggagttcggctctagcaacgagtgcacctttcatgattaagggtggatagtgtggccaggtctgtccgcatataatttcagttggacagacctcaggatggtgccctggcgtagcaccgatgagtgacgaaggaggcgcctgcaccttttcgcttctcgctagcttcatgactgctgattgtgtaagggtgcggccatgaaaggtgagattggtctgcggtcatgaaaggtgagattggtctgcggcctgatgtgtatataaaatttttgccacgaaggaggcgcctgcacctatcccaaaagctcggccatctagggcattggatgctgcttcagttcagataatcaaggctgtccttggaaatgggacgagaggaaagatcccttccccattcgttgagttcagttctctgattggtttcttgctgccctcttgatacggggacctgtgcgccatgtggccgtctcgctgtttatgtgggcaagtttcacttgaggagttgagagggcttgaggcgatcgtggttttgtagagcaacgagtgcaccttccgaatattccttgttcctgtgtgaatcgtctatattgcatcaggcgtcgttgccattgtgtaaaagggaaataaaatcacaatgtaaaggatacactaccatttgaattgtattcagtatcgaagcaacctggcgacgagttcattgcaagggtggatatgttatttgaagtggcctttccaaatgctttcggtttattagttcaaaatatgatttagttttttttttttgcaatgctacccatataaatttgaagtgagaaacagcaaagtctgggttaccaatttccaattaaacttttttgagagaattagaggcagtttccaggaaccctaccagacggggtctaatcttttttaagagaataagccatcgcatctccagttgcagatgctcacttcggcttggcgcaaataattccggcacacaaaaaaaaaacgcaaggatttctcggttcctcttcctcctcgcgcagtcgcgctccccacttcaccgagcatcccgaaaaaaagctcggccactgcgccatctcgcccaccaagcaccagccaccagcagcggcgccatggccaccgcgccctacgcctcctccctcttcctggcttcctcccccatctcaactgcgccacgagccagcgccgggtccttccctccctccgcgcagccgttctccatgcgcctccggcctaggccgtcaccagccgtcgcggccgccgtccaggcggagcaccagcccgcggtggccgcgacgccgaagccgcccgcgctaccgttccgcgtgggccacggcttcgacctccaccgcctggagcccaacctcccgctcatcatcggcggcatcgacatcccccacgaccgcggctgcgaggctcactctgacggagacgtgctgctgcactgcgtggtggacgcgattctcggcgcgctggggctgccggacatcgggcagattttcccggattccgacccccgttggaagggcgccgattcttcggtgttcatgagggaagctgtgaaattgatgcatgaagcaggctacgagctgggcaaccttgatgctacgctgatcttgcaaaaaccaaaaattagcccgttcaaggagacaatcagattgaatctgtgcaacctacttggggcagatccatctgtggtcaatctcaaggccaaaacgcacgagaaagttgacagtctaggggaaaacaggagcatagctgctcataccgtagttctcctgatgcggaagtagaaaaaaaaacaaatagtacctaattgtatcgtgctacaagaaaaaggtcgttaagttatacttgcccttgttaaatgctctagccagnn

SEQ ID NO: 44209 - DNA, 2600 bp, Zea Mays
  misc_feature (2599)..(2600): n is a, c, g, or t
attatgtgttgaggcagttcagctactgtgattcacaagctgaatatggagtacagctttgaccgtgactggaagaagatagaggcttttgttggctccaagaccgtcatccagattaggagtcacgcacaaaagtactttttgaaggttcagaaaaatggaaccagtgaacatgtcccacctccacgaccaaagcgaaaagctgcccatccatatcctcagaaagcttccaagaatgaaccaaactatggtctcaagacagattcatcttccatacataggaactctggcatgaatgtgtctgtttcttcatggcctcataggtctatcccgcaagctgttgcttcatcgatggtgaaagaagatttaggtgctggaacactaggtccaaacaatttttgctcaagcagtactgaaggccctccaagaacttggcaacctggtgaaacaaatggtccaataaatcaaattccgtcactccgccttatgccggattttgcgggagtgtacagcttcttaggtagtgttttcgatccaagcacaagtgatcatctgcagaaactgaaggagatgaatccaattgatgttgagacggcgctgttgttgatgaggaatctctccatcaatttgaccagtcctgattttgaagatcaaaggaaattgttgtctttatatagcgcttctgatggacctgagctagggagctccaggagttcggctctagcaacgagtgcacctttcatgtaaggattaagggtggatagtgtggccaggtctgtccgcatataatttcagttggacagacctcaggatggtgccctggcgtagcaccgatgagtgacgaaggaggcgcctgcaccttttcgcttctcgctagcttcatgactgctgattgtgtaagggtgcggccatgaaaggtgagattggtctgcggtcatgaaaggtgagattggtctgcggcctgatgtgtatataaaatttttgccacgaaggaggcgcctgcacctatcccaaaagctcggccatctagggcattggatgctgcttcagttcagataatcaaggctgtccttggaaatgggacgagaggaaagatcccttccccattcgttgagttcagttctctgattggtttcttgctgccctcttgatacggggacctgtgcgccatgtggccgtctcgctgtttatgtgggcaagtttcacttgaggagttgagagggcttgaggcgatcgtggttttgtagagcaacgagtgcaccttccgaatattccttgttcctgtgtgaatcgtctatattgcatcaggcgtcgttgccattgtgtaaaagggaaataaaatcacaatgtaaaggatacactaccatttgaattgtattcagtatcgaagcaacctggcgacgagttcattgcaagggtggatatgttatttgaagtggcctttccaaatgctttcggtttattagttcaaaatatgatttagttttttttttttgcaatgctacccatataaatttgaagtgagaaacagcaaagtctgggttaccaatttccaattaaacttttttgagagaattagaggcagtttccaggaaccctaccagacggggtctaatcttttttaagagaataagccatcgcatctccagttgcagatgctcacttcggcttggcgcaaataattccggcacacaaaaaaaaaacgcaaggatttctcggttcctcttcctcctcgcgcagtcgcgctccccacttcaccgagcatcccgaaaaaaagctcggccactgcgccatctcgcccaccaagcaccagccaccagcagcggcgccatggccaccgcgccctacgcctcctccctcttcctggcttcctcccccatctcaactgcgccacgagccagcgccgggtccttccctccctccgcgcagccgttctccatgcgcctccggcctaggccgtcaccagccgtcgcggccgccgtccaggcggagcaccagcccgcggtggccgcgacgccgaagccgcccgcgctaccgttccgcgtgggccacggcttcgacctccaccgcctggagcccaacctcccgctcatcatcggcggcatcgacatcccccacgaccgcggctgcgaggctcactctgacggagacgtgctgctgcactgcgtggtggacgcgattctcggcgcgctggggctgccggacatcgggcagattttcccggattccgacccccgttggaagggcgccgattcttcggtgttcatgagggaagctgtgaaattgatgcatgaagcaggctacgagctgggcaaccttgatgctacgctgatcttgcaaaaaccaaaaattagcccgttcaaggagacaatcagattgaatctgtgcaacctacttggggcagatccatctgtggtcaatctcaaggccaaaacgcacgagaaagttgacagtctaggggaaaacaggagcatagctgctcataccgtagttctcctgatgcggaagtagaaaaaaaaacaaatagtacctaattgtatcgtgctacaagaaaaaggtcgttaagttatacttgcccttgttaaatgctctagccagnn

SEQ ID NO: 44210 - DNA, 3069 bp, Zea Mays
  misc_feature (3068)..(3069): n is a, c, g, or t
accacgcgaaacgaagcgaagaaaacgccggcgcccccgcagccagacgctggaagcgccggaacgaacgaacgcgcggcgccaccacccacatcactgccctgccgtcgtagcccagccccacccacccagcgccgcccgcccacgccaccacgcggaccgcagccgcgccgcagctgctcacacacacagggcaacagacgcctcctccatccccacgcgagcggacgacacgacgcggccatcgccgcacgttgagatcccctccgctcctcctctcgatggtctccgccagcgcgccgccgccgccgccgcaggcccagtccgacgcggccgggtcgggggaggaagccagcaagaaggtgcggaagccgtacaccatcaccaagtcgcgggagagctggacggagcaggagcacgacaagttcctcgaggccctgcagcttcctttttaggtccaacatagggaaacaaattatgtgttgaggcagttcagctactgtgattcacaagctgaatatggagtacagctttgaccgtgactggaagaagatagaggcttttgttggctccaagaccgtcatccaggagtcacgcacaaaagtactttttgaaggttcagaaaaatggaaccagtgaacatgtcccacctccacgaccaaagcgaaaagctgcccatccatatcctcagaaagcttccaagaatgaaccaaactatggtctcaagacagattcatcttccatacataggaactctggcatgaatgtgtctgtttcttcatggcctcataggtctatcccgcaagctgttgcttcatcgatggtgaaagaagatttaggtgctggaacactaggtccaaacaatttttgctcaagcagtactgaaggccctccaagaacttggcaacctggtgaaacaaatggtccaataaatcaaattccgtcactccgccttatgccggattttgcgggagtgtacagcttcttaggtagtgttttcgatccaagcacaagtgatcatctgcagaaactgaaggagatgaatccaattgatgttgagacggcgctgttgttgatgaggaatctctccatcaatttgaccagtcctgattttgaagatcaaaggaaattgttgtctttatatagcgcttctgatggacctgagctagggagctccaggagttcggctctagcaacgagtgcacctttcatgtaaggattaagggtggatagtgtggccaggtctgtccgcatataatttcagttggacagacctcaggatggtgccctggcgtagcaccgatgagtgacgaaggaggcgcctgcaccttttcgcttctcgctagcttcatgactgctgattgtgtaagggtgcggccatgaaaggtgagattggtctgcggtcatgaaaggtgagattggtctgcggcctgatgtgtatataaaatttttgccacgaaggaggcgcctgcacctatcccaaaagctcggccatctagggcattggatgctgcttcagttcagataatcaaggctgtccttggaaatgggacgagaggaaagatcccttccccattcgttgagttcagttctctgattggtttcttgctgccctcttgatacggggacctgtgcgccatgtggccgtctcgctgtttatgtgggcaagtttcacttgaggagttgagagggcttgaggcgatcgtggttttgtagagcaacgagtgcaccttccgaatattccttgttcctgtgtgaatcgtctatattgcatcaggcgtcgttgccattgtgtaaaagggaaataaaatcacaatgtaaaggatacactaccatttgaattgtattcagtatcgaagcaacctggcgacgagttcattgcaagggtggatatgttatttgaagtggcctttccaaatgctttcggtttattagttcaaaatatgatttagttttttttttttgcaatgctacccatataaatttgaagtgagaaacagcaaagtctgggttaccaatttccaattaaacttttttgagagaattagaggcagtttccaggaaccctaccagacggggtctaatcttttttaagagaataagccatcgcatctccagttgcagatgctcacttcggcttggcgcaaataattccggcacacaaaaaaaaaacgcaaggatttctcggttcctcttcctcctcgcgcagtcgcgctccccacttcaccgagcatcccgaaaaaaagctcggccactgcgccatctcgcccaccaagcaccagccaccagcagcggcgccatggccaccgcgccctacgcctcctccctcttcctggcttcctcccccatctcaactgcgccacgagccagcgccgggtccttccctccctccgcgcagccgttctccatgcgcctccggcctaggccgtcaccagccgtcgcggccgccgtccaggcggagcaccagcccgcggtggccgcgacgccgaagccgcccgcgctaccgttccgcgtgggccacggcttcgacctccaccgcctggagcccaacctcccgctcatcatcggcggcatcgacatcccccacgaccgcggctgcgaggctcactctgacggagacgtgctgctgcactgcgtggtggacgcgattctcggcgcgctggggctgccggacatcgggcagattttcccggattccgacccccgttggaagggcgccgattcttcggtgttcatgagggaagctgtgaaattgatgcatgaagcaggctacgagctgggcaaccttgatgctacgctgatcttgcaaaaaccaaaaattagcccgttcaaggagacaatcagattgaatctgtgcaacctacttggggcagatccatctgtggtcaatctcaaggccaaaacgcacgagaaagttgacagtctaggggaaaacaggagcatagctgctcataccgtagttctcctgatgcggaagtagaaaaaaaaacaaatagtacctaattgtatcgtgctacaagaaaaaggtcgttaagttatacttgcccttgttaaatgctctagccagnn

SEQ ID NO: 44211 - DNA, 1021 bp, Zea Mays
cccagctcactcccttaagaacagctcgacgctcacctgtctagtctagctcgtgcatgccgccctgagcgccactgcacagacgcgcagagacagacattgcgactttgcgagagacaaaacctcccagataacgcccgcgcgctccccgatggcgtcgtcgtgccagaacgtggagattcccggcaagccgacggagacggggacggcgctgctggagacggcgacgggcaccatccaggggttcgcgccgctgagccagatccaccagcacctgtgcgcgttccacttctacgcggacgacatggggcggcaggtggaggcgcaccacttctgcgcgcacctgaacgaggacgtgcggcagtgcctcatcttcgacgggcccggcgccggcgcgcgcctcatcggcgtggagtacatcgtctccgagacggtgttcctgacgctgcccgacgccgagaagccgctgtggcacacgcacgagttcgaggtgaagggcggggtgctgttcatgccgggggtgcccggcgtggtggagcgccgggacctggagaaggtgtggagaagaagttcggtgtctccttccagaaggagagggagaaccgggcgtacatgagcggaccggagcatggtatccacccgctagcgaacgctaccggcaagggcctgaggaccgagatccgtgaggtcgatttgccggcgagtactaccgccggcgccgggagggtcttcacttgatcgccgtatcgtgtgttgccgcggcgggtctgcgtaatgtagactatatagacggtgcttggtttggtctgtagttcgtgagtacgtgctcaatcgtttgtgttctcttaagacacgaactactgttcatatgaactttgaattttcgcataataagagatggcgctctactaataatttgtgtcaaaaccgttttggttgaactcttggatttaggatgggataatgaatttcatacagtttgcatatattaatgccaaatatctcctagaaacttgtcctt

SEQ ID NO: 44212 - DNA, 1972 bp, Zea Mays
agttcacccctgccaggcccggcccggctgctctctctgcttctgctctgcctccctctatggctctatataaccagcgggccgcttcagctctctctctgacttgtccaccatatcctctccagctttccgctccgcccttgtcgctcgtccagccaccgtgcccgtgcccgtgccgccgagaattctatccagaagcaagcaacaagagcccacccccgcttcgcgcgctctttcgtgccaggcaaacacagagcacagctatctgctcgtgtcccggtccgtccaactcgctcgctcgctcaatccactgatgatggggatcccgctggtgtgctactgcctcgccgtgcccaagccggtcatcgccttctgcaggctgctcagcgccgtcagggacgccgccctgctgatgctggccgtggtggggctgtgccgcttcccgcccgacggcgcggtggacgccggccaccagcccggcgaggtgaaggcccggctccccgccgtggagtacggccagctcctggccgagcacgacgagcagcagcagtccggcgaccacgactgcgacggggacgccgcgtcgtcggattgcatcgtgtgcctcgagacgctggaggcggcggacgaggtgcggcggctgggcaactgcgcgcacgccttccaccgcgcctgcatcgaccgctggatcgacctcggccgcgcgacctgcccgctctgccgctccgacctcctgccgcgcgcgccgggctgggccagccggctcggcctgggccggctcacgcgcgttcggtgaggaggaccgtcttccagggcagtttttaatttgtctattggatgatggggcgcggacaggttagcgacggcgatcgcccgggtggtataacagctgctctgcctgccatcagccaaccgctaatctacgggggggcttcattagtacgtaaaaggcgcctcacacttggtatacgtaaaagatatactagttattaatacgttaaaggattgagtatacggcacctagatgtttcatttgtacacgattttaatttcagtctctcctcgaccatataatagtaattaaattagttcgtcaacttattgtgcaacttggtgagcttagcagcagcaagtttgcgcaactggcagtgatgaataatttagcaaccaacttgaatcctcttatcatgatcatctcgtctcgtgttgggaaccgcttgctaaacacgagcgtgggtgtaaataaagtgccgaaacagtctgatttagactttttcttcgatcaaattgcgacgcccaaggttttgaagaagctagctgcacaccgaatttgaaacagcgcttacctagaaaatccaaaagcgcctgtgtttgacgacgtacgcaaccccaatgcaacaacaatatcccaaacttctttttctacgtcaagggaaacattaattacagacctcaattaacacatggaatcaatgatgaagcagcagcatgtcaaatactagtgtcattatagctttttttttaaaaaaaaaggaagcagcatagtagtcttctattgtacgattctcatcatgtaaccaataatttaatcttatagcgatatggccggacggacaagcacatgcacatgggcctcgttcagcctccactcatgtacgagcatagaagataatccaagagaacacacgacacgacgacacgactcctgcgatctgcacaaatcctgtgacccaattaatgagtgcatatacgacattctaactgacaatcgattctggcatgattagatgccatcacccaaaacagtacaattattcgctgctaagactctgacacggtgacatgtcgttgtcatcactggacaactagactgtctgtacttgaattgaggttttcagcttctggcgtgaactgttttatttcacaaagaaagttgaatatgtgtcttaccaaagtaaaaaaaaggttgaag

SEQ ID NO: 44213 - DNA, 416 bp, Zea Mays
gtcgccctcccccaggcacagcgcagccccacaggcacaccgcacacaaccgccaccgccagtcgccattgctcactgctctgctcagcgctccatgtcgtgccccaaattccgtgactcatcttccttctctttgccaggctgcgcgtgcataccacggacggacgcactgcccccaatctactggttttgctgttcggagttggcactcgtttttcattttcaatatccgcttgttatattgtaaacttgtgatcaacttgttatattgtgaacttgtgatatgtgagattaattttttatattgtgaacttgtgatctatgtgatccattattatattgtgaacttgtgatattgtgaattgtgaacatgtgatattaaaaattatgaacttgtgctttttgtgatatttgta

SEQ ID NO: 44214 - DNA, 522 bp, Zea Mays
gccgccgctcctcttcctgaacagcctgcacggcttctcctcggttgctgcaagcctgcaaagagctccgtggttgtaggctgtagcctactagcctctccctcccccacccccacacggccacacacttgtcacttggggttttgtttggatattgttcgaatccctcgctgaaatcatgtattaggtatattaaaatttacttggagttctattctaattcatatcagcctaatattgattaatgcgaatctgattacatctcgataagaccttgatgtcttctatgtgtggtatatacagggttttgctgttcggagttggcactcgtttttcattttcaatatccgcttgttatattgtaaacttgtgatcaacttgttatattgtgaacttgtgatatgtgagattaattttttatattgtgaacttgtgatctatgtgatccattattatattgtgaacttgtgatattgtgaattgtgaacatgtgatattaaaaattatgaacttgtgcttttt

SEQ ID NO: 44215 - DNA, 1274 bp, Zea Mays
atttatagttggtatagaaaatgatattttatagtggtagtgggatatagggggaatatttaggggaaaccgttgcgggagaggaaaaaataggggaaaaaatagggggagaaagtgatatagggggaaaaatttagaggtaacggttgcggatagtcttatcccctcccagtcccaatcgcgacggcacccatttatacctgtcgtccctgcctgctctggccacactgtgtcacagcgctgctatttctctatctggcctgctctgatccttgcttgcgtttcgcgtcccgtctgatcttctcgggaagatcatggaggcctacttgtttttccacagcgggagggcgcacgaggtcgcgtgcgcggagcaggaggaggacatcggctcgccgtcggattccgagtccccgtccacgtccacgtcgagggagtccgcgggctcctcgtcggagctcgatgacgacgccagctcctccggctcggaccgcttcgagatgtccgccctcatgacgcagctccccctcaagaggggcctgtccaggttcttcgacggcaagtcgcagtccttcgcctcggtcgccgccgtggggtccctggaggacctggccaagccggcccggaagcgcctcaagccgtcgcggagctgcggcggcgccctcgacgcgcaccgcggacgcctcctctcgccgcgcaggcactggaccaagcccgccgccgcgtccggcgccaggaagacggccgcgaggagcggcgggttgtcggtgctcacggccgtcgcgccgagaatgccgccgccggtgcgaggcctgaggacgtggccgccaaggttctcatcgttaattgagccacggatcagcctgcctgagctcgacattgacgcacgccttcacgtcacggggtgcgctgtcgcaggcacagctacgcatcagcgcatccacccgtgcctgaactaacagccaaatcaatggcatgctcgtattctcttctgtttcccaatgcgtttgtgatctttgcagaatgcagactgacctttttgtaatgaaaatccacagctatagcaatggacttcggttgggaactcacatgtcgtttgcaatacttttcagcatcattcgcattccctagcgtactgtgaagttaaatacattaaacagaactgtgatttgtggctccaatcacgctaccaacttggacttcaacatttccaggggactttggaatgtaagaacaatgaacgcataagctctcgtttgcgaactatgagctcaaat

SEQ ID NO: 44216 - DNA, 2869 bp, Zea Mays
cctcatcatccaccatctcatcgctctcgctctcgcactccctctccctgtagctccacttgcaagtcaccaccagatctcccatcccgcggctgcgaggaggtcgcccccgccccacttcttcctcccccacgacacctctttgccgccgtcaccgcgctcccgacgctccgcttcttcgcgttggaggaaatggacatcgacgctgccgccgtcgttgggctcggcctaaaggatctgggtcgatagggtacactggtggcccgccggactttgctggatggcgcagaacctcgacggcctcaggcttgatagcgtcgaaggagttgacgaggatggcttcggcggcttcgcggcagtgcacgacgaggtgcagcatcaccacgtacgatgggtcgaaccggtcctggagcgacgagacgatgtcgagccctaggatgggcacacagccgggtagacgcaccggctcggccaggtctccgaactcgccgggcaaggaggcagccagctcggagaggtggacgacgagcgagagcatgtggaggttcatgggcatgaagaggcaccgcgcggacacgacaatgtcgcgtgcggtggcgaaggaggtcgtcctgaactggttggcccgaacgcgacaaggtgggtggtgtcgcggaactccacgagcaggctcgcgagcgccgggagcgagcgtgcatacttctcagtcatgactcatgagctccatgacgcctcatcttcctcaagctccacggcgccctcgccctcgcgagctagcaacaccctcctccctgtcgtctttgttcatctccatgacacttttggatgcgtacgccaagaccagccgccttgagatggtgctgtagttgctcggcgaaatgcctagcaggaacgttgtctcgcggaccatgcctgtcgcctcgctggcaagtctgacattgaaaggatctgcaaggaagtcttcgaggacctgtcagacaagaacacggggctcctggacatcacaacttttgtagcatgatttattcatacagttcattttttcttgttcagtagtcagcacgttggtctaaaattccagtttcagtaaagctgcattgcctcatttatttgatttctacatcaatacttcattgatttacatatcgccatgatataacttgaattttaaacatcttaacaggtatatgcatgtgcataatgtcgaactgaaattgaaaactaaatacttgtagcgactgttctgttcgccttatcactaggaaagcagtacattggatgggagcatgtttctgatagacagctaattatttggcttcattcaagattgtgatgatttgtagtaatgaattggaggcttcgatccactgcaatttatgtggtacaagggttttgtttgagaaggcgaatgagattctaatggaggaaagaaatgttcagtgtgagtatttccaccaccaacacccgcaagttgaaagcctagacgaatgaactattcagacattggcgacaacgctgcgagtggtgtgatggcaactcttcttgtattcctgtccgttggtttagttggtgctactgatggtacatgcttccatttaactgggaaggtagtaaactggagtggcatgccctttaccattggtatttatggatttttctactctgggcattcagtatttccgaacatctaccagtcaatgtctgatcactctaagttccctgtggcactattcgtatggtatgcttggctatattcatgtttcggtttaccttgttactgaataatgaatattttttcgcaaggtgtgatggtattttcgcaaggcttctacctgttgcatatggcccttggatagttcctttttgcatttagcatgcaatccattctttgttcttatcccttctaacttcaagtcaccaccactagccgcaatcacattgctttgtttattttccagtgagctagctcttttggcctctgattctttttatctgtgtagtactatattaatccagtcagtggatatgaattctgctctttgaaggatgtgcacagtgcactgctatcttgaacctggcgatattagccagtgcgccgtgagaccaaagaagagtagcatctgtgaagttcatataattgaaagtcaaactcatgttacaatatttcctctccctctcgagattcaactgttaaaagtggagagcctatgaaagctgaaggggagatcaaggttgggattttggataaattagttgttgataaggaaaagaaaaaaggtaaaagaagccgccatgacctctaagatcaccgactacttcaccattagacactgttgatcagaagctcatcagtgaactaaactatcggagcttgcggtgttaaagagggctaggatggagagcgtatgaaggcattggagaagatgaataattccaaaccagcatcttcaattgcgaatctggtggctttgatcatttccgtcatcttttgcttcttcatgctttggcaaggtataacaactgataacccataagttatgttaacatgcattatgttctatgcacaattagattcttgttcactagcactggttgtgcataacagtaaatcatctttgttgctcctactacatccattttgagatagaaatttcgtacttaatcaccattaccatatgaccattacaatatgacatgtgttcactacagttatacttgcattcactttgcaaccaatatcttgttagttatttatagaatggacattgactaattccttcaaagtactactggtctactgcatctctgctaaccaataacattagtctttattaattgactttgcctagaaacaacagatgtgtaggat

SEQ ID NO: 44217 - DNA, 2067 bp, Zea Mays
cagaccccaccccagtgcaaatctgcccctacgtgaaacgttcccctcctctcctcgccctccttgcgcaggttgaggcccgaggtgtagtgcaaggtggcgacctctcggcggcttgggtcggattgttttcgggaagtttggtctccagtgacccgagcactggagatgccctgtttggagcaaattccgatggcgaccggcgagaccgccgtggatcgtcgcgaggacccccgcgacatggatttgtcaggggaggagcacgtgcggcccaaggcgcggaagccgtacacgatcacgaagcggcgggagaggtggacggaggaggagcacggtcggttcctcgaggccctgcagctgcacggtcgcgcctggcgccgcatacaagagcacatcggcaccaagactgccgtgcaaatccggagccacgcgcagaagttcttcaccaaggtggtccgagaatcgtcgccaggaagcaacgcctccgcgggcgccgcgccggcgatccagatccccccgccgcgccccaagaggaagccggcacacccttacccgcgcaaagcggacggcgcggccaagaagcccgcgccggagctcaagcggctggagaagacgtccctgcgcgaccgggtccgggacgaagggtcgccgacgtcggtgcttgcctcggcgcgcacggcgttacgagcggaggtgtcgggcagcgtggtcgcgaacagctcgagcgccagcaggtcgccagccctgtctgacgccggttccaacgagcgtggcgacggcggcggctcgctggcctcctcggtggaccgggaggacggctgcgcatcgccaaggacgagagcgccatgtaccaaggtgctctgtgatgcacacgaagtgtcgcgtctaggatcgggagctccagtcgtgaagctgttcggaaacaaggtcgtcgtggtgaaagtgaaagacctggaaacggacactccgcctgcgagcgttgccgaggcagccagaaacgggagccctactaacggtgccgcaggagcgagctcgtggaaaccgtggccggagctcacgtgcctcgttccccggcgggacggcttcgcggcgcaacccatcgtgagcccgccgtgcgcggtgttctactacccgcaggcttcggctcaggagcaccagcaagcttcagagccgctggatcacagacgcgcgcagagggaagggtcgtcgccgacaggttcgagcgtggcctccagcgccgccgcggagtcccgccacggtcccgggcaagagaacgccagcgacggctacgcggcgctacgggccgcaatcccgaggccgaccaagcgcgcgagctcggcttccttcggcgggagagggttcgtgccgtacaagcggtgcgcggccgagagcgaggcggcgcggccggtggcactggcactggcacccggagaggaggccgacggcgacctgacgaggctgtgcttgtgacaagagctgaaggctgcaatgcacatgctctctgctgaaacaggcaatgctctgcacatcaagaatctctgacgatttcaataaccttggaagtgatatattgcttgctgatacatgtccatgatctgacatacgacccagagcatcaccccagacaaaaatgtccttcagagaatctgctgctgcattggatccctcagattgtttgagcttaggagatgtgcgcctttcttgagagcgacaatggactgttaggaaggaacaagctgtcaaccacaaagtggcagtgttcgtctcagatgcatctttcccagcactaatattgtcttcttgtgcatacgaaaagtattaaacaaaagagcagaagaaggaacaggaatgccacgcagcgataaacctcaagaagctgcagaagacggatgacaacaggaggatgaaaacagcggaggagcatatcctatgcgtagatctgctcgaggagtgccactaattctctggactggacgaatgcgcaagaagaagaaaaaaaacagccgcgtacctgctggagctcgactcctctggttgtgcttgcagagctgctccactcgaagcccc

SEQ ID NO: 44218 - DNA, 686 bp, Zea Mays
ttacttgtcttattatgtggatgaattatatatttacagccaggaaaaaattgttgcacataagatttatgatcctaatattagttaacattaatagggggaaatcataggataaaaataatttatatcattgttgagtgataagttatgcctactgcagattggtttgatgtaatacatgctgcagatactgttaaagctgctaccaaaatattacaatcatgtcagagcttatgataatacgctcattacaaattttttttggcgtccacaggattactctgaaaggcggaagaaaggttcgctttgttgtgatgagaaatatgttttgcactgagctgcgaattcatcgtaagtatgacttaaagggttctacacaaggccgatcaaccaaaaagcaaaatataaatgagaacacaacactggaggaccttgacctatcatatgtttttcatgtcgataaaccatggccggacgcacttttcagacaagaggagcatacccatgaggaccttaaggaacaacaggttgtgcatggtgaggtggaaaacactttagggcctggttctatcaacttggcattagagaatccaataccaaaggattggagaactattcatatgattggagctgaaagcaatctactagatattgtatctaattctgttggcacatctataacttaa

SEQ ID NO: 44219 - DNA, 954 bp, Zea Mays
atctaactaccggcggggccaacgaccttagcttctccttcccgcatgttctcgtcctctcctctcctctccgctcgtcgtccacccacccctcgtgctcgtctcactcttcacctccagctccggatctgaaacgccgagcaatctttcgtcgtttcgagtctcatccagagcttctcgtttgcaggaaatggagggcgttgacctcggatgatgaactgtggcgcaagctgttcaacgacaggtggggagcggacgctgcagcgttctacgcgccggagggctccaagtcttggaaggacgtcttcgccgtgcaggaccggtgcgaccgatacggactgtaagccgccactcgcccatctgctccagctccactgcttccgattgccatcagcagctggtgttactgctgtcgaccaacagttcagccgcctcctttccctttgtttttgtttggcctgtgagtgtgtgtgtgtgacctcctttccctttgtttttgtttggcctgtgagtgtgtgtgtgtgaccgcgccgcgtcctttccaggggtgtcaggatcatcagggaagggaaggactactacctgatctaccagggcgagatccagaggtacttgggctcccgccaggacacggatggcgactgcggcgaggacgcgccacggcgggacgctggagacgagcatcggcagatatccgaccggatcctgttcttcctcggggatctggagaaagcctgcgccgacgccaaacgtgttaaggcctgaacacgcgctacccttgtgcccctgatcatcatcagcacaatattccacgctgagtcttgttaatttgtgcatgtctcgtgcatagtttctcaccatcaattcatgtagttggaaatcatgctcacatcgacactgaaattataattcaagtacagtcgtttagagggtaaaactacctgatccccacaa

SEQ ID NO: 44220 - DNA, 995 bp, Zea Mays
atctaactaccggcggggccaacgaccttagcttctccttcccgcatgttctcgtcctctcctctcctctccgctcgtcgtccacccacccctcgtgctcgtctcactcttcacctccagctccggatctgaaacgccgagcaatctttcgtcgtttcgagtctcatccagagcttctcggtgagtgcgacaattgggccggagaactgggaaagcctcgaggagacatggatgggttgcccagagagctgtgcctcaagatcttccacctcctggatcaccagtccctcgcctcttctccccaagtttgcaggaaatggagggcgttgacctcggatgatgaactgtggcgcaagctgttcaacgacaggtggggagcggacgctgcagcgttctacgcgccggagggctccaagtcttggaaggacgtcttcgccgtgcaggaccggtgcgaccgatacggactgtaagccgccactcgcccatctgctccagctccactgcttccgattgccatcagcagctggtgttactgctgtcgaccaacagttcagccgcctcctttccctttgtttttgtttggcctgggtgtcaggatcatcagggaagggaaggactactacctgatctaccagggcgagatccagaggtacttgggctcccgccaggacacggatggcgactgcggcgaggacgcgccacggcgggacgctggagacgagcatcggcagatatccgaccggatcctgttcttcctcggggatctggagaaagcctgcgccgacgccaaacgtgttaaggcctgaacacgcgctacccttgtgcccctgatcatcatcagcacaatattccacgctgagtcttgttaatttgtgcatgtctcgtgcatagtttctcaccatcaattcatgtagttggaaatcatgctcacatcgacactgaaattataattcaagtacagtcgtttagagggtaaaactacctgatccccacaa

SEQ ID NO: 44221 - DNA, 957 bp, Zea Mays
atctaactaccggcggggccaacgaccttagcttctccttcccgcatgttctcgtcctctcctctcctctccgctcgtcgtccacccacccctcgtgctcgtctcactcttcacctccagctccggatctgaaacgccgagcaatctttcgtcgtttcgagtctcatccagagcttctcggtgagtgcgacaattgggccggagaactgggaaagcctcgaggagacatggatgggttgcccagagagctgtgcctcaagatcttccacctcctggatcaccagtccctcgcctcttctccccaagtttgcaggaaatggagggcgttgacctcggatgatgaactgtggcgcaagctgttcaacgacaggtggggagcggacgctgcagcgttctacgcgccggagggctccaagtcttggaaggacgtcttcgccgtgcaggaccggtgcgaccgatacggactgtaagccgccactcgcccatctgctccagctccactgcttccgattgccatcagcagctggtgttactgctgtcgaccaacagggtgtcaggatcatcagggaagggaaggactactacctgatctaccagggcgagatccagaggtacttgggctcccgccaggacacggatggcgactgcggcgaggacgcgccacggcgggacgctggagacgagcatcggcagatatccgaccggatcctgttcttcctcggggatctggagaaagcctgcgccgacgccaaacgtgttaaggcctgaacacgcgctacccttgtgcccctgatcatcatcagcacaatattccacgctgagtcttgttaatttgtgcatgtctcgtgcatagtttctcaccatcaattcatgtagttggaaatcatgctcacatcgacactgaaattataattcaagtacagtcgtttagagggtaaaactacctgatccccacaa

SEQ ID NO: 44222 - DNA, 1042 bp, Zea Mays
atctaactaccggcggggccaacgaccttagcttctccttcccgcatgttctcgtcctctcctctcctctccgctcgtcgtccacccacccctcgtgctcgtctcactcttcacctccagctccggatctgaaacgccgagcaatctttcgtcgtttcgagtctcatccagagcttctcggtgagtgcgacaattgggccggagaactgggaaagcctcgaggagacatggatgggttgcccagagagctgtgcctcaagatcttccacctcctggatcaccagtccctcgcctcttctccccaagtttgcaggaaatggagggcgttgacctcggatgatgaactgtggcgcaagctgttcaacgacaggtggggagcggacgctgcagcgttctacgcgccggagggctccaagtcttggaaggacgtcttcgccgtgcaggaccggtgcgaccgatacggactgtaagccgccactcgcccatctgctccagctccactgcttccgattgccatcagcagctggtgttactgctgtcgaccaacagttcagccgcctcctttccctttgtttttgtttggcctgtgagtgtgtgtgtgtgacctcctttccctttgtttttgtttggcctgggtgtcaggatcatcagggaagggaaggactactacctgatctaccagggcgagatccagaggtacttgggctcccgccaggacacggatggcgactgcggcgaggacgcgccacggcgggacgctggagacgagcatcggcagatatccgaccggatcctgttcttcctcggggatctggagaaagcctgcgccgacgccaaacgtgttaaggcctgaacacgcgctacccttgtgcccctgatcatcatcagcacaatattccacgctgagtcttgttaatttgtgcatgtctcgtgcatagtttctcaccatcaattcatgtagttggaaatcatgctcacatcgacactgaaattataattcaagtacagtcgtttagagggtaaaactacctgatccccacaa

SEQ ID NO: 44223 - DNA, 1307 bp, Zea Mays
gttagtttcacctgtacagagtttgttgcttcccttttctctactagtttcgttggtcatccatggatttgtgaccatggagttgctcctgatcgtcctcttgatccagctgtcctgtcacgcatcaagcagttctcagcgatgaacaagttaaagaagatggctttgcaggtaattgctgagagcctttcggaggaggagattgcagggctgaaggaaatgttcatggcaatggatacagataatagcggtgcaattacatatgatgaactgaaggaaggattgagaaagtatggctccacattaaaggatactgaaattcgtgatctcatggaggcggcggatatagacaacagtgggaccattgattatatagaattcattgctgctacattgcacctcaataaactggaacgtgaggaacatctagttgcagcattttcgtattttgacaaagatggcagtggttacattactgtggatgagcttcaacaagcgtgcaaagagcataacatgccagctgcttttcttgatgatgtgattaaagaagctgaccaggataatgatgggcgcattgattacggggaatttgttgccatgatgacaaagggcaatatgggagttgggaggagaacgatgagaaacagcttgaacataagcatgagggatacgcctgctggtgccctctgaagtctgagcatccaagaaatttgttgcagtatgagagaacgcctggaattccgggtagggtaactcaactcctgctctttcctcgatgagaagtgtgaattgttatgcgttagttggattgcaaatgttcgtagacgtcgggcgtgtttgattttcttgtgcccttgcctcacctaacctagctgggcaagggtaccctcgccagccgaggcaagctgaagcggctcacctgatacctggccaagcatggaaaaatctttacggcacgggaaacgaggcagatggtaaagaatccaatccaaacacaaacaggctggattttgtccagacaggcgaggcaagcgcttggcgtcttggcgaggaaaccaaacgttcctgttgccctcactaattgcaagttttcatatgcagctgggccatcacgccaaaaaaaaaaacttctctacgtgtaaacgtgtatattcgacatcctgatataaataggaatttcaagctggctcaagcatatgtcatacttaatcatttgctttcgctcattcattgtttggtgcaatgcgtcacacgccgtcttgggatccatccatccaactattggctactggcatggaaaagccaac

SEQ ID NO: 44224 - DNA, 2664 bp, Zea Mays
ccggagcagcggcacacacagcgcgactgcagcaaagcagccttcgcttcgctttcctcgcagcgtgaccgactgaccgcgaagccgccgtgaaccctcctcatccccgtcccccctgctccggcttcgccgggctcctctctcccacttgcgccaacattcaagccccgaccccaattcacatccgaggcgctcgcccctttccatctccatcgcccacgcccacgcccgcgcgtctcgtgtccacgcctcgccgcgacttctcccccctaaaccccgcgagaggccgaggtacatgagagagtgatcggcctcgccttcgcgcccacgctcgcgccgagagtgtgatgggcaacacgtgcggcgtcacgcttagatccaagtacttcgccagcttccgcggcagcgcgtcgcagcgccgtgacgcgccggggtactcacctgtcgccacctccgcggccgccgatgaaccctcgccgcatgggaacgggaagcgagccacgcgtccgtcccaggctgcagcggcggcggacgggtcagccccgccccccgccccaggcatgcggcgcggggtgccggcccccgcggagctcacggccaacgtgctgggccacccgaccccgagcctccgcgaccactacgcgctcggccgcaagctggggcaggggcagttcggcaccacctacctctgcacggacctcgccacgggcgtggactacgcctgcaagagtatagccaagcggaagctcatcaccaaggaggatgtcgaggacgtgcgccgcgagatccagattatgcaccacctggctggccaccggaacgtcgtcgccatcaagggcgcgtacgaggaccagctgtacgtccacatcgttatggagttctgcgcgggcggggagctcttcgaccgtatcatacagcgggggcattacagcgagcgcaaggccgcggagctcacgcgcattatcgttggggtcgtcgaggcttgccactcgctcggggtaatgcacagggatctcaagccagagaacttcctgctctcgaacaaggatgacgatatgtcgctcaaggccatcgacttcggcctctccgtgttcttcaagcctggtcaaatttttaccgatgttgtgggaagcccttactatgtagctccagaagtgctgcgcaaacgatatggaccagaagctgatgtgtggacagctggagttattctttacatacttctatgtggtgtaccgccattttgggcagagacacagcaaggaattttcgatgctgttctgaaaggtgtaattgattttgatttggatccctggcctgtgatctctgagagtgcgaaggatcttataaggagaatgctgaatcctatcccatcagagcgcctaacagcacatgaagttctatgtcatccatggatttgtgaccatggagttgctcctgatcgtcctcttgatccagctgtcctgtcacgcatcaagcagttctcagcgatgaacaagttaaagaagatggctttgcaggtaattgctgagagcctttcggaggaggagattgcagggctgaaggaaatgttcatggcaatggatacagataatagcggtgcaattacatatgatgaactgaaggaaggattgagaaagtatggctccacattaaaggatactgaaattcgtgatctcatggaggcggcggatatagacaacagtgggaccattgattatatagaattcattgctgctacattgcacctcaataaactggaacgtgaggaacatctagttgcagcattttcgtattttgacaaagatggcagtggttacattactgtggatgagcttcaacaagcgtgcaaagagcataacatgccagctgcttttcttgatgatgtgattaaagaagctgaccaggataatgatgggcgcattgattacggggaatttgttgccatgatgacaaagggcaatatgggagttgggaggagaacgatgagaaacagcttgaacataagcatgagggatacgcctgctggtgccctctgaagtctgagcatccaagaaatttgttgcagtatgagagaacgcctgggttgtttcaggaattccgggtagggtaactcaactcctgctctttcctcgatgagaagtgtgaattgttatgcgttagttggattgcaaatgttcgtagacgtcgggcgtgtttgattttcttgtgcccttgcctcacctaacctagctgggcaagggtaccctcgccagccgaggcaagctgaagcggctcacctgatacctggccaagcatggaaaaatctttacggcacgggaaacgaggcagatggtaaagaatccaatccaaacacaaacaggctggattttgtccagacaggcgaggcaagcgcttggcgtcttggcgaggaaaccaaacgttcctgttgccctcactaattgcaagttttcatatgcagctgggccatcacgccaaaaaaaaaaacttctctacgtgtaaacgtgtatattcgacatcctgatataaataggaatttcaagctggctcaagcatatgtcatacttaatcatttgctttcgctcattcattgtttggtgcaatgcgtcacacgccgtcttgggatccatccatccaactattggctactggcatggaaaagccaac

SEQ ID NO: 44225 - DNA, 2654 bp, Zea Mays
ctccgatccagccggagcagcggcacacacagcgcgactgcagcaaagcagccttcgcttcgctttcctcgcagcgtgaccgactgaccgcgaagccgccgtgaaccctcctcatccccgtcccccctgctccggcttcgccgggctcctctctcccacttgcgccaacattcaagccccgaccccaattcacatccgaggcgctcgcccctttccatctccatcgcccacgcccacgcccgcgcgtctcgtgtccacgcctcgccgcgacttctcccccctaaaccccgcgagaggccgaggtacatgagagagtgatcggcctcgccttcgcgcccacgctcgcgccgagagtgtgatgggcaacacgtgcggcgtcacgcttagatccaagtacttcgccagcttccgcggcagcgcgtcgcagcgccgtgacgcgccggggtactcacctgtcgccacctccgcggccgccgatgaaccctcgccgcatgggaacgggaagcgagccacgcgtccgtcccaggctgcagcggcggcggacgggtcagccccgccccccgccccaggcatgcggcgcggggtgccggcccccgcggagctcacggccaacgtgctgggccacccgaccccgagcctccgcgaccactacgcgctcggccgcaagctggggcaggggcagttcggcaccacctacctctgcacggacctcgccacgggcgtggactacgcctgcaagagtatagccaagcggaagctcatcaccaaggaggatgtcgaggacgtgcgccgcgagatccagattatgcaccacctggctggccaccggaacgtcgtcgccatcaagggcgcgtacgaggaccagctgtacgtccacatcgttatggagttctgcgcgggcggggagctcttcgaccgtatcatacagcgggggcattacagcgagcgcaaggccgcggagctcacgcgcattatcgttggggtcgtcgaggcttgccactcgctcggggtaatgcacagggatctcaagccagagaacttcctgctctcgaacaaggatgacgatatgtcgctcaaggccatcgacttcggcctctccgtgttcttcaagcctggtcaaatttttaccgatgttgtgggaagcccttactatgtagctccagaagtgctgcgcaaacgatatggaccagaagctgatgtgtggacagctggagttattctttacatacttctatgtggtgtaccgccattttgggcagagacacagcaaggaattttcgatgctgttctgaaaggtgtaattgattttgatttggatccctggcctgtgatctctgagagtgcgaaggatcttataaggagaatgctgaatcctatcccatcagagcgcctaacagcacatgaagttctatgtcatccatggatttgtgaccatggagttgctcctgatcgtcctcttgatccagctgtcctgtcacgcatcaagcagttctcagcgatgaacaagttaaagaagatggctttgcaggtaattgctgagagcctttcggaggaggagattgcagggctgaaggaaatgttcatggcaatggatacagataatagcggtgcaattacatatgatgaactgaaggaaggattgagaaagtatggctccacattaaaggatactgaaattcgtgatctcatggaggcgacaacagtgggaccattgattatatagaattcattgctgctacattgcacctcaataaactggaacgtgaggaacatctagttgcagcattttcgtattttgacaaagatggcagtggttacattactgtggatgagcttcaacaagcgtgcaaagagcataacatgccagctgcttttcttgatgatgtgattaaagaagctgaccaggataatgatgggcgcattgattacggggaatttgttgccatgatgacaaagggcaatatgggagttgggaggagaacgatgagaaacagcttgaacataagcatgagggatacgcctgctggtgccctctgaagtctgagcatccaagaaatttgttgcagtatgagagaacgcctggaattccgggtagggtaactcaactcctgctctttcctcgatgagaagtgtgaattgttatgcgttagttggattgcaaatgttcgtagacgtcgggcgtgtttgattttcttgtgcccttgcctcacctaacctagctgggcaagggtaccctcgccagccgaggcaagctgaagcggctcacctgatacctggccaagcatggaaaaatctttacggcacgggaaacgaggcagatggtaaagaatccaatccaaacacaaacaggctggattttgtccagacaggcgaggcaagcgcttggcgtcttggcgaggaaaccaaacgttcctgttgccctcactaattgcaagttttcatatgcagctgggccatcacgccaaaaaaaaaaacttctctacgtgtaaacgtgtatattcgacatcctgatataaataggaatttcaagctggctcaagcatatgtcatacttaatcatttgctttcgctcattcattgtttggtgcaatgcgtcacacgccgtcttgggatccatccatccaactattggctactggcatggaaaagccaac

SEQ ID NO: 44226 - DNA, 2681 bp, Zea Mays
ggcaattgtatatcctcctccgatccagccggagcagcggcacacacagcgcgactgcagcaaagcagccttcgcttcgctttcctcgcagcgtgaccgactgaccgcgaagccgccgtgaaccctcctcatccccgtcccccctgctccggcttcgccgggctcctctctcccacttgcgccaacattcaagccccgaccccaattcacatccgaggcgctcgcccctttccatctccatcgcccacgcccacgcccgcgcgtctcgtgtccacgcctcgccgcgacttctcccccctaaaccccgcgagaggccgaggtacatgagagagtgatcggcctcgccttcgcgcccacgctcgcgccgagagtgtgatgggcaacacgtgcggcgtcacgcttagatccaagtacttcgccagcttccgcggcagcgcgtcgcagcgccgtgacgcgccggggtactcacctgtcgccacctccgcggccgccgatgaaccctcgccgcatgggaacgggaagcgagccacgcgtccgtcccaggctgcagcggcggcggacgggtcagccccgccccccgccccaggcatgcggcgcggggtgccggcccccgcggagctcacggccaacgtgctgggccacccgaccccgagcctccgcgaccactacgcgctcggccgcaagctggggcaggggcagttcggcaccacctacctctgcacggacctcgccacgggcgtggactacgcctgcaagagtatagccaagcggaagctcatcaccaaggaggatgtcgaggacgtgcgccgcgagatccagattatgcaccacctggctggccaccggaacgtcgtcgccatcaagggcgcgtacgaggaccagctgtacgtccacatcgttatggagttctgcgcgggcggggagctcttcgaccgtatcatacagcgggggcattacagcgagcgcaaggccgcggagctcacgcgcattatcgttggggtcgtcgaggcttgccactcgctcggggtaatgcacagggatctcaagccagagaacttcctgctctcgaacaaggatgacgatatgtcgctcaaggccatcgacttcggcctctccgtgttcttcaagcctggtcaaatttttaccgatgttgtgggaagcccttactatgtagctccagaagtgctgcgcaaacgatatggaccagaagctgatgtgtggacagctggagttattctttacatacttctatgtggtgtaccgccattttgggcagagacacagcaaggaattttcgatgctgttctgaaaggtgtaattgattttgatttggatccctggcctgtgatctctgagagtgcgaaggatcttataaggagaatgctgaatcctatcccatcagagcgcctaacagcacatgaagttctatgtcatccatggatttgtgaccatggagttgctcctgatcgtcctcttgatccagctgtcctgtcacgcatcaagcagttctcagcgatgaacaagttaaagaagatggctttgcaggtaattgctgagagcctttcggaggaggagattgcagggctgaaggaaatgttcatggcaatggatacagataatagcggtgcaattacatatgatgaactgaaggaaggattgagaaagtatggctccacattaaaggatactgaaattcgtgatctcatggaggcggcggatatagacaacagtgggaccattgattatatagaattcattgctgctacattgcacctcaataaactggaacgtgaggaacatctagttgcagcattttcgtattttgacaaagatggcagtggttacattactgtggatgagcttcaacaagcgtgcaaagagcataacatgccagctgcttttcttgatgatgtgattaaagaagctgaccaggataatgatgggcgcattgattacggggaatttgttgccatgatgacaaagggcaatatgggagttgggaggagaacgatgagaaacagcttgaacataagcatgagggatacgcctgctggtgccctctgaagtctgagcatccaagaaatttgttgcagtatgagagaacgcctggaattccgggtagggtaactcaactcctgctctttcctcgatgagaagtgtgaattgttatgcgttagttggattgcaaatgttcgtagacgtcgggcgtgtttgattttcttgtgcccttgcctcacctaacctagctgggcaagggtaccctcgccagccgaggcaagctgaagcggctcacctgatacctggccaagcatggaaaaatctttacggcacgggaaacgaggcagatggtaaagaatccaatccaaacacaaacaggctggattttgtccagacaggcgaggcaagcgcttggcgtcttggcgaggaaaccaaacgttcctgttgccctcactaattgcaagttttcatatgcagctgggccatcacgccaaaaaaaaaaacttctctacgtgtaaacgtgtatattcgacatcctgatataaataggaatttcaagctggctcaagcatatgtcatacttaatcatttgctttcgctcattcattgtttggtgcaatgcgtcacacgccgtcttgggatccatccatccaactattggctactggcatggaaaagccaac

SEQ ID NO: 44227 - DNA, 2271 bp, Zea Mays
ccctcaatcttttcggaaccacgtctggtgggagtggaatgtttctcactcggctcctgaccgcacgtcggtcgcgtacacgacggcgccggttgcgtatccacaagctctgacttcgccggacgccgccctcccaatgagcgagacgtcagtttcgatccacaagcgactacgacgacggccgggagcagcagccgtaaagaaggtccggtgtccacaccgttcagctctggtggtgggcttcagcttcgatcatcgtccttcatgggagagggcatctcttcaaggctggtttggtggccagaaaaatagaggtgatctgttggtgagaaatctccttattcaatggttaccaaattaatcctaaaacttgtatgtcagcctcatagcgtattcttgaaagaatcctaagaccctgtccgcggtttgcctatatgatcactcaaaactctgttttgcactgtaaactgtattgttcatagagtgacgtttaaaataggagattaagataggatgagtaaagtgttgaagatatcttaataagtgttttaaaaaattaacattaaataaaatttatagaggtctaacaaactgcgacactttcacagaattctatggtgatgtcgtgttacaccatttttatgtgacgtcgtaaaactattggccaacacatagagcttaacaacactataaaaatcaaacttagcccaaacttgaagatgttcaagtccacagagtatctacactcacagatacacacagctaattagatcgtgtaaaaagaaaatattgcaattcaaaacataaaggacaagatacaaaagttaacaaatggtttagcttgccaccaagcttgtctacgtccatattattgaggaagccataaaagcttttggtctctttctactatatccacttcccaagtccgacatcaaggctgaacttgagggttcactaagatattttggagaatacaaattttcccatgtctcaccacaagtatgggatctcgctgatacatctagtcgtctaagagcaagtttaataatatagcccacatcgggctttatgatgttgtcatgctagtgaacagcccgtttctagtctctccatttctctttcttccacatcaccacaaatgtgatgtggcatatcctgtagcccacctacaccaccttattatacttgctctaagaggcttcatattcaagagtaacaaaagcacaacaaaaaataatgaagcccaacaaaagcccaatgtttgacttgctctcttttgctatgtactaattaatcacacactctcaggagagagctcaaataagacttgagatgtgttagtagtgaactaaacactaccagccgcaccatgaggcatgggatggatattgtgaacacaagattgacttgtcccttatggtttaggttaatgataaatgattgtcaatggatagtgtctcaggtcgagtcatggactgaccaaagcgtgagattatgtgttgtgcaatcatgtcggtcggattgtggtatgtgggtgtggagcacaggtacggtggtcgataacgaaggtgaaggtcatgcaaattcgtgccgatggaccaggagcggtgaaggacgagcgctgaaacttgaccgagggacctaagtcgtcggggtgactagccatggtggctgacacctaggacaaattattgaatgacaaactattaaaggactaaccgatttgctaagtgttgaacaggaaagatgagtataatgcatatacttcagtgaggaggtaactttagaacttctagagatgatgatgtcgacaagtgaagagataatttatatttaacatggttcttggattcaatttacatcttattaacctttattgattgcaaacttgttagaaagttagaaggttctatctactttggttgtgttggcatcaatcacaaaaaagggggatatttaaaggaaaatgtgctatgtgccatttttaacttagttttggtgattaatgacaagcacaatatcgagatctaactagtttgctaagtgcacacttgcaagttcattcaagtcaaattgaggtttaaaatccaatactcaactcaaacgaggctagaaatgggcaaaacatggagaaggtgagctatgacaggttcacaggtttgaataagtactaactgccctaagaaaaatttccgagcactttagataggttatagatgtcatatattgcaacttatggttcctgttttgagttgaaatagggaatctgag

SEQ ID NO: 44228 - DNA, 2041 bp, Zea Mays
gttggctacttggatagcgacctcgccggaagcacctctggtgctttgttcttccttggtgctagcctgatcagctggatcaagctcagatgttggtgaatgtgaccagtgaacttcctaacaatgaattgcttctccagaaacacttcatggctgtaatttcgtctgtttggagatcaaaatgtcaccgtgatacctcctgttttacgaacacttactctagtgcattacatgtgttttctcctgtgaagaaacctggtggatcatgtgagaactggcccatggtaaactttagaccaagcttcaatctagttaggaaagcccttgcagatgttcaggctaagtctacactaatggtgattccacctccgtcaaggaatcaggaatacccatgcaattatttagaattagagttagatttcttgaaagatcaacatgcttatgatgaagacatcccatctgtagtaaatgtgtccatacaggaaccagaaccatccaaacagacgccagagccagtggaacaatcgttgttgtctgcactttcttgtagacaggctgagaaccggctcaggatagcatcagaagcttgttatgatggtgaaagttctcattgggcatcatcagcttttcacataaatgatgctgcccgccacaaatctggttcaaagtctataggaaagcacaaagccgcattggaatctggtagacttctcaaatccaaagttcagaagattactgaatcgcatcaggaaggggcaattgctatgagtagttttctccgtatgcctgctcaactattgccaagtacagctgacttccacattagtgactccctatctgactttggtatcagagattctgaattctatttttccgaggatctcttgcaagaggttgacgcccttgagttcttcccagatcagggtgactctggtctccttcctggtattgaagagttagaatctctttcggatttcacagatatcggatgaacatagatgagcaaattattgttgatgggatgccctcctataccaagaggagacaagattgcctctggcaggagcccaaggatacaggttgaattgctcagccgtgcacagatgtgttgcaagcagcaagctatcatcatggctggctggagcaaagcactggcttggtgaggtcacattgatctgacaagctcggaggatgggtttgcactaatggcggcatttgggtaatttccatacatgtatgtatattggtagtctagaatcgtaggatgtagaaatgcctccctcatttgtgtttgagggtaggaccttgtaactcgaccacatggaaattttgttgagcaggtaccaacatagaagggaaaagaagaggccctcagcatcacccatttgtcgctgtatctcttgttatgttcattctctgtttaatccaatgctgtttggctatcttgccattgaaaacatctcagatgtcaagttggtggtgtacatatctatcagaagtttaggatgcggcgtcaatatagctgccaaagaatgatcagtcaagtgcaacttatgggcacattatatatttggtcaggactcaacgcatggtatcaatattggcagaaatggtgttccagatgcacttgaggactgcaatttctggtttgattgagacaccggagacaggtttttcataggaggtaaagagcgtggtcatagttgtacatgtaataaaattatgtagggtagtaatctccatcctgtacttttgggcttatggttctttggactctcggtctcggttatgcacttgtagaacagcgggctgctgctgtgagcctgtaacaatgctattgattgttccccaccatattgttgttttggtaagtagactctgcatcactgcaaagcggcgttagatactgtgacgggtctgtttcgctcaaaaatactttgagcttgtattcagtcttggcctccaataatctgtaccgctgtacgctgggaatgtttggccaatcccattaatggtaagctgagaatgtccggccagtccc

SEQ ID NO: 44229 - DNA, 4824 bp, Zea Mays
tattgtcgtgccgactagtgttatgctaaattgggagactgaatttcttaagtggtgtcctgcttttaaaatactgacttatttcggaagcgcaaaggagagaaagcagaagcgtcagggctggatgaaaccaaatttcttccatgtttgcatcacaacatataggcttgtcatacaggactctaaagtgtttaagagaaagaagtggaagtatcttattcttgatgaggctcatctgataaagaactggaaatcacaacgttggcagactttgctcaactttaattcaaagagacgtattcttctgactggaactccactgcaaaatgaccttatggaactttggtccctcatgcattttctgatgcctcatgtgtttcagtctcatcaagagttcaaggattggttctgcaatccaatttctgggatggtggaaggtcaagataaagtaaacaaagaaattatagatcggttgcacaatgtccttcgtccatttatactgcgtcgactgaaaagagatgttgagaaacagttaccaaagaagcaagagcatgtcatatattgccgactttctagaaggcaaagaaacttgtatgaagattttattgctagctcagagactcaagcaacactggcaagtgggaattattttggcatgataagcatcattatgcaacttagaaaggtctgtaaccatccagatctttttgaaggtcggccaataataagctcatttgacatggctgggattaacatgcagctcagctattcagtctgcatgctccttgataagagtccattttctcaggtgggactgtctgatatgaatttagtgtttacgcaaaatgaatttagcatgagttcctgggaagctgatgaggtcatttctgcctttcctttgagtaccacttcctggaaccatgaccttgatactttttgctctaataaggatcgtcagggaagtaatttgacaaacatttttgaagatattcagaaagcactacaggaggagagaataaaggaatccagagaaagggcagcttccattgcatggtggaatagagttagatgccaaaagaggcctgtctatggcacaaacatgatacatgttttgactgtaaagcatcatgtatcaaatattcttgataagaggaacaaccctttgtgccacatggactattcatcaagccttgcagatcttgttcttccatctgtggaacgctttcagaaaatgcttgatattgttgaatcatttacattcgcaattcctgctgctcgagctcctccccctgtttgctggtacagcaaaggaaactctcctgtttttattgatccagcatatagagaaaaatgcatgaacgagttttctcccatcctgtctcctataaggaacttgctattctgttaaggcgcttgaagtcagaagggcacagggccttgatatttactcagatgactaagatgcttgatgtcttggaagagttcataaatctatatggatatacatatttacgtttagatggttctactcccccagaagagaggcagactctgatgcagaggttcaacacaaatccaaagttcttccttttcattttgtccactcgaagtggtggtgtgggaatcaaccttgtaggtgcagacactgtcatcttctatgacagtgactggaaccctgcaatggaccaacaagcacaggacagatgccacaggattggtcagactcgtgaagttcacatatatagactcattagtgaaagcactatagaggagaacattctcaagaaagcaaatcagaaacgagctcttgatgatttagtgatacaacgaggtagctacaatacggaattcttcaagaaacttgatcctatggaattcttttccgggcacacatctcttcatgcagaagatcaggagaagaattgctctacaacctcaggagtttcaaatgatgttgatctggctctgtcaattgcagatgttgaagcagctattagacaagcagaagatgaagctgactatatggctctcaagaagctggaggaggaagaagccgtggacaatcaagaattcagtgaggaggctgcgggcagacaagaggaggatgaattggttaatgaggagaatggaaaacccgatgagcacattaacgaagaacaaaaatataactcttctgatgtagagaaggagaagcacattactctgtctaccaatcgattaaataaggaaaaggctcttacattggctgttggtgatgaagatactgacatgcttgctgatgtgaaacagatggcagctgcagcagctgcagcaggacaagcgagttcatcatttgagaaccagctccggccaattgatagatatgcaatgcgctttatggaactctgggatccagtaattgacaaagctgctttaaatcatcaagtaaatgttgaggaggaagaatgggagcttgatcgtattgaaaaattcaaagaggatttagaagcagaaattgatgaggaccaagaaccactttcttatgaatcatgggatgttgattttgctacgacagcctatcggcaacatgttgaggctttaactcaaaagcagttgttagaagaacaggaaaggcaagctcaggaagcaacaaaagagttggaggagaagaatgataatatgagcagtcaccacagaaagtcaaaaaagaacaaaaagaagacaggcaaactcaagcccctgaaaagagtgcgtctgtcgcctgaatcagaagtcatactggaggaaacctctgtagataatgcaccctcacctgagcttacaagtgatgaatcgccacaccattattgtaacaagcgtaagaagattacggttgccactgaggaaaatagtaacagcagaagtttaaagaagctcaagaaaactactaaatcaagttttatttctgaagccttgtcacctaggctgaaggaggaccttaatgattcagattcaaaatcagtgggtagaactaaaagtgatggcagatttttcatcccttgcatgccagtgaaacgtgttattgtaataaagcctgagagattgaaaaggaagggaatatggtctcgagattgtgcttcagactcatggtcatctgaggaagatgcagttctttgtggaactgttcatgagtatggtccactttgggaattggcaagtgattttcttcattttttgccaggcggttccttgtataggggaagatatcatcatcctgtgcattgctgtgagagatacagagaactgttctgcaaacatggaatgtcagcaacagataattctaacagtgaaaaggttccttctgggactggaaaggctatacttagagtgtctgaggatagcatcagaagcttgttatgatggtgaaagttctcattgggcatcatcagcttttcacataaatgatgctgcccgccacaaatctggttcaaagtctataggaaagcacaaagccgcattggaatctggtagacttctcaaatccaaagttcagaagattactgaatcgcatcaggaaggggcaattgctatgagtagttttctccgtatgcctgctcaactattgccaagtacagctgacttccacattagtgactccctatctgactttggtatcagagattctgaattctatttttccgaggatctcttgcaagaggttgacgcccttgagttcttcccagatcagggtgactctggtctccttcctggtattgaagagttagaatctctttcggatttcacagatatcggatgaacatagatgagcaaattattgttgatgggatgccctcctataccaagaggagacaagattgcctctggcaggagcccaaggatacaggttgaattgctcagccgtgcacagatgtgttgcaagcagcaagctatcatcatggctggctggagcaaagcactggcttggtgaggtcacattgatctgacaagctcggaggatgggtttgcactaatggcggcatttgggtaatttccatacatgtatgtatattggtagtctagaatcgtaggatgtagaaatgcctccctcatttgtgtttgagggtaggaccttgtaactcgaccacatggaaattttgttgagcaggtaccaacatagaagggaaaagaagaggccctcagcatcacccatttgtcgctgtatctcttgttatgttcattctctgtttaatccaatgctgtttggctatcttgccattgaaaacatctcagatgtcaagttggtggtgtacatatctatcagaagtttaggatgcggcgtcaatatagctgccaaagaatgatcagtcaagtgcaacttatgggcacattatatatttggtcaggactcaacgcatggtatcaatattggcagaaatggtgttccagatgcacttgaggactgcaatttctggtttgattgagacaccggagacaggtttttcataggaggtaaagagcgtggtcatagttgtacatgtaataaaattatgtagggtagtaatctccatcctgtacttttgggcttatggttctttggactctcggtctcggttatgcacttgtagaacagcgggctgctgctgtgagcctgtaacaatgctattgattgttccccaccatattgttgttttggtaagtagactctgcatcactgcaaagcggcgttagatactgtgacgggtctgtttcgctcaaaaatactttgagcttgtattcagtcttggcctccaataatctgtaccgctgtacgctgggaatgtttggccaatcccattaatggtaagctgagaatgtccggccagtccc

SEQ ID NO: 44230 - DNA, 4627 bp, Zea Mays
tattgtcgtgccgactagtgttatgctaaattgggagactgaatttcttaagtggtgtcctgcttttaaaatactgacttatttcggaagcgcaaaggagagaaagcagaagcgtcagggctggatgaaaccaaatttcttccatgtttgcatcacaacatataggcttgtcatacaggactctaaagtgtttaagagaaagaagtggaagtatcttattcttgatgaggctcatctgataaagaactggaaatcacaacgttggcagactttgctcaactttaattcaaagagacgtattcttctgactggaactccactgcaaaatgaccttatggaactttggtccctcatgcattttctgatgcctcatgtgtttcagtctcatcaagagttcaaggattggttctgcaatccaatttctgggatggtggaaggtcaagataaagtaaacaaagaaattatagatcggttgcacaatgtccttcgtccatttatactgcgtcgactgaaaagagatgttgagaaacagttaccaaagaagcaagagcatgtcatatattgccgactttctagaaggcaaagaaacttgtatgaagattttattgctagctcagagactcaagcaacactggcaagtgggaattattttggcatgataagcatcattatgcaacttagaaaggtctgtaaccatccagatctttttgaaggtcggccaataataagctcatttgacatggctgggattaacatgcagctcagctattcagtctgcatgctccttgataagagtccattttctcaggtgggactgtctgatatgaatttagtgtttacgcaaaatgaatttagcatgagttcctgggaagctgatgaggtcatttctgcctttcctttgagtaccacttcctggaaccatgaccttgatactttttgctctaataaggatcgtcagggaagtaatttgacaaacatttttgaagatattcagaaagcactacaggaggagagaataaaggaatccagagaaagggcagcttccattgcatggtggaatagagttagatgccaaaagaggcctgtctatggcacaaacatgatacatgttttgactgtaaagcatcatgtatcaaatattcttgataagaggaacaaccctttgtgccacatggactattcatcaagccttgcagatcttgttcttccatctgtggaacgctttcagaaaatgcttgatattgttgaatcatttacattcgcaattcctgctgctcgagctcctccccctgtttgctggtacagcaaaggaaactctcctgtttttattgatccagcatatagagaaaaatgcatgaacgagttttctcccatcctgtctcctataaggaacttgctattctgttaaggcgcttgaagtcagaagggcacagggccttgatatttactcagatgactaagatgcttgatgtcttggaagagttcataaatctatatggatatacatatttacgtttagatggttctactcccccagaagagaggcagactctgatgcagaggttcaacacaaatccaaagttcttccttttcattttgtccactcgaagtggtggtgtgggaatcaaccttgtaggtgcagacactgtcatcttctatgacagtgactggaaccctgcaatggaccaacaagcacaggacagatgccacaggattggtcagactcgtgaagttcacatatatagactcattagtgaaagcactatagaggagaacattctcaagaaagcaaatcagaaacgagctcttgatgatttagtgatacaacgaggtagctacaatacggaattcttcaagaaacttgatcctatggaattcttttccgggcacacatctcttcatgcagaagatcaggagaagaattgctctacaacctcaggagtttcaaatgatgttgatctggctctgtcaattgcagatgttgaagcagctattagacaagcagaagatgaagctgactatatggctctcaagaagctggaggaggaagaagccgtggacaatcaagaattcagtgaggaggctgcgggcagacaagaggaggatgaattggttaatgaggagaatggaaaacccgatgagcacattaacgaagaacaaaaatataactcttctgatgtagagaaggagaagcacattactctgtctaccaatcgattaaataaggaaaaggctcttacattggctgttggtgatgaagatactgacatgcttgctgatgtgaaacagatggcagctgcagcagctgcagcaggacaagcgagttcatcatttgagaaccagctccggccaattgatagatatgcaatgcgctttatggaactctgggatccagtaattgacaaagctgctttaaatcatcaagtaaatgttgaggaggaagaatgggagcttgatcgtattgaaaaattcaaagaggatttagaagcagaaattgatgaggaccaagaaccactttcttatgaatcatgggatgttgattttgctacgacagcctatcggcaacatgttgaggctttaactcaaaagcagttgttagaagaacaggaaaggcaagctcaggaagcaacaaaagagttggaggagaagaatgataatatgaggatcaagctcagatgttggtgaatgtgaccagtgaacttcctaacaatgaattgcttctccagaaacacttcatggctgtaatttcgtctgtttggagatcaaaatgtcaccgtgatacctcctgttttacgaacacttactctagtgcattacatgtgttttctcctgtgaagaaacctggtggatcatgtgagaactggcccatggtaaactttagaccaagcttcaatctagttaggaaagcccttgcagatgttcaggctaagtctacactaatggtgattccacctccgtcaaggaatcaggaatacccatgcaattatttagaattagagttagatttcttgaaagatcaacatgcttatgatgaagacatcccatctgtagtaaatgtgtccatacaggaaccagaaccatccaaacagacgccagagccagtggaacaatcgttgttgtctgcactttcttgtagacaggctgagaaccggctcaggatagcatcagaagcttgttatgatggtgaaagttctcattgggcatcatcagcttttcacataaatgatgctgcccgccacaaatctggttcaaagtctataggaaagcacaaagccgcattggaatctggtagacttctcaaatccaaagttcagaagattactgaatcgcatcaggaaggggcaattgctatgagtagttttctccgtatgcctgctcaactattgccaagtacagctgacttccacattagtgactccctatctgactttggtatcagagattctgaattctatttttccgaggatctcttgcaagaggttgacgcccttgagttcttcccagatcagggtgactctggtctccttcctggtattgaagagttagaatctctttcggatttcacagatatcggatgaacatagatgagcaaattattgttgatgggatgccctcctataccaagaggagacaagattgcctctggcaggagcccaaggatacaggttgaattgctcagccgtgcacagatgtgttgcaagcagcaagctatcatcatggctggctggagcaaagcactggcttggtgaggtcacattgatctgacaagctcggaggatgggtttgcactaatggcggcatttgggtaatttccatacatgtatgtatattggtagtctagaatcgtaggatgtagaaatgcctccctcatttgtgtttgagggtaggaccttgtaactcgaccacatggaaattttgttgagcaggtaccaacatagaagggaaaagaagaggccctcagcatcacccatttgtcgctgtatctcttgttatgttcattctctgtttaatccaatgctgtttggctatcttgccattgaaaacatctcagatgtcaagttggtggtgtacatatctatcagaagtttaggatgcggcgtcaatatagctgccaaagaatgatcagtcaagtgcaacttatgggcacattatatatttggtcaggactcaacgcatggtatcaatattggcagaaatggtgttccagatgcacttgaggactgcaatttctggtttgattgagacaccggagacaggtttttcataggaggtaaagagcgtggtcatagttgtacatgtaataaaattatgtagggtagtaatctccatcctgtacttttgggcttatggttctttggactctcggtctcggttatgcacttgtagaacagcgggctgctgctgtgagcctgtaacaatgctattgattgttccccaccatattgttgttttggtaagtagactctgcatcactgcaaagcggcgttagatactgtgacgggtctgtttcgctcaaaaatactttgagcttgtattcagtcttggcctccaataatctgtaccgctgtacgctgggaatgtttggccaatcccattaatggtaagctgagaatgtccggccagtccc

SEQ ID NO: 44231 - DNA, 3404 bp, Zea Mays
tattgtcgtgccgactagtgttatgctaaattgggagactgaatttcttaagtggtgtcctgcttttaaaatactgacttatttcggaagcgcaaaggagagaaagcagaagcgtcagggctggatgaaaccaaatttcttccatgtttgcatcacaacatataggcttgtcatacaggactctaaagtgtttaagagaaagaagtggaagtatcttattcttgatgaggctcatctgataaagaactggaaatcacaacgttggcagactttgctcaactttaattcaaagagacgtattcttctgactggaactccactgcaaaatgaccttatggaactttggtccctcatgcattttctgatgcctcatgtgtttcagtctcatcaagagttcaaggattggttctgcaatccaatttctgggatggtggaaggtcaagataaagtaaacaaagaaattatagatcggttgcacaatgtccttcgtccatttatactgcgtcgactgaaaagagatgttgagaaacagttaccaaagaagcaagagcatgtcatatattgccgactttctagaaggcaaagaaacttgtatgaagattttattgctagctcagagactcaagcaacactggcaagtgggaattattttggcatgataagcatcattatgcaacttagaaaggtctgtaaccatccagatctttttgaaggtcggccaataataagctcatttgacatggctgggattaacatgcagctcagctattcagtctgcatgctccttgataagagtccattttctcaggtgggactgtctgatatgaatttagtgtttacgcaaaatgaatttagcatgagttcctgggaagctgatgaggtcatttctgcctttcctttgagtaccacttcctggaaccatgaccttgatactttttgctctaataaggatcgtcagggaagtaatttgacaaacatttttgaagatattcagaaagcactacaggaggagagaataaaggaatccagagaaagggcagcttccattgcatggtggaatagagttagatgccaaaagaggcctgtctatggcacaaacatgatacatgttttgactgtaaagcatcatgtatcaaatattcttgataagaggaacaaccctttgtgccacatggactattcatcaagccttgcagatcttgttcttccatctgtggaacgctttcagaaaatgcttgatattgttgaatcatttacattcgcaattcctgctgctcgagctcctccccctgtttgctggtacagcaaaggaaactctcctgtttttattgatccagcatatagagaaaaatgcatgaacgagttttctcccatcctgtctcctataaggaacttgctattctgttaaggcgcttgaagtcagaagggcacagggccttgatatttactcagatgactaagatgcttgatgtcttggaagagttcataaatctatatggatatacatatttacgtttagatggttctactcccccagaagagaggcagactctgatgcagaggttcaacacaaatccaaagttcttccttttcattttgtccactcgaagtggtggtgtgggaatcaaccttgtaggtgcagacactgtcatcttctatgacagtgactggaaccctgcaatggaccaacaagcacaggacagatgccacaggattggtcagactcgtgaagttcacatatatagactcattagtgaaagcactatagaggagaacattctcaagaaagcaaatcagaaacgagctcttgatgatttagtgatacaacgaggtagctacaatacggaattcttcaagaaacttgatcctatggaattcttttccgggcacacatctcttcatgcagaagatcaggagaagaattgctctacaacctcaggagtttcaaatgatgttgatctggctctgtcaattgcagatgttgaagcagctattagacaagcagaagatgaagctgactatatggctctcaagaagctggaggaggaagaagccgtggacaatcaagaattcagtgaggaggctgcgggcagacaagaggaggatgaattggttaatgaggagaatggaaaacccgatgagcacattaacgaagaacaaaaatataactcttctgatgtagagaaggagaagcacattactctgtctaccaatcgattaaataaggaaaaggctcttacattggctgttggtgatgaagatactgacatgcttgctgatgtgaaacagatggcagctgcagcagctgcagcaggacaagcgagttcatcatttgagaaccagctccggccaattgatagatatgcaatgcgctttatggaactctgggatccagtaattgacaaagctgctttaaatcatcaagtaaatgttgaggaggaagaatgggagcttgatcgtattgaaaaattcaaagaggatttagaagcagaaattgatgaggaccaagaaccactttcttatgaatcatgggatgttgattttgctacgacagcctatcggcaacatgttgaggctttaactcaaaagcagttgttagaagaacaggaaaggcaagctcaggaagcaacaaaagagttggaggagaagaatgataatatgagtcaccacagaaagtcaaaaaagaacaaaaagaagacaggcaaactcaagcccctgaaaagagtgcgtctgtcgcctgaatcagaagtcatactggaggaaacctctgtagataatgcaccctcacctgagcttacaagtgatgaatcgccacaccattattgtaacaagcgtaagaagattacggttgccactgaggaaaatagtaacagcagaagtttaaagaagctcaagaaaactactaaatcaagttttatttctgaagccttgtcacctaggctgaaggaggaccttaatgattcagattcaaaatcagtgggtagaactaaaagtgatggcagatttttcatcccttgcatgccagtgaaacgtgttattgtaataaagcctgagagattgaaaaggaagggaatatggtctcgagattgtgcttcagactcatggtcatctgaggaagatgcagttctttgtggaactgttcatgagtatggtccactttgggaattggcaagtgattttcttcattttttgccaggcggttccttgtataggggaagatatcatcatcctgtgcattgctgtgagagatacagagaactgttctgcaaacatggaatgtcagcaacagataattctaacagtgaaaaggttccttctgggactggaaaggctatacttagagtgtctgaggcagtgcatgttttgcttgttggcgtctacattgacgactaggttatcgtcgg

SEQ ID NO: 44232 - DNA, 3389 bp, Zea Mays
tattgtcgtgccgactagtgttatgctaaattgggagactgaatttcttaagtggtgtcctgcttttaaaatactgacttatttcggaagcgcaaaggagagaaagcagaagcgtcagggctggatgaaaccaaatttcttccatgtttgcatcacaacatataggcttgtcatacaggactctaaagtgtttaagagaaagaagtggaagtatcttattcttgatgaggctcatctgataaagaactggaaatcacaacgttggcagactttgctcaactttaattcaaagagacgtattcttctgactggaactccactgcaaaatgaccttatggaactttggtccctcatgcattttctgatgcctcatgtgtttcagtctcatcaagagttcaaggattggttctgcaatccaatttctgggatggtggaaggtcaagataaagtaaacaaagaaattatagatcggttgcacaatgtccttcgtccatttatactgcgtcgactgaaaagagatgttgagaaacagttaccaaagaagcaagagcatgtcatatattgccgactttctagaaggcaaagaaacttgtatgaagattttattgctagctcagagactcaagcaacactggcaagtgggaattattttggcatgataagcatcattatgcaacttagaaaggtctgtaaccatccagatctttttgaaggtcggccaataataagctcatttgacatggctgggattaacatgcagctcagctattcagtctgcatgctccttgataagagtccattttctcaggtgggactgtctgatatgaatttagtgtttacgcaaaatgaatttagcatgagttcctgggaagctgatgaggtcatttctgcctttcctttgagtaccacttcctggaaccatgaccttgatactttttgctctaataaggatcgtcagggaagtaatttgacaaacatttttgaagatattcagaaagcactacaggaggagagaataaaggaatccagagaaagggcagcttccattgcatggtggaatagagttagatgccaaaagaggcctgtctatggcacaaacatgatacatgttttgactgtaaagcatcatgtatcaaatattcttgataagaggaacaaccctttgtgccacatggactattcatcaagccttgcagatcttgttcttccatctgtggaacgctttcagaaaatgcttgatattgttgaatcatttacattcgcaattcctgctgctcgagctcctccccctgtttgctggtacagcaaaggaaactctcctgtttttattgatccagcatatagagaaaaatgcatgaacgagttttctcccatcctgtctcctataaggaacttgctattctgttaaggcgcttgaagtcagaagggcacagggccttgatatttactcagatgactaagatgcttgatgtcttggaagagttcataaatctatatggatatacatatttacgtttagatggttctactcccccagaagagaggcagactctgatgcagaggttcaacacaaatccaaagttcttccttttcattttgtccactcgaagtggtggtgtgggaatcaaccttgtaggtgcagacactgtcatcttctatgacagtgactggaaccctgcaatggaccaacaagcacaggacagatgccacaggattggtcagactcgtgaagttcacatatatagactcattagtgaaagcactatagaggagaacattctcaagaaagcaaatcagaaacgagctcttgatgatttagtgatacaacgaggtagctacaatacggaattcttcaagaaacttgatcctatggaattcttttccgggcacacatctcttcatgcagaagatcaggagaagaattgctctacaacctcaggagtttcaaatgatgttgatctggctctgtcaattgcagatgttgaagcagctattagacaagcagaagatgaagctgactatatggctctcaagaagctggaggaggaagaagccgtggacaatcaagaattcagtgaggaggctgcgggcagacaagaggaggatgaattggttaatgaggagaatggaaaacccgatgagcacattaacgaagaacaaaaatataactcttctgatgtagagaaggagaagcacattactctgtctaccaatcgattaaataaggaaaaggctcttacattggctgttggtgatgaagatactgacatgcttgctgatgtgaaacagatggcagctgcagcagctgcagcaggacaagcgagttcatcatttgagaaccagctccggccaattgatagatatgcaatgcgctttatggaactctgggatccagtaattgacaaagctgctttaaatcatcaagtaaatgttgaggaggaagaatgggagcttgatcgtattgaaaaattcaaagaggatttagaagcagaaattgatgaggaccaagaaccactttcttatgaatcatgggatgttgattttgctacgacagcctatcggcaacatgttgaggctttaactcaaaagcagttgttagaagaacaggaaaggcaagctcaggaagcaacaaaagagttggaggagaagaatgataatatgagtcaccacagaaagtcaaaaaagaacaaaaagaagacaggcaaactcaagcccctgaaaagagtgcgtctgtcgcctgaatcagaagtcatactggaggaaacctctgtagataatgcaccctcacctgagcttacaagtgatgaatcgccacaccattattgtaacaagcgtaagaagattacggttgccactgaggaaaatagtaacagcagaagtttaaagaagctcaagaaaactactaaatcaagttttatttctgaagccttgtcacctaggctgaaggaggaccttaatgattcagattcaaaatcagtgggtagaactaaaagtgatggcagatttttcatcccttgcatgccagtgaaacgtgttattgtaataaagcctgagagattgaaaaggaagggaatatggtctcgagattgtgcttcagactcatggtcatctgaggaagatgcagttctttgtggaactgttcatgagtatggtccactttgggaattggcaagtgattttcttcattttttgccaggcggttccttgtataggggaagatatcatcatcctgtgcattgctgtgagagatacagagaactgttctgcaaacatggaatgtcagcaacagataattctaacagtgaaaaggttccttctgggactggaaaggctatacttagagtgtctgaggagagctgcgtatcattatattaagaagaagatattag

SEQ ID NO: 44233 - DNA, 1591 bp, Zea Mays
atggcgtcaaaaggtccccggtcaaagttagaccatgagacaagagctaggcgtcagaaggctcttgaagctccaagggagcctcgacgaccaaaagttcactgggaccatgtccttgctgagatgatgtggctgtcaaaggagtttgattctgagagaaaatggaagttgtccatggccaaaaagattgctcaaagagcaaataagagcatagttgaccaagcaacaaagggcgagagaaaacagaaggagaaagaacatagaatgcgaaaagttgcccttaatatttcaaaggatgtgaagaagttctggatcaaaatagaaaagctggttgtttataagcaccagctggagcttgaggagagaaagaagaaggcacttgataagcaacttgattttcttttaggtcagactgaaaggtattcgacaatgttggcggaaaatcttgtggatatgccctatcccgaaaacctagaaaacaggacttcacagataaaccaacgatcccatcaagaggaagtaccagaaaagaacttaaatgcaaccatttctgatgattttgataatatggaagtcgatgatgattatgagagctccttggacgaagagccagaagatgatgagcacacaattgatgaggatgaagctcagatcactgaagctgagcgcaacgaagaactagctgctttagaggcagaagctgatctaccacttgatgttattctcaagatgtacacaaaaactaaagttagcagggaaggcagtccagatagcaaagacatgctaagtaacttaggttcgaagattttgattgtagattctttgaagcaggctaatgggcgtgatcatgaacctgctcactcttcaagtgaagatggcaattcttctgaggaagtggatgatggccattcttatgctgagtttgtgaagaagaatcattgctgtgtaccttcctggtgcggcgccttcgcagttaggctcatggctctatccttggctgcagctatcgaggacaaagattacattgctactgaagaagtaaaggatgatgaagcaactttgtctgaagaggaagaattggcaaaaaaagaagatcctgattatctggaagaggttaagttactgcagaaggagagcgagataccactagaagaacttctcgcgaggatggctgtgcagatcatgaaacagcggagttgaagaattcaccccattttgttgaagaggtcaatactgacatgtctttggatgatcaatctgtgagcattttggaagcgaaaagtgatttatttgtggatcaccaatccagggatgtgctggaaactgaggacacggctccacgatcagaaatcgcatcagagccttgtgctaaacaaaattttgatgaagagaataatctcactgatgttaagacagtcaatggagataagagtgatgatgtaaagagtgatgatgtaattgctgatgctgcagctgctgcaagatcagcacaaccaactggcaacaccttcttgactacaaaagtgcgcacgaaattcccattccttcttaagcattctcttcgtgaataccagcatatagggctggattg

SEQ ID NO: 44234 - DNA, 1573 bp, Zea Mays
atggcgtcaaaaggtccccggtcaaagttagaccatgagacaagagctaggcgtcagaaggctcttgaagctccaagggagcctcgacgaccaaaagttcactgggaccatgtccttgctgagatgatgtggctgtcaaaggagtttgattctgagagaaaatggaagttgtccatggccaaaaagattgctcaaagagcaaataagagcatagttgaccaagcaacaaagggcgagagaaaacagaaggagaaagaacatagaatgcgaaaagttgcccttaatatttcaaaggatgtgaagaagttctggatcaaaatagaaaagctggttgtttataagcaccagctggagcttgaggagagaaagaagaaggcacttgataagcaacttgattttcttttaggtcagactgaaaggtattcgacaatgttggcggaaaatcttgtggatatgccctatcccgaaaacctagaaaacaggacttcacagataaaccaacgatcccatcaagaggaagtaccagaaaagaacttaaatgcaaccatttctgatgattttgataatatggaagtcgatgatgattatgagagctccttggacgaagagccagaagatgatgagcacacaattgatgaggatgaagctcagatcactgaagctgagcgcaacgaagaactagctgctttagaggcagaagctgatctaccacttgatgttattctcaagatgtacacaaaaactaaagttcaatatgtctcagttagcagggaaggcagtccagatagcaaagacatgctaagtaacttaggttcgaagattttgattgtagattctttgaagcaggctaatgggcgtgatcatgaacctgctcactcttcaagtgaagatggcaattcttctgaggaagtggatgatggccattcttatgctgagtttgtgaagaagaatcatggtaaaagtaacggaaatatttcttctatcaatgaccaggaggacaaagattacattgctactgaagaagtaaaggatgatgaagcaactttgtctgaagaggaagaattggcaaaaaaagaagatcctgattatctggaagaggttaagttactgcagaaggagagcgagataccactagaagaacttctcgcgaggtaccgagagatcatgaaacagcggagttgaagaattcaccccattttgttgaagaggtcaatactgacatgtctttggatgatcaatctgtgagcattttggaagcgaaaagtgatttatttgtggatcaccaatccagggatgtgctggaaactgaggacacggctccacgatcagaaatcgcatcagagccttgtgctaaacaaaattttgatgaagagaataatctcactgatgttaagacagtcaatggagataagagtgatgatgtaaagagtgatgatgtaattgctgatgctgcagctgctgcaagatcagcacaaccaactggcaacaccttcttgactacaaaagtgcgcacgaaattcccattccttcttaagcattctcttcgtgaataccagcatatagggctggattg

SEQ ID NO: 44235 - DNA, 1561 bp, Zea Mays
atggcgtcaaaaggtccccggtcaaagttagaccatgagacaagagctaggcgtcagaaggctcttgaagctccaagggagcctcgacgaccaaaagttcactgggaccatgtccttgctgagatgatgtggctgtcaaaggagtttgattctgagagaaaatggaagttgtccatggccaaaaagattgctcaaagagcaaataagagcatagttgaccaagcaacaaagggcgagagaaaacagaaggagaaagaacatagaatgcgaaaagttgcccttaatatttcaaaggatgtgaagaagttctggatcaaaatagaaaagctggttgtttataagcaccagctggagcttgaggagagaaagaagaaggcacttgataagcaacttgattttcttttaggtcagactgaaaggtattcgacaatgttggcggaaaatcttgtggatatgccctatcccgaaaacctagaaaacaggacttcacagataaaccaacgatcccatcaagaggaagtaccagaaaagaacttaaatgcaaccatttctgatgattttgataatatggaagtcgatgatgattatgagagctccttggacgaagagccagaagatgatgagcacacaattgatgaggatgaagctcagatcactgaagctgagcgcaacgaagaactagctgctttagaggcagaagctgatctaccacttgatgttattctcaagatgtacacaaaaactaaagttagcagggaaggcagtccagatagcaaagacatgctaagtaacttaggttcgaagattttgattgtagattctttgaagcaggctaatgggcgtgatcatgaacctgctcactcttcaagtgaagatggcaattcttctgaggaagtggatgatggccattcttatgctgagtttgtgaagaagaatcatggtaaaagtaacggaaatatttcttctatcaatgaccaggaggacaaagattacattgctactgaagaagtaaaggatgatgaagcaactttgtctgaagaggaagaattggcaaaaaaagaagatcctgattatctggaagaggttaagttactgcagaaggagagcgagataccactagaagaacttctcgcgaggatggctgtgcagatcatgaaacagcggagttgaagaattcaccccattttgttgaagaggtcaatactgacatgtctttggatgatcaatctgtgagcattttggaagcgaaaagtgatttatttgtggatcaccaatccagggatgtgctggaaactgaggacacggctccacgatcagaaatcgcatcagagccttgtgctaaacaaaattttgatgaagagaataatctcactgatgttaagacagtcaatggagataagagtgatgatgtaaagagtgatgatgtaattgctgatgctgcagctgctgcaagatcagcacaaccaactggcaacaccttcttgactacaaaagtgcgcacgaaattcccattccttcttaagcattctcttcgtgaataccagcatatagggctggattg

SEQ ID NO: 44236 - DNA, 1582 bp, Zea Mays
atggcgtcaaaaggtccccggtcaaagttagaccatgagacaagagctaggcgtcagaaggctcttgaagctccaagggagcctcgacgaccaaaagttcactgggaccatgtccttgctgagatgatgtggctgtcaaaggagtttgattctgagagaaaatggaagttgtccatggccaaaaagattgctcaaagagcaaataagagcatagttgaccaagcaacaaagggcgagagaaaacagaaggagaaagaacatagaatgcgaaaagttgcccttaatatttcaaaggatgtgaagaagttctggatcaaaatagaaaagctggttgtttataagcaccagctggagcttgaggagagaaagaagaaggcacttgataagcaacttgattttcttttaggtcagactgaaaggtattcgacaatgttggcggaaaatcttgtggatatgccctatcccgaaaacctagaaaacaggacttcacagataaaccaacgatcccatcaagaggaagtaccagaaaagaacttaaatgcaaccatttctgatgattttgataatatggaagtcgatgatgattatgagagctccttggacgaagagccagaagatgatgagcacacaattgatgaggatgaagctcagatcactgaagctgagcgcaacgaagaactagctgctttagaggcagaagctgatctaccacttgatgttattctcaagatgtacacaaaaactaaagttcaatatgtctcagttagcagggaaggcagtccagatagcaaagacatgctaagtaacttaggttcgaagattttgattattctttgaagcaggctaatgggcgtgatcatgaacctgctcactcttcaagtgaagatggcaattcttctgaggaagtggatgatggccattcttatgctgagtttgtgaagaagaatcatggtaaaagtaacggaaatatttcttctatcaatgaccaggaggacaaagattacattgctactgaagaagtaaaggatgatgaagcaactttgtctgaagaggaagaattggcaaaaaaagaagatcctgattatctggaagaggttaagttactgcagaaggagagcgagataccactagaagaacttctcgcgaggtaccgagaggatggctgtgcagatcatgaaacagcggagttgaagaattcaccccattttgttgaagaggtcaatactgacatgtctttggatgatcaatctgtgagcattttggaagcgaaaagtgatttatttgtggatcaccaatccagggatgtgctggaaactgaggacacggctccacgatcagaaatcgcatcagagccttgtgctaaacaaaattttgatgaagagaataatctcactgatgttaagacagtcaatggagataagagtgatgatgtaaagagtgatgatgtaattgctgatgctgcagctgctgcaagatcagcacaaccaactggcaacaccttcttgactacaaaagtgcgcacgaaattcccattccttcttaagcattctcttcgtgaataccagcatatagggctggattg

SEQ ID NO: 44237 - DNA, 1634 bp, Zea Mays
atgctctaagatatgatataggattggaaagatggcgtcaaaaggtccccggtcaaagttagaccatgagacaagagctaggcgtcagaaggctcttgaagctccaagggagcctcgacgaccaaaagttcactgggaccatgtccttgctgagatgatgtggctgtcaaaggagtttgattctgagagaaaatggaagttgtccatggccaaaaagattgctcaaagagcaaataagagcatagttgaccaagcaacaaagggcgagagaaaacagaaggagaaagaacatagaatgcgaaaagttgcccttaatatttcaaaggatgtgaagaagttctggatcaaaatagaaaagctggcaagttcatttttgacttctaatgtcatgagaaagcaggttgtttataagcaccagctggagcttgaggagagaaagaagaaggcacttgataagcaacttgattttcttttaggtcagactgaaaggtattcgacaatgttggcggaaaatcttgtggatatgccctatcccgaaaacctagaaaacaggacttcacagataaaccaacgatcccatcaagaggaagtaccagaaaagaacttaaatgcaaccatttctgatgattttgataatatggaagtcgatgatgattatgagagctccttggacgaagagccagaagatgatgagcacacaattgatgaggatgaagctcagatcactgaagctgagcgcaacgaagaactagctgctttagaggcagaagctgatctaccacttgatgttattctcaagatgtacacaaaaactaaagggaaggcagtccagatagcaaagacatgctaagtaacttaggttcgaagattttgattgtagattctttgaagcaggctaatgggcgtgatcatgaacctgctcactcttcaagtgaagatggcaattcttctgaggaagtggatgatggccattcttatgctgagtttgtgaagaagaatcatggtaaaagtaacggaaatatttcttctatcaatgaccaggaggacaaagattacattgctactgaagaagtaaaggatgatgaagcaactttgtctgaagaggaagaattggcaaaaaaagaagatcctgattatctggaagaggttaagttactgcagaaggagagcgagataccactagaagaacttctcgcgaggtaccgagaggatggctgtgcagatcatgaaacagcggagttgaagaattcaccccattttgttgaagaggtcaatactgacatgtctttggatgatcaatctgtgagcattttggaagcgaaaagtgatttatttgtggatcaccaatccagggatgtgctggaaactgaggacacggctccacgatcagaaatcgcatcagagccttgtgctaaacaaaattttgatgaagagaataatctcactgatgttaagacagtcaatggagataagagtgatgatgtaaagagtgatgatgtaattgctgatgctgcagctgctgcaagatcagcacaaccaactggcaacaccttcttgactacaaaagtgcgcacgaaattcccattccttcttaagcattctcttcgtgaataccagcatatagggctggattg

SEQ ID NO: 44238 - DNA, 1702 bp, Zea Mays
cttcaacacattggcgcatattttcctgggtcattgatttttttacccaaaactatggtaccagttcggtgctcatgctctaagatatgatataggattggaaagatggcgtcaaaaggtccccggtcaaagttagaccatgagacaagagctaggcgtcagaaggctcttgaagctccaagggagcctcgacgaccaaaagttcactgggaccatgtccttgctgagatgatgtggctgtcaaaggagtttgattctgagagaaaatggaagttgtccatggccaaaaagattgctcaaagagcaaataagagcatagttgaccaagcaacaaagggcgagagaaaacagaaggagaaagaacatagaatgcgaaaagttgcccttaatatttcaaaggatgtgaagaagttctggatcaaaatagaaaagctggcaagttcatttttgacttctaatgtcatgagaaagcaggttgtttataagcaccagctggagcttgaggagagaaagaagaaggcacttgataagcaacttgattttcttttaggtcagactgaaaggtattcgacaatgttggcggaaaatcttgtggatatgccctatcccgaaaacctagaaaacaggacttcacagataaaccaacgatcccatcaagaggaagtaccagaaaagaacttaaatgcaaccatttctgatgattttgataatatggaagtcgatgatgattatgagagctccttggacgaagagccagaagatgatgagcacacaattgatgaggatgaagctcagatcactgaagctgagcgcaacgaagaactagctgctttagaggcagaagctgatctaccacttgatgttattctcaagatgtacacaaaaactaaagttagcagggaaggcagtccagatagcaaagacatgctaagtaacttaggttcgaagattttgattgtagattctttgaagcaggctaatgggcgtgatcatgaacctgctcactcttcaagtgaagatggcaattcttctgaggaagtggatgatggccattcttatgctgagtttgtgaagaagaatcatggtaaaagtaacggaaatatttcttctatcaatgaccaggaggacaaagattacattgctactgaagaagtaaaggatgatgaagcaactttgtctgaagaggaagaattggcaaaaaaagaagatcctgattatctggaagaggttaagttactgcagaaggagagcgagataccactagaagaacttctcgcgaggtaccgagagatcatgaaacagcggagttgaagaattcaccccattttgttgaagaggtcaatactgacatgtctttggatgatcaatctgtgagcattttggaagcgaaaagtgatttatttgtggatcaccaatccagggatgtgctggaaactgaggacacggctccacgatcagaaatcgcatcagagccttgtgctaaacaaaattttgatgaagagaataatctcactgatgttaagacagtcaatggagataagagtgatgatgtaaagagtgatgatgtaattgctgatgctgcagctgctgcaagatcagcacaaccaactggcaacaccttcttgactacaaaagtgcgcacgaaattcccattccttcttaagcattctcttcgtgaataccagcatatagggctggattg

SEQ ID NO: 44239 - DNA, 1691 bp, Zea Mays
gccagatcccgccgcgggacctgcaggattggaaagatggcgtcaaaaggtccccggtcaaagttagaccatgagacaagagctaggcgtcagaaggctcttgaagctccaagggagcctcgacgaccaaaagttcactgggaccatgtccttgctgagatgatgtggctgtcaaaggagtttgattctgagagaaaatggaagttgtccatggccaaaaagattgctcaaagagcaaataagagcatagttgaccaagcaacaaagggcgagagaaaacagaaggagaaagaacatagaatgcgaaaagttgcccttaatatttcaaaggatgtgaagaagttctggatcaaaatagaaaagctggcaagttcatttttgacttctaatgtcatgagaaagcaggttgtttataagcaccagctggagcttgaggagagaaagaagaaggcacttgataagcaacttgattttcttttaggtcagactgaaaggtattcgacaatgttggcggaaaatcttgtggatatgccctatcccgaaaacctagaaaacaggacttcacagataaaccaacgatcccatcaagaggaagtaccagaaaagaacttaaatgcaaccatttctgatgattttgataatatggaagtcgatgatgattatgagagctccttggacgaagagccagaagatgatgagcacacaattgatgaggatgaagctcagatcactgaagctgagcgcaacgaagaactagctgctttagaggcagaagctgatctaccacttgatgttattctcaagatgtacacaaaaactaaagttcaatatgtctcagttagcagggaaggcagtccagatagcaaagacatgctaagtaacttaggttcgaagattttgattgtagattctttgaagcaggctaatgggcgtgatcatgaacctgctcactcttcaagtgaagatggcaattcttctgaggaagtggatgatggccattcttatgctgagtttgtgaagaagaatcattgctgtgtaccttcctggtgcggcgccttcgcagttaggctcatggctctatccttggctgcagctatcgaggacaaagattacattgctactgaagaagtaaaggatgatgaagcaactttgtctgaagaggaagaattggcaaaaaaagaagatcctgattatctggaagaggttaagttactgcagaaggagagcgagataccactagaagaacttctcgcgaggtaccgagaggatggctgtgcagatcatgaaacagcggagttgaagaattcaccccattttgttgaagaggtcaatactgacatgtctttggatgatcaatctgtgagcattttggaagcgaaaagtgatttatttgtggatcaccaatccagggatgtgctggaaactgaggacacggctccacgatcagaaatcgcatcagagccttgtgctaaacaaaattttgatgaagagaataatctcactgatgttaagacagtcaatggagataagagtgatgatgtaaagagtgatgatgtaattgctgatgctgcagctgctgcaagatcagcacaaccaactggcaacaccttcttgactacaaaagtgcgcacgaaattcccattccttcttaagcattctcttcgtgaataccagcatatagggctggattg

SEQ ID NO: 44240 - DNA, 1687 bp, Zea Mays
aagcacccccgtccgtgtctccctgactccctccctctagaattttacagtattctactcgctgcctgcgttccaaaacctttcgtcttttcccccgccgtctacaaagacttcacactcgcagccgcaggctgctccggcagactcctacaccgggaagacttctcctctcctctctcctctctcctctctcccttccactcgcgctctcctggataccgcgcgcggcgacgagatggcgatagatcacgcgacccctctcgggctgaagcggagaggcgccatgggcggaggcggcgagtgcgacgacggcagtgatacccggcggtggccgccgtggctgaggccgctgctgtccgcgagcttcttcgtccaatgcagggtccacgccgacgcgcacaagagcgagtgcaacatgtactgcctcgactgcatgggcggcgcgctctgcgcgctctgcctcgccgcgcgccaccgcgaccaccactccatccaggtcagtggagagcctagcgctgtgcgcagactggtgcagttcggcagttcaggcggctgcgttctcgttccccagtgcctctgcctccagcacatttcattcccctccgtcgccttctccatccgtctctctctttgcgtgttcgtgtttcgtttttgtttctctcttcatgacaaccaactgactagctcatgggcatgcgctgccgtcacgggctgtccgttcttccatcagatacggaggtcgtcgtaccacgacgtgatccgggtgtcggagatacagaaggtgctggacatcgccggcgtgcagacgtacatcatcaacagcgcgcgcgtggtgttcctcaacgagcggccgcagccccgcccgggcaagggcgtcaccaacacctgcgaggtctgcgagcgcagcctcctcgactgcttccgcttctgctcccttgggtgcaagatagtgggcacggcccgtggctaccgtcctgggaagaagaagcacggcggcggcggcggtaacaagaagagggcgtcgccggcgccggcgcttaaggacgtgcggtctgactcggaggactcgtgcaccagcaccagcggcgccagcagcgacaagagcagcgtcgtgcagagctcccctccgccgccgacctctgccagccaccgcccccccgggaacaagcgccggaagggcatcccgcaccggtcgcccttgggcagcctcatcgtcgagctctaggactcttcgtcagcgccaaggcaaggcaacgcactctgtatacatgacatagccccccgaagagaagggaataacaaacagtaagcctctggacgtggagggcgaagggcgacagcggtaagccgtaagatcggacaatccttagttttgcttcttctcaggttttgttttgcttttacagttactagcagtggtaccatcagtaagataaccgcgactaagttttgcagccttgtacattgtaatattattactatagaccatgactctccgatgcttagatgtatatagtaatagtatcagaacgtgggggtagcagtcgatcggcagcgaggtgttcgtcgtatgtgcatcataagctgtatgtaataaaaataagaaacgctgctccagatcctactgttgctcgctgcccccccccccctcacagcattggctgctgctattgctattgatattgcg

SEQ ID NO: 44241 - DNA, 4319 bp, Zea Mays
cccactacaacgagcgaaacctatcgcctcctccgatcgccattaacgggtcggtggctctgcgccaccacggcaccacctgtgcccgcgcggacgagacgctgctggcaagctcaccgcccctacagtcgacagcgagcacggcagctagcaggctagcgcacaccgaaccaactcccttttggccgtttcaaactcttttaaagccccaccagctggtgcaggcaccgtcatcactcctaggctcgaccgctcgaggccgaaaggcacgaccttcggccagtcgagcagctgggcgcgtggcgcggccagggacgagggcgccatgagctcgccggagaatggcgccgccccggaggccagcgggaagaagaagaagaaggcggaagaggaggaggtggtggccaaggtgccgttcctgaagctgttctcgttcgcggaccggtgggactgcgtgctgatggcggtgggctcgctgggcgcgtgcgcgcacggcgcctccgtcccggtcttcttcatcttcttcggcaagctcatcaacatcatcggcctcgcctacctcttccccaccaccgtctccggccgcgtcgccaagtactcgctggacttcgtgtacctcggcatcgtcatattcttctcgtcgtggaccgaggtggcgtgctggatgcacacgggcgagcggcaggcggcgaagatgcggctggcctacctgcgcgcgatgctggaccaggacatcgccgtcttcgacacggaggcgtccaccggcgaggtcatcaacgccatcaccagcgacatcctcgtcgtccaggacgccatctccgagaaggtgggcaacttcatgcactacatcagccggttcctggccggcttcgccatcggcttctcgcaggtgtggcagatcagcctcgtcaccctcgccatcgttccgctcatcgccatcgccggcggcacctacgcctacgtcaccatcggcctcatggcccgcgtgcgcaagtcctacgtcaaggctggcgagatcgccgaggaggcgttcgtcggcgaggagaaggccgtgaggtcgtaccgggaggcgcttctgaggacgtacaagtacggcaagaggggcggcctcgccaagggcctcggcctcggctccatgcactctgtgcttttcctctcgtgggcgctgctcatctggttcaccagcgtcgtcgtccacaagcggatatccaatggcggcgagtccttcaccaccatgctcaacgtcgtcatcgctggcctgtcgctcggccaggcggcgccgaacatttcgacgttcctgcgggcgaggacggcggcgtaccccatcttccagatgatcgagaggagcaccgtgaacacggcgagctccaggacgggccgcacgctgccggtggtcgacgggcacatccagttccgcaacgtcgacttcagctacccgtcacggccggacgttgtcatcctcgataggttcagcctgaacttccctgccggcaagatcgtcgctctcgtcggcggcagcgggtccggcaagagcaccgttgtctcgctcatcgagcgcttctatgagccgctgtccggctccattctgctcgatgggcacgacatcaaagagctcgacgtcaagtggctccgccgccagatcgggctggtcaaccaggagccggccctgttcgcgacgagcatccgggagaacatactctacggcaaaggcgacgctaccgcggaggagatcaaccacgcggcgaagctgtcggaggcgatcacgttcatcaaccacctccctgatcggtacgagacgcaggtcggcgagcgcgggatacagctgtccggcggccagaagcagcgcatcgcgatctcgagggcgatactgaagaacccgtcgatactgctcctagacgaggcgacgagcgcgctggacgccgagtccgagaagagcgtgcaggaggcgctggaccgcgtcatggtcggccgcaccaccgtggtgatcgcgcaccgcctgtcgaccatccggaacgccgatacgatcgcggtcgtcgacggaggcaggatcgtcgagacaggcacgcacgagcagctcatggcgaacccgtacagtgcctactcctcgctgatccaactccaagaggctgcccagctccaacacaagccttctttgtctgacagcgcaagcattaccaggccactaagtttcaagtattcaagggagttgtccgggaggacgagcatgggcgccagcttccgctccgacaaggactcaatcagccggtacggcggcgccggagaggcgcatgacgaggtgcgcaaggggaagcccgtgtccatgaagaagctctactccatggtgcgcccggactggttcttcggcctgtcgggcaccatcagtgccttcgtggccggctcccagatgccgctcttcgcgcttggcgtcacgcaggcactggtgtcctactacatgggctgggagaccacgaagctggaggtgcgaaagattgccgtgctcttctgctgcggcgcggtgctgacggtcgtgttccacgtgatcgagcatctcagcttcggcatcatgggcgagcggctcaccctgcgcgtccgggagaagatgttctcggcgatactgcggaacgagatcggctggttcgatgataccagcaacacgagcgccatgctgtcgtcgcggctcgaggctgacgcgacgcttgtgcgcaccatcgtcgtcgaccgctccaccatcctgctccagaacgtcggtatgatcgtgacgtcgctcatcatcgctttcatactcaactggagaatcacgctggtcgtccttgccacctatcccctcatggtcagcggccacatcagcgagaaaatgttcatgaaaggctacggcggcaacctcggcaagtcctatctgaaggccaacatgctcgccgcggaggcagtgagcaacatccggacggtggctgccttctgctccgaggagaaggtgataaagctctacgcggacgagctcagggagccttctaagaggtccttccggcgaggccagggcgccggcctcttttacggagtctcccagttcttcctcttctcatcctacgcactggcgttatggtatggttcagtgctgatgagcaaggaattggccagcttcaagtccgtgatgaagtccttcatggtgctcatagtgacggcgctggccatgggggagacactggcaatggcacctgatatcatcaaagggaaccagatggcgtcctcggtgttcgagatcctggaccgtaagaccgacgtccggatcgacacaggtgaggacatcaagagggtcgaggggctgatcgagctgcgcggcatcgagttccggtacccgtcgaggcccgacgtgaccgtgttcaagggacttgacctgctgatgaaggctggcaagagcatggcgcttgtcggcatgagcggctccggcaagagtaccgtgctgtcgctcatcctccgcttctacgacccgatcgccggaagagtcttgatcgatgggaaggacgtcaagaagcttaagctcaagtgtctcaggaaacacatcggcctggtccagcaagagccggcgctgttcgcgacgacgatctacgacaacatcctgtatggcaaggacggggccacggaggccgaggtcgtcgaggcggccaagctggcgaacgcgcactcgttcatcagctcgctgccggaggggtacaagaccaaggtcggggagcgcggcgtgcagctgtcgggcgggcagaagcagcgcatcgcgatcgcgcgcgccatcgtgaaggacccggccatcctgctgctggacgaggcgacgagcgcgctggacgtggagtcggagcgcgtcgtgcagcaggcgctgaacagggtgatgaggaaccggaccaccgtgatggtggcgcaccggctgtccacggtcaagaacgccgacgtcatctcggtgctgcaggacggcaagatcatagagcagggggcgcaccagcacctgatcgaggacaagaacggcgcctaccacaagctcgtcagcttgcagcagcagcaacagatgcagacgcagcagagctcatcagaagacatttgaataagatcgtgcgtttctgtatcttgctgtggctttgtctttcttgggcttttgtaaaagatctgcgctggttatcttttcaatgaaagggagtgttcagaattacaggatgaagcattattgggttcttattcctgactcccgtaaaaaaatatatatattgtacatagaatcttgcaatgtaattctgctccatggatctcaatgtttagtgcctacttctgattctatt

SEQ ID NO: 44242 - DNA, 4295 bp, Zea Mays
ctgacccactacaacgagcgaaacctatcgcctcctccgatcgccattaacgggtcggtggctctgcgccaccacggcaccacctgtgcccgcgcggacgagacgctgctggcaagctcaccgcccctacagtcgacagcgagcacggcagctagcaggctagcgcacaccgaaccaactcccttttggccgtttcaaactcttttaaagccccaccagctggtgcaggcaccgtcatcactcctaggctcgaccgctcgaggccgaaaggcacgaccttcggccagtcgagcagctgggcgcgtggcgcggccagggacgagggcgccatgagctcgccggagaatggcgccgccccggaggccagcgggaagaagaagaagaaggcggaagaggaggaggtggtggccaaggtgccgttcctgaagctgttctcgttcgcggaccggtgggactgcgtgctgatggcggtgggctcgctgggcgcgtgcgcgcacggcgcctccgtcccggtcttcttcatcttcttcggcaagctcatcaacatcatcggcctcgcctacctcttccccaccaccgtctccggccgcgtcgccaagaggtggcgtgctggatgcacacgggcgagcggcaggcggcgaagatgcggctggcctacctgcgcgcgatgctggaccaggacatcgccgtcttcgacacggaggcgtccaccggcgaggtcatcaacgccatcaccagcgacatcctcgtcgtccaggacgccatctccgagaaggtgggcaacttcatgcactacatcagccggttcctggccggcttcgccatcggcttctcgcaggtgtggcagatcagcctcgtcaccctcgccatcgttccgctcatcgccatcgccggcggcacctacgcctacgtcaccatcggcctcatggcccgcgtgcgcaagtcctacgtcaaggctggcgagatcgccgaggaggtgatcggcaacgtgcggacggtgcaggcgttcgtcggcgaggagaaggccgtgaggtcgtaccgggaggcgcttctgaggacgtacaagtacggcaagaggggcggcctcgccaagggcctcggcctcggctccatgcactctgtgcttttcctctcgtgggcgctgctcatctggttcaccagcgtcgtcgtccacaagcggatatccaatggcggcgagtccttcaccaccatgctcaacgtcgtcatcgctggcctgtcgctcggccaggcggcgccgaacatttcgacgttcctgcgggcgaggacggcggcgtaccccatcttccagatgatcgagaggagcaccgtgaacacggcgagctccaggacgggccgcacgctgccggtggtcgacgggcacatccagttccgcaacgtcgacttcagctacccgtcacggccggacgttgtcatcctcgataggttcagcctgaacttccctgccggcaagatcgtcgctctcgtcggcggcagcgggtccggcaagagcaccgttgtctcgctcatcgagcgcttctatgagccgctgtccggctccattctgctcgatgggcacgacatcaaagagctcgacgtcaagtggctccgccgccagatcgggctggtcaaccaggagccggccctgttcgcgacgagcatccgggagaacatactctacggcaaaggcgacgctaccgcggaggagatcaaccacgcggcgaagctgtcggaggcgatcacgttcatcaaccacctccctgatcggtacgagacgcaggtcggcgagcgcgggatacagctgtccggcggccagaagcagcgcatcgcgatctcgagggcgatactgaagaacccgtcgatactgctcctagacgaggcgacgagcgcgctggacgccgagtccgagaagagcgtgcaggaggcgctggaccgcgtcatggtcggccgcaccaccgtggtgatcgcgcaccgcctgtcgaccatccggaacgccgatacgatcgcggtcgtcgacggaggcaggatcgtcgagacaggcacgcacgagcagctcatggcgaacccgtacagtgcctactcctcgctgatccaactccaagaggctgcccagctccaacacaagccttctttgtctgacagcgcaagcattaccaggccactaagtttcaagtattcaagggagttgtccgggaggacgagcatgggcgccagcttccgctccgacaaggactcaatcagccggtacggcggcgccggagaggcgcatgacgaggtgcgcaaggggaagcccgtgtccatgaagaagctctactccatggtgcgcccggactggttcttcggcctgtcgggcaccatcagtgccttcgtggccggctcccagatgccgctcttcgcgcttggcgtcacgcaggcactggtgtcctactacatgggctgggagaccacgaagctggaggtgcgaaagattgccgtgctcttctgctgcggcgcggtgctgacggtcgtgttccacgtgatcgagcatctcagcttcggcatcatgggcgagcggctcaccctgcgcgtccgggagaagatgttctcggcgatactgcggaacgagatcggctggttcgatgataccagcaacacgagcgccatgctgtcgtcgcggctcgaggctgacgcgacgcttgtgcgcaccatcgtcgtcgaccgctccaccatcctgctccagaacgtcggtatgatcgtgacgtcgctcatcatcgctttcatactcaactggagaatcacgctggtcgtccttgccacctatcccctcatggtcagcggccacatcagcgagaaaatgttcatgaaaggctacggcggcaacctcggcaagtcctatctgaaggccaacatgctcgccgcggaggcagtgagcaacatccggacggtggctgccttctgctccgaggagaaggtgataaagctctacgcggacgagctcagggagccttctaagaggtccttccggcgaggccagggcgccggcctcttttacggagtctcccagttcttcctcttctcatcctacgcactggcgttatggtatggttcagtgctgatgagcaaggaattggccagcttcaagtccgtgatgaagtccttcatggtgctcatagtgacggcgctggccatgggggagacactggcaatggcacctgatatcatcaaagggaaccagatggcgtcctcggtgttcgagatcctggaccgtaagaccgacgtccggatcgacacaggtgaggacatcaagagggtcgaggggctgatcgagctgcgcggcatcgagttccggtacccgtcgaggcccgacgtgaccgtgttcaagggacttgacctgctgatgaaggctggcaagagcatggcgcttgtcggcatgagcggctccggcaagagtaccgtgctgtcgctcatcctccgcttctacgacccgatcgccggaagagtcttgatcgatgggaaggacgtcaagaagcttaagctcaagtgtctcaggaaacacatcggcctggtccagcaagagccggcgctgttcgcgacgacgatctacgacaacatcctgtatggcaaggacggggccacggaggccgaggtcgtcgaggcggccaagctggcgaacgcgcactcgttcatcagctcgctgccggaggggtacaagaccaaggtcggggagcgcggcgtgcagctgtcgggcgggcagaagcagcgcatcgcgatcgcgcgcgccatcgtgaaggacccggccatcctgctgctggacgaggcgacgagcgcgctggacgtggagtcggagcgcgtcgtgcagcaggcgctgaacagggtgatgaggaaccggaccaccgtgatggtggcgcaccggctgtccacggtcaagaacgccgacgtcatctcggtgctgcaggacggcaagatcatagagcagggggcgcaccagcacctgatcgaggacaagaacggcgcctaccacaagctcgtcagcttgcagcagcagcaacagatgcagacgcagcagagctcatcagaagacatttgaataagatcgtgcgtttctgtatcttgctgtggctttgtctttcttgggcttttgtaaaagatctgcgctggttatcttttcaatgaaagggagtgttcagaattacaggatgaagcattattgggttcttattcctgactcccgtaaaaaaatatatatattgtacatagaatcttgcaatgtaattctgctccatggatctcaatgtttagtgcctacttctgattctatt

SEQ ID NO: 44243 - DNA, 4383 bp, Zea Mays
cttcaaagcagcaggccagaaggcattgccggctgatggcctgacccactacaacgagcgaaacctatcgcctcctccgatcgccattaacgggtcggtggctctgcgccaccacggcaccacctgtgcccgcgcggacgagacgctgctggcaagctcaccgcccctacagtcgacagcgagcacggcagctagcaggctagcgcacaccgaaccaactcccttttggccgtttcaaactcttttaaagccccaccagctggtgcaggcaccgtcatcactcctaggctcgaccgctcgaggccgaaaggcacgaccttcggccagtcgagcagctgggcgcgtggcgcggccagggacgagggcgccatgagctcgccggagaatggcgccgccccggaggccagcgggaagaagaagaagaaggcggaagaggaggaggtggtggccaaggtgccgttcctgaagctgttctcgttcgcggaccggtgggactgcgtgctgatggcggtgggctcgctgggcgcgtgcgcgcacggcgcctccgtcccggtcttcttcatcttcttcggcaagctcatcaacatcatcggcctcgcctacctcttccccaccaccgtctccggccgcgtcgccaagtactcgctggacttcgtgtacctcggcatcgtcatattcttctcgtcgtggaccgaggtggcgtgctggatgcacacgggcgagcggcaggcggcgaagatgcggctggcctacctgcgcgcgatgctggaccaggacatcgccgtcttcgacacggaggcgtccaccggcgaggtcatcaacgccatcaccagcgacatcctcgtcgtccaggacgccatctccgagaaggtgggcaacttcatgcactacatcagccggttcctggccggcttcgccatcggcttctcgcaggtgtggcagatcagcctcgtcaccctcgccatcgttccgctcatcgccatcgccggcggcacctacgcctacgtcaccatcggcctcatggcccgcgtgcgcaagtcctacgtcaaggctggcgagatcgccgaggaggtgatcggcaacgtgcggacggtgcaggcgttcgtcggcgaggagaaggccgtgaggtcgtaccgggaggcgcttctgaggacgtacaagtacggcaagaggggcggcctcgccaagggcctcggcctcggctccatgcactctgtgcttttcctctcgtgggcgctgctcatctggttcaccagcgtcgtcgtccacaagcggatatccaatggcggcgagtccttcaccaccatgctcaacgtcgtcatcgctggcctgtcgctcggccaggcggcgccgaacatttcgacgttcctgcgggcgaggacggcggcgtaccccatcttccagatgatcgagaggagcaccgtgaacacggcgagctccaggacgggccgcacgctgccggtggtcgacgggcacatccagttccgcaacgtcgacttcagctacccgtcacggccggacgttgtcatcctcgataggttcagcctgaacttccctgccggcaagatcgtcgctctcgtcggcggcagcgggtccggcaagagcaccgttgtctcgctcatcgagcgcttctatgagccgctgtccggctccattctgctcgatgggcacgacatcaaagagctcgacgtcaagtggctccgccgccagatcgggctggtcaaccaggagccggccctgttcgcgacgagcatccgggagaacatactctacggcaaaggcgacgctaccgcggaggagatcaaccacgcggcgaagctgtcggaggcgatcacgttcatcaaccacctccctgatcggtacgagacgcaggtcggcgagcgcgggatacagctgtccggcggccagaagcagcgcatcgcgatctcgagggcgatactgaagaacccgtcgatactgctcctagacgaggcgacgagcgcgctggacgccgagtccgagaagagcgtgcaggaggcgctggaccgcgtcatggtcggccgcaccaccgtggtgatcgcgcaccgcctgtcgaccatccggaacgccgatacgatcgcggtcgtcgacggaggcaggatcgtcgagacaggcacgcacgagcagctcatggcgaacccgtacagtgcctactcctcgctgatccaactccaagaggctgcccagctccaacacaagccttctttgtctgacagcgcaagcattaccaggccactaagtattcaagggagttgtccgggaggacgagcatgggcgccagcttccgctccgacaaggactcaatcagccggtacggcggcgccggagaggcgcatgacgaggtgcgcaaggggaagcccgtgtccatgaagaagctctactccatggtgcgcccggactggttcttcggcctgtcgggcaccatcagtgccttcgtggccggctcccagatgccgctcttcgcgcttggcgtcacgcaggcactggtgtcctactacatgggctgggagaccacgaagctggaggtgcgaaagattgccgtgctcttctgctgcggcgcggtgctgacggtcgtgttccacgtgatcgagcatctcagcttcggcatcatgggcgagcggctcaccctgcgcgtccgggagaagatgttctcggcgatactgcggaacgagatcggctggttcgatgataccagcaacacgagcgccatgctgtcgtcgcggctcgaggctgacgcgacgcttgtgcgcaccatcgtcgtcgaccgctccaccatcctgctccagaacgtcggtatgatcgtgacgtcgctcatcatcgctttcatactcaactggagaatcacgctggtcgtccttgccacctatcccctcatggtcagcggccacatcagcgagaaaatgttcatgaaaggctacggcggcaacctcggcaagtcctatctgaaggccaacatgctcgccgcggaggcagtgagcaacatccggacggtggctgccttctgctccgaggagaaggtgataaagctctacgcggacgagctcagggagccttctaagaggtccttccggcgaggccagggcgccggcctcttttacggagtctcccagttcttcctcttctcatcctacgcactggcgttatggtatggttcagtgctgatgagcaaggaattggccagcttcaagtccgtgatgaagtccttcatggtgctcatagtgacggcgctggccatgggggagacactggcaatggcacctgatatcatcaaagggaaccagatggcgtcctcggtgttcgagatcctggaccgtaagaccgacgtccggatcgacacaggtgaggacatcaagagggtcgaggggctgatcgagctgcgcggcatcgagttccggtacccgtcgaggcccgacgtgaccgtgttcaagggacttgacctgctgatgaaggctggcaagagcatggcgcttgtcggcatgagcggctccggcaagagtaccgtgctgtcgctcatcctccgcttctacgacccgatcgccggaagagtcttgatcgatgggaaggacgtcaagaagcttaagctcaagtgtctcaggaaacacatcggcctggtccagcaagagccggcgctgttcgcgacgacgatctacgacaacatcctgtatggcaaggacggggccacggaggccgaggtcgtcgaggcggccaagctggcgaacgcgcactcgttcatcagctcgctgccggaggggtacaagaccaaggtcggggagcgcggcgtgcagctgtcgggcgggcagaagcagcgcatcgcgatcgcgcgcgccatcgtgaaggacccggccatcctgctgctggacgaggcgacgagcgcgctggacgtggagtcggagcgcgtcgtgcagcaggcgctgaacagggtgatgaggaaccggaccaccgtgatggtggcgcaccggctgtccacggtcaagaacgccgacgtcatctcggtgctgcaggacggcaagatcatagagcagggggcgcaccagcacctgatcgaggacaagaacggcgcctaccacaagctcgtcagcttgcagcagcagcaacagatgcagacgcagcagagctcatcagaagacatttgaataagatcgtgcgtttctgtatcttgctgtggctttgtctttcttgggcttttgtaaaagatctgcgctggttatcttttcaatgaaagggagtgttcagaattacaggatgaagcattattgggttcttattcctgactcccgtaaaaaaatatatatattgtacatagaatcttgcaatgtaattctgctccatggatctcaatgtttagtgcctacttctgattctatt

SEQ ID NO: 44244 - DNA, 1433 bp, Zea Mays
atgcagtctgtggctgagatggcttctaatgcctatcgcaaacccagtgtcagtccatcagctacgatgctgaaagctctgcctatgcggttcctcgcctcgccggagcccggtgggtggagccggcgactaccacgacgatcgctgcggtcggtttcggcagcgctcatgaccaaccccgcttacttcgaggtgggaagattcttgggtggctatggcttcatgaacatcacaagttactcatcatctcaatttggagagccttcaaatgttgccggtattcaagaccttggtcttggatattcaccagaagagatcgaacggttgagggtccaagatattggagaaggagaagtgacaattagactttatgagggaagagttgttcaaggtccattcaggggcacacgggctgtatttaagacataggatttgaaacaaaggtataccctggagcccgtgctgatgcttctgaagctgatttgatggcactgaatgagttaaggactcatgcgtttcttcagagtgatgctagtgacatatgcgagaacatccagtttcttttaggggccttcgagacagcaactggagaacagtggctcgccttccgtgatgacgggagatatagtgctgcagactatgcaaatgtaactagtgcaaggcaattgaaggaaaaatctggagggacgccattctggaaccctttcgatcgagcatacaaattggagttaaggagatactttgttcttaagttgctgaacggtgctatgagtggccttgttcacatgcacaatcatgatagactgcatcaaagccttggaccttcttctgtaattctcaatacggcattggataaagagggacgctacttggttccaaggctgagagatttggcattttctgtagatattgggtactcatctattggggctggagtgctgtcggacggactatggcgtcgagcctctgctgctggggcttccactcctttggagaagcgagcctttggaatagctgatgacatttatggagctgggctgcttcttgcatacatgtcattcattccattctgcaaagcgggcgttatggatggtatctccttgcagagacttttagagagcacctttcggcttgacatttacgctgcaagagagtattgtctggcagatgaccagctgtcggaagcagtaagttttctagatttaggggatggtgctggctgggagttattgcaggcaatgcttaatccggattaccgcaagcgaccaattgcagaggctgtactgaaccacagtgcgtgttctctgtctgtcgcttcccattgcatggctatggctatggcgagcaaatagccgatgagcatacccactttcagctgcgctgcaggcaatcacctgagggaccgtagtgctgggagtagagatggcaatggg

SEQ ID NO: 44245 - DNA, 1467 bp, Zea Mays
atgcagtctgtggctgagatggcttctaatgcctatcgcaaacccagtgtcagtccatcagctacgatgctgaaagctctgcctatgcggttcctcgcctcgccggagcccggtgggtggagccggcgactaccacgacgatcgctgcggtcggtttcggcagcgctcatgaccaaccccgcttacttcgaggtgggaagattcttgggtggctatggcttcatgaacatcacaagttactcatcatctcaatttggagagccttcaaatgttgccggtattcaagaccttggtcttggatattcaccagaagagatcgaacggttgagggtccaagatattggagaaggagaagtgacaattagactttatgagggaagagttgttcaaggtccattcaggggcacacgggctgtatttaaggtataccctggagcccgtgctgatgcttctgaagctgatttgatggcactgaatgagttaaggactcatgcgtttcttcagagtgatgctagtgacatatgcgagaacatccagtttcttttaggggccttcgagacagcaactggagaacagtggctcgccttccgtgatgacgggagatatagtgctgcagactatgcaaatgtaactagtgcaaggcaattgaaggaaaaatctggagggacgccattctggaaccctttcgatcgagcatacaaattggagttaaggagatactttgttcttaagttgctgaacggtgctatgagtggccttgttcacatgcacaatcatgatagactgcatcaaagccttggaccttcttctgtaattctcaatacggcattggataaagagggacgctacttggttccaaggctgagagatttggcattttctgtagatattgggtactcatctattggggctggagtgctgtcggacggactatggcgtcgagcctctgctgctggggcttccactcctttggagaagcgagcctttggaatagctgatgacatgcaaagacttttagagagcacctttcggcttgacatttacgctgcaagagagtattgtctggcagatgaccagctgtcggaagcagtaagttttctagatttaggggatggtgctggctgggagttattgcaggcaatgcttaatccggattaccgcaagcgaccaattgcagaggctgtactgaaccacaggtttataactggagcagttttacgaaactactaatcagcattttttttacttgtataaagttgctacgtggaaattgtaaaagtacaataattttagtgggtgaagaggtgatacgtttcttggatgaacagtgcgtgttctctgtctgtcgcttcccattgcatggctatggctatggcgagcaaatagccgatgagcatacccactttcagctgcgctgcaggcaatcacctgagggaccgtagtgctgggagtagagatggcaatggg

SEQ ID NO: 44246 - DNA, 1545 bp, Zea Mays
atgcagtctgtggctgagatggcttctaatgcctatcgcaaacccagtgtcagtccatcagctacgatgctgaaagctctgcctatgcggttcctcgcctcgccggagcccggtgggtggagccggcgactaccacgacgatcgctgcggtcggtttcggcagcgctcatgaccaaccccgcttacttcgaggtgggaagattcttgggtggctatggcttcatgaacatcacaagttactcatcatctcaatttggagagccttcaaatgttgccggtattcaagaccttggtcttggatattcaccagaagagatcgaacggttgagggtccaagatattggagaaggagaagtgacaattagactttatgagggaagagttgttcaaggtccattcaggggcacacgggctgtatttaaggtataccctggagcccgtgctgatgcttctgaagctgatttgatggcactgaatgagttaaggactcatgcgtttcttcagagtgatgctagtgacatatgcgagaacatccagtttcttttaggggccttcgagacagcaactggagaacagtggctcgccttccgtgatgacgggagatatagtgctgcagactatgcaaatgtaactagtgcaaggcaattgaaggaaaaatctggagggacgccattctggaaccctttcgatcgagcatacaaattggagttaaggagatactttgttcttaagttgctgaacggtgctatgagtggccttgttcacatgcacaatcatgatagactgcatcaaagccttggaccttcttctgtaattctcaatacggcattggataaagagggacgctacttggttccaaggctgagagatttggcattttctgtagatattgggtactcatctattggggctggagtgctgtcggacggactatggcgtcgagcctctgctgctggggcttccactcctttggagaagcgagcctttggaatagctgatgacatttatggagctgggctgcttcttgcatacatgtcattcattccattctgcaaagcgggcgttatggatggtatctccttgcagagacttttagagagcacctttcggcttgacatttacgctgcaagagagtattgtctggcagatgaccagctgtcggaagcagtaagttttctagatttaggggatggtgctggctgggagttattgcaggcaatgcttaatccggattaccgcaagcgaccaattgcagaggctgtactgaaccacaggtttataactggagcagttttacgaaactactaatcagcattttttttacttgtataaagttgctacgtggaaattgtaaaagtacaataattttagtgggtgaagaggtgatacgtttcttggatgaacagtgcgtgttctctgtctgtcgcttcccattgcatggctatggctatggcgagcaaatagccgatgagcatacccactttcagctgcgctgcaggcaatcacctgagggaccgtagtgctgggagtagagatggcaatggg

SEQ ID NO: 44247 - DNA, 1559 bp, Zea Mays
atgcagtctgtggctgagatggcttctaatgcctatcgcaaacccagtgtcagtccatcagctacgatgctgaaagctctgcctatgcggttcctcgcctcgccggagcccggtgggtggagccggcgactaccacgacgatcgctgcggtcggtttcggcagcgctcatgaccaaccccgcttacttcgaggtgggaagattcttgggtggctatggcttcatgaacatcacaagttactcatcatctcaatttggagagccttcaaatgttgccggtattcaagaccttggtcttggatattcaccagaagagatcgaacggttgagggtccaagatattggagaaggagaagtgacaattagactttatgagggaagagttgttcaaggtccattcaggggcacacgggctgtatttaaggatttgaaacaaaggtataccctggagcccgtgctgatgcttctgaagctgatttgatggcactgaatgagttaaggactcatgcgtttcttcagagtgatgctagtgacatatgcgagaacatccagtttcttttaggggccttcgagacagcaactggagaacagtggctcgccttccgtgatgacgggagatatagtgctgcagactatgcaaatgtaactagtgcaaggcaattgaaggaaaaatctggagggacgccattctggaaccctttcgatcgagcatacaaattggagttaaggagatactttgttcttaagttgctgaacggtgctatgagtggccttgttcacatgcacaatcatgatagactgcatcaaagccttggaccttcttctgtaattctcaatacggcattggataaagagggacgctacttggttccaaggctgagagatttggcattttctgtagatattgggtactcatctattggggctggagtgctgtcggacggactatggcgtcgagcctctgctgctggggcttccactcctttggagaagcgagcctttggaatagctgatgacatttatggagctgggctgcttcttgcatacatgtcattcattccattctgcaaagcgggcgttatggatggtatctccttgcagagacttttagagagcacctttcggcttgacatttacgctgcaagagagtattgtctggcagatgaccagctgtcggaagcagtaagttttctagatttaggggatggtgctggctgggagttattgcaggcaatgcttaatccggattaccgcaagcgaccaattgcagaggctgtactgaaccacaggtttataactggagcagttttacgaaactactaatcagcattttttttacttgtataaagttgctacgtggaaattgtaaaagtacaataattttagtgggtgaagaggtgatacgtttcttggatgaacagtgcgtgttctctgtctgtcgcttcccattgcatggctatggctatggcgagcaaatagccgatgagcatacccactttcagctgcgctgcaggcaatcacctgagggaccgtagtgctgggagtagagatggcaatggg

SEQ ID NO: 44248 - DNA, 1779 bp, Zea Mays
atgcagtctgtggctgagatggcttctaatgcctatcgcaaacccagtgtcagtccatcagctacgatgctgaaagctctgcctatgcggttcctcgcctcgccggagcccggtgggtggagccggcgactaccacgacgatcgctgcggtcggtttcggcagcgctcatgaccaaccccgcttacttcgaggtgggaagattcttgggtggctatggcttcatgaacatcacaagttactcatcatctcaatttggagagccttcaaatgttgccggtattcaagaccttggtcttggatattcaccagaagagatcgaacggttgagggtccaagatattggagaaggagaagtgacaattagactttatgagggaagagttgttcaaggtccattcaggggcacacgggctgtatttaaggtatgtgtagatttgttactttgctaagtttagttgcatagtgtcctttagtaatcagcagaatgccatgccttgaaatttggttctacagtgccttgaaaagattatttgtagtaggatatacacttttgacctttcaatttgtcttcattttattatggtacctttctctgccataggtacatgaatatattaacagtcttaatatgctaagacataggatttgaaacaaaggtataccctggagcccgtgctgatgcttctgaagctgatttgatggcactgaatgagttaaggactcatgcgtttcttcagagtgatgctagtgacatatgcgagaacatccagtttcttttaggggccttcgagacagcaactggagaacagtggctcgccttccgtgatgacgggagatatagtgctgcagactatgcaaatgtaactagtgcaaggcaattgaaggaaaaatctggagggacgccattctggaaccctttcgatcgagcatacaaattggagttaaggagatactttgttcttaagttgctgaacggtgctatgagtggccttgttcacatgcacaatcatgatagactgcatcaaagccttggaccttcttctgtaattctcaatacggcattggataaagagggacgctacttggttccaaggctgagagatttggcattttctgtagatattgggtactcatctattggggctggagtgctgtcggacggactatggcgtcgagcctctgctgctggggcttccactcctttggagaagcgagcctttggaatagctgatgacatttatggagctgggctgcttcttgcatacatgtcattcattccattctgcaaagcgggcgttatggatggtatctccttgcagagacttttagagagcacctttcggcttgacatttacgctgcaagagagtattgtctggcagatgaccagctgtcggaagcagtaagttttctagatttaggggatggtgctggctgggagttattgcaggcaatgcttaatccggattaccgcaagcgaccaattgcagaggctgtactgaaccacaggtttataactggagcagttttacgaaactactaatcagcattttttttacttgtataaagttgctacgtggaaattgtaaaagtacaataattttagtgggtgaagaggtgatacgtttcttggatgaacagtgcgtgttctctgtctgtcgcttcccattgcatggctatggctatggcgagcaaatagccgatgagcatacccactttcagctgcgctgcaggcaatcacctgagggaccgtagtgctgggagtagagatggcaatggg

SEQ ID NO: 44249 - DNA, 1885 bp, Zea Mays
gtttggtaagcgcaatagtctcaaaggtaagagaggtaggagacggacacggaggggcggagggcaacgactgctgagcctgtcacctcagctgttgtctccgcctgcactgcgcatatatacccctgctgccccgcccaagccgtgctctcagactgcatcatccaaccagaacccgggagcagagcagtgacaggcgaaccaagacacgcagggacagggagacatggggcgagggcgagcgccgtgctgcgccaaggtggggctcaacaggggctcctggacgccgcaggaggacatgcgcctcatcgcctacatccagaagcacggccacaccaactggcgcgcgctgcccaagcaagcaggtttgctgcgctgtgggaagagctgcaggctgcgctggatcaactacctgcggccggacctcaagcgcggcaacttcaccgacgaggaggaggaggccatcataaggctgcacgggttgctcgggaataaatggtctaagatcgctgcctgcctgccggggaggacggacaacgagatcaagaacgtgtggaacacgcacctgaagaagaaggtggcgcagcgggagaagaagaaggccggcgcggggagcggcgacgccggcacgcccgccactgcgcccttgtcctcggcgacctcctcgacgacgacccacaacagctccgggggcagcgactccggcgaccagtgcggcacgagcagggagcctgacgcgaccgacgtgtgccccctccagctagaggacatggacgtctcggacatgctggtggacggcgcgcccccggcggcgcagccaatgccgtcgccgtcctcctcgtcctccctgacgacgtgcgtcggcggcgtggaggagctgatcgagctgccggtgatcgacatcgagccggaaatctggagcatcatcgacggcgagagcgctgtggcgcgccatggtggcgatgcagccgcgccatgtacgggcaccggcaccgccgtcagcaccagcgaagcagaggaagcggcggcgaacgattggtggctggagaatttggagaaggagctgggcctgtggggctacgcggaggaggatactcaggcccaccctgacctactggaccactacacaggtttgagcccactctgcgccctggagggggacccagtctccacctacttccagaccgggcccgccgccgcggaacctgagctcctggtggtcgtcgaaccatctgccgttctgctatgactatgagcaacatgacggacggtcacagcaacgaacatcctggttcttggagatgttcggtggatcaaattcgagtagtttgtttgatgcagtggcagattaatatctctacaggccaattagaatgcacattcagaacagaaccgtccaaagaaagcctgtagagtgaaggctagtactctcttattcttaacagtgtttaacgcagatacatacatacaggcagctagctagatgctagggtttgattggtaaccctgcactccggtctcaagacggaggagggcaacgagggagtgccgtccgccgtcgtgctcgtgttgcttggttcgtggctttgtgtgcagtgtgcatatatagaacatgacgtcaccgcgacgtaagcgtgtgctcacctgagaagtcctaccactaccgaccatgtatgatgtcctttgtgaatcatcaccgggctctgattacgctttggaaacccttttgcttttgataatgcgatgtaaccttttttttcttcatctccttttcgttctttgtttgttttcttcttcatgtagatttgccggtctagcttctttttcgttcttgtgcagtgttagttacgtatagctaggacagtgaaaagaaaccacatgttac

SEQ ID NO: 44250 - DNA, 923 bp, Zea Mays
cgccaacatccagatgcggcggaggagactcgccggcacgctcccgctcgccctcccgtggcttcgcccctaatcggcctgtacctccacccagtattgcgtcgtcttcgtggggacgaggcggcgctggtcgtcgacaacgacggcgactacagtcctcgctccacagcctccctctctgcaccgcgtcgctgcttctcataggtatctgtttctgctgcatttgaaggacaactttaggactgcaatggcgcttcaatataaccaaagatttagataaaacaggtgaggttatatggtttctttattacttttttttaaaaaaaatgtttgccacctacattagtggtttttattgcaacgagttgaatactaatgttttcccttacctctttatcacataaacattttattactcccccgatcattctatttactctaaagaaaacaaaaacaggacaacgctgcaagataggtatgtatttcaatcttctaaaattatgtttctttctccatcagggctttttaggttatattcattttctttgttccttttaaagtcatacacatatcttaagtaaatcgaggcacgccgctccatgtttcatcagctctaaactacttttttacttctatagccgtgctcaaataattccatgtttgctattattttgtaggctagtctccccgagaacaaggaattgctagaatcccttaactcggaacaaaaagacagtggatgttacgtttatgaagaatggtccttttattttcttgcaaggaaacaagtttaagcacttaaaaaggctggaaggaaatctgaaatggatcaccactttggcttttcagatggtgatggaataagggaaaaacacagtggcaaagagagtcaagtacagtttatttgatgatcatcaaggagg

SEQ ID NO: 44251 - DNA, 721 bp, Zea Mays
cgccaacatccagatgcggcggaggagactcgccggcacgctcccgctcgccctcccgtggcttcgcccctaatcggcctgtacctccacccagtattgcgtcgtcttcgtggggacgaggcggcgctggtcgtcgacaacgacggcgactacagtcctcgctccacagcctccctctctgcaccgcgtcgctgcttctcataggtatctgtttctgctgcatttgaaggacaactttaggactgcaatggcgcttcaatataaccaaagatttagataaaacaggtgaggttatatggtttctttattacttttttttaaaaaaaatgtttgccacctacattagtggtttttattgcaacgagttgaatactaatgttttcccttacctctttatcacataaacattttattactcccccgatcattctatttactctaaagaaaacaaaaacaggacaacgctgcaagataggctagtctccccgagaacaaggaattgctagaatcccttaactcggaacaaaaagacagtggatgttacgtttatgaagaatggtccttttattttcttgcaaggaaacaagtttaagcacttaaaaaggctggaaggaaatctgaaatggatcaccactttggcttttcagatggtgatggaataagggaaaaacacagtggcaaagagagtcaagtacagtttatttgatgatcatcaaggagg

SEQ ID NO: 44252 - DNA, 2436 bp, Zea Mays
cacgtggggcccaatagcacggtgtccatatctgcaactgctaactcgagcaaggtgaccacggtggcgactggcgagagagacgcgcggcttttactcgtcgcagtaatcgaatcttgtgaacacaagagctccatgtggccaccggccacggtgtggcaatggtagtttcgtcacactgactctgctccaccgctcgccgatggtactagcatggtgggaggtctagttctgtcccaggcgcagacgcaccataccgccgcgccaagaaccgccgcaccggcgccggcacaggcgttggagaagcggccgagggaccaggcccagccatgtggcacagcggcggcggccgtctcggtgcggagcttggacgaggtcaggaaggcgcacgcgcggcacatcaagctgggcctcgaccgctccccacggcacgcgcggccgctgctcgcggcgtgtgcgctctcgggctggccgggcggcatggagctcgcggcgtccatcttcgagtcgctcgtcgagccggaggccttcgattacaacaccctgatgcgcggccacgtcggtggcggccgtgaaccggcggccgcgctgcgcatgtacgttgacatgctggaggcgggcgtccggcctgacagctacacgttcccgttcgcactcaaggcgtgcgcgcagctcgcggccttgcaagaagggagacaggcgcacatcgtgaagctcgggttccagcacgacgaacacgtgcagaacagcctgatcagcttctacggcaagtgcgtcgagccggcgatggctcgtctggcgtttgaccgggtggaggcggaggagcgaacggcggcttcctggagcgcactcctcgcggcgtacacgaaagccgggctgtggggcgaatgcctcgagtcgttcggcgcgatggtgctcgatgggtggcgtcccgacgagagctccacggtcagcgcgctctcggcgtgcgcgcacctgggtgccttcgacgtcgggcggagtctccactgcgcgttgctgaggaacaccgcgaggctgaacaccatcatgcagacgtccctggtggacatgtacgccaagtgcggcagcatcgagaaggccgcggcggtgttcgacgcgatggacgacaagaacgcgtggacgtacagcgccatgctgtccggcttggcgctgcacggggacgggcggaaggccctgcaggtgttcgacgcgatggtccgggagcgccacgcgcccgacgcagccacgtacgtcggcgtgctgaacgcctgcagccgcgccgggctgctcgaggacgggctgcggtgcttcgaccgcatgcggctggagcacaacgtcgcgcccaacgcgcagtactacggctgcatggtggacctgatggcgcgcgccggaaggctggacgacgcgcgcgcgctcatcgggagcatgtccacggggccgacggacacggcctggcgaagcctgctgaacgcctgccggatccacggcgatctggatctcgccgagcgcgccctccaggagctgaggcgcctcggcgccgcgaacgccggcgactacgtcatcgtcgcggacatgcacgccagggccaaggactgggccgctgccgcccagctccggacagaggcggtggactggggcctcgcgcaatcccccggggtcagcgccgtggaggtacgcggcgagctgcaccggttcgtgtcgcaggacaggtcgcacccgcggacgagcgacatctacgagatgctccaccagatggagtggcagctgcggttcgatggctacaaacctgacacgtcggaggtggcgctggacgtgggcgaagaggagaagcggcgtgtggtcgccgcgcacagccagaagctggccatggcattcggcctgctcagcacggcggagggggcaccggtgaggatcgtgaccaacctccggatgagcaaggaatgccacgcgtacagcgcgctgatctcggaaattttcggccgggagatcgtcatcagggaccggaaccgcctccaccggttccggcgcggcgtctgcagttgcagagactactggtaacggtttcgttttgtcaacagtggtcgatggtgtaaatatcaaccgcaatttctgtctttgctgttgagtcctgatcgaaaaaaatgtctgaacgtttgctgacacttcaaaggccgaggttggtatgtttgatgtcatttgggctaagcaaacgcaggaattttacaagaacggtgtaggaatttcacgggaattagttcaaaaacacgtaaaaaatgtatgattcggattaattctatttgttccaaaggaggtctaagaattgaagacagatatagtaagcgattagcaacgtcaagagaaacttcaactacttaaatcatcaaaactaagtttgagggtttttctcttataacaaagccggttcaaatcggcgca

SEQ ID NO: 44253 - DNA, 1440 bp, Zea Mays
atcccggcggcgtccgctggcgtgcgtcgtcggcgagcatggcacggtggtcgtcccctaaggaccctgccctggaggcggcgctccggcgcaaccgccgctgggtcgtcaacaaccagatcaagcgcctcctactccgcttcccgtcccgcacggcgcccgtgcgtttcctccaatcccgcttcaagacactcgatctcatgggtcgcgccgccaactggctcagcaagtacccttcctgcttcgaggtcttctccgcggacgatggtggcggtgagcaggaaccccatttcggcttcaccaagcggatggcggcgctcgtccacgcggaggaggctgccgtcgcggcttccgagccggccatggcggaccgcctcgcgcgcgtgctcatgctcgcccgcggccgccgcctacaggtttccaagctcgccgcgctgcggggccctctcggcctccccgatgactacctcctccgcctcgtccccgccaacaccgatctcttccgcctcacaaacccctacccgcaccgccgcaacgccgctgagctagagctcgtcagatgggctccctctctcgccgtctccgccgtcgaggccgcgagcgactcgaccccacggttcagctgctcgctgccggcctcatgggtcaagtcacacgccaagatggaggatttcaacgcctccacgccttacatctcgccctactcggagtgggccttgccgggcacggatgccgaagccgagaagcgatcggtggccttggtgcacgagctcctctctctcaccagtggtgctccgcgaaggttacgaggggtcagagctgagggagaaggatccggtggtcttggccaaggatcggctcggggagctgatgcaggaggggctgcatgagtataaccaacggcggcgagggatgaatattgagaagaagaggaggagaggggaggttgaggtaaagaaagagaaagaggtggaggatgaggaagcggcgcgcttggatagtgcagagaaaagagaggagaggaggcggttttataaggtgttgtttggtgatggcaatcggtaattcccagttttgctgtgttgatattgaaggtgaacatcatcagtgcatagctgctgctgattgggctgtgttgatattcagaggaaggtgaacatcatcggtgcatagctgctggttggggtttgagcattaccctcttcccattatgtgatcgaaaacatttgcccgtggccttgttctcgcgggtgcaataaggttgacaaactgtctgcaagtgaaaatggtaccaatgtgtgctgttttcttgtcacagggcatgggatttgttaactgttaactagaatgtatgagtgaagaaaggattcccacaggcaccagatgctttgatctgtctaccaatcgcaacaatttaaacactttggaccaaggtaataa

SEQ ID NO: 44254 - DNA, 427 bp, Zea Mays
atgaataaaaaaaaagggtcaacctaggcatcctgctttggctcctcaccggctaatcttctccgttgctggtgctcagcgaccttgtagtccacgacctcacggaacaggccaggggttagctcgcagtccttgctcccgtagacagccgcctggacgctggccatcatcttggctatctctcgtccggagaagccctgggtcttggccgccgcctcgcggatcaggtcgtcggtgacgcccttcaccacgatcttctggggctggcggcggaagaaacggagccagctcttctcgcgcttgtcgccggctctgatgacgtacttgtccagggtaccccaaaaaaaaaacaaaaacggtctgagatgtcaacgctacagtttgcaagttatgggtgagaaactgagcactactcgcacaagaaaaa

SEQ ID NO: 44255 - DNA, 891 bp, Zea Mays
ccagattgcagcgtgtgtgagtgtggtaggtcttctgtccgcaccagtgttcacctctcccctgcccaagtttgcccagtcccagggtctagtatgtcatccttctgtcagtggtgaccacgcccactgactgcctacctcgccgtggccaagacgtctcaaggagtgaccagcccgcatgaccctcgttccacgttcttctaagaacacctagacgaggtggtatttgaagaagtctactccaacgcctgctcctcaagtggatgaagccatctaactgggtattgaatagagggatctagaaccacttcactgcaacaaaggcaagccccggtgcatgcaaccccttccttgtgtttttaaataatttctgcacactttaagtctagtgaaatgtgcattaggtttataggagttgtttgaaaccttcttgatgcattgcctttccttgatatccatacctttatagatacttctgatgaagtatcaaaacatgatttacaaaaatgcttagccctgcttagatcttgtggatagaggttgtcctttgcgttaatgcttagctcaggggttatcctgaggaaggatggcttctacctgcaagaatatttttcattgggagcgtggtgggatcttactgcaaagttccctataatgctcttttcatcctaaggaatacaaacaatcctaagggtggaagtacttaaatcgggacttgggctaggaacaggtgatgctccgcccaggttaattaaggattggatgcgtatgtaggcctgttgatcaaggactatcttaactagccacatgccctggaaatgggacagggtaagcttgaacccggctattccatacgtgaaaagacaaccgcgcactgggcgtgggagatgg

SEQ ID NO: 44256 - DNA, 681 bp, Zea Mays
ggcccaactgcagccttgtcgggacaaccgtaatataatacccacaacccactcgatagaagcatcgccccgcgaaccctagctcccgcaactgccgccgccactcccacgctcgcagccatgccgcccaagctcgacccgtcgcaggtggtggaggtgttcgtccgtgtgaccggcggcgaggtcggcgcagcgtcttcgctggcccccaagatcggcccgctcggtctttcccccaagaagatcggagaggacatcgccaaggagacggccaaggactggaagggcctccgcgtcaccgtcaagctcaccgtccagaaccggcaggccaaggtctccgtcgtcccctccgccgcggcgctcgtcatcaaggcgctcaaggagccagagagggaccgcaagaaggtcaagaacatcaagcacagcggcaacatcagcctcgacgacgtcatcgagatcgccaggaccatgaggcacaggtccatggccaaggaattggccggcaccgtcaaggagatcctcggtacctgcgtcagcgtcgggtgcaccgtcgacggcaaggaccccaaggacctgcagcaggagattgacgacggcgaggtggagatcccgtccgcttaagaaggaaaacttggaatgcctttcaaaatacgccacttctgcttcaagactccaaaagcc

SEQ ID NO: 44257 - DNA, 1992 bp, Zea Mays
gttttttgtcacaaaaggatatcacagaaggaattgtgaaagagcaggaacctatcagtgttgagagatctgcttcagtggaagtcatggatgattcaccaatcctaggtgtgattgagaagaaacaggatgcctcagttgaagattgtgaggacttggctgagttctcacctgcaagggagatgactgatgaggccattcctgttactgaagataaggaagtggccatcagtgaggagtctgttactgaagataatgaagtggcaatcagtgaggaggctgttactgaagataaggaagtggccatcagtgaggaggctgttactgaagataaggaagtggccatcagtgaggaggctgttactgaagataaggaagtggccatcaatgaggaggctgttactgaagataaggaagtggccatcagtgaggaggccatcgaggaagatggttttgctaacactgttgagactgatcctaccccaaaggagattcttctgactgaaggtgaaatcatactcattgaaggcaaagaaggtgctgctaatgagatgccacaggctggtgagaccagtgaagaagatgaggaagattaccttgctgaattgaaagaaggggctgctgatcaggtgctgcaggctgagctggcagacaatgaaacaagtaaagaagatgaagatgacctaagtgaaaagagagaagggactgctgctaagatgctgcagggtgaactgacggacgatgagaccagcgaagaagacgatctcgatgaagatgaggaatgggtttcagatgatgatgagaacaccgaggaagattaccttgctgaattgaaagaaggggttgctgatcaggtgctgcaggctgagctggcaaacaatgaaacaggtgaagaagatgaagatgccctaagtgaagagagagaagggactgctgctaagatgctgcagggtgaaccgacagacgatgagaccagtgaagaagacgatctcgatgaagatgagggatgggcttcagatgatgatgagaacactgaggaaattggctctactgacgagaccgatgaagatcctgatgagaccaatgaggagagttacacctctgatgcagtccaaatgatgcagggatctgggatagctgaagatgccaacgaagatgcctctactgaagatgatgatttcagtggcgacctaccaccagagtttgaaaatatcatgatattcagtggtgctgaaaccgagagtgacattgctcctccagtgctcgaggaaaacaaggatgctgttgtatctgcaacaaaaactgcaaagtccctggatgattctgccttaaaaacagggcaggaggaggagggtcctgaagaggttgacaacgttgtgaagtccctggatgaagaggtagaatcaaaggagatgcagaagcagcaaccacaggattataatagcatgagcctcaggaagcttaaagccacacacaagaaatatctcattgctgcaaaggaggaggtcaccgaagggaagaggcttcctctcgaggaggtggatgaaaacgcctgcatcgaccactgaacagaacaagcaggcgaaattttgtgtggatggcgtctgccacaaaaggattgaaacgcggagtgtgctctggttgtgaagtgataactaggctaccgcatgttcattttcaaaagttttcgtgtgtgatcgtgatcaggggtgaaaccatggtttcagccaacaaacttgcagttcctgttgcttctcccccttttttcctttatatatatattttgtatcggttacagaacatggtttatccagtgaagatgctaagtttcgcttaataatgtatatgaaggtcctggatacctcaaattttgttcatgttgaaccagtgcgaagttatagaaacgcttcaaagttcaaatagcatttagcatgttccatgtgctgctatttcagcactcattcccgtgctggcaatgcaaactgcaactgg

SEQ ID NO: 44258 - DNA, 3192 bp, Zea Mays
cgcgtgcatactcgtcaatcacctccggaccccacctgcagtgacaatacatgctccactaaacgccacgccaagccgcctccacttgagctgacagctgagcagcgttcaaacttcaaacaatcaaacgagaggggaaaaccctagacgagccccccttgcaacggtcagatccattcctatatagtattcctccgccgccaacctcctgagcatcccatatctgtgtgtgctcaattcgccatccacaaaatcactgcacccgatcatcgtatcaggaggagaaggtaagagacgtgagggagatggaggcggcgacggccatggatttccacacgctctcgcgccgggagctccaggcgctgtgcaagcgcaacggcgtccgcgccaacatgaccaacgccgccatggccgaggcgctgcagggcctaacctcggtcgacggggtcgacgagatcggcacgactctctgtctgccgacggcgacgccaggaaggtcggcgatgaagtcggcggcgaagatggtggccgtcgaggagcagcagcacggtagcccgctcccccgcggccgccgcgtatcggtaaaatcaccagaggccatccggatggaggttggaggagaggacgagatgaaggagaacgtgaagactcccggcgtggtgctgcgcagcactcgccgcggtattcgggccacacccgcgcctcttcctactccggttccggcgtccagtgcgcgcgcaacagcgaggaggactgccgttcgtaggacgggcgaggtggcgccgaccccagccacccggaggagggcggcctctcgcaaagccgcgggggcagtggaggtggaccgccccgccgaagatgtatccgaggacaagacatcgaagatgacgagagctttggatcaggaagccgaggtggtggcggtcgcatcaaaagaggagaaggggcagcaagacgaaccgagagctgctctctcggatgtgaaatgtgatgacccaaagggggaggagaaggtgcagcaagaggaaccaaaagccgtggtcttggatgtgaaatgtgatggcccagagcaggaggaagttgtccagtttttggaaggggacaacaaagtggaggaagtggaggagggtgaggaagggtctgcagctgttttgggtaagagctgcaatgatcctaaggtggaggaagtggtggttgtcatggaggaacagttcacagagccccatgaaggaattgtgaaagagcaggaacctatcagtgttgagagatctgcttcagtggaagtcatggatgattcaccaatcctaggtgtgattgagaagaaacaggatgcctcagttgaagattgtgaggacttggctgagttctcacctgcaagggagatgactgatgaggccattcctgttactgaagataaggaagtggccatcagtgaggagtctgttactgaagataatgaagtggcaatcagtgaggaggctgttactgaagataaggaagtggccatcagtgaggaggctgttactgaagataaggaagtggccatcagtgaggaggctgttactgaagataaggaagtggccatcaatgaggaggctgttactgaagataaggaagtggccatcagtgaggaggccatcgaggaagatggttttgctaacactgttgagactgatcctaccccaaaggagattcttctgactgaaggtgaaatcatactcattgaaggcaaagaaggtgctgctaatgagatgccacaggctggtgagaccagtgaagaagatgaggaagattaccttgctgaattgaaagaaggggctgctgatcaggtgctgcaggctgagctggcagacaatgaaacaagtaaagaagatgaagatgacctaagtgaaaagagagaagggactgctgctaagatgctgcagggtgaactgacggacgatgagaccagcgaagaagacgatctcgatgaagatgaggaatgggtttcagatgatgatgagaacaccgaggaagattaccttgctgaattgaaagaaggggttgctgatcaggtgctgcaggctgagctggcaaacaatgaaacaggtgaagaagatgaagatgccctaagtgaagagagagaagggactgctgctaagatgctgcagggtgaaccgacagacgatgagaccagtgaagaagacgatctcgatgaagatgagggatgggcttcagatgatgatgagaacactgaggaaattggctctactgacgagaccgatgaagatcctgatgagaccaatgaggagagttacacctctgatgcagtccaaatgatgcagggatctgggatagctgaagatgccaacgaagatgcctctactgaagatgatgatttcagtggcgacctaccaccagagtttgaaaatatcatgatattcagtggtgctgaaaccgagagtgacattgctcctccagtgctcgaggaaaacaaggatgctgttgtatctgcaacaaaaactgcaaagtccctggatgattctgccttaaaaacagggcaggaggaggagggtcctgaagaggttgacaacgttgtgaagtccctggatgaagaggtagaatcaaaggagatgcagaagcagcaaccacaggattataatagcatgagcctcaggaagcttaaagccacacacaagaaatatctcattgctgcaaaggaggaggtcaccgaagggaagaggcttcctctcgaggaggtggatgaaaacgcctgcatcgaccactgaacagaacaagcaggcgaaattttgtgtggatggcgtctgccacaaaaggattgaaacgcggagtgtgctctggttgtgaagtgataactaggctaccgcatgttcattttcaaaagttttcgtgtgtgatcgtgatcaggggtgaaaccatggtttcagccaacaaacttgcagttcctgttgcttctcccccttttttcctttatatatatattttgtatcggttacagaacatggtttatccagtgaagatgctaagtttcgcttaataatgtatatgaaggtcctggatacctcaaattttgttcatgttgaaccagtgcgaagttatagaaacgcttcaaagttcaaatagcatttagcatgttccatgtgctgctatttcagcactcattcccgtgctggcaatgcaaactgcaactgg

SEQ ID NO: 44259 - DNA, 3464 bp, Zea Mays
gttcccagccgcagccacacaaacagaccgccccctctcgtgctctcaccctccgttcctcgtcgccactcgcgtgccgtgccgtgtgagtgaccctcgtcgcgactcgcgtcgctaggatgagatagaaacgaaaccggcccccacacccggctcgctcgcatgaagcaatcgccggcgtctactgcagtctccgactctgggatgctgggccgccgcctcgccttgctcccggcggcgaccgtcgggcgcgggggtaggacgacgcgggcgcggatgacgatggggtgcgtgctgctcgaccacgtggcgccgcggctcgcggtggcctcggccacgctcgtgggtgcccgggaggtgatcgcggcggctgccgccgcgggcgcggggggaagcggcgcggtgcacggcgccgtggcgtcgacgctcgcgcaggtagcggtcacggccgtggcgattgcatcgggggcgtgcctttcgaccaaggtcgacttcctctggcctcgcatcgaccagttgccagatactcttatatttgaaggagtggaggtgacaggataccagatatttgaggatcccaaggtgcagaaagcaatagaatttgctagtacagcccaccttgggcaatttaggagaacaggggatccatatattacacactgcatacacactggaaaaattttagctgccttggttccgtcaactggagaaagagctgttaacacaattgtggctggcattcttcacgatgttgtttgtgatacatcagagagcttgaagagcatagaagagcagtttggggctgatgttgctagcttggtatctggtgtatcaaaattaagctacataaaccagctacttcgcaggcatcgacaaaaaaatactggtgggagcactcttacttcagaggaatcaggcaaataatctacgtgttatgttattggggatggttgatgatcctcgtgtggtgctcatcaagctggcagatcgcttgcacaatatgcggacaatttatgctcttcctgtacctaaagctgaagctgttgctcaagagacattggctgtctggtgctcacttgcttctcgattgggagtctgggctttgaaagctgagctggaagatttatgctttgctgtcctccagcctcaaatcttcaagaaaatacaatctgaacttactttaatgtggaatcgtaccggaaaatctaaaaatatgagaagatcatcaattcgaaacgaattacttgcttcaatgaaagatgggaatatggtgtccatcaatgatttgtttagttcatgtaaccaagaaagaccaaatatgaaggacttattgcaggcagttttgccatttgacatctttttggatcggaagaggcgttcatacttccttagcaatctcaatagtaattctggagaatctataccaaatcctaagatagttgacgatgctgctgttgcattagcatctttagcatcttgtgaggaagaacttgagcgagaattactcatatcaacatcgtacatacctgggatggaagtgactttgtcgagtagactcaagagcttgtacagtatctactgcaagatgaaaagaaaagaagtaggaattaggcaagtgtatgatgctcgtgcattgagggtgattgttggagacaaaaatggtgccatgcatggatctgctgtccggagttgttacagcatccttgatatagtacacaggctatggactccaattgatggggagtttgatgactacattatcaatcctaagggtagcggttaccaatcactacacacagcagttcaggcatctgatagctcaccgctggaggtccagattagaacccagcgaatgcatgagtatgcagaacatggacttgctgctcattggctgtataaggagagcaaagttgagtacagaagtagcatgagtaagagaataagacaaagtacatcatattcatctagttcttcagaagatgaaagttctgtacaggatgatatcccatcaaagtacagttcaatgaaagtggggcatccagtgctaagaattgaaggtagtcacttactagcagctgtcgtagtcagtatagataaaggaggaaaggaattgattgttgctgtaagttttagtcttgaagcttctgaagctgtagctgagctaaggtcatcttttcagttgaagcgttgggaagcctatgctaggcttcataaaaaggtttctgagaagtggtggtgtgcacctggacatggtgactggtcaacaaatctggagaggtacacactatgccaggatgggatatttcataagcaagaccaatttgggagacttttacctacatttattcaaataattgatttggcggaagaggaagaggaagagtattggatggttgtatctgccatattcgagggaaaggaaacttgcagtctaccatctgaatcgagttatgctgataaatcatcatctgaacctccaagttctactccattaagcgaccccatcaacaataagaaccatgcttcaatgggaggagcaagttcgtcgtggcgcatctttggcagagaaaagtctcagtgcaagcatctgcacaaaggcaatcctgcgtgaggtggccataatattctggcctaatggcaagattatgagaatgagcactggtagcacagctgctgacgctgctagaagaatgggcgtcgaagggaagctgctctgggttaatggccaactagtgctgccccaaacagagctaaaggatggggatatagttgaagtgagggtatagatgcaagtaccagattccagtacaccttcctcagggttattgatcatattggttcctcagttcttgccctatcttggcaatgcatcgaacctcaattgtacagtccatttgtcgaaatgaatcgaagaaagaaggattaggtccagtaagtgttgtgtcatacaagagttcactgtgtacataagaaactgcaagtataaaagctgtctgtccagctgtgcttctccttgcccatagttacagtggtaatgtaaatttccgtaagtaaagatgtagtaatgtttagttagtggtccacatttcagcgtgaagttatgaagtgcagtagcgctgcaagtttttttttatatatgtccaaagtagatgtctcatgctgcctaaaaaagatgtccatgtcccgtaatttggcaagccaagattttcaacgttgtttggtttgtggagtcaacctatgcttgatgtatcatgaattcatcccttaaattttggtggaaatcctcatgaatatactactccgtccgtcctaggatataaggcgtaaccactttttgttcttgtcccacgatataagacgtgctctctatgcatacgtacatcgatacaatggtatagacataattaaatacattttttggtctttgaaccagaggtggttgtgccttgtatactgggacagag

SEQ ID NO: 44260 - DNA, 3567 bp, Zea Mays
gttcccagccgcagccacacaaacagaccgccccctctcgtgctctcaccctccgttcctcgtcgccactcgcgtgccgtgccgtgtgagtgaccctcgtcgcgactcgcgtcgctaggatgagatagaaacgaaaccggcccccacacccggctcgctcgcatgaagcaatcgccggcgtctactgcagtctccgactctgggatgctgggccgccgcctcgccttgctcccggcggcgaccgtcgggcgcgggggtaggacgacgcgggcgcggatgacgatggggtgcgtgctgctcgaccacgtggcgccgcggctcgcggtggcctcggccacgctcgtgggtgcccgggaggtgatcgcggcggctgccgccgcgggcgcggggggaagcggcgcggtgcacggcgccgtggcgtcgacgctcgcgcaggtagcggtcacggccgtggcgattgcatcgggggcgtgcctttcgaccaaggtcgacttcctctggcctcgcatcgaccagttgccagatactcttatatttgaaggagtggaggtgacaggataccagatatttgaggatcccaaggtgcagaaagcaatagaatttgctagtacagcccaccttgggcaatttaggagaacaggggatccatatattacacactgcatacacactggaaaaattttagctgccttggttccgtcaactggagaaagagctgttaacacaattgtggctggcattcttcacgatgttgtttgtgatacatcagagagcttgaagagcatagaagagcagtttggggctgatgttgctagcttggtatctggtgtatcaaaattaagctacataaaccagctacttcgcaggcatcgacaaaaaaatactggtgggagcactcttacttcagaggaagcaaataatctacgtgttatgttattggggatggttgatgatcctcgtgtggtgctcatcaagctggcagatcgcttgcacaatatgcggacaatttatgctcttcctgtacctaaagctgaagctgttgctcaagagacattggctgtctggtgctcacttgcttctcgattgggagtctgggctttgaaagctgagctggaagatttatgctttgctgtcctccagcctcaaatcttcaagaaaatacaatctgaacttactttaatgtggaatcgtaccggaaaatctaaaaatatgagaagatcatcaattcgaaacgaattacttgcttcaatgaaagatgggaatatggtgtccatcaatgatttgtttagttcatgtaaccaagaaagaccaaatatgaaggacttattgcaggcagttttgccatttgacatctttttggatcggaagaggcgttcatacttccttagcaatctcaatagtaattctggagaatctataccaaatcctaagatagttgacgatgctgctgttgcattagcatctttagcatcttgtgaggaagaacttgagcgagaattactcatatcaacatcgtacatacctgggatggaagtgactttgtcgagtagactcaagagcttgtacagtatctactgcaagatgaaaagaaaagaagtaggaattaggcaagtgtatgatgctcgtgcattgagggtgattgttggagacaaaaatggtgccatgcatggatctgctgtccggagttgttacagcatccttgatatagtacacaggctatggactccaattgatggggagtttgatgactacattatcaatcctaagggtagcggttaccaatcactacacacagcagttcaggcatctgatagctcaccgctggaggtccagattagaacccagcgaatgcatgagtatgcagaacatggacttgctgctcattggctgtataaggagagcaaagttgagtacagaagtagcatgagtaagagaataagacaaagtacatcatattcatctagttcttcagaagatgaaagttctgtacaggatgatatcccatcaaagtacagttcaatgaaagtggggcatccagtgctaagaattgaaggtagtcacttactagcagctgtcgtagtcagtatagataaaggaggaaaggaattgattgttgctgtaagttttagtcttgaagcttctgaagctgtagctgagctaaggtcatcttttcagttgaagcgttgggaagcctatgctaggcttcataaaaaggtttctgagaagtggtggtgtgcacctggacatggtgactggtcaacaaatctggagaggtacacactatgccaggatgggatatttcataagagatacaagttactgctggtgccctaaactcctattatgtgattatgtcgtgggtttgattatatcctgtgcgtctaagatgtcttgtttcagcaagaccaatttgggagacttttacctacatttattcaaataattgatttggcggaagaggaagaggaagagtattggatggttgtatctgccatattcgagggaaaggaaacttgcagtctaccatctgaatcgagttatgctgataaatcatcatctgaacctccaagttctactccattaagcgaccccatcaacaataaggtgcatttgctcagaaccatgcttcaatgggaggagcaagttcgtcgtggcgcatctttggcagagaaaagtctcagtgcaagcatctgcacaaaggcaatcctgcgtgaggtggccataatattctggcctaatggcaagattatgagaatgagcactggtagcacagctgctgacgctgctagaagaatgggcgtcgaagggaagctgctctgggttaatggccaactagtgctgccccaaacagagctaaaggatggggatatagttgaagtgagggtatagatgcaagtaccagattccagtacaccttcctcagggttattgatcatattggttcctcagttcttgccctatcttggcaatgcatcgaacctcaattgtacagtccatttgtcgaaatgaatcgaagaaagaaggattaggtccagtaagtgttgtgtcatacaagagttcactgtgtacataagaaactgcaagtataaaagctgtctgtccagctgtgcttctccttgcccatagttacagtggtaatgtaaatttccgtaagtaaagatgtagtaatgtttagttagtggtccacatttcagcgtgaagttatgaagtgcagtagcgctgcaagtttttttttatatatgtccaaagtagatgtctcatgctgcctaaaaaagatgtccatgtcccgtaatttggcaagccaagattttcaacgttgtttggtttgtggagtcaacctatgcttgatgtatcatgaattcatcccttaaattttggtggaaatcctcatgaatatactactccgtccgtcctaggatataaggcgtaaccactttttgttcttgtcccacgatataagacgtgctctctatgcatacgtacatcgatacaatggtatagacataattaaatacattttttggtctttgaaccagaggtggttgtgccttgtatactgggacagag

SEQ ID NO: 44261 - DNA, 3469 bp, Zea Mays
gttcccagccgcagccacacaaacagaccgccccctctcgtgctctcaccctccgttcctcgtcgccactcgcgtgccgtgccgtgtgagtgaccctcgtcgcgactcgcgtcgctaggatgagatagaaacgaaaccggcccccacacccggctcgctcgcatgaagcaatcgccggcgtctactgcagtctccgactctgggatgctgggccgccgcctcgccttgctcccggcggcgaccgtcgggcgcgggggtaggacgacgcgggcgcggatgacgatggggtgcgtgctgctcgaccacgtggcgccgcggctcgcggtggcctcggccacgctcgtgggtgcccgggaggtgatcgcggcggctgccgccgcgggcgcggggggaagcggcgcggtgcacggcgccgtggcgtcgacgctcgcgcaggtagcggtcacggccgtggcgattgcatcgggggcgtgcctttcgaccaaggtcgacttcctctggcctcgcatcgaccagttgccagatactcttatatttgaaggagtggaggtgacaggataccagatatttgaggatcccaaggtgcagaaagcaatagaatttgctagtacagcccaccttgggcaatttaggagaacaggggatccatatattacacactgcatacacactggaaaaattttagctgccttggttccgtcaactggagaaagagctgttaacacaattgtggctggcattcttcacgatgttgtttgtgatacatcagagagcttgaagagcatagaagagcagtttggggctgatgttgctagcttggtatctggtgtatcaaaattaagctacataaaccagctacttcgcaggcatcgacaaaaaaatactggtgggagcactcttacttcagaggaagcaaataatctacgtgttatgttattggggatggttgatgatcctcgtgtggtgctcatcaagctggcagatcgcttgcacaatatgcggacaatttatgctcttcctgtacctaaagctgaagctgttgctcaagagacattggctgtctggtgctcacttgcttctcgattgggagtctgggctttgaaagctgagctggaagatttatgctttgctgtcctccagcctcaaatcttcaagaaaatacaatctgaacttactttaatgtggaatcgtaccggaaaatctaaaaatatgagaagatcatcaattcgaaacgaattacttgcttcaatgaaagatgggaatatggtgtccatcaatgatttgtttagttcatgtaaccaagaaagaccaaatatgaaggacttattgcaggcagttttgccatttgacatctttttggatcggaagaggcgttcatacttccttagcaatctcaatagtaattctggagaatctataccaaatcctaagatagttgacgatgctgctgttgcattagcatctttagcatcttgtgaggaagaacttgagcgagaattactcatatcaacatcgtacatacctgggatggaagtgactttgtcgagtagactcaagagcttgtacagtatctactgcaagatgaaaagaaaagaagtaggaattaggcaagtgtatgatgctcgtgcattgagggtgattgttggagacaaaaatggtgccatgcatggatctgctgtccggagttgttacagcatccttgatatagtacacaggctatggactccaattgatggggagtttgatgactacattatcaatcctaagggtagcggttaccaatcactacacacagcagttcaggcatctgatagctcaccgctggaggtccagattagaacccagcgaatgcatgagtatgcagaacatggacttgctgctcattggctgtataaggagagcaaagttgagtacagaagtagcatgagtaagagaataagacaaagtacatcatattcatctagttcttcagaagatgaaagttctgtacaggatgatatcccatcaaagtacagttcaatgaaagtggggcatccagtgctaagaattgaaggtagtcacttactagcagctgtcgtagtcagataaaggaggaaaggaattgattgttgctgtaagttttagtcttgaagcttctgaagctgtagctgagctaaggtcatcttttcagttgaagcgttgggaagcctatgctaggcttcataaaaaggtttctgagaagtggtggtgtgcacctggacatggtgactggtcaacaaatctggagaggtacacactatgccaggatgggatatttcataagcaagaccaatttgggagacttttacctacatttattcaaataattgatttggcggaagaggaagaggaagagtattggatggttgtatctgccatattcgagggaaaggaaacttgcagtctaccatctgaatcgagttatgctgataaatcatcatctgaacctccaagttctactccattaagcgaccccatcaacaataaggtgcatttgctcagaaccatgcttcaatgggaggagcaagttcgtcgtggcgcatctttggcagagaaaagtctcagtgcaagcatctgcacaaaggcaatcctgcgtgaggtggccataatattctggcctaatggcaagattatgagaatgagcactggtagcacagctgctgacgctgctagaagaatgggcgtcgaagggaagctgctctgggttaatggccaactagtgctgccccaaacagagctaaaggatggggatatagttgaagtgagggtatagatgcaagtaccagattccagtacaccttcctcagggttattgatcatattggttcctcagttcttgccctatcttggcaatgcatcgaacctcaattgtacagtccatttgtcgaaatgaatcgaagaaagaaggattaggtccagtaagtgttgtgtcatacaagagttcactgtgtacataagaaactgcaagtataaaagctgtctgtccagctgtgcttctccttgcccatagttacagtggtaatgtaaatttccgtaagtaaagatgtagtaatgtttagttagtggtccacatttcagcgtgaagttatgaagtgcagtagcgctgcaagtttttttttatatatgtccaaagtagatgtctcatgctgcctaaaaaagatgtccatgtcccgtaatttggcaagccaagattttcaacgttgtttggtttgtggagtcaacctatgcttgatgtatcatgaattcatcccttaaattttggtggaaatcctcatgaatatactactccgtccgtcctaggatataaggcgtaaccactttttgttcttgtcccacgatataagacgtgctctctatgcatacgtacatcgatacaatggtatagacataattaaatacattttttggtctttgaaccagaggtggttgtgccttgtatactgggacagag

SEQ ID NO: 44262 - DNA, 3858 bp, Zea Mays
aacgtcgacagctcccgtgacccagttcccagccgcagccacacaaacagaccgccccctctcgtgctctcaccctccgttcctcgtcgccactcgcgtgccgtgccgtgtgagtgaccctcgtcgcgactcgcgtcgctaggatgagatagaaacgaaaccggcccccacacccggctcgctcgcatgaagcaatcgccggcgtctactgcagtctccgactctgggatgctgggccgccgcctcgccttgctcccggcggcgaccgtcgggcgcgggggtaggacgacgcgggcgcggatgacgatggggtgcgtgctgctcgaccacgtggcgccgcggctcgcggtggcctcggccacgctcgtgggtgcccgggaggtgatcgcggcggctgccgccgcgggcgcggggggaagcggcgcggtgcacggcgccgtggcgtcgacgctcgcgcaggtagcggtcacggccgtggcgattgcatcgggggcgtgcctttcgaccaaggtcgacttcctctggcctcgcatcgaccagttgccagatactcttatatttgaaggagtggaggtgacaggataccagatatttgaggatcccaaggtgcagaaagcaatagaatttgctagtacagcccaccttgggcaatttaggagaacaggggatccatatattacacactgcatacacactggaaaaattttagctgccttggttccgtcaactggagaaagagctgttaacacaattgtggctggcattcttcacgatgttgtttgtgatacatcagagagcttgaagagcatagaagagcagtttggggctgatgttgctagcttggtatctggtgtatcaaaattaagctacataaaccagctacttcgcaggcatcgacaaaaaaatactggtgggagcactcttacttcagaggaagcaaataatctacgtgttatgttattggggatggttgatgatcctcgtgtggtgctcatcaagctggcagatcgcttgcacaatatgcggacaatttatgctcttcctgtacctaaagctgaagctgttgctcaagagacattggctgtctggtgctcacttgcttctcgattgggagtctgggctttgaaagctgagctggaagatttatgctttgctgtcctccagcctcaaatcttcaagaaaatacaatctgaacttactttaatgtggaatcgtaccggaaaatctaaaaatatgagaagatcatcaattcgaaacgaattacttgcttcaatgaaagatgggaatatggtgtccatcaatgatttgtttagttcatgtaaccaagaaagaccaaatatgaaggacttattgcaggcagttttgccatttgacatctttttggatcggaagaggcgttcatacttccttagcaatctcaatagtaattctggagaatctataccaaatcctaagatagttgacgatgctgctgttgcattagcatctttagcatcttgtgaggaagaacttgagcgagaattactcatatcaacatcgtacatacctgggatggaagtgactttgtcgagtagactcaagagcttgtacagtatctactgcaagatgaaaagaaaagaagtaggaattaggcaagtgtatgatgctcgtgcattgagggtgattgttggagacaaaaatggtgccatgcatggatctgctgtccggagttgttacagcatccttgatatagtacacaggctatggactccaattgatggggagtttgatgactacattatcaatcctaagggtagcggttaccaagacctgaggagtgctactcagaccatctaaccaactcagctagatgccctttcacaagtcactacacacagcagttcaggcatctgatagctcaccgctggaggtccagattagaacccagcgaatgcatgagtatgcagaacatggacttgctgctcattggctgtataaggagagcaaagttgagtacagaagtagcatgagtaagagaataagacaaagtacatcatattcatctagttcttcagaagatgaaagttctgtacaggatgatatcccatcaaagtacagttcaatgaaagtggggcatccagtgctaagaattgaaggtagtcacttactagcagctgtcgtagtcaggtatatcttcattcaaaaatagaaactgttgtttgttctggaagaccaatattgcagctgatatatgtttaaatcaatttgcagtatagataaaggaggaaaggaattgattgttgctgtaagttttagtcttgaagcttctgaagctgtagctgagctaaggtcatcttttcagttgaagcgttgggaagcctatgctaggcttcataaaaaggtttctgagaagtggtggtgtgcacctggacatggtgactggtcaacaaatctggagaggtacacactatgccaggatgggatatttcataaggtctgtacagctgaaacattagctctttatcagtttttgtttcttcttctcagccttttgttctgttttagattatatgagaatgcaaaactgatattgcatgcacatttggaatcatcgcaccaactgaaaaatttagagatacaagttactgctggtgccctaaactcctattatgtgattatgtcgtgggtttgattatatcctgtgcgtctaagatgtcttgtttcagcaagaccaatttgggagacttttacctacatttattcaaataattgatttggcggaagaggaagaggaagagtattggatggttgtatctgccatattcgagggaaaggaaacttgcagtctaccatctgaatcgagttatgctgataaatcatcatctgaacctccaagttctactccattaagcgaccccatcaacaataagaaccatgcttcaatgggaggagcaagttcgtcgtggcgcatctttggcagagaaaagtctcagtgcaagcatctgcacaaaggcaatcctgcgtgaggtggccataatattctggcctaatggcaagattatgagaatgagcactggtagcacagctgctgacgctgctagaagaatgggcgtcgaagggaagctgctctgggttaatggccaactagtgctgccccaaacagagctaaaggatggggatatagttgaagtgagggtatagatgcaagtaccagattccagtacaccttcctcagggttattgatcatattggttcctcagttcttgccctatcttggcaatgcatcgaacctcaattgtacagtccatttgtcgaaatgaatcgaagaaagaaggattaggtccagtaagtgttgtgtcatacaagagttcactgtgtacataagaaactgcaagtataaaagctgtctgtccagctgtgcttctccttgcccatagttacagtggtaatgtaaatttccgtaagtaaagatgtagtaatgtttagttagtggtccacatttcagcgtgaagttatgaagtgcagtagcgctgcaagtttttttttatatatgtccaaagtagatgtctcatgctgcctaaaaaagatgtccatgtcccgtaatttggcaagccaagattttcaacgttgtttggtttgtggagtcaacctatgcttgatgtatcatgaattcatcccttaaattttggtggaaatcctcatgaatatactactccgtccgtcctaggatataaggcgtaaccactttttgttcttgtcccacgatataagacgtgctctctatgcatacgtacatcgatacaatggtatagacataattaaatacattttttggtctttgaaccagaggtggttgtgccttgtatactgggacagag

SEQ ID NO: 44263 - DNA, 3836 bp, Zea Mays
aatctggcgaaacttctatcatcgtcactcacaaggcttttacacgactagttctgcgaggctaagagcagaaaaaactccacctgcctggctgatttcatcaactccggcggcttggagaagacgaagctgctccagaatccgataggaagtttggtgctcgcgtgttgacgggttgatttcggtgcgccgatggggcaggcgttccgcaagctgttcgatgccttcctcggcaccagcgagatgagggttgtgatgcttggtctggatgccgccggtaaaaccaccatcttgtacaagctgcaaatcggggaggttttgtcgactgttcccacgattggtttcaatgtcgagaaagttcaatacaagaatgtgatgtttactgtttgggatgttggtggccaagaaaagttgaggcccttgtggaggcactacttcaacaatactgatggcttgatctatgtagttgattcattggatcgggagaggattggaaaagctaaagctgaatttcaggcaataatcaatgatcctttcatgcttaacagtgtcatattggtatttgccaataaacaagatatgaaaggggcaatgacaccaatggaggtgtgtgagggccttggcctctacgatttgaagaatcgcacctggcacatccaaggctcctgtgcgcttaaaggtgatggcctttatgagggcttggactggatggcaagcactctgaaggaattgcaagcttcaggtcgcctaccctctggagggacatcgttgttctaagaagcaaatctgcatatactcttatatttgaaggagtggaggtgacaggataccagatatttgaggatcccaaggtgcagaaagcaatagaatttgctagtacagcccaccttgggcaatttaggagaacaggggatccatatattacacactgcatacacactggaaaaattttagctgccttggttccgtcaactggagaaagagctgttaacacaattgtggctggcattcttcacgatgttgtttgtgatacatcagagagcttgaagagcatagaagagcagtttggggctgatgttgctagcttggtatctggtgtatcaaaattaagctacataaaccagctacttcgcaggcatcgacaaaaaaatactggtgggagcactcttacttcagaggaagcaaataatctacgtgttatgttattggggatggttgatgatcctcgtgtggtgctcatcaagctggcagatcgcttgcacaatatgcggacaatttatgctcttcctgtacctaaagctgaagctgttgctcaagagacattggctgtctggtgctcacttgcttctcgattgggagtctgggctttgaaagctgagctggaagatttatgctttgctgtcctccagcctcaaatcttcaagaaaatacaatctgaacttactttaatgtggaatcgtaccggaaaatctaaaaatatgagaagatcatcaattcgaaacgaattacttgcttcaatgaaagatgggaatatggtgtccatcaatgatttgtttagttcatgtaaccaagaaagaccaaatatgaaggacttattgcaggcagttttgccatttgacatctttttggatcggaagaggcgttcatacttccttagcaatctcaatagtaattctggagaatctataccaaatcctaagatagttgacgatgctgctgttgcattagcatctttagcatcttgtgaggaagaacttgagcgagaattactcatatcaacatcgtacatacctgggatggaagtgactttgtcgagtagactcaagagcttgtacagtatctactgcaagatgaaaagaaaagaagtaggaattaggcaagtgtatgatgctcgtgcattgagggtgattgttggagacaaaaatggtgccatgcatggatctgctgtccggagttgttacagcatccttgatatagtacacaggctatggactccaattgatggggagtttgatgactacattatcaatcctaagggtagcggttaccaatcactacacacagcagttcaggcatctgatagctcaccgctggaggtccagattagaacccagcgaatgcatgagtatgcagaacatggacttgctgctcattggctgtataaggagagcaaagttgagtacagaagtagcatgagtaagagaataagacaaagtacatcatattcatctagttcttcagaagatgaaagttctgtacaggatgatatcccatcaaagtacagttcaatgaaagtggggcatccagtgctaagaattgaaggtagtcacttactagcagctgtcgtagtcagtatagataaaggaggaaaggaattgattgttgctgtaagttttagtcttgaagcttctgaagctgtagctgagctaaggtcatcttttcagttgaagcgttgggaagcctatgctaggcttcataaaaaggtttctgagaagtggtggtgtgcacctggacatggtgactggtcaacaaatctggagaggtacacactatgccaggatgggatatttcataagagatacaagttactgctggtgccctaaactcctattatgtgattatgtcgtgggtttgattatatcctgtgcgtctaagatgtcttgtttcagcaagaccaatttgggagacttttacctacatttattcaaataattgatttggcggaagaggaagaggaagagtattggatggttgtatctgccatattcgagggaaaggaaacttgcagtctaccatctgaatcgagttatgctgataaatcatcatctgaacctccaagttctactccattaagcgaccccatcaacaataaggtgcatttgctcagaaccatgcttcaatgggaggagcaagttcgtcgtggcgcatctttggcagagaaaagtctcagtgcaagcatctgcacaaaggcaatcctgcgtgaggtggccataatattctggcctaatggcaagattatgagaatgagcactggtagcacagctgctgacgctgctagaagaatgggcgtcgaagggaagctgctctgggttaatggccaactagtgctgccccaaacagagctaaaggatggggatatagttgaagtgagggtatagatgcaagtaccagattccagtacaccttcctcagggttattgatcatattggttcctcagttcttgccctatcttggcaatgcatcgaacctcaattgtacagtccatttgtcgaaatgaatcgaagaaagaaggattaggtccagtaagtgttgtgtcatacaagagttcactgtgtacataagaaactgcaagtataaaagctgtctgtccagctgtgcttctccttgcccatagttacagtggtaatgtaaatttccgtaagtaaagatgtagtaatgtttagttagtggtccacatttcagcgtgaagttatgaagtgcagtagcgctgcaagtttttttttatatatgtccaaagtagatgtctcatgctgcctaaaaaagatgtccatgtcccgtaatttggcaagccaagattttcaacgttgtttggtttgtggagtcaacctatgcttgatgtatcatgaattcatcccttaaattttggtggaaatcctcatgaatatactactccgtccgtcctaggatataaggcgtaaccactttttgttcttgtcccacgatataagacgtgctctctatgcatacgtacatcgatacaatggtatagacataattaaatacattttttggtctttgaaccagaggtggttgtgccttgtatactgggacagag

SEQ ID NO: 44264 - DNA, 1212 bp, Zea Mays
ggacggaaggaatcgcagaaaggcgtgctcgctgcgcgacgccatctctgcatcccaaccgctcgtgtaggcgcaaatggttcagatgtgttctcacgtcacgggtaaaatctggcgaaacttctatcatcgtcactcacaaggcttttacacgactagttctgcgaggctaagagcagaaaaaactccacctgcctggctgatttcatcaactccggcggcttggagaagacgaagctgctccagaatccgataggaagtttggtgctcgcgtgttgacgggttgatttcggtgcgccgatggggcaggcgttccgcaagctgttcgatgccttcctcggcaccagcgagatgagggttgtgatgcttggtctggatgccgccggtaaaaccaccatcttgtacaagctgcaaatcggggaggttttgtcgactgttcccacgattggtttcaatgtcgagaaagttcaatacaagaatgtgatgtttactgtttgggatgttggtggccaagaaaagttgaggcccttgtggaggcactacttcaacaatactgatggcttgatctatgtagttgattcattggatcgggagaggattggaaaagctaaagctgaatttcaggcaataatcaatgatcctttcatgcttaacagtgtcatattggtatttgccaataaacaagatatgaaaggggcaatgacaccaatggaggtgtgtgagggccttggcctctacgatttgaagaatcgcacctggcacatccaaggctcctgtgcgcttaaaggtgatggcctttatgagggcttggactggatggcaagcactctgaaggaattgcaagcttcaggtcgcctaccctctggagggacatcgttgttctaagaagcaaatctgcatgctccgtggggtgattctactaaagaaaaggtgaaacatgggcctgaccgcataaaaatatcggtcatgcgtttgtactcacccctggggatttcttgtcaatgatctaacctgtgatataggccttgtaacttccgttgtgagtaagtttcattcaaagctaaccggcggatgcatttgtcacatatgagaattgaggagtcaacttccacatcctgttgttgtaagaatttctgtaaatcgaagttggcaaacataatttatctcaacaagttggtccggtcattattcaggattgggtttatttttgtg

SEQ ID NO: 44265 - DNA, 2327 bp, Zea Mays
atgaaagaaggggaagaactcaatactgacaaaatacactactcgctgcgaatgaatgaaaggaagaactcaatactgacaaaatacactactcgctgcgaaatgcgagtgaatgaaaggaaagtgaatgaaaggaagaactcgatgctgacaaaatacacactctcgctgcgaatgaatggaaggaaaacgaatgaagggaagaactcgatgctgacaaaatacactcgctgggaatggatgaaaggaagaactcattttcagctcattattataagctgtcctcgctattacgagggggaaacaaaaacaaaacgaaaaatagggacacgccacatcatcgccatcctcatttcgtcctgttatctcgtagctccacagtccacacccaccatcccgttctccctctcttctcctctccaaggtccctgccacccacacaaggcttggactcttgggccggccgggggggaagaagacaagacaaacgcagccgccggcatgatggcgatctgcagcgcgcacaccaccaccatctccctgcgctccccatgcacgacgaccgtctcgaacgcggcagctggcttggtgcagaagcaagtcatcttcttgaccagcatcaacaggaggagcggcagcagaaggcgtggaggaggggtgagcaggaccttactccaggtctcgtgctccgccgacggcaacaagccagtggtgatcggcctggcggcggactccgggtgcggcaagagcaccttcatgcgccggctcaccagcgtcttcggcggcgccgcggagccgcccaggggcgggaacccggactccaacacgctcatcagcgacaccacgaccgtgatatgcctcgacgactaccactccctggacaggaccggcaggaaggagaagggcgtcaccgcgctcgacccgagggccaacaacttcgacctcatgtacgagcaggtgaaggcgatcaagcaaggccaggcggtccagaagcccatctacaaccacgtcaccggcctcctcgacccgccggagcttatcacgccgcccaagatctttgtcatcgaaggttcgacgagcgtgtgagggacctcttagacttcagcatctacttggacatcagtgatgaggttaagtttgcatggaaaatccagagcgtgggcacagccttgaaagcatcaaggccagcatcgaagccaggaaaccagatttcgatgcatatattgatccgcagaagcagtacgctgacgccgtgatcgaagttctgccgacccagttgatccccgacgacgacgaagggaaggttctgcgagtcaagctgatcatgaaagaaggggtggacaaattcaacccggtctatctcttcgacgaagggtccaccatctcctgggtgccctgtggaagaaagctcacgtgctcttaccccggcatcaaattcgcctacggcccagacatttacttcggaaacgaggtatctgttttggagatggatgggcagttcgacagactagacgagctcatctacgtggagagccatctgagcaacctctcgaccaagttctacggggaggtgacacagcagatgctgaagcacgcggacttccctggaagcaacaacgggacaggtctcttccagaccatcgtcgggctgaagattagagacctctacgagcagattgttgccgagagggctggcgcgccagtggaagcagccaaagtttgatggcccgcgtgcattcagatgtcctaaaacgggacaggcctcttcaaactcgacgcacgtctgttggggatatatgcatgggcagcatggcgaggaactaggagcctaggaggatgtggaagaaacgtcatttgcagagctcaggaaaacgtgcagcacttgtttagatgtgtgccttcttccatgcttcattgcagaaagaaatcaagtgcctctactactatcaggtactcctattcaagtgtaggagacgaatccataccacttccattgttggttattgtttctctgacccggagccaagaacagtcaacaaggacccgaggttgaacatctctttttatggactactggagagtaacaacatgtccgtttggttttaattagtactggattggactgcttctacagtactttgtctttatggattatagctgtagtagtcggttttaattcgtactggattggactgcttccacagtattttatctttatgcattgtagctgcagtagtccgaacaactggttttaatccgaggagagcattaatgttcttgccatctagcaattgaaaaccatagcaggcaaacaaaaaaaatcaaaa

SEQ ID NO: 44266 - DNA, 1732 bp, Zea Mays
atgaaagaaggggaagaactcaatactgacaaaatacactactcgctgcgaatgaatgaaaggaagaactcaatactgacaaaatacactactcgctgcgaaatgcgagtgaatgaaaggaaagtgaatgaaaggaagaactcgatgctgacaaaatacacactctcgctgcgaatgaatggaaggaaaacgaatgaagggaagaactcgatgctgacaaaatacactcgctgggaatggatgaaaggaagaactcattttcagctcattattataagctgtcctcgctattacgagggggaaacaaaaacaaaacgaaaaatagggacacgccacatcatcgccatcctcatttcgtcctgttatctcgtagctccacagtccacacccaccatcccgttctccctctcttctcctctccaaggtccctgccacccacacaaggcttggactcttgggccggccgggggggaagaagacaagacaaacgcagccgccggcatgatggcgatctgcagcgcgcacaccaccaccatctccctgcgctccccatgcacgacgaccgtctcgaacgcggcagctggcttggtgcagaagcaagtcatcttcttgaccagcatcaacaggaggagcggcagcagaaggcgtggaggaggggtgagcaggaccttactccaggtctcgtgctccgccgacggcaacaagccagtggtgatcggcctggcggcggactccgggtgcggcaagagcaccttcatgcgccggctcaccagcgtcttcggcggcgccgcggagccgcccaggggcgggaacccggactccaacacgctcatcagcgacaccacgaccgtgatatgcctcgacgactaccactccctggacaggaccggcaggaaggagaagggcgtcaccgcgctcgacccgagggccaacaacttcgacctcatgtacgagcaggtgaagttctacggggaggtgacacagcagatgctgaagcacgcggacttccctggaagcaacaacgggacaggtctcttccagaccatcgtcgggctgaagattagagacctctacgagcagattgttgccgagagggctggcgcgccagtggaagcagccaaagtttgatggcccgcgtgcattcagatgtcctaaaacgggacaggcctcttcaaactcgacgcacgtctgttggggatatatgcatgggcagcatggcgaggaactaggagcctaggaggatgtggaagaaacgtcatttgcagagctcaggaaaacgtgcagcacttgtttagatgtgtgccttcttccatgcttcattgcagaaagaaatcaagtgcctctactactatcaggtactcctattcaagtgtaggagacgaatccataccacttccattgttggttattgtttctctgacccggagccaagaacagtcaacaaggacccgaggttgaacatctctttttatggactactggagagtaacaacatgtccgtttggttttaattagtactggattggactgcttctacagtactttgtctttatggattatagctgtagtagtcggttttaattcgtactggattggactgcttccacagtattttatctttatgcattgtagctgcagtagtccgaacaactggttttaatccgaggagagcattaatgttcttgccatctagcaattgaaaaccatagcaggcaaacaaaaaaaatcaaaa

SEQ ID NO: 44267 - DNA, 3546 bp, Zea Mays
ttttcatttcacattttttcctcacaaaaaagagagggaaacaatattgcagggccgcccgcgccggaaccgaccacttcaccggcagcgagccggagactccgtggagcccctgtccccgcgccggcgtgggcggagggaggggagcagcggcagcggcagccagcagaagaaggataacggggggctcttggagcctctgggaagaagcttctagaagctgcctgaggcgagggcgagcgcgccgttgccagagtgatctcggtggaataagccgcgcggggccggcgccgtgggggatgcgcctctgggtgccggcaccctccgggatttgaatggtagccagatctcgagggggaggggagcttctcgaagctgggtgaggcgcgcgggccggccgccctgcggttagggtttggtggaagcgggatggtggggagctcggtggagggaggagcggacggagatggaggctgctgcggcgtcggggacacctcgcccgggaccatcgtgtgggtgcggcggaggaatgggtcctggtggcccggcaggatcctgggcccccaggagctcccaccatcgcagatcatgtcgccgaggtccggtacgccggtcaagctcctcggccgggaagacgcaagcgtggattggtacaaccttgagaaatcaaaacgtgttaaagcattcaggtgtggggagtttgatgcctgtattgagaaggcagaggctactcaagggactcttgtgaagaaaagagagaaatatgcaaggagagaagatgctattcttcatgcgcttgaattggagaggaagcagcttgcatcaaagtaccagactcaaggtttcagacctggaccacctggtaatatttctgcttgcacaaaacatcacaaagaccttggaagtactcgctacaagagtaagaagggcaagaagcgcaaagatgcatctgttcctcctgatgtaaaaaaagaagtgggacaatgttttctgcctgctggttcaaagagaaacttttcaggatcacttactcaaggaaatcttgtcagtaatcacatgggtgacttctcccctttgggacattctcatggaggtgccactttagaaaacaaggagagtacagttgtgaagaaaaatagatcagatggaagtgattttgaagactctcttgtttcaaaatcagacagacgcagaccactttctcaagtattgcagagcagtgaaaacttgcttcctcacttaaagcaaaatgatgattttggggctttgttaatcgcggagagtaataatccttcacttgccgcctcctggtccagaagaaataaatatacgtacatggctagtgattctggcgaaactgagagtcatagtgatttaccttctataaagatgtcttctactagaactgattttgagaatgaaagctatcttcagcatcctgtttatttttctgaggagcagacttctgacttcattgagaagcaaataaccgagtcttccgagagggaatgttcagaaagcgagactgaagatgatgctgaacttctgcagaatgcaagtgtgattctacgtacagaatcacatgctccttgtccatattctattccagtttctgacaagttcaagcatgtggattatgatgacaatgaggtgatctattctacttatatgccccagttgaatgaatatgaggaagaggatggttcttctgagctgggtgtctctcagtggcacatgaaaggtaaacgtaacaatcgtaatgccgtgaagagattagtggatatgagagatggaaatacatggttaaataaatacaatggatcattaaaaggatctttgcataacacaaatggtgggaatcccagaaaagaaggtatgcacacatctggtgagcagttttttgaggaaagcttttaccaaataaaagaggagcccaattatgattctgatgaaactaatttatttgagaacatgagccattcagagactaacttgtactatggtaaaaaatacccttcatccttgagaaccacaagagatcttagccgaggctacagttactttaatgactcttcaaatgtttctcccctaaacaaggacactgaacgaatatatcatgttgatcggaatgcatattgggatagaccttcattttaccaaaggaagttgacttcaagttttggtggcatgggaccaatgttgttcaatgttaacctcaaagttcaggccagctaccaaggagagcatgtccctcttgtctctttgatgagcagacttaatggcaaagcaattgttggacaccctatccaaattgaaatagttgaagatggttccacagcagtattctgtggtgacagtggtatgcaagagaccacagctgctccacctgcttggccaacaggtagaaggactgccatgcaaagagttccccgttcaaatccatcaggagcactgttggatggcgataatgaaggtggtcttgtgtattctgattatgagacgaaaccaaccttaagaaagtactcatcttcttcgaatcaccaggttaaggtgaataataaaatcagttctaatgctaagaggtcatcagctaagccccctaagaagtcatccaagaaaacaaacctctcaagccagaaacttagagctctctcttccatctccactgcaaaaaaccatcatggagaaggtggtcaagcgaaggcaaattggcacaatgacatatttggtggtttaatcggatcagaaggagcagttcctctagtgacatgtgtcccaacgaaggttgtgttcactaggatattggaagcagttggaaggccacctctgtctgccgctcgccgtgttagaatggctagtcctccggtacgagatcctccataggcttcaactgtagtgctacatgcggtttatgtcgccagccatcgacatgcaagttttatgtacattcctgttaattgatgaagaggcagaccattcaatcatccggtaacacctgtgaggagtcgattgacatggttgctccgtaataacttggaacagctgatcccttattagcagtggtgacaacctgtaaaaatcagtaatatttctgactggagactgaggtcatgaatgcttcagagcagctcacatatttctgactggagactgcgtccatgaatgcttcagagcagttgagccatcgataccatgaagaggtactcttcggtgtagctagcactggtaactttcgtcacaactgtctcctgtaaagtactagtttcaacattttaggtggcaatttagtcaaaacatttgtgccgtcatatatagcgataggtcatagatttcctaatgccatgtataatcccttaattacatcctgatgtgtctgtcatttgttgtcgagaagtagttggttcaactgtatgtttagagaagcatgtgtacctagtcgatgtaatatatactagtccagagcgcgcgccctgcgcgcgtttataaacaattaggtataaatgcataaacatcttttaatcatgaagttgcatattgaatacttat

SEQ ID NO: 44268 - DNA, 3506 bp, Zea Mays
ttttcatttcacattttttcctcacaaaaaagagagggaaacaatattgcagggccgcccgcgccggaaccgaccacttcaccggcagcgagccggagactccgtggagcccctgtccccgcgccggcgtgggcggagggaggggagcagcggcagcggcagccagcagaagaaggataacggggggctcttggagcctctgggaagaagcttctagaagctgcctgaggcgagggcgagcgcgccgttgccagagtgatctcggtggaataagccgcgcggggccggcgccgtgggggatgcgcctctgggtgccggcaccctccgggatttgaatggtagccagatctcgagggggaggggagcttctcgaagctgggtgaggcgcgcgggccggccgccctgcggttagggtttggtggaagcgggatggtggggagctcggtggagggaggagcggacggagatggaggctgctgcggcgtcggggacacctcgcccgggaccatcgtgtgggtgcggcggaggaatgggtcctggtggcccggcaggatcctgggcccccaggagctcccaccatcgcagatcatgtcgccgaggtccgggattggtacaaccttgagaaatcaaaacgtgttaaagcattcaggtgtggggagtttgatgcctgtattgagaaggcagaggctactcaagggactcttgtgaagaaaagagagaaatatgcaaggagagaagatgctattcttcatgcgcttgaattggagaggaagcagcttgcatcaaagtaccagactcaaggtttcagacctggaccacctggtaatatttctgcttgcacaaaacatcacaaagaccttggaagtactcgctacaagagtaagaagggcaagaagcgcaaagatgcatctgttcctcctgatgtaaaaaaagaagtgggacaatgttttctgcctgctggttcaaagagaaacttttcaggatcacttactcaaggaaatcttgtcagtaatcacatgggtgacttctcccctttgggacattctcatggaggtgccactttagaaaacaaggagagtacagttgtgaagaaaaatagatcagatggaagtgattttgaagactctcttgtttcaaaatcagacagacgcagaccactttctcaagtattgcagagcagtgaaaacttgcttcctcacttaaagcaaaatgatgattttggggctttgttaatcgcggagagtaataatccttcacttgccgcctcctggtccagaagaaataaatatacgtacatggctagtgattctggcgaaactgagagtcatagtgatttaccttctataaagatgtcttctactagaactgattttgagaatgaaagctatcttcagcatcctgtttatttttctgaggagcagacttctgacttcattgagaagcaaataaccgagtcttccgagagggaatgttcagaaagcgagactgaagatgatgctgaacttctgcagaatgcaagtgtgattctacgtacagaatcacatgctccttgtccatattctattccagtttctgacaagttcaagcatgtggattatgatgacaatgaggtgatctattctacttatatgccccagttgaatgaatatgaggaagaggatggttcttctgagctgggtgtctctcagtggcacatgaaaggtaaacgtaacaatcgtaatgccgtgaagagattagtggatatgagagatggaaatacatggttaaataaatacaatggatcattaaaaggatctttgcataacacaaatggtgggaatcccagaaaagaaggtatgcacacatctggtgagcagttttttgaggaaagcttttaccaaataaaagaggagcccaattatgattctgatgaaactaatttatttgagaacatgagccattcagagactaacttgtactatggtaaaaaatacccttcatccttgagaaccacaagagatcttagccgaggctacagttactttaatgactcttcaaatgtttctcccctaaacaaggacactgaacgaatatatcatgttgatcggaatgcatattgggatagaccttcattttaccaaaggaagttgacttcaagttttggtggcatgggaccaatgttgttcaatgttaacctcaaagttcaggccagctaccaaggagagcatgtccctcttgtctctttgatgagcagacttaatggcaaagcaattgttggacaccctatccaaattgaaatagttgaagatggttccacagcagtattctgtggtgacagtggtatgcaagagaccacagctgctccacctgcttggccaacaggtagaaggactgccatgcaaagagttccccgttcaaatccatcaggagcactgttggatggcgataatgaaggtggtcttgtgtattctgattatgagacgaaaccaaccttaagaaagtactcatcttcttcgaatcaccaggttaaggtgaataataaaatcagttctaatgctaagaggtcatcagctaagccccctaagaagtcatccaagaaaacaaacctctcaagccagaaacttagagctctctcttccatctccactgcaaaaaaccatcatggagaaggtggtcaagcgaaggcaaattggcacaatgacatatttggtggtttaatcggatcagaaggagcagttcctctagtgacatgtgtcccaacgaaggttgtgttcactaggatattggaagcagttggaaggccacctctgtctgccgctcgccgtgttagaatggctagtcctccggtacgagatcctccataggcttcaactgtagtgctacatgcggtttatgtcgccagccatcgacatgcaagttttatgtacattcctgttaattgatgaagaggcagaccattcaatcatccggtaacacctgtgaggagtcgattgacatggttgctccgtaataacttggaacagctgatcccttattagcagtggtgacaacctgtaaaaatcagtaatatttctgactggagactgaggtcatgaatgcttcagagcagctcacatatttctgactggagactgcgtccatgaatgcttcagagcagttgagccatcgataccatgaagaggtactcttcggtgtagctagcactggtaactttcgtcacaactgtctcctgtaaagtactagtttcaacattttaggtggcaatttagtcaaaacatttgtgccgtcatatatagcgataggtcatagatttcctaatgccatgtataatcccttaattacatcctgatgtgtctgtcatttgttgtcgagaagtagttggttcaactgtatgtttagagaagcatgtgtacctagtcgatgtaatatatactagtccagagcgcgcgccctgcgcgcgtttataaacaattaggtataaatgcataaacatcttttaatcatgaagttgcatattgaatacttat

SEQ ID NO: 44269 - DNA, 3545 bp, Zea Mays
ttttcatttcacattttttcctcacaaaaaagagagggaaacaatattgcagggccgcccgcgccggaaccgaccacttcaccggcagcgagccggagactccgtggagcccctgtccccgcgccggcgtgggcggagggaggggagcagcggcagcggcagccagcagaagaaggataacggggggctcttggagcctctgggaagaagcttctagaagctgcctgaggcgagggcgagcgcgccgttgccagagtgatctcggtggaataagccgcgcggggccggcgccgtgggggatgcgcctctgggtgccggcaccctccgggatttgaatggtagccagatctcgagggggaggggagcttctcgaagctgggtgaggcgcgcgggccggccgccctgcggttagggtttggtggaagcgggatggtggggagctcggtggagggaggagcggacggagatggaggctgctgcggcgtcggggacacctcgcccgggaccatcgtgtgggtgcggcggaggaatgggtcctggtggcccggcaggatcctgggcccccaggagctcccaccatcgcagatcatgtcgccgaggtccggtacgccggtcaagctcctcggccgggaagacgcaagcgggattggtacaaccttgagaaatcaaaacgtgttaaagcattcaggtgtggggagtttgatgcctgtattgagaaggcagaggctactcaagggactcttgtgaagaaaagagagaaatatgcaaggagagaagatgctattcttcatgcgcttgaattggagaggaagcagcttgcatcaaagtaccagactcaaggtttcagacctggaccacctggtaatatttctgcttgcacaaaacatcacaaagaccttggaagtactcgctacaagagtaagaagggcaagaagcgcaaagatgcatctgttcctcctgatgtaaaaaaagaagtgggacaatgttttctgcctgctggttcaaagagaaacttttcaggatcacttactcaaggaaatcttgtcagtaatcacatgggtgacttctcccctttgggacattctcatggaggtgccactttagaaaacaaggagagtacagttgtgaagaaaaatagatcagatggaagtgattttgaagactctcttgtttcaaaatcagacagacgcagaccactttctcaagtattgcagagcagtgaaaacttgcttcctcacttaaagcaaaatgatgattttggggctttgttaatcgcggagagtaataatccttcacttgccgcctcctggtccagaagaaataaatatacgtacatggctagtgattctggcgaaactgagagtcatagtgatttaccttctataaagatgtcttctactagaactgattttgagaatgaaagctatcttcagcatcctgtttatttttctgaggagcagacttctgacttcattgagaagcaaataaccgagtcttccgagagggaatgttcagaaagcgagactgaagatgatgctgaacttctgcagaatgcaagtgtgattctacgtacagaatcacatgctccttgtccatattctattccagtttctgacaagttcaagcatgtggattatgatgacaatgaggtgatctattctacttatatgccccagttgaatgaatatgaggaagaggatggttcttctgagctgggtgtctctcagtggcacatgaaaggtaaacgtaacaatcgtaatgccgtgaagagattagtggatatgagagatggaaatacatggttaaataaatacaatggatcattaaaaggatctttgcataacacaaatggtgggaatcccagaaaagaaggtatgcacacatctggtgagcagttttttgaggaaagcttttaccaaataaaagaggagcccaattatgattctgatgaaactaatttatttgagaacatgagccattcagagactaacttgtactatggtaaaaaatacccttcatccttgagaaccacaagagatcttagccgaggctacagttactttaatgactcttcaaatgtttctcccctaaacaaggacactgaacgaatatatcatgttgatcggaatgcatattgggatagaccttcattttaccaaaggaagttgacttcaagttttggtggcatgggaccaatgttgttcaatgttaacctcaaagttcaggccagctaccaaggagagcatgtccctcttgtctctttgatgagcagacttaatggcaaagcaattgttggacaccctatccaaattgaaatagttgaagatggttccacagcagtattctgtggtgacagtggtatgcaagagaccacagctgctccacctgcttggccaacaggtagaaggactgccatgcaaagagttccccgttcaaatccatcaggagcactgttggatggcgataatgaaggtggtcttgtgtattctgattatgagacgaaaccaaccttaagaaagtactcatcttcttcgaatcaccaggttaaggtgaataataaaatcagttctaatgctaagaggtcatcagctaagccccctaagaagtcatccaagaaaacaaacctctcaagccagaaacttagagctctctcttccatctccactgcaaaaaaccatcatggagaaggtggtcaagcgaaggcaaattggcacaatgacatatttggtggtttaatcggatcagaaggagcagttcctctagtgacatgtgtcccaacgaaggttgtgttcactaggatattggaagcagttggaaggccacctctgtctgccgctcgccgtgttagaatggctagtcctccggtacgagatcctccataggcttcaactgtagtgctacatgcggtttatgtcgccagccatcgacatgcaagttttatgtacattcctgttaattgatgaagaggcagaccattcaatcatccggtaacacctgtgaggagtcgattgacatggttgctccgtaataacttggaacagctgatcccttattagcagtggtgacaacctgtaaaaatcagtaatatttctgactggagactgaggtcatgaatgcttcagagcagctcacatatttctgactggagactgcgtccatgaatgcttcagagcagttgagccatcgataccatgaagaggtactcttcggtgtagctagcactggtaactttcgtcacaactgtctcctgtaaagtactagtttcaacattttaggtggcaatttagtcaaaacatttgtgccgtcatatatagcgataggtcatagatttcctaatgccatgtataatcccttaattacatcctgatgtgtctgtcatttgttgtcgagaagtagttggttcaactgtatgtttagagaagcatgtgtacctagtcgatgtaatatatactagtccagagcgcgcgccctgcgcgcgtttataaacaattaggtataaatgcataaacatcttttaatcatgaagttgcatattgaatacttat

SEQ ID NO: 44270 - DNA, 2494 bp, Zea Mays
ccaacctcccgcacccgcgccgctactgccctccacgcacgcaggccgccgcttcggtttttgagtttttccatcacacgcagaggtagagagcatccggattccagcttcaagtcccgaaccccacccatgtccgccgccgccgcgacctctgccagcgactggaccatagtccgccgccgcggccgccgccgaggcaacgccccacgctccacctcccagcccgatgccccgacgcctctccccgtgaccccagtcctctggtccccctccgattcctctctcgaccccgcccgcgtctcccgcctcgtcgcgcgcgcccacgccgccatctcccgcgtcgctgcctcccctctctaccacagcctcctccaggactcgtcgctccgccgccgcctcagtctcctcgccccggcccacctctccctcctcggcgtcggcagcttcgagtcctcccccgccgcgcgcctccagctcgcgctcgccgccctcctacgccgcgacctcctcccgaaagccgcctccgcggacgtcttcgaccccgtcctctccgccgtcgagtgcgcggccgccgcggcgctcggcttctccgtcccgagcctcgacgacgggtgccgccgttgcgctgaggagcccacgctcttctacatgccccactgcgaggcgtcgctctacgatgctctcctcgccgctaactgggattcccccgcgcagctacgccgcgtctgcgtgctcggcaacagcttccggcggtacgcgctccaggccgaggagaaccgctcgggccccgccgccaaggccccacatgtcctcgctgcagagcggttcgcgcgcgaggagcggttcggcgacccgagggatctggatgacgaagattggttcgcccacgcgttcaacgagacgagctggcatttcttcgagctgcgcgacgacgtcgacttgtccgccaccattgctgtaggagggagctaagttcattgatcagatgtaatatgggataacgatgaaggcaataagattgggaacaccaaaccgttagggacgcaatacagatttctctgttacatcataacccgtaaggtcaatttcatgatatttgttgttgatggcgtcgctgtccttgagtcaattggtagcaacaataaaggatacactgagatactttgtcaaacttttatgtatccgttcttatcgattggaggtacggattgctaggatggacacataccttatatatccattttatcattatcataggaagtttcctgaatacagatttatgttcacttatactgctttatgaatgaaatatatgcttcaatcgtattgtattctcttcaatttagatctcacctgctatagaataagagtgtacatgttgtcgatttaaattgttagcttcagtcatctcatgcatgcactatgtttgtctctgtgaataaattatgcttcctattgtagacatcatgtgatcataacaaattttatcgcagatgataaacctgttgtcgtttgtctctgttgataaaccatcacggccgtgctgcggtcgtttccgtgaatgccaacttgactgcaggcttggagtcctacaagcacaaagcagtaaaagctgccatggattatggctttcacatggccattacaaagtggcatgatgaggttgcaagggaaatggaagtgatggttaaggagcatgaggatggtgatgctggacaacagtggatgattgacctctggatagctggtctagaagggcatgctctctcaagacctccaattttagaaggagaagcaactgcacgggcaatccgtttagcgaagttcatcaatatgctactgtatgttcatgtgatgagcatagacgcaatggatgagattgccaaggctaaaagagaaggacagtcagatgccgagatctggaaattgcgactacagttgcacgtagcaatggtctacattgcaccacgcttgatgactaaggatgcgggatgcgttcagttgcggctgaggacaagttcagttgcggctgaggacaagcaggacagggacgtcctctctcgtccctctaattttgagggacaatcaaagacaattgggataatctagtcccaacctctgaccctgaaataaacaactctatttgagggatcgttctattccatcccgttctgtcattacaagtaaacacacctcaaaacatcttggtatagaactgaaatatgatattcgttgcatgtattgtagttcattttagtgatcgcctgtaaaattgtgtggcattggttctggctaaatttattgttgtattggtatcttgcttactgttttttttttgaactacacagacatgcggaattaccatgtttagagctagtttgacaactctatttttttttcaagggattctcatttttctaaggaaaaatgaactagttttctatagaaaaataaaaattccttgtaaaaataaggttgctaaactagctcttag

SEQ ID NO: 44271 - DNA, 3009 bp, Zea Mays
ccaacctcccgcacccgcgccgctactgccctccacgcacgcaggccgccgcttcggtttttgagtttttccatcacacgcagaggtagagagcatccggattccagcttcaagtcccgaaccccacccatgtccgccgccgccgcgacctctgccagcgactggaccatagtccgccgccgcggccgccgccgaggcaacgccccacgctccacctcccagcccgatgccccgacgcctctccccgtgaccccagtcctctggtccccctccgattcctctctcgaccccgcccgcgtctcccgcctcgtcgcgcgcgcccacgccgccatctcccgcgtcgctgcctcccctctctaccacagcctcctccaggactcgtcgctccgccgccgcctcagtctcctcgccccggcccacctctccctcctcggcgtcggcagcttcgagtcctcccccgccgcgcgcctccagctcgcgctcgccgccctcctacgccgcgacctcctcccgaaagccgcctccgcggacgtcttcgaccccgtcctctccgccgtcgagtgcgcggccgccgcggcgctcggcttctccgtcccgagcctcgacgacgggtgccgccgttgcgctgaggagcccacgctcttctacatgccccactgcgaggcgtcgctctacgatgctctcctcgccgctaactgggattcccccgcgcagctacgccgcgtctgcgtgctcggcaacagcttccggcggtacgcgctccaggccgaggagaaccgctcgggccccgccgccaaggccccacatgtcctcgctgcagagcggttcgcgcgcgaggagcggttcggcgacccgagggatctggatgacgaagattggttcgcccacgcgttcaacgagacgagctggcatttcttcgagctgcgcgacgacgtcgacttgtccgccaccattgctgtaggagggagctaagttcattgatcagatgtaatatggtaactggatatcttcatgcgttgcttgattgaatgcaatggtgatcaagattctaagtttatcctatttatcggattctctgtgggatgcatactgtataccaattccaaggagaacggtgtatatgccaagttgccaactaggtacctggttgttgctcgatttgttgtctctcgtctgtacatggatatacgattgaattccagcatcaataggacaactgtcctgaattctgtatgctttatgagcatttaaggcctcaatgaggatcgccatgaaattcacaggacatagcatgcatttctagtcaggatctgtatatgttttgaattttatgacaattccagtcatcattgcaaaattcagagtatcgttatacttgaatgtcgtttccgattttctgtttcaatttcacaatcttctttattattattaagctaaagaagtaacatatgaagatatacaacacaatatattacttaaaatcattaattttttgagcatttttaaacagggataacgatgaaggcaataagattgggaacaccaaaccgttagggacgcaatacagatttctctgttacatcataacccgtaaggtcaatttcatgatatttgttgttgatggcgtcgctgtccttgagtcaattggtagcaacaataaaggatacactgagatactttgtcaaacttttatgtatccgttcttatcgattggaggtacggattgctaggatggacacataccttatatatccattttatcattatcataggaagtttcctgaatacagatttatgttcacttatactgctttatgaatgaaatatatgcttcaatcgtattgtattctcttcaatttagatctcacctgctatagaataagagtgtacatgttgtcgatttaaattgttagcttcagtcatctcatgcatgcactatgtttgtctctgtgaataaattatgcttcctattgtagacatcatgtgatcataacaaattttatcgcagatgataaacctgttgtcgtttgtctctgttgataaaccatcacggccgtgctgcggtcgtttccgtgaatgccaacttgactgcaggcttggagtcctacaagcacaaagcagtaaaagctgccatggattatggctttcacatggccattacaaagtggcatgatgaggttgcaagggaaatggaagtgatggttaaggagcatgaggatggtgatgctggacaacagtggatgattgacctctggatagctggtctagaagggcatgctctctcaagacctccaattttagaaggagaagcaactgcacgggcaatccgtttagcgaagttcatcaatatgctactgtatgttcatgtgatgagcatagacgcaatggatgagattgccaaggctaaaagagaaggacagtcagatgccgagatctggaaattgcgactacagttgcacgtagcaatggtctacattgcaccacgcttgatgactaaggatgcgggatgcgttcagttgcggctgaggacaagttcagttgcggctgaggacaagcaggacagggacgtcctctctcgtccctctaattttgagggacaatcaaagacaattgggataatctagtcccaacctctgaccctgaaataaacaactctatttgagggatcgttctattccatcccgttctgtcattacaagtaaacacacctcaaaacatcttggtatagaactgaaatatgatattcgttgcatgtattgtagttcattttagtgatcgcctgtaaaattgtgtggcattggttctggctaaatttattgttgtattggtatcttgcttactgttttttttttgaactacacagacatgcggaattaccatgtttagagctagtttgacaactctatttttttttcaagggattctcatttttctaaggaaaaatgaactagttttctatagaaaaataaaaattccttgtaaaaataaggttgctaaactagctcttag

SEQ ID NO: 44272 - DNA, 2505 bp, Zea Mays
ccaacctcccgcacccgcgccgctactgccctccacgcacgcaggccgccgcttcggtttttgagtttttccatcacacgcagaggtagagagcatccggattccagcttcaagtcccgaaccccacccatgtccgccgccgccgcgacctctgccagcgactggaccatagtccgccgccgcggccgccgccgaggcaacgccccacgctccacctcccagcccgatgccccgacgcctctccccgtgaccccagtcctctggtccccctccgattcctctctcgaccccgcccgcgtctcccgcctcgtcgcgcgcgcccacgccgccatctcccgcgtcgctgcctcccctctctaccacagcctcctccaggactcgtcgctccgccgccgcctcagtctcctcgccccggcccacctctccctcctcggcgtcggcagcttcgagtcctcccccgccgcgcgcctccagctcgcgctcgccgccctcctacgccgcgacctcctcccgaaagccgcctccgcggacgtcttcgaccccgtcctctccgccgtcgagtgcgcggccgccgcggcgctcggcttctccgtcccgagcctcgacgacgggtgccgccgttgcgctgaggagcccacgctcttctacatgccccactgcgaggcgtcgctctacgatgctctcctcgccgctaactgggattcccccgcgcagctacgccgcgtctgcgtgctcggcaacagcttccggcggtacgcgctccaggccgaggagaaccgctcgggccccgccgccaaggccccacatgtcctcgctgcagagcggttcgcgcgcgaggagcggttcggcgacccgagggatctggatgacgaagattggttcgcccacgcgttcaacgagacgagctggcatttcttcgagctgcgcgacgacgtcgacttgtccgccaccattgctgtaggagggagctaagttcattgatcagatgtaatatggtaactggatatcttcatgcgttgcttgattgaatgcaatggtgatcaagattctaagtttatcctatttatcggattctctgtgggatgcatactgtataccaattccaaggagaacggtgtatatgccaagttgccaactaggtacctggttgttgctcgatttgttgtctctcgtctgtacatggatatacgattgaattccagcatcaataggacaactgtcctgaattctgtatgctttatgagcatttaaggcctcaatgaggatcgccatgaaattcacaggacatagcatgcatttctagtcaggatctgtatatgttttgaattttatgacaattccagtcatcattgcaaaattcagagtatcgttatacttgaatgtcgtttccgattttctgtttcaatttcacaatcttctttattattattaagctaaagaagtaacatatgaagatatacaacacaatatattacttaaaatcattaattttttgagcatttttaaacagggataacgatgaaggcaataagattgggaacaccaaaccgttagggacgcaatacagatttctctgttacatcataacccgcttggagtcctacaagcacaaagcagtaaaagctgccatggattatggctttcacatggccattacaaagtggcatgatgaggttgcaagggaaatggaagtgatggttaaggagcatgaggatggtgatgctggacaacagtggatgattgacctctggatagctggtctagaagggcatgctctctcaagacctccaattttagaaggagaagcaactgcacgggcaatccgtttagcgaagttcatcaatatgctactgtatgttcatgtgatgagcatagacgcaatggatgagattgccaaggctaaaagagaaggacagtcagatgccgagatctggaaattgcgactacagttgcacgtagcaatggtctacattgcaccacgcttgatgactaaggatgcgggatgcgttcagttgcggctgaggacaagttcagttgcggctgaggacaagcaggacagggacgtcctctctcgtccctctaattttgagggacaatcaaagacaattgggataatctagtcccaacctctgaccctgaaataaacaactctatttgagggatcgttctattccatcccgttctgtcattacaagtaaacacacctcaaaacatcttggtatagaactgaaatatgatattcgttgcatgtattgtagttcattttagtgatcgcctgtaaaattgtgtggcattggttctggctaaatttattgttgtattggtatcttgcttactgttttttttttgaactacacagacatgcggaattaccatgtttagagctagtttgacaactctatttttttttcaagggattctcatttttctaaggaaaaatgaactagttttctatagaaaaataaaaattccttgtaaaaataaggttgctaaactagctcttag

SEQ ID NO: 44273 - DNA, 2147 bp, Zea Mays
ccaacctcccgcacccgcgccgctactgccctccacgcacgcaggccgccgcttcggtttttgagtttttccatcacacgcagaggtagagagcatccggattccagcttcaagtcccgaaccccacccatgtccgccgccgccgcgacctctgccagcgactggaccatagtccgccgccgcggccgccgccgaggcaacgccccacgctccacctcccagcccgatgccccgacgcctctccccgtgaccccagtcctctggtccccctccgattcctctctcgaccccgcccgcgtctcccgcctcgtcgcgcgcgcccacgccgccatctcccgcgtcgctgcctcccctctctaccacagcctcctccaggactcgtcgctccgccgccgcctcagtctcctcgccccggcccacctctccctcctcggcgtcggcagcttcgagtcctcccccgccgcgcgcctccagctcgcgctcgccgccctcctacgccgcgacctcctcccgaaagccgcctccgcggacgtcttcgaccccgtcctctccgccgtcgagtgcgcggccgccgcggcgctcggcttctccgtcccgagcctcgacgacgggtgccgccgttgcgctgaggagcccacgctcttctacatgccccactgcgaggcgtcgctctacgatgctctcctcgccgctaactgggattcccccgcgcagctacgccgcgtctgcgtgctcggcaacagcttccggcggtacgcgctccaggccgaggagaaccgctcgggccccgccgccaaggccccacatgtcctcgctgcagagcggttcgcgcgcgaggagcggttcggcgacccgagggatctggatgacgaagattggttcgcccacgcgttcaacgagacgagctggcatttcttcgagctgcgcgacgacgtcgacttgtccgccaccattgctgtaggagggagctaagttcattgatcagatgtaatatggtaactggatatcttcatgcgttgcttgattgaatgcaatggtgatcaagattctaagtttatcctatttatcggattctctgtgggatgcatactgtataccaattccaaggagaacggtgtatatgccaagttgccaactaggtacctggttgttgctcgatttgttgtctctcgtctgtacatggatatacgattgaattccagcatcaataggacaactgtcctgaattctgtatgctttatgagcatttaaggcctcaatgaggatcgccatgaaattcacaggacatagcatgcatttctagtcaggatctgtatatgttttgaattttatgacaattccagtcatcattgcaaaattcagagtatcgttatacttgaatgtcgtttccgattttctgtttcaatttcacaatcttctttattattattaagctaaagaagtaacatatgaagatatacaacacaatatattacttaaaatcattaattttttgagcatttttaaacagggataacgatgaaggcaataagattgggaacaccaaaccgttagggacgcaatacagatttctctgttacatcataacccgcttggagtcctacaagcacaaagcagtaaaagctgccatggattatggctttcacatggccattacaaagtggcatgatgaggttgcaagggaaatggaagtgatggttaaggagcatgaggatggtgatgctggacaacagtggatgattgacctctggatagctggtctagaagggcatgctctctcaagacctccaattttagaaggagaagcaactgcacgggcaatccgtttagcgaagttcatcaatatgctactgtatgttcatgtgatgagcatagacgcaatggatgagattgccaaggctaaaagagaaggacagtcagatgccgagatctggaaattgcgactacagttgcacgtagcaatggtctacattgcaccacgcttgatggtagggaaaaagggtgctatgacagcaggtttctatgattctagatgctcaaaactaaagtttgtgaagataataagggataacaagacaacaattaataaaaagatgggcatctggagattgtcgaaacaggctaaaagatatcctgctttggtttaa

SEQ ID NO: 44274 - DNA, 1753 bp, Zea Mays
gcgactcccacatatcgcgtgcatagaggtaacagccgtcgctatctacgtcgcgctggatatggccaacttggcctataaagcccagccaccatgagacgttccgggacggaccctagccaccatacacgcccataggaatacgcacagccgccactgcaaaaaaaaaaagggaaggagcgccgtccgaccaggaagacagacgccaccgccagagaatcgcatctagccgtgaagactacaactcagttgccagaatgagccagggtcgtgttccgggttcaccaagtctgcggcgcgcatcggcggggcttgggcggcgcaatccgcggtgcggtcacgaggatctgatgaatcaccctgctaactggaatctcaagtgtcaggcaagttgtgtccttgattcacttttaatacccaataatgttctttgcaatcatttaccatgcataggtttaattttgatgggacccaataggtcaccctagattgtttatctcatcaccttgtttgcccctgaatcacatgggtagtttttgctattgctttatatggttttaggataatcatttattatatccatgttccagttattttgttattctatttatgttcatgtcaagatcattatattattgttaattggaacatggagcttaacttgagaaatacgtgccaccacaagggaggaatgagaccccttggctaactaattaggaaagctagtggaagactaccttacccgaaaggggcaagggcagtaggggagttgcatgcaaggaggttctcgggttgatttgctgcgatggcggtcagacgggggattcttgcaagtgctcttcccataaactgtagcgggttttcggaagctagtggaactttgtaaaggcctcgtagtggatccctagccattcaccttggtagtgtctaagggcctagctaaccctggcgacatgggaaacacgacttgtgggtaaagggtacaacctctgtagagtgtaaaactggtatactagccgagctcacggtcatgagcggctcaggactctccgatgattaatttatggaacctaaactcaatgtgtcatttgcatatgcatgagattatttattaatttgttctattattttattatggtttggtattcacttacacttagtaattgctaataaaattttgaccaacttataaaagcaatgctcagctttaacctctattgttgatcagccttacacttcatgaactcccacctttggtgagttcatgtcacattattccccacaacttgttgagcgatgaacatgtgtgagctcacccttgctgtctcacaccccccacaggagaagagcaggtggttcagaaggagccacaaggcgaggagttcgatctgatctaggtggcgtttctcaattgacattggcgccgacgatccttagttcgtgttatatttatcttttattttgtaagacttccgctatgtattaaatactctgatgttttgtgacatttatctttatacactctgttattatatatgttgtctactttggcgcatgtatgagatgcacctggctttgttccttaaagccgtgtgtgacaaaaggcacataaatgagcgatgtgtgcaaaacatcaatcaaaattcctagaatcaagaatgtttagctcatgcctaagtttggtaaaagttttctcatctagtggtttggtaaagatatcggctaattgttctttggtgctaacatatgcaat

SEQ ID NO: 44275 - DNA, 2504 bp, Zea Mays
ctctctctctctctctctctctctctctctctctctctctctctctctctctctctctcgctctctctctctcgctctctctctctctctctctctctctcccccccccccgggctaagtccatttggcttctcctccgtgtcggacgcccgctggtcgctgactcgtgttgctgttggggcggcgtcgacgctgcaaagctgtttgcggtccggcgaccggcctgcttctcattcgaacccaatcaaatgctgatgctacggtggggtttcgtctcctcctgtctttttcagttattgctgctggcattgcggcgcggtaagaggagaggagcgaggagggatcggcggagaatgaagatgaaggcgctggcgtgctgccggcggcggccccaggacttgagcatcgacatggaccaagagcccgacagggtgatgacatataatggcctggagacctgcattatcaactgttccgcctatgacgatgatagtggcatcagtgcaacaacatgcggagatggctgtgtcaccgctgattcccttgatgatgaagtctctagctgctttagtaaagatgcttctggttcttccttctcttcacactgccttagcaagcaggaggagcattcgctagatgagttgggtacacccatcgcaattcatctactccctttcaaagcgaagaaaccaatcacatataccttgagtgcttcagatattgaaaacatgaagaaaaaatttgcgaagcttttgctcggttatgatacttcaggaggcgctaggggcgtttgtgcggctctggccttgtctaatggcataatcaatctctctgctactgtttttggagaactctggaagctggaaccattgtgcgaagataaaaagatcaggtggagaaaagaaatggactggttgatgtctcctacaacttatatagtggagctggttccaaggaaacaaagcggagcagatggatgcacatttgagattatgactccaaaggcccgctcagatgttcatgtgaaccttcctgcccttcagaagcttgatacgatgctcattgaagtaatggactctatgatagatacagagttctggtatgaggagagtggtagcagagctgatggtccggtgaaaattaccggcccaaggaagagtaaaaagtggtggctcccatctcctcgtgtccctgagcaagggctatctcgatttcagcggaaaaggcttgtttttcaggctaagcttgttcaccagatcctcaaagccgcaaaatccatcaacgaacaagtcctgttccacatgcctattccggcagctgttatggatgcccttccaaagtctgggagagctagcttgggtgaagatttgtaccaggctataacgaccgagtatattcccatagaggaaatatttgtttccctcagtttgaaaactgagcatagtgtgctcgagactatgaaccagttggagggggcaatgtttgcatggaaccaaagaatcttagaggagcgaagcaagaggtcaccgggacgtcattcctggagcttcatgaaggacagctcgtcagaactcgacaagatgtctgcatgcatcgaaagggtcgacacccttgtgcagcttctgaaagccagatatccgaacctgcctccaacttttatagatgttctaaaggtccagtacaatgtggatgtggggaatgcaatcgtggaggcatactctagggttcttgtcggggtagcattcagcatactgtcgcgcgtggcggagatactgctggaggatgacctggtcaagaggcccaacacccccatggcctcactgaagttcgacctctcctccgacgtgtacttggccggcataacagagacgccgccgggacacgtccggaggtcccttatggatcagatcagcatggtcgacgggcgcttcaacgctgctgtgaagaagaaaggagcgaagcagctgaggtggtgaggacagtcggctgttgtgtgaaatcttttggccatgtacagggtgggtgatgcagagcccagtgtccgctccacaaggacacaaggcaaggttaccatagcaatagcgccagtgtaatgtatttggcaacgagtttatagcttactgtaagagcaagcattaggcgaatcctgcctgtcgaagtctccggatgttgctgttccgtctgaacatctgatgctcttggtcagcctctgctgcatttcttgctggcacctgatgatagcatgtctatggcgagggaccttgcttgagtgcttgacgggttcatgctgacgcgtcttccgctctggaagcagtccgcgtgtggacgcttgtggaattgagactttagagaagagaacgaattccgaagtcagattgggagccagtcgggtgcaaaagggaaggaaatgcactcggcccaacaaatcttccccgcacggtcattcgacggaaggcgacagagcttcaggacaacacaagatgaccgtcgtcgtttgtcggctc

SEQ ID NO: 44276 - DNA, 2402 bp, Zea Mays
ctctctctctctctctctctctctctctctctctctctctctctctctctctctctctcgctctctctctctcgctctctctctctctctctctctctctcccccccccccgggctaagtccatttggcttctcctccgtgtcggacgcccgctggtcgctgactcgtgttgctgttggggcggcgtcgacgctgcaaagttattgctgctggcattgcggcgcggtaagaggagaggagcgaggagggatcggcggagaatgaagatgaaggcgctggcgtgctgccggcggcggccccaggacttgagcatcgacatggaccaagagcccgacagggtgatgacatataatggcctggagacctgcattatcaactgttccgcctatgacgatgatagtggcatcagtgcaacaacatgcggagatggctgtgtcaccgctgattcccttgatgatgaagtctctagctgctttagtaaagatgcttctggttcttccttctcttcacactgccttagcaagcaggaggagcattcgctagatgagttgggtacacccatcgcaattcatctactccctttcaaagcgaagaaaccaatcacatataccttgagtgcttcagatattgaaaacatgaagaaaaaatttgcgaagcttttgctcggttatgatacttcaggaggcgctaggggcgtttgtgcggctctggccttgtctaatggcataatcaatctctctgctactgtttttggagaactctggaagctggaaccattgtgcgaagataaaaagatcaggtggagaaaagaaatggactggttgatgtctcctacaacttatatagtggagctggttccaaggaaacaaagcggagcagatggatgcacatttgagattatgactccaaaggcccgctcagatgttcatgtgaaccttcctgcccttcagaagcttgatacgatgctcattgaagtaatggactctatgatagatacagagttctggtatgaggagagtggtagcagagctgatggtccggtgaaaattaccggcccaaggaagagtaaaaagtggtggctcccatctcctcgtgtccctgagcaagggctatctcgatttcagcggaaaaggcttgtttttcaggctaagcttgttcaccagatcctcaaagccgcaaaatccatcaacgaacaagtcctgttccacatgcctattccggcagctgttatggatgcccttccaaagtctgggagagctagcttgggtgaagatttgtaccaggctataacgaccgagtatattcccatagaggaaatatttgtttccctcagtttgaaaactgagcatagtgtgctcgagactatgaaccagttggagggggcaatgtttgcatggaaccaaagaatcttagaggagcgaagcaagaggtcaccgggacgtcattcctggagcttcatgaaggacagctcgtcagaactcgacaagatgtctgcatgcatcgaaagggtcgacacccttgtgcagcttctgaaagccagatatccgaacctgcctccaacttttatagatgttctaaaggtccagtacaatgtggatgtggggaatgcaatcgtggaggcatactctagggttcttgtcggggtagcattcagcatactgtcgcgcgtggcggagatactgctggaggatgacctggtcaagaggcccaacacccccatggcctcactgaagttcgacctctcctccgacgtgtacttggccggcataacagagacgccgccgggacacgtccggaggtcccttatggatcagatcagcatggtcgacgggcgcttcaacgctgctgtgaagaagaaaggagcgaagcagctgaggtggtgaggacagtcggctgttgtgtgaaatcttttggccatgtacagggtgggtgatgcagagcccagtgtccgctccacaaggacacaaggcaaggttaccatagcaatagcgccagtgtaatgtatttggcaacgagtttatagcttactgtaagagcaagcattaggcgaatcctgcctgtcgaagtctccggatgttgctgttccgtctgaacatctgatgctcttggtcagcctctgctgcatttcttgctggcacctgatgatagcatgtctatggcgagggaccttgcttgagtgcttgacgggttcatgctgacgcgtcttccgctctggaagcagtccgcgtgtggacgcttgtggaattgagactttagagaagagaacgaattccgaagtcagattgggagccagtcgggtgcaaaagggaaggaaatgcactcggcccaacaaatcttccccgcacggtcattcggtcagcgatcctctagttataggaaaggaacattgtttttgttttgat

SEQ ID NO: 44277 - DNA, 2551 bp, Zea Mays
ctctctctctctctctctctctctctctctctctctctctctctctctctctctctctcgctctctctctctcgctctctctctctctctctctctctctcccccccccccgggctaagtccatttggcttctcctccgtgtcggacgcccgctggtcgctgactcgtgttgctgttggggcggcgtcgacgctgcaaagttattgctgctggcattgcggcgcggtaagaggagaggagcgaggagggatcggcggagaatgaagatgaaggcgctggcgtgctgccggcggcggccccaggacttgagcatcgacatggaccaagagcccgacaaaatacagccaatggaaacacaagattcacaacagcttctaggaagttcgcacaggggtgatgacatataatggcctggagacctgcattatcaactgttccgcctatgacgatgatagtggcatcagtgcaacaacatgcggagatggctgtgtcaccgctgattcccttgatgatgaagtctctagctgctttagtaaagatgcttctggttcttccttctcttcacactgccttagcaagcaggaggagcattcgctagatgagttgggtacacccatcgcaattcatctactccctttcaaagcgaagaaaccaatcacatataccttgagtgcttcagatattgaaaacatgaagaaaaaatttgcgaagcttttgctcggttatgatacttcaggaggcgctaggggcgtttgtgcggctctggccttgtctaatggcataatcaatctctctgctactgtttttggagaactctggaagctggaaccattgtgcgaagataaaaagatcaggtggagaaaagaaatggactggttgatgtctcctacaacttatatagtggagctggttccaaggaaacaaagcggagcagatggatgcacatttgagattatgactccaaaggcccgctcagatgttcatgtgaaccttcctgcccttcagaagcttgatacgatgctcattgaagtaatggactctatgatagatacagagttctggtatgaggagagtggtagcagagctgatggtccggtgaaaattaccggcccaaggaagagtaaaaagtggtggctcccatctcctcgtgtccctgagcaagggctatctcgatttcagcggaaaaggcttgtttttcaggctaagcttgttcaccagatcctcaaagccgcaaaatccatcaacgaacaagtcctgttccacatgcctattccggcagctgttatggatgcccttccaaagtctgggagagctagcttgggtgaagatttgtaccaggctataacgaccgagtatattcccatagaggaaatatttgtttccctcagtttgaaaactgagcatagtgtgctcgagactatgaaccagttggagggggcaatgtttgcatggaaccaaagaatcttagaggagcgaagcaagaggtcaccgggacgtcattcctggagcttcatgaaggacagctcgtcagaactcgacaagatgtctgcatgcatcgaaagggtcgacacccttgtgcagcttctgaaagccagatatccgaacctgcctccaacttttatagatgttctaaaggtccagtacaatgtggtaagttagacactgcactgcgacgttttggataggcctaattctaagatgctgtagctctgaacattcgctgaagaatggctactggatgcaggatgtggggaatgcaatcgtggaggcatactctagggttcttgtcggggtagcattcagcatactgtcgcgcgtggcggagatactgctggaggatgacctggtcaagaggcccaacacccccatggcctcactgaagttcgacctctcctccgacgtgtacttggccggcataacagagacgccgccgggacacgtccggaggtcccttatggatcagatcagcatggtcgacgggcgcttcaacgctgctgtgaagaagaaaggagcgaagcagctgaggtggtgaggacagtcggctgttgtgtgaaatcttttggccatgtacagggtgggtgatgcagagcccagtgtccgctccacaaggacacaaggcaaggttaccatagcaatagcgccagtgtaatgtatttggcaacgagtttatagcttactgtaagagcaagcattaggcgaatcctgcctgtcgaagtctccggatgttgctgttccgtctgaacatctgatgctcttggtcagcctctgctgcatttcttgctggcacctgatgatagcatgtctatggcgagggaccttgcttgagtgcttgacgggttcatgctgacgcgtcttccgctctggaagcagtccgcgtgtggacgcttgtggaattgagactttagagaagagaacgaattccgaagtcagattgggagccagtcgggtgcaaaagggaaggaaatgcactcggcccaacaaatcttccccgcacggtcattcggtcagcgatcctctagttataggaaaggaacattgtttttgttttgat

SEQ ID NO: 44278 - DNA, 50 bp, Zea Mays
cttccagcccttggggatcaggtaccctgcagccagccagcacaggcaag

SEQ ID NO: 44279 - DNA, 1278 bp, Zea Mays
tgaggatagagtctaagtgttgaagattacaagatcctttactcaaacgtctttatgaatccagaatcctgctacttggataacacggtgcccgctgctcttacttggatgccaatgagccctaagcattggtagcaaggagcacttagatcctgctggggcatgctcattttacaacgaaggagaagcacagcaagttcgtaatcttgtgcactggtatatatgcaccatttacttctctacttgaacgctgcactatgttgtatcctgcttttctttgcatattcctttaatgttctattccaaattcagtcctgttggctatacattaggattatcagttactactagttagccttgatcagcagaacctacttatccctgggggttttttttatgcttggattattgagctaacaggcgcctcaaaaatcatgactgcaggagtatctccaaccgcgattgctgttcagtcaccctacattgctcaagtgcaattattagactatctccagcagatttcctatctcacttctattttaaactccactctgcaaatagtgtcgtctcagtataaaatagtgttttgcacgcccatatagatggtcttaagagagaagcaccttccttggatggggtttctgggctcggcttcagttaacattgattcaaacacctgaacgcttggttaacacaaggaattggaagctgggaaatcatatgttgcgttttattatcattttttttaactctgatacacacaggacggcatgaggatgaatattcaggaagaggaaaacttcaatttcctgggcatcactgacctatttcttgcctagcacgggcacggtgctcctattcctgtaaatccagtactgtcgacaaggataggatacccagtgcagatgacagacagttcacaattgagttctaggcttcacatttgtgcttgtgcttgcttggagcaacatattgcagcatcaaacatttccaagatatctctgaacaacccgatcttccaactcccgtctctcccctgtcatgagcgtggagttttgtgttgttaatatcatgctcatgtaatctatcttggattcttgggagatcacggaggaatccagttcccccacataactgaactttacttatactgtccttgcttatgctactgcaacttcccaatattgctgctctattatatgattgattcacacgattggagctcgaccaacagaattgaagtgatcaaacatgatcccgtatgctggtcgtgccctt

SEQ ID NO: 44280 - DNA, 1629 bp, Zea Mays
cgaatactggatgggggaggcgtggggacgctgtccaaaacggcgatccgctggggcggaaggagcttggccggtgcgtggtggagtcgctcaggcagggcagggcagggcatgcggtctcgtccatggcatctaggctcgccgccgccgaaatggaaggtgacctcgtttccatggcgttgcctctacattagtgagggtcggtggaaggcaggcttgggttcgtgaatcgtgatccaggcgcagccttacctcttggccgcccccatgcatgccccaggatctggacttgtggaggcgctctgtctcaaggtctcacacactaccctaccctgttcaaccacttccagcgtgagctccgactggtgagcgggatgtggtgctggactgctggagtttacacaagaggaattgaatgccactgcaatgacgattccgagcatcccaagcctgtcgagtaccccgtgagcaatgggtaggctcagcacgagcaatgcgacaccatttgatcttggatgtgatcagcagctccacagttgccacttttttagggttgggaggcctgcatttggttctctattcagggttgaaggtggggcataagctgctccaacctccaactactctgtctcctggagacgtggtttgggctacttggataacacggtgcccgctgctcttacttggatgccaatgagccctaagcattggtagcaaggagcacttagatcctgctggggcatgctcattttacaacgaaggagaagcacagcaagttcgtaatcttgtgcactggagtatctccaaccgcgattgctgttcagtcaccctacattgctcaagtgcaattattagactatctccagcagatttcctatctcacttctattttaaactccactctgcaaatagtgtcgtctcagtataaaatagtgttttgcacgcccatatagatggtcttaagagagaagcaccttccttggatggggtttctgggctcggcttcagttaacattgattcaaacacctgaacgcttggttaacacaaggaattggaagctgggaaatcatatgttgcgttttattatcattttttttaactctgatacacacaggacggcatgaggatgaatattcaggaagaggaaaacttcaatttcctgggcatcactgacctatttcttgcctagcacgggcacggtgctcctattcctgtaaatccagtactgtcgacaaggataggatacccagtgcagatgacagacagttcacaattgagttctaggcttcacatttgtgcttgtgcttgcttggagcaacatattgcagcatcaaacatttccaagatatctctgaacaacccgatcttccaactcccgtctctcccctgtcatgagcgtggagttttgtgttgttaatatcatgctcatgtaatctatcttggattcttgggagatcacggaggaatccagttcccccacataactgaactttacttatactgtccttgcttatgctactgcaacttcccaatattgctgctctattatatgattgattcacacgattggagctcgaccaacagaattgaagtgatcaaacatgatcccgtatgctggtcgtgccctt

SEQ ID NO: 44281 - DNA, 1496 bp, Zea Mays
cgaatactggatgggggaggcgtggggacgctgtccaaaacggcgatccgctggggcggaaggagcttggccggtgcgtggtggagtcgctcaggcagggcagggcagggcatgcggtctcgtccatggcatctaggctcgccgccgccgaaatggaaggtgacctcgtttccatggcgttgcctctacattagtgagggtcggtggaaggcaggcttgggttcgtgaatcgtgatccaggcgcagccttacctcttggccgcccccatgcatgccccaggatctggacttgtggaggcgctctgtctcaaggtctcacacactaccctaccctgttcaaccacttccagcgtgagctccgactggtgagcgggatgtggtgctggactgctggagtttacacaagaggaattgaatgccactgcaatgacgattccgagcatcccaagcctgtcgagtaccccgtgagcaatgggtaggctcagcacgagcaatgcgacaccatttgatcttggatgtgatcagcagctccacaggctacttggataacacggtgcccgctgctcttacttggatgccaatgagccctaagcattggtagcaaggagcacttagatcctgctggggcatgctcattttacaacgaaggagaagcacagcaagagtatctccaaccgcgattgctgttcagtcaccctacattgctcaagtgcaattattagactatctccagcagatttcctatctcacttctattttaaactccactctgcaaatagtgtcgtctcagtataaaatagtgttttgcacgcccatatagatggtcttaagagagaagcaccttccttggatggggtttctgggctcggcttcagttaacattgattcaaacacctgaacgcttggttaacacaaggaattggaagctgggaaatcatatgttgcgttttattatcattttttttaactctgatacacacaggacggcatgaggatgaatattcaggaagaggaaaacttcaatttcctgggcatcactgacctatttcttgcctagcacgggcacggtgctcctattcctgtaaatccagtactgtcgacaaggataggatacccagtgcagatgacagacagttcacaattgagttctaggcttcacatttgtgcttgtgcttgcttggagcaacatattgcagcatcaaacatttccaagatatctctgaacaacccgatcttccaactcccgtctctcccctgtcatgagcgtggagttttgtgttgttaatatcatgctcatgtaatctatcttggattcttgggagatcacggaggaatccagttcccccacataactgaactttacttatactgtccttgcttatgctactgcaacttcccaatattgctgctctattatatgattgattcacacgattggagctcgaccaacagaattgaagtgatcaaacatgatcccgtatgctggtcgtgccctt

SEQ ID NO: 44282 - DNA, 1787 bp, Zea Mays
cgaatactggatgggggaggcgtggggacgctgtccaaaacggcgatccgctggggcggaaggagcttggccggtgcgtggtggagtcgctcaggcagggcagggcagggcatgcggtctcgtccatggcatctaggctcgccgccgccgaaatggaaggtgacctcgtttccatggcgttgcctctacattagtgagggtcggtggaaggcaggcttgggttcgtgaatcgtgatccaggcgcagccttacctcttggccgcccccatgcatgccccaggatctggacttgtggaggcgctctgtctcaaggtctcacacactaccctaccctgttcaaccacttccagcgtgagctccgactggtgagcgggatgtggtgctggactgctggagtttacacaagaggaattgaatgccactgcaatgacgattccgagcatcccaagcctgtcgagtaccccgtgagcaatgggtaggctcagcacgagcaatgcgacaccatttgatcttggatgtgatcagcagctccacagggttgggaggcctgcatttggttctctattcagggttgaaggtggggcataagctgctccaacctccaactactctgtctcctggagacgtggtttgggtgagggcgccacttcttgaaggcaaggctttgcttataatcttgaggaagatggctacaacataactgtggctctagaatcacgccatggtgatgctaccttctctaggctatttggagaaaagtgtgcgaattgaccaaatttaagattcgctgattctctttcatataaggctacttggataacacggtgcccgctgctcttacttggatgccaatgagccctaagcattggtagcaaggagcacttagatcctgctggggcatgctcattttacaacgaaggagaagcacagcaagttcgtaatcttgtgcactggagtatctccaaccgcgattgctgttcagtcaccctacattgctcaagtgcaattattagactatctccagcagatttcctatctcacttctattttaaactccactctgcaaatagtgtcgtctcagtataaaatagtgttttgcacgcccatatagatggtcttaagagagaagcaccttccttggatggggtttctgggctcggcttcagttaacattgattcaaacacctgaacgcttggttaacacaaggaattggaagctgggaaatcatatgttgcgttttattatcattttttttaactctgatacacacaggacggcatgaggatgaatattcaggaagaggaaaacttcaatttcctgggcatcactgacctatttcttgcctagcacgggcacggtgctcctattcctgtaaatccagtactgtcgacaaggataggatacccagtgcagatgacagacagttcacaattgagttctaggcttcacatttgtgcttgtgcttgcttggagcaacatattgcagcatcaaacatttccaagatatctctgaacaacccgatcttccaactcccgtctctcccctgtcatgagcgtggagttttgtgttgttaatatcatgctcatgtaatctatcttggattcttgggagatcacggaggaatccagttcccccacataactgaactttacttatactgtccttgcttatgctactgcaacttcccaatattgctgctctattatatgattgattcacacgattggagctcgaccaacagaattgaagtgatcaaacatgatcccgtatgctggtcgtgccctt

SEQ ID NO: 44283 - DNA, 1526 bp, Zea Mays
ctcgaatactggatgggggaggcgtggggacgctgtccaaaacggcgatccgctggggcggaaggagcttggccggtgcgtggtggagtcgctcaggcagggcagggcagggcatgcggtctcgtccatggcatctaggctcgccgccgccgaaatggaagcgtgagctccgactggtgagcgggatgtggtgctggactgctggagtttacacaagaggaattgaatgccactgcaatgacgattccgagcatcccaagcctgtcgagtaccccgtgagcaatgggtaggctcagcacgagcaatgcgacaccatttgatcttggatgtgatcagcagctccacagttgccacttttttagggttgggaggcctgcatttggttctctattcagggttgaaggtggggcataagctgctccaacctccaactactctgtctcctggagacgtggtttgggtgagggcgccacttcttgaaggctatttggagaaaagtgtgcgaattgaccaaatttaagattcgctgattctctttcatataaggctacttggataacacggtgcccgctgctcttacttggatgccaatgagccctaagcattggtagcaaggagcacttagatcctgctggggcatgctcattttacaacgaaggagaagcacagcaagttcgtaatcttgtgcactggagtatctccaaccgcgattgctgttcagtcaccctacattgctcaagtgcaattattagactatctccagcagatttcctatctcacttctattttaaactccactctgcaaatagtgtcgtctcagtataaaatagtgttttgcacgcccatatagatggtcttaagagagaagcaccttccttggatggggtttctgggctcggcttcagttaacattgattcaaacacctgaacgcttggttaacacaaggaattggaagctgggaaatcatatgttgcgttttattatcattttttttaactctgatacacacaggacggcatgaggatgaatattcaggaagaggaaaacttcaatttcctgggcatcactgacctatttcttgcctagcacgggcacggtgctcctattcctgtaaatccagtactgtcgacaaggataggatacccagtgcagatgacagacagttcacaattgagttctaggcttcacatttgtgcttgtgcttgcttggagcaacatattgcagcatcaaacatttccaagatatctctgaacaacccgatcttccaactcccgtctctcccctgtcatgagcgtggagttttgtgttgttaatatcatgctcatgtaatctatcttggattcttgggagatcacggaggaatccagttcccccacataactgaactttacttatactgtccttgcttatgctactgcaacttcccaatattgctgctctattatatgattgattcacacgattggagctcgaccaacagaattgaagtgatcaaacatgatcccgtatgctggtcgtgccctt

SEQ ID NO: 44284 - DNA, 2138 bp, Zea Mays
  misc_feature (2138)..(2138): n is a, c, g, or t
gatccatcgcttgctcgtgcttctcaccttttgatgacgctgctttttccgttttcgtgcgcctgccctgccccctgagcgcgttcgtgtgtgtgtgtgtttttgtttctcgccgatgcgcatgcgcccgttcggttgggtccttagcttggccttgacgcttctatggtgcgctttcctgtgcttaatctgttggtgatgtatttagtgatcagaggcgggtagtttagtttgcgaccgtttctcttcgttgatcccctcccccttttctacgtttttatgcaggtttcatgtgtttttcttatatcctgtttctgattcatttttccctaattccttttcctaaactctggtgcccttcagtactagtctttactactgctagtagtatcacaaacggcatcaacatttttgttccccactttatcagtagtataatggaaaaacgtctggcgaaattcggaaatacgcttttgggatgcttctgataaccaacgaatgtgctcttccttgttttagatcctatttcaatctgaactttccgcatggatccttttttttttattaggcttgttttgatttcactcctgtattgggttttgctctacgtaaaaccaatagtggatttgtttacacggctcggtagttatgctactctggcgatcgagttatgtaattatgttactctggatcggcttcgatttgttctggacaggatcattacgctgtgtggcttttgtttgcttcacttttcgagagcgtccctttcttgttatgcatgctgagtttgctataaacatgtagcagcactgcactgcactacaacctcgttggcactctatccgtcctctgtttttttttttggtgatgacaattgttctgtttcccatctggttctactccatgtttgtagaaggcggtgctgcgattattcagtacttgcgagcatgtgttttttttgtactagcactaccgtgtgtgcacgattcctatttttgtagaaggtggtgctgcaattgttcaggacttggttgttcatgttgtctcgtgcggagttgtttaggatactgatgtcatctcttcgtatattgcttgactaagatcatgctagttttgattaggtagcttgcatagaaaaagcttgagtatgtatgtactaatcaaatcgcgccctgtggcaatcccgtacatacattaatttcacttggcattgttcattggcatctttctttatgctatctgcagtaacgtagaaggccactttccgtttgtccttttctgcttttgtatggctttgaagttactcaggagacagagcttttctgcgttctcaattttttttttggaacgaagtggcaggagctactcaggccttagtatcgggcacctaagaaggaacacactcaggtcttagtatcgggcacctaagaaggaacacgacatgcaaccctagtacaagccaaagcggttagacgcacttttatagagcaagacacactctctcactctccctgcgatccggagcggtgacagcgagcgatgctcaaagattcttcggttgcgctccttccaaaggttccacgtagtgtagatgaccaggccattgaactcccttttgcgatcttgcggaaagagagtctccgtcttctctcaccactcgccaatgctggagatgttgctcaaatccacatgttgcggcagggaaaagctttcccaagcaagaactgtgttccagacctcatgagcgaaggggcagtcatggctggagctgctgctctcaatgagggtatcctttcttccgtgtccgagaaaaatgttgctgctcacccatggcatgatttggagataggaccagaggctcctgaagtgttcaattgtgtggttgagattcctagaggcagcaaggttaagtatgagttggacaagatatctggtctgatcaaggtggatcgtgtcctttactcctctgttgtttacccacataactatggtttcattccacgcacactctgtgaggatagcgaccccatggacgtcctcgtactgatgcaggaacaagttgtccctgggtgttttctgcgagctcgtgctattgggctcatgcctatgatcgatcagggtgagaaagatgataagan

SEQ ID NO: 44285 - DNA, 3134 bp, Zea Mays
  misc_feature (3134)..(3134): n is a, c, g, or t
cgttcgtccggccccaccaggccaccacttagcacgccccgactctcctacttgctcgtagccgctgacgccactctgctcgaggcggtgcggcaggtggacgttgtcatctacgcggtgcccacgaagcaggcgctcgagcagaagcccctgcttcgggctataaaggaagctggatgcgtgaagttggctctgcgactgggtgtttgaagaatgccatatgtttttccttgagggatttcaagtaataaagtatgctatctgcacagagcaacttagggcataataggcattctcgcaatgatgtttccacaaagcacaaaagtggctatgaaccttctgacacagaaactgagtggcatgaaagcccttggaacgatggagcattggcatcgaataggaatcgtcttcctaaagattctggtaggaatgaccaagttggtactaggaggcaaaacatatctcctaactgcacactagattatcatgctgagaaaacttcaaacttgagatacagtcgtactcctccaagggtcacagaacaaaggcgccatccttctccatttacagctgtgaagaatgaatcacgtaagaagagcagccggacgcctcccagatttcgttcttctatggaaacctttagtagatcatcaataaaggcaaggttttcccgcaatcgttcaatttctgcaccaaaattacggccacaagagaaggaacatcctgctagagctcctgcatttcctggcagtaaccctgtctcaacacatccagaaagagaagttgctgataatatagaagaagattcacatgcagaaaactgttcccaggagatcagtgaattgattgcaaatggcaagttacctaattccagatataatgagtatgcatttacgagcacagagtcgatacctgcaggtgatatcttcttctcccgtgattgcagggctccacttgagaaaacgtcaacaaagcttaacaatattgaccaatcatttacctctgactcaaatgtccatactgagaatgatggcactgttactcaaagtaatttgggccagccatcacaatttgtttcagctcggacaggtctttcgcgcacaactacgaaatccagttatgctactggtcgccattgccagatgagcaccaccaccactttgagtagcccatatagcaatggaaaattaagtggggagagtggaaagtttagtgaaatcactgggaaactagttggaggcgtcatgaaattcacatccagcaaggtgcaaaacgatacgtggcttccatgtatgactgggaaggcatgtcgaaaatcaagaacatcaaacaacaaaaaaaatgatgaatctgaatcaagtttcattcagaaggcacttgtcattgagaagattagacttttttgggctgataaatatcgtccacaaaatttaaatggatttacttgccacagggagcaagtccagcagcttaaacaatcggtctctgcagaattttgcccacatattattttcaaaggtcctccaggatcaggaaagagatctttgtgcagagctgtcctcactgaaatttttggcgattcatctttgaatgtctctcactatttgaagagctgcaatggccaggggtccatatctgtgcctattctcgtcccagtttcatccagcaataaccatgtggaactccacatgaggtttcaatcgaagaacgctagatatgctttgatgactctagcaaatgaaatgtctgataagtgtaaaatcactgagccaattgtgagaaagagctttaaagtgattgttctctatgatgttgataaagtcagccaaaataaccagcgtctgataaaatggataatagattcctcctctgatgcatgcaagataataatgacttgccaggatgaatctaatctcctagattctataaagagtcgttgcaagattatttcaattggtgtgcccagtacacgtgaggtggtagatatccttacctatacatcaagaaaagagagttttgatcttcctacaagttttgctactaccattgcgaatcaatccaggaagaacttgagggaggctatattggctctagaggcatgtaaagccaacaattatcccttcattgatggacaagctataccactaggatgggaggaggttctggaggaacttgcagtagaaattttggatgatcctgcccctaaaaggttatttctggcacgaggcaagctccaaaaactcctggtggaatttgtacctcctaaactaatactccagaagctcgtagaactcttcttgaagggaattcagactggcgtgaagagggaagtctactattggcatgcctactatgacaagaggttgcctgttggtgcaagtgctctgcttaaattggaagaattcgttgccaagttcatgagcatccaccggaagagcatgtcgcatgagcccaagattcctgaggtgccgcagtgaaacctggcagagcatgtcctcgtgcggttcggccgtgtcgaaatcccgtttgtggtggtggtttttctgttttatataattcaccttacgtgatcaactgtcatggtccatgtttttcttgttctatgtatatactatatggtacacatatatgctactactgagtacacaaatatgtccagccgaataaatgtctatacggctataccatctgtgttggcaatatcttgttgcaaaagtttgggagtggacgtataataatcttttgatttgagtcatggctggagctgctgctctcaatgagggtatcctttcttccgtgtccgagaaaaatgttgctgctcacccatggcatgatttggagataggaccagaggctcctgaagtgttcaattgtgtggttgagattcctagaggcagcaaggttaagtatgagttggacaagatatctggtctgatcaaggtggatcgtgtcctttactcctctgttgtttacccacataactatggtttcattccacgcacactctgtgaggatagcgaccccatggacgtcctcgtactgatgcaggaacaagttgtccctgggtgttttctgcgagctcgtgctattgggctcatgcctatgatcgatcagggtgagaaagatgataagan

SEQ ID NO: 44286 - DNA, 628 bp, Zea Mays
aaaggcttctcatcactgcgctaggatgggaggaggttctggaggaacttgcagtagaaattttggatgatcctgcccctaaaaggttatttctggcacgaggcaagctccaaaaactcctggtggaatttgtacctcctaaactaatactccagaagctcgtagaactcttcttgaagggaattcagactggcgtgaagagggaagtctactattggcatgcctactatgacaagaggttgcctgttggtgcaagtgctctgcttaaattggaagaattcgttgccaagttcatgagcatccaccggaagagcatgtcgcatgagcccaagattcctgaggtgccgcagtgaaacctggcagagcatgtcctcgtgcggttcggccgtgtcgaaatcccgtttgtggtggtggtttttctgttttatataattcaccttacgtgatcaactgtcatggtccatgtttttcttgttctatgtatatactatatggtacacatatatgctactactgagtacacaaatatgtccagccgaataaatgtctatacggctataccatctgtgttggcaatatcttgttgcaaaagtttgggagtggacgtataataatcttttgatttgag

SEQ ID NO: 44287 - DNA, 2641 bp, Zea Mays
ctcctttaaatatatgttttatgttcctaggaatatatgatgatttttggaataagtggcctaggtaatggggtagaatggcttcttctctcctttggtttattctgcacttggagtagaagaagaggacaagaatgccatctggcaaaacagaaaggatgtttttttcttgtcttccttctttgttgtctccttataactcttgcttttgtccttcagttggctctgcgactgggtgtttgaagaatgccatatgtttttccttgagggatttcaagtaataaagtatgctatctgcacagagcaacttagggcataataggcattctcgcaatgatgtttccacaaagcacaaaagtggctatgaaccttctgacacagaaactgagtggcatgaaagcccttggaacgatggagcattggcatcgaataggaatcgtcttcctaaagattctggtaggaatgaccaagttggtactaggaggcaaaacatatctcctaactgcacactagattatcatgctgagaaaacttcaaacttgagatacagtcgtactcctccaagggtcacagaacaaaggcgccatccttctccatttacagctgtgaagaatgaatcacgtaagaagagcagccggacgcctcccagatttcgttcttctatggaaacctttagtagatcatcaataaaggcaaggttttcccgcaatcgttcaatttctgcaccaaaattacggccacaagagaaggaacatcctgctagagctcctgcatttcctggcagtaaccctgtctcaacacatccagaaagagaagttgctgataatatagaagaagattcacatgcagaaaactgttcccaggagatcagtgaattgattgcaaatggcaagttacctaattccagatataatgagtatgcatttacgagcacagagtcgatacctgcaggtgatatcttcttctcccgtgattgcagggctccacttgagaaaacgtcaacaaagcttaacaatattgaccaatcatttacctctgactcaaatgtccatactgagaatgatggcactgttactcaaagtaatttgggccagccatcacaatttgtttcagctcggacaggtctttcgcgcacaactacgaaatccagttatgctactggtcgccattgccagatgagcaccaccaccactttgagtagcccatatagcaatggaaaattaagtggggagagtggaaagtttagtgaaatcactgggaaactagttggaggcgtcatgaaattcacatccagcaaggtgcaaaacgatacgtggcttccatgtatgactgggaaggcatgtcgaaaatcaagaacatcaaacaacaaaaaaaatgatgaatctgaatcaagtttcattcagaaggcacttgtcattgagaagattagacttttttgggctgataaatatcgtccacaaaatttaaatggatttacttgccacagggagcaagtccagcagcttaaacaatcggggtccatatctgtgcctattctcgtcccagtttcatccagcaataaccatgtggaactccacatgaggtttcaatcgaagaacgctagatatgctttgatgactctagcaaatgaaatgtctgataagtgtaaaatcactgagccaattgtgagaaagagctttaaagtgattgttctctatgatgttgataaagtcagccaaaataaccagcgtctgataaaatggataatagattcctcctctgatgcatgcaagataataatgacttgccaggatgaatctaatctcctagattctataaagagtcgttgcaagattatttcaattggtgtgcccagtacacgtgaggtggtagatatccttacctatacatcaagaaaagagagttttgatcttcctacaagttttgctactaccattgcgaatcaatccaggaagaacttgagggaggctatattggctctagaggcatgtaaagccaacaattatcccttcattgatggacaagctataccactaggatgggaggaggttctggaggaacttgcagtagaaattttggatgatcctgcccctaaaaggttatttctggcacgaggcaagctccaaaaactcctggtggaatttgtacctcctaaactaatactccagaagctcgtagaactcttcttgaagggaattcagactggcgtgaagagggaagtctactattggcatgcctactatgacaagaggttgcctgttggtgcaagtgctctgcttaaattggaagaattcgttgccaagttcatgagcatccaccggaagagcatgtcgcatgagcccaagattcctgaggtgccgcagtgaaacctggcagagcatgtcctcgtgcggttcggccgtgtcgaaatcccgtttgtggtggtggtttttctgttttatataattcaccttacgtgatcaactgtcatggtccatgtttttcttgttctatgtatatactatatggtacacatatatgctactactgagtacacaaatatgtccagccgaataaatgtctatacggctataccatctgtgttggcaatatcttgttgcaaaagtttgggagtggacgtataataatcttttgatttgag

SEQ ID NO: 44288 - DNA, 2828 bp, Zea Mays
ggtggatgcagctggagcatgccaggctatatggctcgtgcagctgctgggggacatcaccggcgtcaaagtctagccatcgctgctgaagatggacaattagtatttttttaaaagagaatgatgttgctaaattgacaatatgcaccatagaagattccaggacattgaacaagatgttgtatctgaggcctctaggaaatgtctgctcaatgactgaattggctgacctctaggagacaaaaatcaagaaatccctgaaaaagttatatgtaacagaagatcaacttcttaaagaaatccatgttggctctgcgactgggtgtttgaagaatgccatatgtttttccttgagagcaacttagggcataataggcattctcgcaatgatgtttccacaaagcacaaaagtggctatgaaccttctgacacagaaactgagtggcatgaaagcccttggaacgatggagcattggcatcgaataggaatcgtcttcctaaagattctggtaggaatgaccaagttggtactaggaggcaaaacatatctcctaactgcacactagattatcatgctgagaaaacttcaaacttgagatacagtcgtactcctccaagggtcacagaacaaaggcgccatccttctccatttacagctgtgaagaatgaatcacgtaagaagagcagccggacgcctcccagatttcgttcttctatggaaacctttagtagatcatcaataaaggcaaggttttcccgcaatcgttcaatttctgcaccaaaattacggccacaagagaaggaacatcctgctagagctcctgcatttcctggcagtaaccctgtctcaacacatccagaaagagaagttgctgataatatagaagaagattcacatgcagaaaactgttcccaggagatcagtgaattgattgcaaatggcaagttacctaattccagatataatgagtatgcatttacgagcacagagtcgatacctgcaggtgatatcttcttctcccgtgattgcagggctccacttgagaaaacgtcaacaaagcttaacaatattgaccaatcatttacctctgactcaaatgtccatactgagaatgatggcactgttactcaaagtaatttgggccagccatcacaatttgtttcagctcggacaggtctttcgcgcacaactacgaaatccagttatgctactggtcgccattgccagatgagcaccaccaccactttgagtagcccatatagcaatggaaaattaagtggggagagtggaaagtttagtgaaatcactgggaaactagttggaggcgtcatgaaattcacatccagcaaggtgcaaaacgatacgtggcttccatgtatgactgggaaggcatgtcgaaaatcaagaacatcaaacaacaaaaaaaatgatgaatctgaatcaagtttcattcagaaggcacttgtcattgagaagattagacttttttgggctgataaatatcgtccacaaaatttaaatggatttacttgccacagggagcaagtccagcagcttaaacaatcgaattttgcccacatattattttcaaaggtcctccaggatcaggaaagagatctttgtgcagagctgtcctcactgaaatttttggcgattcatctttgaatgtctctcactatttgaagagctgcaatggccaggggtccatatctgtgcctattctcgtcccagtttcatccagcaataaccatgtggaactccacatgaggtttcaatcgaagaacgctagatatgctttgatgactctagcaaatgaaatgtctgataagtgtaaaatcactgagccaattgtgagaaagagctttaaagtgattgttctctatgatgttgataaagtcagccaaaataaccagcgtctgataaaatggataatagattcctcctctgatgcatgcaagataataatgacttgccaggatgaatctaatctcctagattctataaagagtcgttgcaagattatttcaattggtgtgcccagtacacgtgaggtggtagatatccttacctatacatcaagaaaagagagttttgatcttcctacaagttttgctactaccattgcgaatcaatccaggaagaacttgagggaggctatattggctctagaggcatgtaaagccaacaattatcccttcattgatggacaagctataccactaggatgggaggaggttctggaggaacttgcagtagaaattttggatgatcctgcccctaaaaggttatttctggcacgaggcaagctccaaaaactcctggtggaatttgtacctcctaaactaatactccagaagctcgtagaactcttcttgaagggaattcagactggcgtgaagagggaagtctactattggcatgcctactatgacaagaggttgcctgttggtgcaagtgctctgcttaaattggaagaattcgttgccaagttcatgagcatccaccggaagagcatgtcgcatgagcccaagattcctgaggtgccgcagtgaaacctggcagagcatgtcctcgtgcggttcggccgtgtcgaaatcccgtttgtggtggtggtttttctgttttatataattcaccttacgtgatcaactgtcatggtccatgtttttcttgttctatgtatatactatatggtacacatatatgctactactgagtacacaaatatgtccagccgaataaatgtctatacggctataccatctgtgttggcaatatcttgttgcaaaagtttgggagtggacgtataataatcttttgatttgag

SEQ ID NO: 44289 - DNA, 2446 bp, Zea Mays
ataaaggaagctggatgcgtgaagttggctctgcgactgggtgtttgaagaatgccatatgtttttccttgagggatttcaagtaataaagtatgctatctgcacagagcaacttagggcataataggcattctcgcaatgatgtttccacaaagcacaaaagtggctatgaaccttctgacacagaaactgagtggcatgaaagcccttggaacgatggagcattggcatcgaataggaatcgtcttcctaaagattctggtaggaatgaccaagttggtactaggaggcaaaacatatctcctaactgcacactagattatcatgctgagaaaacttcaaacttgagatacagtcgtactcctccaagggtcacagaacaaaggcgccatccttctccatttacagctgtgaagaatgaatcacgtaagaagagcagccggacgcctcccagatttcgttcttctatggaaacctttagtagatcatcaataaaggcaaggttttcccgcaatcgttcaatttctgcaccaaaattacggccacaagagaaggaacatcctgctagagctcctgcatttcctggcagtaaccctgtctcaacacatccagaaagagaagttgctgataatatagaagaagattcacatgcagaaaactgttcccaggagatcagtgaattgattgcaaatggcaagttacctaattccagatataatgagtatgcatttacgagcacagagtcgatacctgcaggtgatatcttcttctcccgtgattgcagggctccacttgagaaaacgtcaacaaagcttaacaatattgaccaatcatttacctctgactcaaatgtccatactgagaatgatggcactgttactcaaagtaatttgggccagccatcacaatttgtttcagctcggacaggtctttcgcgcacaactacgaaatccagttatgctactggtcgccattgccagatgagcaccaccaccactttgagtagcccatatagcaatggaaaattaagtggggagagtggaaagtttagtgaaatcactgggaaactagttggaggcgtcatgaaattcacatccagcaaggtgcaaaacgatacgtggcttccatgtatgactgggaaggcatgtcgaaaatcaagaacatcaaacaacaaaaaaaatgatgaatctgaatcaagtttcattcagaaggcacttgtcattgagaagattagacttttttgggctgataaatatcgtccacaaaatttaaatggatttacttgccacagggagcaagtccagcagcttaaacaatcggggtccatatctgtgcctattctcgtcccagtttcatccagcaataaccatgtggaactccacatgaggtttcaatcgaagaacgctagatatgctttgatgactctagcaaatgaaatgtctgataagtgtaaaatcactgagccaattgtgagaaagagctttaaagtgattgttctctatgatgttgataaagtcagccaaaataaccagcgtctgataaaatggataatagattcctcctctgatgcatgcaagataataatgacttgccaggatgaatctaatctcctagattctataaagagtcgttgcaagattatttcaattggtgtgcccagtacacgtgaggtggtagatatccttacctatacatcaagaaaagagagttttgatcttcctacaagttttgctactaccattgcgaatcaatccaggaagaacttgagggaggctatattggctctagaggcatgtaaagccaacaattatcccttcattgatggacaagctataccactaggatgggaggaggttctggaggaacttgcagtagaaattttggatgatcctgcccctaaaaggttatttctggcacgaggcaagctccaaaaactcctggtggaatttgtacctcctaaactaatactccagaagctcgtagaactcttcttgaagggaattcagactggcgtgaagagggaagtctactattggcatgcctactatgacaagaggttgcctgttggtgcaagtgctctgcttaaattggaagaattcgttgccaagttcatgagcatccaccggaagagcatgtcgcatgagcccaagattcctgaggtgccgcagtgaaacctggcagagcatgtcctcgtgcggttcggccgtgtcgaaatcccgtttgtggtggtggtttttctgttttatataattcaccttacgtgatcaactgtcatggtccatgtttttcttgttctatgtatatactatatggtacacatatatgctactactgagtacacaaatatgtccagccgaataaatgtctatacggctataccatctgtgttggcaatatcttgttgcaaaagtttgggagtggacgtataataatcttttgatttgag

SEQ ID NO: 44290 - DNA, 2548 bp, Zea Mays
tcgggctataaaggaagctggatgcgtgaagggatttcaagtaataaagtatgctatctgcacagagcaacttagggcataataggcattctcgcaatgatgtttccacaaagcacaaaagtggctatgaaccttctgacacagaaactgagtggcatgaaagcccttggaacgatggagcattggcatcgaataggaatcgtcttcctaaagattctggtaggaatgaccaagttggtactaggaggcaaaacatatctcctaactgcacactagattatcatgctgagaaaacttcaaacttgagatacagtcgtactcctccaagggtcacagaacaaaggcgccatccttctccatttacagctgtgaagaatgaatcacgtaagaagagcagccggacgcctcccagatttcgttcttctatggaaacctttagtagatcatcaataaaggcaaggttttcccgcaatcgttcaatttctgcaccaaaattacggccacaagagaaggaacatcctgctagagctcctgcatttcctggcagtaaccctgtctcaacacatccagaaagagaagttgctgataatatagaagaagattcacatgcagaaaactgttcccaggagatcagtgaattgattgcaaatggcaagttacctaattccagatataatgagtatgcatttacgagcacagagtcgatacctgcaggtgatatcttcttctcccgtgattgcagggctccacttgagaaaacgtcaacaaagcttaacaatattgaccaatcatttacctctgactcaaatgtccatactgagaatgatggcactgttactcaaagtaatttgggccagccatcacaatttgtttcagctcggacaggtctttcgcgcacaactacgaaatccagttatgctactggtcgccattgccagatgagcaccaccaccactttgagtagcccatatagcaatggaaaattaagtggggagagtggaaagtttagtgaaatcactgggaaactagttggaggcgtcatgaaattcacatccagcaaggtgcaaaacgatacgtggcttccatgtatgactgggaaggcatgtcgaaaatcaagaacatcaaacaacaaaaaaaatgatgaatctgaatcaagtttcattcagaaggcacttgtcattgagaagattagacttttttgggctgataaatatcgtccacaaaatttaaatggatttacttgccacagggagcaagtccagcagcttaaacaatcggtctctgcagaattttgcccacatattattttcaaaggtcctccaggatcaggaaagagatctttgtgcagagctgtcctcactgaaatttttggcgattcatctttgaatgtctctcactatttgaagagctgcaatggccaggggtccatatctgtgcctattctcgtcccagtttcatccagcaataaccatgtggaactccacatgaggtttcaatcgaagaacgctagatatgctttgatgactctagcaaatgaaatgtctgataagtgtaaaatcactgagccaattgtgagaaagagctttaaagtgattgttctctatgatgttgataaagtcagccaaaataaccagcgtctgataaaatggataatagattcctcctctgatgcatgcaagataataatgacttgccaggatgaatctaatctcctagattctataaagagtcgttgcaagattatttcaattggtgtgcccagtacacgtgaggtggtagatatccttacctatacatcaagaaaagagagttttgatcttcctacaagttttgctactaccattgcgaatcaatccaggaagaacttgagggaggctatattggctctagaggcatgtaaagccaacaattatcccttcattgatggacaagctataccactaggatgggaggaggttctggaggaacttgcagtagaaattttggatgatcctgcccctaaaaggttatttctggcacgaggcaagctccaaaaactcctggtggaatttgtacctcctaaactaatactccagaagctcgtagaactcttcttgaagggaattcagactggcgtgaagagggaagtctactattggcatgcctactatgacaagaggttgcctgttggtgcaagtgctctgcttaaattggaagaattcgttgccaagttcatgagcatccaccggaagagcatgtcgcatgagcccaagattcctgaggtgccgcagtgaaacctggcagagcatgtcctcgtgcggttcggccgtgtcgaaatcccgtttgtggtggtggtttttctgttttatataattcaccttacgtgatcaactgtcatggtccatgtttttcttgttctatgtatatactatatggtacacatatatgctactactgagtacacaaatatgtccagccgaataaatgtctatacggctataccatctgtgttggcaatatcttgttgcaaaagtttgggagtggacgtataataatcttttgatttgag

SEQ ID NO: 44291 - DNA, 2584 bp, Zea Mays
cacgaagcaggcgctcgagcagaagcccctgcttcgggctataaaggaagctggatgcgtgaagggatttcaagtaataaagtatgctatctgcacagagcaacttagggcataataggcattctcgcaatgatgtttccacaaagcacaaaagtggctatgaaccttctgacacagaaactgagtggcatgaaagcccttggaacgatggagcattggcatcgaataggaatcgtcttcctaaagattctggtaggaatgaccaagttggtactaggaggcaaaacatatctcctaactgcacactagattatcatgctgagaaaacttcaaacttgagatacagtcgtactcctccaagggtcacagaacaaaggcgccatccttctccatttacagctgtgaagaatgaatcacgtaagaagagcagccggacgcctcccagatttcgttcttctatggaaacctttagtagatcatcaataaaggcaaggttttcccgcaatcgttcaatttctgcaccaaaattacggccacaagagaaggaacatcctgctagagctcctgcatttcctggcagtaaccctgtctcaacacatccagaaagagaagttgctgataatatagaagaagattcacatgcagaaaactgttcccaggagatcagtgaattgattgcaaatggcaagttacctaattccagatataatgagtatgcatttacgagcacagagtcgatacctgcaggtgatatcttcttctcccgtgattgcagggctccacttgagaaaacgtcaacaaagcttaacaatattgaccaatcatttacctctgactcaaatgtccatactgagaatgatggcactgttactcaaagtaatttgggccagccatcacaatttgtttcagctcggacaggtctttcgcgcacaactacgaaatccagttatgctactggtcgccattgccagatgagcaccaccaccactttgagtagcccatatagcaatggaaaattaagtggggagagtggaaagtttagtgaaatcactgggaaactagttggaggcgtcatgaaattcacatccagcaaggtgcaaaacgatacgtggcttccatgtatgactgggaaggcatgtcgaaaatcaagaacatcaaacaacaaaaaaaatgatgaatctgaatcaagtttcattcagaaggcacttgtcattgagaagattagacttttttgggctgataaatatcgtccacaaaatttaaatggatttacttgccacagggagcaagtccagcagcttaaacaatcggtctctgcagaattttgcccacatattattttcaaaggtcctccaggatcaggaaagagatctttgtgcagagctgtcctcactgaaatttttggcgattcatctttgaatgtctctcactatttgaagagctgcaatggccagcaggggtccatatctgtgcctattctcgtcccagtttcatccagcaataaccatgtggaactccacatgaggtttcaatcgaagaacgctagatatgctttgatgactctagcaaatgaaatgtctgataagtgtaaaatcactgagccaattgtgagaaagagctttaaagtgattgttctctatgatgttgataaagtcagccaaaataaccagcgtctgataaaatggataatagattcctcctctgatgcatgcaagataataatgacttgccaggatgaatctaatctcctagattctataaagagtcgttgcaagattatttcaattggtgtgcccagtacacgtgaggtggtagatatccttacctatacatcaagaaaagagagttttgatcttcctacaagttttgctactaccattgcgaatcaatccaggaagaacttgagggaggctatattggctctagaggcatgtaaagccaacaattatcccttcattgatggacaagctataccactaggatgggaggaggttctggaggaacttgcagtagaaattttggatgatcctgcccctaaaaggttatttctggcacgaggcaagctccaaaaactcctggtggaatttgtacctcctaaactaatactccagaagctcgtagaactcttcttgaagggaattcagactggcgtgaagagggaagtctactattggcatgcctactatgacaagaggttgcctgttggtgcaagtgctctgcttaaattggaagaattcgttgccaagttcatgagcatccaccggaagagcatgtcgcatgagcccaagattcctgaggtgccgcagtgaaacctggcagagcatgtcctcgtgcggttcggccgtgtcgaaatcccgtttgtggtggtggtttttctgttttatataattcaccttacgtgatcaactgtcatggtccatgtttttcttgttctatgtatatactatatggtacacatatatgctactactgagtacacaaatatgtccagccgaataaatgtctatacggctataccatctgtgttggcaatatcttgttgcaaaagtttgggagtggacgtataataatcttttgatttgag

SEQ ID NO: 44292 - DNA, 4326 bp, Zea Mays
gtgcccacgaagcaggcgctcgagcagaagcccctgcttcgggctataaaggaagctggatgcgtgaaggtatttttttaaaagagaatgatgttgctaaattgacaatatgcaccatagaagattccaggacattgaacaagatgttgtatctgaggcctctaggaaatgtctgctcaatgactgaattggctgacctctaggagacaaaaatcaagaaatccctgaaaaagttatatgtaacagaagatcaacttcttaaagaaatccatggttcgaagcaggctctccgcatttgcgggggcaaagcttgcctcgatttatcccttcctagacccgactcacgtgggagcatccgacactgcaaatgtggagaggctacttcgaacccgcgacctgatgactttgagatagctttcaccactacccttggtctatccttttgtgagttactgatactttataatttagtcaatctgtttcagttttttataccttcactttttttttctcgaacacgcaggagagctgcgtatcatttcattagaagaaagatggtatttatagtgacctaacacactactcacacacacacacaaacaacaagaggtataaccgcctcctagccggggttgaacacaaaagctaggtccgaaagacgggtgaagcctttggcccccgcaaaacaccacatattgaactcatcactggctgaggtaagcaatccaactatataaggctgagcaccattgaaaacacaatcattgcggtgtctccagatagtccaagcccccaggatcacggagttataggtacaattacatttgattatggcgtagaagtttggtgctatgtgtacgaagaacaaggttgataaaaacatgaagaagctgtgaaacctcgcttttcctagttgcaatttgcaaatcattttctgaaagacgattgtttcatgcataaaaaatgtacactcattctttctttgtcctcgttgcagatgctccatttctcttgaagatggatttaatttttatatattcagcatttgttaagggtgataacacatattttgaaattgacttgtcaattgaaaggaaatcaactgtatccccatgtaaattatacaacagtgaacgagtaattggatactctagtttagaatatttgatcaatttatatctttcttgtaagtcataaacaatgctttttttgttccaaatggagtattaaaagaagtggagtcatgaatacctgtccatctttgtttgttctgacaagtgaatgtggtgatgatctgacattttttatcctgcataattgatgtgatcttaggtcacgcgtaaatcataatgggcccatatccaagcaaaagacaaatcttaaacaaataaaaactctctgacaattcagtaggcatcttgaactttccttaccgaagtttgtaaggttcacagaatgataaaacggtgtgaaagaatagatatcagtgttaggaagtcatagaacagtattttattgctgctagatcctacataagctgtctcctttaaatatatgttttatgttcctaggaatatatgatgatttttggaataagtggcctaggtaatggggtagaatggcttcttctctcctttggtttattctgcacttggagtagaagaagaggacaagaatgccatctggcaaaacagaaaggatgtttttttcttgtcttccttctttgttgtctccttataactcttgcttttgtccttcagttggctctgcgactgggtgtttgaagaatgccatatgtttttccttgagggatttcaagtaataaagtatgctatctgcacagagcaacttagggcataataggcattctcgcaatgatgtttccacaaagcacaaaagtggctatgaaccttctgacacagaaactgagtggcatgaaagcccttggaacgatggagcattggcatcgaataggaatcgtcttcctaaagattctggtaggaatgaccaagttggtactaggaggcaaaacatatctcctaactgcacactagattatcatgctgagaaaacttcaaacttgagatacagtcgtactcctccaagggtcacagaacaaaggcgccatccttctccatttacagctgtgaagaatgaatcacgtaagaagagcagccggacgcctcccagatttcgttcttctatggaaacctttagtagatcatcaataaaggcaaggttttcccgcaatcgttcaatttctgcaccaaaattacggccacaagagaaggaacatcctgctagagctcctgcatttcctggcagtaaccctgtctcaacacatccagaaagagaagttgctgataatatagaagaagattcacatgcagaaaactgttcccaggagatcagtgaattgattgcaaatggcaagttacctaattccagatataatgagtatgcatttacgagcacagagtcgatacctgcaggtgatatcttcttctcccgtgattgcagggctccacttgagaaaacgtcaacaaagcttaacaatattgaccaatcatttacctctgactcaaatgtccatactgagaatgatggcactgttactcaaagtaatttgggccagccatcacaatttgtttcagctcggacaggtctttcgcgcacaactacgaaatccagttatgctactggtcgccattgccagatgagcaccaccaccactttgagtagcccatatagcaatggaaaattaagtggggagagtggaaagtttagtgaaatcactgggaaactagttggaggcgtcatgaaattcacatccagcaaggtgcaaaacgatacgtggcttccatgtatgactgggaaggcatgtcgaaaatcaagaacatcaaacaacaaaaaaaatgatgaatctgaatcaagtttcattcagaaggcacttgtcattgagaagattagacttttttgggctgataaatatcgtccacaaaatttaaatggatttacttgccacagggagcaagtccagcagcttaaacaatcggtctctgcagaattttgcccacatattattttcaaaggtcctccaggatcaggaaagagatctttgtgcagagctgtcctcactgaaatttttggcgattcatctttgaatgtctctcactatttgaagagctgcaatggccaggggtccatatctgtgcctattctcgtcccagtttcatccagcaataaccatgtggaactccacatgaggtttcaatcgaagaacgctagatatgctttgatgactctagcaaatgaaatgtctgataagtgtaaaatcactgagccaattgtgagaaagagctttaaagtgattgttctctatgatgttgataaagtcagccaaaataaccagcgtctgataaaatggataatagattcctcctctgatgcatgcaagataataatgacttgccaggatgaatctaatctcctagattctataaagagtcgttgcaagattatttcaattggtgtgcccagtacacgtgaggtggtagatatccttacctatacatcaagaaaagagagttttgatcttcctacaagttttgctactaccattgcgaatcaatccaggaagaacttgagggaggctatattggctctagaggcatgtaaagccaacaattatcccttcattgatggacaagctataccactaggatgggaggaggttctggaggaacttgcagtagaaattttggatgatcctgcccctaaaaggttatttctggcacgaggcaagctccaaaaactcctggtggaatttgtacctcctaaactaatactccagaagctcgtagaactcttcttgaagggaattcagactggcgtgaagagggaagtctactattggcatgcctactatgacaagaggttgcctgttggtgcaagtgctctgcttaaattggaagaattcgttgccaagttcatgagcatccaccggaagagcatgtcgcatgagcccaagattcctgaggtgccgcagtgaaacctggcagagcatgtcctcgtgcggttcggccgtgtcgaaatcccgtttgtggtggtggtttttctgttttatataattcaccttacgtgatcaactgtcatggtccatgtttttcttgttctatgtatatactatatggtacacatatatgctactactgagtacacaaatatgtccagccgaataaatgtctatacggctataccatctgtgttggcaatatcttgttgcaaaagtttgggagtggacgtataataatcttttgatttgag

SEQ ID NO: 44293 - DNA, 3167 bp, Zea Mays
gtgcccacgaagcaggcgctcgagcagaagcccctgcttcgggctataaaggaagctggatgcgtgaagagtatatggtggatgcagctggagcatgccaggctatatggctcgtgcagctgctgggggacatcaccggcgtcaaagtctagccatcgctgctgaagatggacaattagtattatttctctattctaatagtcttatatctgaatttacatgtaaattttgttacctcagggaagaacatttatttgcaggtatttttttaaaagagaatgatgttgctaaattgacaatatgcaccatagaagattccaggacattgaacaagatgttgtatctgaggcctctaggaaatgtctgctcaatgactgaattggctgacctctaggagacaaaaatcaagaaatccctgaaaaagttatatgtaacagaagatcaacttcttaaagaaatccatggttcgaagcaggctctccgcatttgcgggggcaaagcttgcctcgatttatcccttcctagacccgactcacgtgggagcatccgacactgcaaatgtggagaggctacttcgaacccgcgacctgatgactttgagatagctttcaccactacccttggtctatccttttttggctctgcgactgggtgtttgaagaatgccatatgtttttccttgagagcaacttagggcataataggcattctcgcaatgatgtttccacaaagcacaaaagtggctatgaaccttctgacacagaaactgagtggcatgaaagcccttggaacgatggagcattggcatcgaataggaatcgtcttcctaaagattctggtaggaatgaccaagttggtactaggaggcaaaacatatctcctaactgcacactagattatcatgctgagaaaacttcaaacttgagatacagtcgtactcctccaagggtcacagaacaaaggcgccatccttctccatttacagctgtgaagaatgaatcacgtaagaagagcagccggacgcctcccagatttcgttcttctatggaaacctttagtagatcatcaataaaggcaaggttttcccgcaatcgttcaatttctgcaccaaaattacggccacaagagaaggaacatcctgctagagctcctgcatttcctggcagtaaccctgtctcaacacatccagaaagagaagttgctgataatatagaagaagattcacatgcagaaaactgttcccaggagatcagtgaattgattgcaaatggcaagttacctaattccagatataatgagtatgcatttacgagcacagagtcgatacctgcaggtgatatcttcttctcccgtgattgcagggctccacttgagaaaacgtcaacaaagcttaacaatattgaccaatcatttacctctgactcaaatgtccatactgagaatgatggcactgttactcaaagtaatttgggccagccatcacaatttgtttcagctcggacaggtctttcgcgcacaactacgaaatccagttatgctactggtcgccattgccagatgagcaccaccaccactttgagtagcccatatagcaatggaaaattaagtggggagagtggaaagtttagtgaaatcactgggaaactagttggaggcgtcatgaaattcacatccagcaaggtgcaaaacgatacgtggcttccatgtatgactgggaaggcatgtcgaaaatcaagaacatcaaacaacaaaaaaaatgatgaatctgaatcaagtttcattcagaaggcacttgtcattgagaagattagacttttttgggctgataaatatcgtccacaaaatttaaatggatttacttgccacagggagcaagtccagcagcttaaacaatcggtctctgcagaattttgcccacatattattttcaaaggtcctccaggatcaggaaagagatctttgtgcagagctgtcctcactgaaatttttggcgattcatctttgaatgtctctcactatttgaagagctgcaatggccaggggtccatatctgtgcctattctcgtcccagtttcatccagcaataaccatgtggaactccacatgaggtttcaatcgaagaacgctagatatgctttgatgactctagcaaatgaaatgtctgataagtgtaaaatcactgagccaattgtgagaaagagctttaaagtgattgttctctatgatgttgataaagtcagccaaaataaccagcgtctgataaaatggataatagattcctcctctgatgcatgcaagataataatgacttgccaggatgaatctaatctcctagattctataaagagtcgttgcaagattatttcaattggtgtgcccagtacacgtgaggtggtagatatccttacctatacatcaagaaaagagagttttgatcttcctacaagttttgctactaccattgcgaatcaatccaggaagaacttgagggaggctatattggctctagaggcatgtaaagccaacaattatcccttcattgatggacaagctataccactaggatgggaggaggttctggaggaacttgcagtagaaattttggatgatcctgcccctaaaaggttatttctggcacgaggcaagctccaaaaactcctggtggaatttgtacctcctaaactaatactccagaagctcgtagaactcttcttgaagggaattcagactggcgtgaagagggaagtctactattggcatgcctactatgacaagaggttgcctgttggtgcaagtgctctgcttaaattggaagaattcgttgccaagttcatgagcatccaccggaagagcatgtcgcatgagcccaagattcctgaggtgccgcagtgaaacctggcagagcatgtcctcgtgcggttcggccgtgtcgaaatcccgtttgtggtggtggtttttctgttttatataattcaccttacgtgatcaactgtcatggtccatgtttttcttgttctatgtatatactatatggtacacatatatgctactactgagtacacaaatatgtccagccgaataaatgtctatacggctataccatctgtgttggcaatatcttgttgcaaaagtttgggagtggacgtataataatcttttgatttgag

SEQ ID NO: 44294 - DNA, 3020 bp, Zea Mays
ctacgcggtgcccacgaagcaggcgctcgagcagaagcccctgcttcgggctataaaggaagctggatgcgtgaagagtatatggtggatgcagctggagcatgccaggctatatggctcgtgcagctgctgggggacatcaccggcgtcaaagtctagccatcgctgctgaagatggacaattagtatttttttaaaagagaatgatgttgctaaattgacaatatgcaccatagaagattccaggacattgaacaagatgttgtatctgaggcctctaggaaatgtctgctcaatgactgaattggctgacctctaggagacaaaaatcaagaaatccctgaaaaagttatatgtaacagaagatcaacttcttaaagaaatccatgttggctctgcgactgggtgtttgaagaatgccatatgtttttccttgagggatttcaagtaataaagtatgctatctgcacagagcaacttagggcataataggcattctcgcaatgatgtttccacaaagcacaaaagtggctatgaaccttctgacacagaaactgagtggcatgaaagcccttggaacgatggagcattggcatcgaataggaatcgtcttcctaaagattctggtaggaatgaccaagttggtactaggaggcaaaacatatctcctaactgcacactagattatcatgctgagaaaacttcaaacttgagatacagtcgtactcctccaagggtcacagaacaaaggcgccatccttctccatttacagctgtgaagaatgaatcacgtaagaagagcagccggacgcctcccagatttcgttcttctatggaaacctttagtagatcatcaataaaggcaaggttttcccgcaatcgttcaatttctgcaccaaaattacggccacaagagaaggaacatcctgctagagctcctgcatttcctggcagtaaccctgtctcaacacatccagaaagagaagttgctgataatatagaagaagattcacatgcagaaaactgttcccaggagatcagtgaattgattgcaaatggcaagttacctaattccagatataatgagtatgcatttacgagcacagagtcgatacctgcaggtgatatcttcttctcccgtgattgcagggctccacttgagaaaacgtcaacaaagcttaacaatattgaccaatcatttacctctgactcaaatgtccatactgagaatgatggcactgttactcaaagtaatttgggccagccatcacaatttgtttcagctcggacaggtctttcgcgcacaactacgaaatccagttatgctactggtcgccattgccagatgagcaccaccaccactttgagtagcccatatagcaatggaaaattaagtggggagagtggaaagtttagtgaaatcactgggaaactagttggaggcgtcatgaaattcacatccagcaaggtgcaaaacgatacgtggcttccatgtatgactgggaaggcatgtcgaaaatcaagaacatcaaacaacaaaaaaaatgatgaatctgaatcaagtttcattcagaaggcacttgtcattgagaagattagacttttttgggctgataaatatcgtccacaaaatttaaatggatttacttgccacagggagcaagtccagcagcttaaacaatcggtctctgcagaattttgcccacatattattttcaaaggtcctccaggatcaggaaagagatctttgtgcagagctgtcctcactgaaatttttggcgattcatctttgaatgtctctcactatttgaagagctgcaatggccagcaggggtccatatctgtgcctattctcgtcccagtttcatccagcaataaccatgtggaactccacatgaggtttcaatcgaagaacgctagatatgctttgatgactctagcaaatgaaatgtctgataagtgtaaaatcactgagccaattgtgagaaagagctttaaagtgattgttctctatgatgttgataaagtcagccaaaataaccagcgtctgataaaatggataatagattcctcctctgatgcatgcaagataataatgacttgccaggatgaatctaatctcctagattctataaagagtcgttgcaagattatttcaattggtgtgcccagtacacgtgaggtggtagatatccttacctatacatcaagaaaagagagttttgatcttcctacaagttttgctactaccattgcgaatcaatccaggaagaacttgagggaggctatattggctctagaggcatgtaaagccaacaattatcccttcattgatggacaagctataccactaggatgggaggaggttctggaggaacttgcagtagaaattttggatgatcctgcccctaaaaggttatttctggcacgaggcaagctccaaaaactcctggtggaatttgtacctcctaaactaatactccaggaatactattttctcaacagagataactatgcatatgaacttcattctcaaatctcttgcagaagctcgtagaactcttcttgaagggaattcagactggcgtgaagagggaagtctactattggcatgcctactatgacaagaggttgcctgttggtgcaagtgctctgcttaaattggaagaattcgttgccaagttcatgagcatccaccggaagagcatgtcgcatgagcccaagattcctgaggtgccgcagtgaaacctggcagagcatgtcctcgtgcggttcggccgtgtcgaaatcccgtttgtggtggtggtttttctgttttatataattcaccttacgtgatcaactgtcatggtccatgtttttcttgttctatgtatatactatatggtacacatatatgctactactgagtacacaaatatgtccagccgaataaatgtctatacggctataccatctgtgttggcaatatcttgttgcaaaagtttgggagtggacgtataataatcttttgatttgag

SEQ ID NO: 44295 - DNA, 2702 bp, Zea Mays
gtcatctacgcggtgcccacgaagcaggcgctcgagcagaagcccctgcttcgggctataaaggaagctggatgcgtgaagttggctctgcgactgggtgtttgaagaatgccatatgtttttccttgagggatttcaagtaataaagtatgctatctgcacagagcaacttagggcataataggcattctcgcaatgatgtttccacaaagcacaaaagtggctatgaaccttctgacacagaaactgagtggcatgaaagcccttggaacgatggagcattggcatcgaataggaatcgtcttcctaaagattctggtaggaatgaccaagttggtactaggaggcaaaacatatctcctaactgcacactagattatcatgctgagaaaacttcaaacttgagatacagtcgtactcctccaagggtcacagaacaaaggcgccatccttctccatttacagctgtgaagaatgaatcacgtaagaagagcagccggacgcctcccagatttcgttcttctatggaaacctttagtagatcatcaataaaggcaaggttttcccgcaatcgttcaatttctgcaccaaaattacggccacaagagaaggaacatcctgctagagctcctgcatttcctggcagtaaccctgtctcaacacatccagaaagagaagttgctgataatatagaagaagattcacatgcagaaaactgttcccaggagatcagtgaattgattgcaaatggcaagttacctaattccagatataatgagtatgcatttacgagcacagagtcgatacctgcaggtgatatcttcttctcccgtgattgcagggctccacttgagaaaacgtcaacaaagcttaacaatattgaccaatcatttacctctgactcaaatgtccatactgagaatgatggcactgttactcaaagtaatttgggccagccatcacaatttgtttcagctcggacaggtctttcgcgcacaactacgaaatccagttatgctactggtcgccattgccagatgagcaccaccaccactttgagtagcccatatagcaatggaaaattaagtggggagagtggaaagtttagtgaaatcactgggaaactagttggaggcgtcatgaaattcacatccagcaaggtgcaaaacgatacgtggcttccatgtatgactgggaaggcatgtcgaaaatcaagaacatcaaacaacaaaaaaaatgatgaatctgaatcaagtttcattcagaaggcacttgtcattgagaagattagacttttttgggctgataaatatcgtccacaaaatttaaatggatttacttgccacagggagcaagtccagcagcttaaacaatcgaattttgcccacatattattttcaaaggtcctccaggatcaggaaagagatctttgtgcagagctgtcctcactgaaatttttggcgattcatctttgaatgtctctcactatttgaagagctgcaatggccaggggtccatatctgtgcctattctcgtcccagtttcatccagcaataaccatgtggaactccacatgaggtttcaatcgaagaacgctagatatgctttgatgactctagcaaatgaaatgtctgataagtgtaaaatcactgagccaattgtgagaaagagctttaaagtgattgttctctatgatgttgataaagtcagccaaaataaccagcgtctgataaaatggataatagattcctcctctgatgcatgcaagataataatgacttgccaggatgaatctaatctcctagattctataaagagtcgttgcaagattatttcaattggtgtgcccagtacacgtgaggtggtagatatccttacctatacatcaagaaaagagagttttgatcttcctacaagttttgctactaccattgcgaatcaatccaggaagaacttgagggaggctatattggctctagaggcatgtaaagccaacaattatcccttcattgatggacaagctataccactaggatgggaggaggttctggaggaacttgcagtagaaattttggatgatcctgcccctaaaaggttatttctggcacgaggcaagctccaaaaactcctggtggaatttgtacctcctaaactaatactccagcaggaatactattttctcaacagagataactatgcatatgaacttcattctcaaatctcttgcagaagctcgtagaactcttcttgaagggaattcagactggcgtgaagagggaagtctactattggcatgcctactatgacaagaggttgcctgttggtgcaagtgctctgcttaaattggaagaattcgttgccaagttcatgagcatccaccggaagagcatgtcgcatgagcccaagattcctgaggtgccgcagtgaaacctggcagagcatgtcctcgtgcggttcggccgtgtcgaaatcccgtttgtggtggtggtttttctgttttatataattcaccttacgtgatcaactgtcatggtccatgtttttcttgttctatgtatatactatatggtacacatatatgctactactgagtacacaaatatgtccagccgaataaatgtctatacggctataccatctgtgttggcaatatcttgttgcaaaagtttgggagtggacgtataataatcttttgatttgag

SEQ ID NO: 44296 - DNA, 2548 bp, Zea Mays
cgccactctgctcgagttggctctgcgactgggtgtttgaagaatgccatatgtttttccttgagagcaacttagggcataataggcattctcgcaatgatgtttccacaaagcacaaaagtggctatgaaccttctgacacagaaactgagtggcatgaaagcccttggaacgatggagcattggcatcgaataggaatcgtcttcctaaagattctggtaggaatgaccaagttggtactaggaggcaaaacatatctcctaactgcacactagattatcatgctgagaaaacttcaaacttgagatacagtcgtactcctccaagggtcacagaacaaaggcgccatccttctccatttacagctgtgaagaatgaatcacgtaagaagagcagccggacgcctcccagatttcgttcttctatggaaacctttagtagatcatcaataaaggcaaggttttcccgcaatcgttcaatttctgcaccaaaattacggccacaagagaaggaacatcctgctagagctcctgcatttcctggcagtaaccctgtctcaacacatccagaaagagaagttgctgataatatagaagaagattcacatgcagaaaactgttcccaggagatcagtgaattgattgcaaatggcaagttacctaattccagatataatgagtatgcatttacgagcacagagtcgatacctgcaggtgatatcttcttctcccgtgattgcagggctccacttgagaaaacgtcaacaaagcttaacaatattgaccaatcatttacctctgactcaaatgtccatactgagaatgatggcactgttactcaaagtaatttgggccagccatcacaatttgtttcagctcggacaggtctttcgcgcacaactacgaaatccagttatgctactggtcgccattgccagatgagcaccaccaccactttgagtagcccatatagcaatggaaaattaagtggggagagtggaaagtttagtgaaatcactgggaaactagttggaggcgtcatgaaattcacatccagcaaggtgcaaaacgatacgtggcttccatgtatgactgggaaggcatgtcgaaaatcaagaacatcaaacaacaaaaaaaatgatgaatctgaatcaagtttcattcagaaggcacttgtcattgagaagattagacttttttgggctgataaatatcgtccacaaaatttaaatggatttacttgccacagggagcaagtccagcagcttaaacaatcggtctctgcagaattttgcccacatattattttcaaaggtcctccaggatcaggaaagagatctttgtgcagagctgtcctcactgaaatttttggcgattcatctttgaatgtctctcactatttgaagagctgcaatggccaggggtccatatctgtgcctattctcgtcccagtttcatccagcaataaccatgtggaactccacatgaggtttcaatcgaagaacgctagatatgctttgatgactctagcaaatgaaatgtctgataagtgtaaaatcactgagccaattgtgagaaagagctttaaagtgattgttctctatgatgttgataaagtcagccaaaataaccagcgtctgataaaatggataatagattcctcctctgatgcatgcaagataataatgacttgccaggatgaatctaatctcctagattctataaagagtcgttgcaagattatttcaattggtgtgcccagtacacgtgaggtggtagatatccttacctatacatcaagaaaagagagttttgatcttcctacaagttttgctactaccattgcgaatcaatccaggaagaacttgagggaggctatattggctctagaggcatgtaaagccaacaattatcccttcattgatggacaagctataccactaggatgggaggaggttctggaggaacttgcagtagaaattttggatgatcctgcccctaaaaggttatttctggcacgaggcaagctccaaaaactcctggtggaatttgtacctcctaaactaatactccagaagctcgtagaactcttcttgaagggaattcagactggcgtgaagagggaagtctactattggcatgcctactatgacaagaggttgcctgttggtgcaagtgctctgcttaaattggaagaattcgttgccaagttcatgagcatccaccggaagagcatgtcgcatgagcccaagattcctgaggtgccgcagtgaaacctggcagagcatgtcctcgtgcggttcggccgtgtcgaaatcccgtttgtggtggtggtttttctgttttatataattcaccttacgtgatcaactgtcatggtccatgtttttcttgttctatgtatatactatatggtacacatatatgctactactgagtacacaaatatgtccagccgaataaatgtctatacggctataccatctgtgttggcaatatcttgttgcaaaagtttgggagtggacgtataataatcttttgatttgag

SEQ ID NO: 44297 - DNA, 2587 bp, Zea Mays
gctgacgccactctgctcgagttggctctgcgactgggtgtttgaagaatgccatatgtttttccttgagggatttcaagtaataaagtatgctatctgcacagagcaacttagggcataataggcattctcgcaatgatgtttccacaaagcacaaaagtggctatgaaccttctgacacagaaactgagtggcatgaaagcccttggaacgatggagcattggcatcgaataggaatcgtcttcctaaagattctggtaggaatgaccaagttggtactaggaggcaaaacatatctcctaactgcacactagattatcatgctgagaaaacttcaaacttgagatacagtcgtactcctccaagggtcacagaacaaaggcgccatccttctccatttacagctgtgaagaatgaatcacgtaagaagagcagccggacgcctcccagatttcgttcttctatggaaacctttagtagatcatcaataaaggcaaggttttcccgcaatcgttcaatttctgcaccaaaattacggccacaagagaaggaacatcctgctagagctcctgcatttcctggcagtaaccctgtctcaacacatccagaaagagaagttgctgataatatagaagaagattcacatgcagaaaactgttcccaggagatcagtgaattgattgcaaatggcaagttacctaattccagatataatgagtatgcatttacgagcacagagtcgatacctgcaggtgatatcttcttctcccgtgattgcagggctccacttgagaaaacgtcaacaaagcttaacaatattgaccaatcatttacctctgactcaaatgtccatactgagaatgatggcactgttactcaaagtaatttgggccagccatcacaatttgtttcagctcggacaggtctttcgcgcacaactacgaaatccagttatgctactggtcgccattgccagatgagcaccaccaccactttgagtagcccatatagcaatggaaaattaagtggggagagtggaaagtttagtgaaatcactgggaaactagttggaggcgtcatgaaattcacatccagcaaggtgcaaaacgatacgtggcttccatgtatgactgggaaggcatgtcgaaaatcaagaacatcaaacaacaaaaaaaatgatgaatctgaatcaagtttcattcagaaggcacttgtcattgagaagattagacttttttgggctgataaatatcgtccacaaaatttaaatggatttacttgccacagggagcaagtccagcagcttaaacaatcggtctctgcagaattttgcccacatattattttcaaaggtcctccaggatcaggaaagagatctttgtgcagagctgtcctcactgaaatttttggcgattcatctttgaatgtctctcactatttgaagagctgcaatggccaggggtccatatctgtgcctattctcgtcccagtttcatccagcaataaccatgtggaactccacatgaggtttcaatcgaagaacgctagatatgctttgatgactctagcaaatgaaatgtctgataagtgtaaaatcactgagccaattgtgagaaagagctttaaagtgattgttctctatgatgttgataaagtcagccaaaataaccagcgtctgataaaatggataatagattcctcctctgatgcatgcaagataataatgacttgccaggatgaatctaatctcctagattctataaagagtcgttgcaagattatttcaattggtgtgcccagtacacgtgaggtggtagatatccttacctatacatcaagaaaagagagttttgatcttcctacaagttttgctactaccattgcgaatcaatccaggaagaacttgagggaggctatattggctctagaggcatgtaaagccaacaattatcccttcattgatggacaagctataccactaggatgggaggaggttctggaggaacttgcagtagaaattttggatgatcctgcccctaaaaggttatttctggcacgaggcaagctccaaaaactcctggtggaatttgtacctcctaaactaatactccagaagctcgtagaactcttcttgaagggaattcagactggcgtgaagagggaagtctactattggcatgcctactatgacaagaggttgcctgttggtgcaagtgctctgcttaaattggaagaattcgttgccaagttcatgagcatccaccggaagagcatgtcgcatgagcccaagattcctgaggtgccgcagtgaaacctggcagagcatgtcctcgtgcggttcggccgtgtcgaaatcccgtttgtggtggtggtttttctgttttatataattcaccttacgtgatcaactgtcatggtccatgtttttcttgttctatgtatatactatatggtacacatatatgctactactgagtacacaaatatgtccagccgaataaatgtctatacggctataccatctgtgttggcaatatcttgttgcaaaagtttgggagtggacgtataataatcttttgatttgag

SEQ ID NO: 44298 - DNA, 3187 bp, Zea Mays
cccgactctcctacttgctcgtagccgctgacgccactctgctcgaggtggacgttgtcatctacgcggtgcccacgaagcaggcgctcgagcagaagcccctgcttcgggctataaaggaagctggatgcgtgaagagtatatggtggatgcagctggagcatgccaggctatatggctcgtgcagctgctgggggacatcaccggcgtcaaagtctagccatcgctgctgaagatggacaattagtatttttttaaaagagaatgatgttgctaaattgacaatatgcaccatagaagattccaggacattgaacaagatgttgtatctgaggcctctaggaaatgtctgctcaatgactgaattggctgacctctaggagacaaaaatcaagaaatccctgaaaaagttatatgtaacagaagatcaacttcttaaagaaatccatggttcgaagcaggctctccgcatttgcgggggcaaagcttgcctcgatttatcccttcctagacccgactcacgtgggagcatccgacactgcaaatgtggagaggctacttcgaacccgcgacctgatgactttgagatagctttcaccactacccttggtctatccttttttggctctgcgactgggtgtttgaagaatgccatatgtttttccttgagggatttcaagtaataaagtatgctatctgcacagagcaacttagggcataataggcattctcgcaatgatgtttccacaaagcacaaaagtggctatgaaccttctgacacagaaactgagtggcatgaaagcccttggaacgatggagcattggcatcgaataggaatcgtcttcctaaagattctggtaggaatgaccaagttggtactaggaggcaaaacatatctcctaactgcacactagattatcatgctgagaaaacttcaaacttgagatacagtcgtactcctccaagggtcacagaacaaaggcgccatccttctccatttacagctgtgaagaatgaatcacgtaagaagagcagccggacgcctcccagatttcgttcttctatggaaacctttagtagatcatcaataaaggcaaggttttcccgcaatcgttcaatttctgcaccaaaattacggccacaagagaaggaacatcctgctagagctcctgcatttcctggcagtaaccctgtctcaacacatccagaaagagaagttgctgataatatagaagaagattcacatgcagaaaactgttcccaggagatcagtgaattgattgcaaatggcaagttacctaattccagatataatgagtatgcatttacgagcacagagtcgatacctgcaggtgatatcttcttctcccgtgattgcagggctccacttgagaaaacgtcaacaaagcttaacaatattgaccaatcatttacctctgactcaaatgtccatactgagaatgatggcactgttactcaaagtaatttgggccagccatcacaatttgtttcagctcggacaggtctttcgcgcacaactacgaaatccagttatgctactggtcgccattgccagatgagcaccaccaccactttgagtagcccatatagcaatggaaaattaagtggggagagtggaaagtttagtgaaatcactgggaaactagttggaggcgtcatgaaattcacatccagcaaggtgcaaaacgatacgtggcttccatgtatgactgggaaggcatgtcgaaaatcaagaacatcaaacaacaaaaaaaatgatgaatctgaatcaagtttcattcagaaggcacttgtcattgagaagattagacttttttgggctgataaatatcgtccacaaaatttaaatggatttacttgccacagggagcaagtccagcagcttaaacaatcggtctctgcagaattttgcccacatattattttcaaaggtcctccaggatcaggaaagagatctttgtgcagagctgtcctcactgaaatttttggcgattcatctttgaatgtctctcactatttgaagagctgcaatggccaggggtccatatctgtgcctattctcgtcccagtttcatccagcaataaccatgtggaactccacatgaggtttcaatcgaagaacgctagatatgctttgatgactctagcaaatgaaatgtctgataagtgtaaaatcactgagccaattgtgagaaagagctttaaagtgattgttctctatgatgttgataaagtcagccaaaataaccagcgtctgataaaatggataatagattcctcctctgatgcatgcaagataataatgacttgccaggatgaatctaatctcctagattctataaagagtcgttgcaagattatttcaattggtgtgcccagtacacgtgaggtggtagatatccttacctatacatcaagaaaagagagttttgatcttcctacaagttttgctactaccattgcgaatcaatccaggaagaacttgagggaggctatattggctctagaggcatgtaaagccaacaattatcccttcattgatggacaagctataccactaggatgggaggaggttctggaggaacttgcagtagaaattttggatgatcctgcccctaaaaggttatttctggcacgaggcaagctccaaaaactcctggtggaatttgtacctcctaaactaatactccagaagctcgtagaactcttcttgaagggaattcagactggcgtgaagagggaagtctactattggcatgcctactatgacaagaggttgcctgttggtgcaagtgctctgcttaaattggaagaattcgttgccaagttcatgagcatccaccggaagagcatgtcgcatgagcccaagattcctgaggtgccgcagtgaaacctggcagagcatgtcctcgtgcggttcggccgtgtcgaaatcccgtttgtggtggtggtttttctgttttatataattcaccttacgtgatcaactgtcatggtccatgtttttcttgttctatgtatatactatatggtacacatatatgctactactgagtacacaaatatgtccagccgaataaatgtctatacggctataccatctgtgttggcaatatcttgttgcaaaagtttgggagtggacgtataataatcttttgatttgag

SEQ ID NO: 44299 - DNA, 2817 bp, Zea Mays
caccaggccaccacttagcacgccccgactctcctacttgctcgtagccgctgacgccactctgctcgaggcggtgcggcaggtggacgttgtcatctacgcggtgcccacgaagcaggcgctcgagcagaagcccctgcttcgggctataaaggaagctggatgcgtgaaggtatttttttaaaagagaatgatgttgctaaattgacaatatgcaccatagaagattccaggacattgaacaagatgttgtatctgaggcctctaggaaatgtctgctcaatgactgaattggctgacctctaggagacaaaaatcaagaaatccctgaaaaagttatatgtaacagaagatcaacttcttaaagaaatccatgttggctctgcgactgggtgtttgaagaatgccatatgtttttccttgagagcaacttagggcataataggcattctcgcaatgatgtttccacaaagcacaaaagtggctatgaaccttctgacacagaaactgagtggcatgaaagcccttggaacgatggagcattggcatcgaataggaatcgtcttcctaaagattctggtaggaatgaccaagttggtactaggaggcaaaacatatctcctaactgcacactagattatcatgctgagaaaacttcaaacttgagatacagtcgtactcctccaagggtcacagaacaaaggcgccatccttctccatttacagctgtgaagaatgaatcacgtaagaagagcagccggacgcctcccagatttcgttcttctatggaaacctttagtagatcatcaataaaggcaaggttttcccgcaatcgttcaatttctgcaccaaaattacggccacaagagaaggaacatcctgctagagctcctgcatttcctggcagtaaccctgtctcaacacatccagaaagagaagttgctgataatatagaagaagattcacatgcagaaaactgttcccaggagatcagtgaattgattgcaaatgggctccacttgagaaaacgtcaacaaagcttaacaatattgaccaatcatttacctctgactcaaatgtccatactgagaatgatggcactgttactcaaagtaatttgggccagccatcacaatttgtttcagctcggacaggtctttcgcgcacaactacgaaatccagttatgctactggtcgccattgccagatgagcaccaccaccactttgagtagcccatatagcaatggaaaattaagtggggagagtggaaagtttagtgaaatcactgggaaactagttggaggcgtcatgaaattcacatccagcaaggtgcaaaacgatacgtggcttccatgtatgactgggaaggcatgtcgaaaatcaagaacatcaaacaacaaaaaaaatgatgaatctgaatcaagtttcattcagaaggcacttgtcattgagaagattagacttttttgggctgataaatatcgtccacaaaatttaaatggatttacttgccacagggagcaagtccagcagcttaaacaatcggtctctgcagaattttgcccacatattattttcaaaggtcctccaggatcaggaaagagatctttgtgcagagctgtcctcactgaaatttttggcgattcatctttgaatgtctctcactatttgaagagctgcaatggccaggggtccatatctgtgcctattctcgtcccagtttcatccagcaataaccatgtggaactccacatgaggtttcaatcgaagaacgctagatatgctttgatgactctagcaaatgaaatgtctgataagtgtaaaatcactgagccaattgtgagaaagagctttaaagtgattgttctctatgatgttgataaagtcagccaaaataaccagcgtctgataaaatggataatagattcctcctctgatgcatgcaagataataatgacttgccaggatgaatctaatctcctagattctataaagagtcgttgcaagattatttcaattggtgtgcccagtacacgtgaggtggtagatatccttacctatacatcaagaaaagagagttttgatcttcctacaagttttgctactaccattgcgaatcaatccaggaagaacttgagggaggctatattggctctagaggcatgtaaagccaacaattatcccttcattgatggacaagctataccactaggatgggaggaggttctggaggaacttgcagtagaaattttggatgatcctgcccctaaaaggttatttctggcacgaggcaagctccaaaaactcctggtggaatttgtacctcctaaactaatactccagaagctcgtagaactcttcttgaagggaattcagactggcgtgaagagggaagtctactattggcatgcctactatgacaagaggttgcctgttggtgcaagtgctctgcttaaattggaagaattcgttgccaagttcatgagcatccaccggaagagcatgtcgcatgagcccaagattcctgaggtgccgcagtgaaacctggcagagcatgtcctcgtgcggttcggccgtgtcgaaatcccgtttgtggtggtggtttttctgttttatataattcaccttacgtgatcaactgtcatggtccatgtttttcttgttctatgtatatactatatggtacacatatatgctactactgagtacacaaatatgtccagccgaataaatgtctatacggctataccatctgtgttggcaatatcttgttgcaaaagtttgggagtggacgtataataatcttttgatttgag

SEQ ID NO: 44300 - DNA, 3985 bp, Zea Mays
caccaggccaccacttagcacgccccgactctcctacttgctcgtagccgctgacgccactctgctcgaggcggtgcggcaggtggacgttgtcatctacgcggtgcccacgaagcaggcgctcgagcagaagcccctgcttcgggctataaaggaagctggatgcgtgaagagtatatggtggatgcagctggagcatgccaggctatatggctcgtgcagctgctgggggacatcaccggcgtcaaagtctagccatcgctgctgaagatggacaattagtatttttttaaaagagaatgatgttgctaaattgacaatatgcaccatagaagattccaggacattgaacaagatgttgtatctgaggcctctaggaaatgtctgctcaatgactgaattggctgacctctaggagacaaaaatcaagaaatccctgaaaaagttatatgtaacagaagatcaacttcttaaagaaatccatggttcgaagcaggctctccgcatttgcgggggcaaagcttgcctcgatttatcccttcctagacccgactcacgtgggagcatccgacactgcaaatgtggagaggctacttcgaacccgcgacctgatgactttgagatagctttcaccactacccttggtctatccttttatgctccatttctcttgaagatggatttaatttttatatattcagcatttgttaagggtgataacacatattttgaaattgacttgtcaattgaaaggaaatcaactgtatccccatgtaaattatacaacagtgaacgagtaattggatactctagtttagaatatttgatcaatttatatctttcttgtaagtcataaacaatgctttttttgttccaaatggagtattaaaagaagtggagtcatgaatacctgtccatctttgtttgttctgacaagtgaatgtggtgatgatctgacattttttatcctgcataattgatgtgatcttaggtcacgcgtaaatcataatgggcccatatccaagcaaaagacaaatcttaaacaaataaaaactctctgacaattcagtaggcatcttgaactttccttaccgaagtttgtaaggttcacagaatgataaaacggtgtgaaagaatagatatcagtgttaggaagtcatagaacagtattttattgctgctagatcctacataagctgtctcctttaaatatatgttttatgttcctaggaatatatgatgatttttggaataagtggcctaggtaatggggtagaatggcttcttctctcctttggtttattctgcacttggagtagaagaagaggacaagaatgccatctggcaaaacagaaaggatgtttttttcttgtcttccttctttgttgtctccttataactcttgcttttgtccttcagttggctctgcgactgggtgtttgaagaatgccatatgtttttccttgagggatttcaagtaataaagtatgctatctgcacagagcaacttagggcataataggcattctcgcaatgatgtttccacaaagcacaaaagtggctatgaaccttctgacacagaaactgagtggcatgaaagcccttggaacgatggagcattggcatcgaataggaatcgtcttcctaaagattctggtaggaatgaccaagttggtactaggaggcaaaacatatctcctaactgcacactagattatcatgctgagaaaacttcaaacttgagatacagtcgtactcctccaagggtcacagaacaaaggcgccatccttctccatttacagctgtgaagaatgaatcacgtaagaagagcagccggacgcctcccagatttcgttcttctatggaaacctttagtagatcatcaataaaggcaaggttttcccgcaatcgttcaatttctgcaccaaaattacggccacaagagaaggaacatcctgctagagctcctgcatttcctggcagtaaccctgtctcaacacatccagaaagagaagttgctgataatatagaagaagattcacatgcagaaaactgttcccaggagatcagtgaattgattgcaaatggcaagttacctaattccagatataatgagtatgcatttacgagcacagagtcgatacctgcaggtgatatcttcttctcccgtgattgcagggctccacttgagaaaacgtcaacaaagcttaacaatattgaccaatcatttacctctgactcaaatgtccatactgagaatgatggcactgttactcaaagtaatttgggccagccatcacaatttgtttcagctcggacaggtctttcgcgcacaactacgaaatccagttatgctactggtcgccattgccagatgagcaccaccaccactttgagtagcccatatagcaatggaaaattaagtggggagagtggaaagtttagtgaaatcactgggaaactagttggaggcgtcatgaaattcacatccagcaaggtgcaaaacgatacgtggcttccatgtatgactgggaaggcatgtcgaaaatcaagaacatcaaacaacaaaaaaaatgatgaatctgaatcaagtttcattcagaaggcacttgtcattgagaagattagacttttttgggctgataaatatcgtccacaaaatttaaatggatttacttgccacagggagcaagtccagcagcttaaacaatcggtctctgcagaattttgcccacatattattttcaaaggtcctccaggatcaggaaagagatctttgtgcagagctgtcctcactgaaatttttggcgattcatctttgaatgtctctcactatttgaagagctgcaatggccaggggtccatatctgtgcctattctcgtcccagtttcatccagcaataaccatgtggaactccacatgaggtttcaatcgaagaacgctagatatgctttgatgactctagcaaatgaaatgtctgataagtgtaaaatcactgagccaattgtgagaaagagctttaaagtgattgttctctatgatgttgataaagtcagccaaaataaccagcgtctgataaaatggataatagattcctcctctgatgcatgcaagataataatgacttgccaggatgaatctaatctcctagattctataaagagtcgttgcaagattatttcaattggtgtgcccagtacacgtgaggtggtagatatccttacctatacatcaagaaaagagagttttgatcttcctacaagttttgctactaccattgcgaatcaatccaggaagaacttgagggaggctatattggctctagaggcatgtaaagccaacaattatcccttcattgatggacaagctataccactaggatgggaggaggttctggaggaacttgcagtagaaattttggatgatcctgcccctaaaaggttatttctggcacgaggcaagctccaaaaactcctggtggaatttgtacctcctaaactaatactccagaagctcgtagaactcttcttgaagggaattcagactggcgtgaagagggaagtctactattggcatgcctactatgacaagaggttgcctgttggtgcaagtgctctgcttaaattggaagaattcgttgccaagttcatgagcatccaccggaagagcatgtcgcatgagcccaagattcctgaggtgccgcagtgaaacctggcagagcatgtcctcgtgcggttcggccgtgtcgaaatcccgtttgtggtggtggtttttctgttttatataattcaccttacgtgatcaactgtcatggtccatgtttttcttgttctatgtatatactatatggtacacatatatgctactactgagtacacaaatatgtccagccgaataaatgtctatacggctataccatctgtgttggcaatatcttgttgcaaaagtttgggagtggacgtataataatcttttgatttgag

SEQ ID NO: 44301 - DNA, 3126 bp, Zea Mays
gttcgtccggccccaccaggccaccacttagcacgccccgactctcctacttgctcgtagccgctgacgccactctgctcgaggcggtgcggcaggtggacgttgtcatctacgcggtgcccacgaagcaggcgctcgagcagaagcccctgcttcgggctataaaggaagctggatgcgtgaaggtatttttttaaaagagaatgatgttgctaaattgacaatatgcaccatagaagattccaggacattgaacaagatgttgtatctgaggcctctaggaaatgtctgctcaatgactgaattggctgacctctaggagacaaaaatcaagaaatccctgaaaaagttatatgtaacagaagatcaacttcttaaagaaatccatggttcgaagcaggctctccgcatttgcgggggcaaagcttgcctcgatttatcccttcctagacccgactcacgtgggagcatccgacactgcaaatgtggagaggctacttcgaacccgcgacctgatgactttgagatagctttcaccactacccttggtctatccttttttggctctgcgactgggtgtttgaagaatgccatatgtttttccttgagggatttcaagtaataaagtatgctatctgcacagagcaacttagggcataataggcattctcgcaatgatgtttccacaaagcacaaaagtggctatgaaccttctgacacagaaactgagtggcatgaaagcccttggaacgatggagcattggcatcgaataggaatcgtcttcctaaagattctggtaggaatgaccaagttggtactaggaggcaaaacatatctcctaactgcacactagattatcatgctgagaaaacttcaaacttgagatacagtcgtactcctccaagggtcacagaacaaaggcgccatccttctccatttacagctgtgaagaatgaatcacgtaagaagagcagccggacgcctcccagatttcgttcttctatggaaacctttagtagatcatcaataaaggcaaggttttcccgcaatcgttcaatttctgcaccaaaattacggccacaagagaaggaacatcctgctagagctcctgcatttcctggcagtaaccctgtctcaacacatccagaaagagaagttgctgataatatagaagaagattcacatgcagaaaactgttcccaggagatcagtgaattgattgcaaatggcaagttacctaattccagatataatgagtatgcatttacgagcacagagtcgatacctgcaggtgatatcttcttctcccgtgattgcagggctccacttgagaaaacgtcaacaaagcttaacaatattgaccaatcatttacctctgactcaaatgtccatactgagaatgatggcactgttactcaaagtaatttgggccagccatcacaatttgtttcagctcggacaggtctttcgcgcacaactacgaaatccagttatgctactggtcgccattgccagatgagcaccaccaccactttgagtagcccatatagcaatggaaaattaagtggggagagtggaaagtttagtgaaatcactgggaaactagttggaggcgtcatgaaattcacatccagcaaggtgcaaaacgatacgtggcttccatgtatgactgggaaggcatgtcgaaaatcaagaacatcaaacaacaaaaaaaatgatgaatctgaatcaagtttcattcagaaggcacttgtcattgagaagattagacttttttgggctgataaatatcgtccacaaaatttaaatggatttacttgccacagggagcaagtccagcagcttaaacaatcggtctctgcagaattttgcccacatattattttcaaaggtcctccaggatcaggaaagagatctttgtgcagagctgtcctcactgaaatttttggcgattcatctttgaatgtctctcactatttgaagagctgcaatggccaggggtccatatctgtgcctattctcgtcccagtttcatccagcaataaccatgtggaactccacatgaggtttcaatcgaagaacgctagatatgctttgatgactctagcaaatgaaatgtctgataagtgtaaaatcactgagccaattgtgagaaagagctttaaagtgattgttctctatgatgttgataaagtcagccaaaataaccagcgtctgataaaatggataatagattcctcctctgatgcatgcaagataataatgacttgccaggatgaatctaatctcctagattctataaagagtcgttgcaagattatttcaattggtgtgcccagtacacgtgaggtggtagatatccttacctatacatcaagaaaagagagttttgatcttcctacaagttttgctactaccattgcgaatcaatccaggaagaacttgagggaggctatattggctctagaggcatgtaaagccaacaattatcccttcattgatggacaagctataccactaggatgggaggaggttctggaggaacttgcagtagaaattttggatgatcctgcccctaaaaggttatttctggcacgaggcaagctccaaaaactcctggtggaatttgtacctcctaaactaatactccagaagctcgtagaactcttcttgaagggaattcagactggcgtgaagagggaagtctactattggcatgcctactatgacaagaggttgcctgttggtgcaagtgctctgcttaaattggaagaattcgttgccaagttcatgagcatccaccggaagagcatgtcgcatgagcccaagattcctgaggtgccgcagtgaaacctggcagagcatgtcctcgtgcggttcggccgtgtcgaaatcccgtttgtggtggtggtttttctgttttatataattcaccttacgtgatcaactgtcatggtccatgtttttcttgttctatgtatatactatatggtacacatatatgctactactgagtacacaaatatgtccagccgaataaatgtctatacggctataccatctgtgttggcaatatcttgttgcaaaagtttgggagtggacgtataataatcttttgatttgag

SEQ ID NO: 44302 - DNA, 3894 bp, Zea Mays
ttcgcgttcgtccggccccaccaggccaccacttagcacgccccgactctcctacttgctcgtagccgctgacgccactctgctcgaggcggtgcggcaggtggacgttgtcatctacgcggtgcccacgaagcaggcgctcgagcagaagcccctgcttcgggctataaaggaagctggatgcgtgaaggtatttttttaaaagagaatgatgttgctaaattgacaatatgcaccatagaagattccaggacattgaacaagatgttgtatctgaggcctctaggaaatgtctgctcaatgactgaattggctgacctctaggagacaaaaatcaagaaatccctgaaaaagttatatgtaacagaagatcaacttcttaaagaaatccatggttcgaagcaggctctccgcatttgcgggggcaaagcttgcctcgatttatcccttcctagacccgactcacgtgggagcatccgacactgcaaatgtggagaggctacttcgaacccgcgacctgatgactttgagatagctttcaccactacccttggtctatccttttatgctccatttctcttgaagatggatttaatttttatatattcagcatttgttaagggtgataacacatattttgaaattgacttgtcaattgaaaggaaatcaactgtatccccatgtaaattatacaacagtgaacgagtaattggatactctagtttagaatatttgatcaatttatatctttcttgtaagtcataaacaatgctttttttgttccaaatggagtattaaaagaagtggagtcatgaatacctgtccatctttgtttgttctgacaagtgaatgtggtgatgatctgacattttttatcctgcataattgatgtgatcttaggtcacgcgtaaatcataatgggcccatatccaagcaaaagacaaatcttaaacaaataaaaactctctgacaattcagtaggcatcttgaactttccttaccgaagtttgtaaggttcacagaatgataaaacggtgtgaaagaatagatatcagtgttaggaagtcatagaacagtattttattgctgctagatcctacataagctgtctcctttaaatatatgttttatgttcctaggaatatatgatgatttttggaataagtggcctaggtaatggggtagaatggcttcttctctcctttggtttattctgcacttggagtagaagaagaggacaagaatgccatctggcaaaacagaaaggatgtttttttcttgtcttccttctttgttgtctccttataactcttgcttttgtccttcagttggctctgcgactgggtgtttgaagaatgccatatgtttttccttgagggatttcaagtaataaagtatgctatctgcacagagcaacttagggcataataggcattctcgcaatgatgtttccacaaagcacaaaagtggctatgaaccttctgacacagaaactgagtggcatgaaagcccttggaacgatggagcattggcatcgaataggaatcgtcttcctaaagattctggtaggaatgaccaagttggtactaggaggcaaaacatatctcctaactgcacactagattatcatgctgagaaaacttcaaacttgagatacagtcgtactcctccaagggtcacagaacaaaggcgccatccttctccatttacagctgtgaagaatgaatcacgtaagaagagcagccggacgcctcccagatttcgttcttctatggaaacctttagtagatcatcaataaaggcaaggttttcccgcaatcgttcaatttctgcaccaaaattacggccacaagagaaggaacatcctgctagagctcctgcatttcctggcagtaaccctgtctcaacacatccagaaagagaagttgctgataatatagaagaagattcacatgcagaaaactgttcccaggagatcagtgaattgattgcaaatggcaagttacctaattccagatataatgagtatgcatttacgagcacagagtcgatacctgcaggtgatatcttcttctcccgtgattgcagggctccacttgagaaaacgtcaacaaagcttaacaatattgaccaatcatttacctctgactcaaatgtccatactgagaatgatggcactgttactcaaagtaatttgggccagccatcacaatttgtttcagctcggacaggtctttcgcgcacaactacgaaatccagttatgctactggtcgccattgccagatgagcaccaccaccactttgagtagcccatatagcaatggaaaattaagtggggagagtggaaagtttagtgaaatcactgggaaactagttggaggcgtcatgaaattcacatccagcaaggtgcaaaacgatacgtggcttccatgtatgactgggaaggcatgtcgaaaatcaagaacatcaaacaacaaaaaaaatgatgaatctgaatcaagtttcattcagaaggcacttgtcattgagaagattagacttttttgggctgataaatatcgtccacaaaatttaaatggatttacttgccacagggagcaagtccagcagcttaaacaatcggtctctgcagaattttgcccacatattattttcaaaggtcctccaggatcaggaaagagatctttgtgcagagctgtcctcactgaaatttttggcgattcatctttgaatgtctctcactatttgaagagctgcaatggccaggggtccatatctgtgcctattctcgtcccagtttcatccagcaataaccatgtggaactccacatgaggtttcaatcgaagaacgctagatatgctttgatgactctagcaaatgaaatgtctgataagtgtaaaatcactgagccaattgtgagaaagagctttaaagtgattgttctctatgatgttgataaagtcagccaaaataaccagcgtctgataaaatggataatagattcctcctctgatgcatgcaagataataatgacttgccaggatgaatctaatctcctagattctataaagagtcgttgcaagattatttcaattggtgtgcccagtacacgtgaggtggtagatatccttacctatacatcaagaaaagagagttttgatcttcctacaagttttgctactaccattgcgaatcaatccaggaagaacttgagggaggctatattggctctagaggcatgtaaagccaacaattatcccttcattgatggacaagctataccactaggatgggaggaggttctggaggaacttgcagtagaaattttggatgatcctgcccctaaaaggttatttctggcacgaggcaagctccaaaaactcctggtggaatttgtacctcctaaactaatactccagaagctcgtagaactcttcttgaagggaattcagactggcgtgaagagggaagtctactattggcatgcctactatgacaagaggttgcctgttggtgcaagtgctctgcttaaattggaagaattcgttgccaagttcatgagcatccaccggaagagcatgtcgcatgagcccaagattcctgaggtgccgcagtgaaacctggcagagcatgtcctcgtgcggttcggccgtgtcgaaatcccgtttgtggtggtggtttttctgttttatataattcaccttacgtgatcaactgtcatggtccatgtttttcttgttctatgtatatactatatggtacacatatatgctactactgagtacacaaatatgtccagccgaataaatgtctatacggctataccatctgtgttggcaatatcttgttgcaaaagtttgggagtggacgtataataatcttttgatttgag

SEQ ID NO: 44303 - DNA, 3070 bp, Zea Mays
cttcgcgttcgtccggccccaccaggccaccacttagcacgccccgactctcctacttgctcgtagccgctgacgccactctgctcgaggcggtgcggcaggtggacgttgtcatctacgcggtgcccacgaagcaggcgctcgagcagaagcccctgcttcgggctataaaggaagctggatgcgtgaagagtatatggtggatgcagctggagcatgccaggctatatggctcgtgcagctgctgggggacatcaccggcgtcaaagtctagccatcgctgctgaagatggacaattagtatttttttaaaagagaatgatgttgctaaattgacaatatgcaccatagaagattccaggacattgaacaagatgttgtatctgaggcctctaggaaatgtctgctcaatgactgaattggctgacctctaggagacaaaaatcaagaaatccctgaaaaagttatatgtaacagaagatcaacttcttaaagaaatccatgttggctctgcgactgggtgtttgaagaatgccatatgtttttccttgagggatttcaagtaataaagtatgctatctgcacagagcaacttagggcataataggcattctcgcaatgatgtttccacaaagcacaaaagtggctatgaaccttctgacacagaaactgagtggcatgaaagcccttggaacgatggagcattggcatcgaataggaatcgtcttcctaaagattctggtaggaatgaccaagttggtactaggaggcaaaacatatctcctaactgcacactagattatcatgctgagaaaacttcaaacttgagatacagtcgtactcctccaagggtcacagaacaaaggcgccatccttctccatttacagctgtgaagaatgaatcacgtaagaagagcagccggacgcctcccagatttcgttcttctatggaaacctttagtagatcatcaataaaggcaaggttttcccgcaatcgttcaatttctgcaccaaaattacggccacaagagaaggaacatcctgctagagctcctgcatttcctggcagtaaccctgtctcaacacatccagaaagagaagttgctgataatatagaagaagattcacatgcagaaaactgttcccaggagatcagtgaattgattgcaaatggcaagttacctaattccagatataatgagtatgcatttacgagcacagagtcgatacctgcaggtgatatcttcttctcccgtgattgcagggctccacttgagaaaacgtcaacaaagcttaacaatattgaccaatcatttacctctgactcaaatgtccatactgagaatgatggcactgttactcaaagtaatttgggccagccatcacaatttgtttcagctcggacaggtctttcgcgcacaactacgaaatccagttatgctactggtcgccattgccagatgagcaccaccaccactttgagtagcccatatagcaatggaaaattaagtggggagagtggaaagtttagtgaaatcactgggaaactagttggaggcgtcatgaaattcacatccagcaaggtgcaaaacgatacgtggcttccatgtatgactgggaaggcatgtcgaaaatcaagaacatcaaacaacaaaaaaaatgatgaatctgaatcaagtttcattcagaaggcacttgtcattgagaagattagacttttttgggctgataaatatcgtccacaaaatttaaatggatttacttgccacagggagcaagtccagcagcttaaacaatcggtctctgcagaattttgcccacatattattttcaaaggtcctccaggatcaggaaagagatctttgtgcagagctgtcctcactgaaatttttggcgattcatctttgaatgtctctcactatttgaagagctgcaatggccaggggtccatatctgtgcctattctcgtcccagtttcatccagcaataaccatgtggaactccacatgaggtttcaatcgaagaacgctagatatgctttgatgactctagcaaatgaaatgtctgataagtgtaaaatcactgagccaattgtgagaaagagctttaaagtgattgttctctatgatgttgataaagtcagccaaaataaccagcgtctgataaaatggataatagattcctcctctgatgcatgcaagataataatgacttgccaggatgaatctaatctcctagattctataaagagtcgttgcaagattatttcaattggtgtgcccagtacacgtgaggtggtagatatccttacctatacatcaagaaaagagagttttgatcttcctacaagttttgctactaccattgcgaatcaatccaggaagaacttgagggaggctatattggctctagaggcatgtaaagccaacaattatcccttcattgatggacaagctataccactaggatgggaggaggttctggaggaacttgcagtagaaattttggatgatcctgcccctaaaaggttatttctggcacgaggcaagctccaaaaactcctggtggaatttgtacctcctaaactaatactccagaagctcgtagaactcttcttgaagggaattcagactggcgtgaagagggaagtctactattggcatgcctactatgacaagaggttgcctgttggtgcaagtgctctgcttaaattggaagaattcgttgccaagttcatgagcatccaccggaagagcatgtcgcatgagcccaagattcctgaggtgccgcagtgaaacctggcagagcatgtcctcgtgcggttcggccgtgtcgaaatcccgtttgtggtggtggtttttctgttttatataattcaccttacgtgatcaactgtcatggtccatgtttttcttgttctatgtatatactatatggtacacatatatgctactactgagtacacaaatatgtccagccgaataaatgtctatacggctataccatctgtgttggcaatatcttgttgcaaaagtttgggagtggacgtataataatcttttgatttgag

SEQ ID NO: 44304 - DNA, 4557 bp, Zea Mays
cttcgcgttcgtccggccccaccaggccaccacttagcacgccccgactctcctacttgctcgtagccgctgacgccactctgctcgaggcggtgcggcaggtggacgttgtcatctacgcggtgcccacgaagcaggcgctcgagcagaagcccctgcttcgggctataaaggaagctggatgcgtgaagagtatatggtggatgcagctggagcatgccaggctatatggctcgtgcagctgctgggggacatcaccggcgtcaaagtctagccatcgctgctgaagatggacaattagtatttttttaaaagagaatgatgttgctaaattgacaatatgcaccatagaagattccaggacattgaacaagatgttgtatctgaggcctctaggaaatgtctgctcaatgactgaattggctgacctctaggagacaaaaatcaagaaatccctgaaaaagttatatgtaacagaagatcaacttcttaaagaaatccatggttcgaagcaggctctccgcatttgcgggggcaaagcttgcctcgatttatcccttcctagacccgactcacgtgggagcatccgacactgcaaatgtggagaggctacttcgaacccgcgacctgatgactttgagatagctttcaccactacccttggtctatccttttgtgagttactgatactttataatttagtcaatctgtttcagttttttataccttcactttttttttctcgaacacgcaggagagctgcgtatcatttcattagaagaaagatggtatttatagtgacctaacacactactcacacacacacacaaacaacaagaggtataaccgcctcctagccggggttgaacacaaaagctaggtccgaaagacgggtgaagcctttggcccccgcaaaacaccacatattgaactcatcactggctgaggtaagcaatccaactatataaggctgagcaccattgaaaacacaatcattgcggtgtctccagatagtccaagcccccaggatcacggagttataggtacaattacatttgattatggcgtagaagtttggtgctatgtgtacgaagaacaaggttgataaaaacatgaagaagctgtgaaacctcgcttttcctagttgcaatttgcaaatcattttctgaaagacgattgtttcatgcataaaaaatgtacactcattctttctttgtcctcgttgcagatgctccatttctcttgaagatggatttaatttttatatattcagcatttgttaagggtgataacacatattttgaaattgacttgtcaattgaaaggaaatcaactgtatccccatgtaaattatacaacagtgaacgagtaattggatactctagtttagaatatttgatcaatttatatctttcttgtaagtcataaacaatgctttttttgttccaaatggagtattaaaagaagtggagtcatgaatacctgtccatctttgtttgttctgacaagtgaatgtggtgatgatctgacattttttatcctgcataattgatgtgatcttaggtcacgcgtaaatcataatgggcccatatccaagcaaaagacaaatcttaaacaaataaaaactctctgacaattcagtaggcatcttgaactttccttaccgaagtttgtaaggttcacagaatgataaaacggtgtgaaagaatagatatcagtgttaggaagtcatagaacagtattttattgctgctagatcctacataagctgtctcctttaaatatatgttttatgttcctaggaatatatgatgatttttggaataagtggcctaggtaatggggtagaatggcttcttctctcctttggtttattctgcacttggagtagaagaagaggacaagaatgccatctggcaaaacagaaaggatgtttttttcttgtcttccttctttgttgtctccttataactcttgcttttgtccttcagttggctctgcgactgggtgtttgaagaatgccatatgtttttccttgagggatttcaagtaataaagtatgctatctgcacagagcaacttagggcataataggcattctcgcaatgatgtttccacaaagcacaaaagtggctatgaaccttctgacacagaaactgagtggcatgaaagcccttggaacgatggagcattggcatcgaataggaatcgtcttcctaaagattctggtaggaatgaccaagttggtactaggaggcaaaacatatctcctaactgcacactagattatcatgctgagaaaacttcaaacttgagatacagtcgtactcctccaagggtcacagaacaaaggcgccatccttctccatttacagctgtgaagaatgaatcacgtaagaagagcagccggacgcctcccagatttcgttcttctatggaaacctttagtagatcatcaataaaggcaaggttttcccgcaatcgttcaatttctgcaccaaaattacggccacaagagaaggaacatcctgctagagctcctgcatttcctggcagtaaccctgtctcaacacatccagaaagagaagttgctgataatatagaagaagattcacatgcagaaaactgttcccaggagatcagtgaattgattgcaaatggcaagttacctaattccagatataatgagtatgcatttacgagcacagagtcgatacctgcaggtgatatcttcttctcccgtgattgcagggctccacttgagaaaacgtcaacaaagcttaacaatattgaccaatcatttacctctgactcaaatgtccatactgagaatgatggcactgttactcaaagtaatttgggccagccatcacaatttgtttcagctcggacaggtctttcgcgcacaactacgaaatccagttatgctactggtcgccattgccagatgagcaccaccaccactttgagtagcccatatagcaatggaaaattaagtggggagagtggaaagtttagtgaaatcactgggaaactagttggaggcgtcatgaaattcacatccagcaaggtgcaaaacgatacgtggcttccatgtatgactgggaaggcatgtcgaaaatcaagaacatcaaacaacaaaaaaaatgatgaatctgaatcaagtttcattcagaaggcacttgtcattgagaagattagacttttttgggctgataaatatcgtccacaaaatttaaatggatttacttgccacagggagcaagtccagcagcttaaacaatcggtctctgcagaattttgcccacatattattttcaaaggtcctccaggatcaggaaagagatctttgtgcagagctgtcctcactgaaatttttggcgattcatctttgaatgtctctcactatttgaagagctgcaatggccaggggtccatatctgtgcctattctcgtcccagtttcatccagcaataaccatgtggaactccacatgaggtttcaatcgaagaacgctagatatgctttgatgactctagcaaatgaaatgtctgataagtgtaaaatcactgagccaattgtgagaaagagctttaaagtgattgttctctatgatgttgataaagtcagccaaaataaccagcgtctgataaaatggataatagattcctcctctgatgcatgcaagataataatgacttgccaggatgaatctaatctcctagattctataaagagtcgttgcaagattatttcaattggtgtgcccagtacacgtgaggtggtagatatccttacctatacatcaagaaaagagagttttgatcttcctacaagttttgctactaccattgcgaatcaatccaggaagaacttgagggaggctatattggctctagaggcatgtaaagccaacaattatcccttcattgatggacaagctataccactaggatgggaggaggttctggaggaacttgcagtagaaattttggatgatcctgcccctaaaaggttatttctggcacgaggcaagctccaaaaactcctggtggaatttgtacctcctaaactaatactccagaagctcgtagaactcttcttgaagggaattcagactggcgtgaagagggaagtctactattggcatgcctactatgacaagaggttgcctgttggtgcaagtgctctgcttaaattggaagaattcgttgccaagttcatgagcatccaccggaagagcatgtcgcatgagcccaagattcctgaggtgccgcagtgaaacctggcagagcatgtcctcgtgcggttcggccgtgtcgaaatcccgtttgtggtggtggtttttctgttttatataattcaccttacgtgatcaactgtcatggtccatgtttttcttgttctatgtatatactatatggtacacatatatgctactactgagtacacaaatatgtccagccgaataaatgtctatacggctataccatctgtgttggcaatatcttgttgcaaaagtttgggagtggacgtataataatcttttgatttgag

SEQ ID NO: 44305 - DNA, 3246 bp, Zea Mays
cgaaccttcgcgttcgtccggccccaccaggccaccacttagcacgccccgactctcctacttgctcgtagccgctgacgccactctgctcgaggcggtgcggcaggtggacgttgtcatctacgcggtgcccacgaagcaggcgctcgagcagaagcccctgcttcgggctataaaggaagctggatgcgtgaagagtatatggtggatgcagctggagcatgccaggctatatggctcgtgcagctgctgggggacatcaccggcgtcaaagtctagccatcgctgctgaagatggacaattagtatttttttaaaagagaatgatgttgctaaattgacaatatgcaccatagaagattccaggacattgaacaagatgttgtatctgaggcctctaggaaatgtctgctcaatgactgaattggctgacctctaggagacaaaaatcaagaaatccctgaaaaagttatatgtaacagaagatcaacttcttaaagaaatccatggttcgaagcaggctctccgcatttgcgggggcaaagcttgcctcgatttatcccttcctagacccgactcacgtgggagcatccgacactgcaaatgtggagaggctacttcgaacccgcgacctgatgactttgagatagctttcaccactacccttggtctatccttttttggctctgcgactgggtgtttgaagaatgccatatgtttttccttgagggatttcaagtaataaagtatgctatctgcacagagcaacttagggcataataggcattctcgcaatgatgtttccacaaagcacaaaagtggctatgaaccttctgacacagaaactgagtggcatgaaagcccttggaacgatggagcattggcatcgaataggaatcgtcttcctaaagattctggtaggaatgaccaagttggtactaggaggcaaaacatatctcctaactgcacactagattatcatgctgagaaaacttcaaacttgagatacagtcgtactcctccaagggtcacagaacaaaggcgccatccttctccatttacagctgtgaagaatgaatcacgtaagaagagcagccggacgcctcccagatttcgttcttctatggaaacctttagtagatcatcaataaaggcaaggttttcccgcaatcgttcaatttctgcaccaaaattacggccacaagagaaggaacatcctgctagagctcctgcatttcctggcagtaaccctgtctcaacacatccagaaagagaagttgctgataatatagaagaagattcacatgcagaaaactgttcccaggagatcagtgaattgattgcaaatggcaagttacctaattccagatataatgagtatgcatttacgagcacagagtcgatacctgcaggtgatatcttcttctcccgtgattgcagggctccacttgagaaaacgtcaacaaagcttaacaatattgaccaatcatttacctctgactcaaatgtccatactgagaatgatggcactgttactcaaagtaatttgggccagccatcacaatttgtttcagctcggacaggtctttcgcgcacaactacgaaatccagttatgctactggtcgccattgccagatgagcaccaccaccactttgagtagcccatatagcaatggaaaattaagtggggagagtggaaagtttagtgaaatcactgggaaactagttggaggcgtcatgaaattcacatccagcaaggtgcaaaacgatacgtggcttccatgtatgactgggaaggcatgtcgaaaatcaagaacatcaaacaacaaaaaaaatgatgaatctgaatcaagtttcattcagaaggcacttgtcattgagaagattagacttttttgggctgataaatatcgtccacaaaatttaaatggatttacttgccacagggagcaagtccagcagcttaaacaatcggtctctgcagaattttgcccacatattattttcaaaggtcctccaggatcaggaaagagatctttgtgcagagctgtcctcactgaaatttttggcgattcatctttgaatgtctctcactatttgaagagctgcaatggccaggggtccatatctgtgcctattctcgtcccagtttcatccagcaataaccatgtggaactccacatgaggtttcaatcgaagaacgctagatatgctttgatgactctagcaaatgaaatgtctgataagtgtaaaatcactgagccaattgtgagaaagagctttaaagtgattgttctctatgatgttgataaagtcagccaaaataaccagcgtctgataaaatggataatagattcctcctctgatgcatgcaagataataatgacttgccaggatgaatctaatctcctagattctataaagagtcgttgcaagattatttcaattggtgtgcccagtacacgtgaggtggtagatatccttacctatacatcaagaaaagagagttttgatcttcctacaagttttgctactaccattgcgaatcaatccaggaagaacttgagggaggctatattggctctagaggcatgtaaagccaacaattatcccttcattgatggacaagctataccactaggatgggaggaggttctggaggaacttgcagtagaaattttggatgatcctgcccctaaaaggttatttctggcacgaggcaagctccaaaaactcctggtggaatttgtacctcctaaactaatactccagaagctcgtagaactcttcttgaagggaattcagactggcgtgaagagggaagtctactattggcatgcctactatgacaagaggttgcctgttggtgcaagtgctctgcttaaattggaagaattcgttgccaagttcatgagcatccaccggaagagcatgtcgcatgagcccaagattcctgaggtgccgcagtgaaacctggcagagcatgtcctcgtgcggttcggccgtgtcgaaatcccgtttgtggtggtggtttttctgttttatataattcaccttacgtgatcaactgtcatggtccatgtttttcttgttctatgtatatactatatggtacacatatatgctactactgagtacacaaatatgtccagccgaataaatgtctatacggctataccatctgtgttggcaatatcttgttgcaaaagtttgggagtggacgtataataatcttttgatttgag

SEQ ID NO: 44306 - DNA, 1770 bp, Zea Mays
gccacggctacccgatcgcgcgccgcgccacggagcaccacacgatccccgacgcaaacctgctacacaaagaaaaaaaaaaacagaacgagccttcacttccgttcccctggccggcctggccccgtcctctgttccagcgttcgccgccgctctgcacgagccctgcctaccgatgtccgtcgcgtccgtggccgccctccggacggccggctccggccgccgccgcggcgcgggttcccagcagaccggccttaacggttcctgatgatgcagaggagggagctggtgaccaaggccgggatcgcgctcgccgtctcctgctcgatggctacctcacccgcttcagccaacggcgctgctcaagggctggagattttgccgttcaaagctgacgggtacaacttctggacgtggcggggtcgccggatacactacgtcgagcaaggcgcggggcggcccgtcgtgctcatccacggcttcggcgcttccgccttccactggaggtacaacatccctgagctggccaagaagtacaaggtgtacgccatagacctgctggggttcggctggagcgagaaggcgctggtggactacgaggccaccatctggatggagcaggtctccgacttcctccgggagatcgtcaaggaaccagccgtccttgtaggcaacagcttgggaggcttcacgacgctgttcacggccaccgaggtgccggagctggtccggggcgtcgtgctcctcaactccgccggccagttcgccgaccccaacaagccggccgccgcgccggccgaggaggaggaggggggcagcgcgctgtccaggtacatcgtgcagccgctcaaggaggccttccagcgggtggtgctggggctcctcttctggcagtccaagcagcccgccagggtcgagaaagtcttgaaaagcgtaacgttaactcagcttgatgtctaagtctaatcgcataaagttcatcgtcttagatcgtcacactcatacctgcaggtgtacatagatcccagcaacgtcgacgactacctggtcggctccatcacggcgccggcggcggaccccaacgccggcgaggtgtactacaggctgatgtcgcggttcatgtcgaaccagagccggtacacgctggaccggctgctggggaagatgtcgtgcccgctgctgctgctgtggggcgacctggacccgtgggtcggcccggccaaggccgcgcggatccaggagttctacgccgacaccgccgtcgtgcacctgcaggccggccactgcccgcacgacgaggcgccggagcaggccaaccgcgcgctgctcgagtggctcgcggccctcgacgcccgcgctaagtcggccgagcccagcctacagaccgtctgatggatcgagcgcaaggggcttagcgtatgctagtcaaagaatacaatttggtggcctatatctatagtttgatgtagtatgtcctgtagtaggaacagtaatttcttactgtgagttagtttactgttctacagctgttgcacccgtttgatgtagttatagatgaccaataagcacgaggcccgcgagcccggcacgaggcccgcgagcccggcacgaagcccactgtttagcctcgatccgagtccggcacggcacggttctatgcaggcccgggccgggctcggacaggaaactaggcacggtgggctagtccggcacggcccgtttaactctaagcccgttaagcccgctttttgcactaaaacgtgtttaccg

SEQ ID NO: 44307 - DNA, 2985 bp, Zea Mays
ctcctctcctagtctcccctcctgccggacgtgtctccactgtccactcaccgcgctccagtccgccacgctgccgggcgctgctggccccgacaccgtgggccagccccggcccgtggtgcgcggagcccagcaacatgcacgcagccacgcaccggcaccgcccggcacgctgctgcctgctgctgccgcctgctagcgcttctgtcgtaccagtactactgctgcgttcctcagttccttcctcgctctcgatctatcaccaaaacccgcctgctaatcactccggtgtgggagttggggttgggttcgggcgcgcaacttttcctccccttcttattcacatctcctcaccagcagccgccggcaccaccatccatccatccatcctctcttcttcctctgcaaatcgatcgcccggccttccggtttgtttgccgctgcaaatcgatcgcgcgtcgctcgatcggtgcatctatcgtctcctccgacgtaccgtcctcgctgcgtaccttccagttcgtcgatcgacaacaaggcaggcaccagcggcaagaaggaatttcagttagtgctctataatatgatcaggtcgtagtcagatcatattgctgctggtgatcgaccgacgatgatggccggggcaccgccgacgatgcacatctgcatggactccgactggctcaaggtacgtatataccgtgaccacatacctgggttcttgtactaacatatataattcctttctggcagctcactagctcctctctttgttgatctctgcgctatatatctctttaattatctgttgtttttttgtcataacgtactactaagttgtatgtctctgctctctctacaataatggttgtttattagtgtagacttaatctgatcaaaggcagtgagatcgtaataataacctttatgaaactactatgatcgatcacaggagatatccaattaataggtccacaaggatcgttatatcttacttaaaccaacaaagaaactaaccgatgaaactctggaaggattattgctcacaaatatgtcgaaaaacacaaaggaaacaaccacataaacagtataataaagtgtactgcacctgcactaccgtcagattcttacccatatattaattgcaagcaaaagcaacaagagagataaagagagatctgaacaagtacatctgatctacatggctttaactttagaacactgcaaaagccgtgtatatcgatctctttgactgtcgacataacacgtgaaaagaacaacgtgaataaatatacttgtcgatattttaccataattttattagggaaaacactattttttgttaatgataactagtaagtaataagcacatatatgtatgaacggtagacgatgttcttatcatgttatgtgttttcaagcttaattagaccagatgttacctagcagcacgatgagaccattcttcaaatacatgatggcgccatggcggacatgatgaacgagcacaagattttatgtaatctcactgacaattctatctagtacgagtttataggaagtgcctgcataatgcataagaaatcaataaaaaaacgaaactacgcgcgcgcaaaggatcagatgtgtggcggccaggcaacagagactgaccaacgtgatttcaaaagctacggattcaccattggcagatcagagatctagaaactctgatctacatgatgcctccatcatgaaaaccataataatctctggatctttttgcacgcacctctttcacgcattccgaggcttccattctgtcactgcacggctcatcatgatttgcgatcactatgcaacaaacgtggtctcgtgcttttcagggcatcgtcgtccccgaggagcctgggatgggcggatcgtcgtcctcaccgtcagcggaactgatcgcatgccctaggccgcccatgcacgccgcggcggcggatcaccggcgtctgcgcccgcagcacgaccagccgctcaagtgcccccggtgcgagtcgacgcacaccaagttctgctactacaacaactacagcctctcgcagccgcgctacttctgcaagacgtgccgccgctactggaccaagggcggctcgctccgcaacgtcccggtcggtgggggatgccgcaagaacaagcgagccagcgccaagaagcatcccgccgcgacgccgatgcagccacggcacgtggcggagacgggcctccacctgtccttctccggcgtgcagctgccgccgccgccgtcccccgccgccgcggccgacccgctctgcagcctcggccttctggactggaagtacgacccgatcctcgcgggttccggtggcgccgccgctggctcgttggatggcgcgagctccgaggcgcacttcgctggggcgggcatgctgggcatcccaggcggcggcgagtgctacgcgctgagttcgctccggtacgcggccgacctgggcgagcacctgcagctgcaggggctcccgttcgggctacgtgctgagcaggaatcgatggaggtgaaggcggcggcgacggagaggacgctgtcgctggactggtacagcgagacaagccgcgcgccggagagcgccctcagctcgctgggcgcgctgggcctgtggagcggcatgctccgcggcgcgcaccagcaccatggctcctcggcggccatctaagatgctggcgaaaacgtgcctcttccactacatgcttgcgttgtatgctaatggatttaaccagtacgaatgactacgtaggagtgcttgcttttcttgttgtttttgcctgttttcatcttctgtttcctttcgcccttttgtttcttggtacttgctactcgtcatttcagatatgacgtctctgttgccacttcaaagttcaacattacgttttatctatgtattgaactacggattatggaaccatgcataaatagaacttagagagcttgggacgaat

SEQ ID NO: 44308 - DNA, 554 bp, Zea Mays
aataggtcggctgccttctgtcactctcccctctgctcaaaatttcccccaaaacttctcctcttgaggaaggcagcccaagcgagcgcgctgcaatggcggactcgtcggcgccgacgagagtgatgatggcggtgaacgagtcgtcgctcaaggggtacccgcacccctccatcagctgtcgcaccgccttcgactggacgctctccaagctcgtccgctccaaccctgggggcttccacttcctcttcgtccacgttcaggtccccgacgaggacggatttgatgacatggatagcatctatgcttcgccggaggactttcaccaaatgaagcagagagacaagataagagggcttcatttgctcgagtactttgtaaaccaatgccatcagttagggataaaatgcgaggcatggatcagacatggagatccaaaggaggttatctgcagcgaagtgaagagagtccagcctgaccttctagttgtgggaagtaggggtcttgggccatttcagagctcaggacgctacatgtattgcaacagatcatag

SEQ ID NO: 44309 - DNA, 1836 bp, Zea Mays
aataggtcggctgccttctgtcactctcccctctgctcaaaatttcccccaaaacttctcctcttgaggaaggcagcccaagcgagcgcgctgcaatggcggactcgtcggcgccgacgagagtgatgatggcggtgaacgagtcgtcgctcaaggggtacccgcacccctccatcagctgtcgcaccgccttcgactggacgctctccaagctcgtccgctccaaccctgggggcttccacttcctcttcgtccacgttcaggtccccgacgaggacggatttgatgacatggatagcatctatgcttcgccggaggactttcaccaaatgaagcagagagacaagataagagggcttcatttgctcgagtactttgtaaaccaatgccatcagttagggataaaatgcgaggcatggatcagacatggagatccaaaggaggttatctgcagcgaagtgaagagagtccagcctgaccttctagttgtgggaagtaggggtcttgggccatttcagagggttttcgtgggcacggtgagcgagttctgcgttaagcatgccgaatgccccgtcatcaccataaaacggaacgctaccgaagctcctcaggaccctgtcgacgattgatgcttccaagccaagccatgccatgtcactggagaatgagatgttcttcttcactgcttttataatgggttgatgtacaaaatacgatatggaagtggtgcctggaactagttcgcggagggttccaactcttgcacactgcgcccccaaaaactagagttgaagatgtaaaacgccgtcgtccgccgagggacgacgagagattgcttcgctggaacgaacgccccgccccttatttgcccctgcccgtccacagccacagccacagcttgagcagggtacctgaagcccgcgtagtcctttggcacggcgtagcctttgggaacgccgacgagctggggctgttgctgatgcttaagctgacgccccttgttgctgccagcaagcttgccgtcgctcttccacgccggaggcttccccggcgcgaacttgatctcgaagccgtcgtcgatgtcgtggatcgtggcgcgggagctcgccacgggcttcatcgccgggcacttgatctcgaatccgccgcccttctccaggtcgcctccgacggagtcggaggcgtaggagtcctggtcggcggcgtacctcttcctggagagccggcgcccgcacagcctgccggcgacgcaggcggccacggcgaggaaggagatcgccgcgagcacggcgaagaccgggccgaacgagcccttggcggtcgtggaaggcgcccgcgcgcgcaggacggcgttggaggacgcggggtagtagaccgtggggtcaggcatatccttggttctcggcgctctctcaagctgctagctgctgatatatgccaccaccacgctctccctcgaagaaaatggttcggccgtttgggtgtcgcactcttgggcaccgaggggagtgctggtcgttttatgatggggagctgaaggcgccggtttgaaccgagcgattactttgcgattttgtttttcatcacgagccgactctcactcagctcagctgctgtcatggcatgatgatgcccgctgccgccccatcctccctctccctcgtcgggccgcgagaaaggctggcgctttgggatccctttggagcagttcaatgcgagcttggaataacgtctcggcacgtctgcactctgctgcagcagccgcctggcctctctctctctctcactcactcacccccgtgtccccctgtggcctactacgtgctgttgcttttg

SEQ ID NO: 44310 - DNA, 641 bp, Zea Mays
caaaacgaggggattacacgttttgccgataataggtcggctgccttctgtcactctcccctctgctcaaaatttcccccaaaacttctcctcttgaggaaggcagcccaagcgagcgcgctgcaatggcggactcgtcggcgccgacgagagtgatgatggcggtgaacgagtcgtcgctcaaggggtacccgcacccctccatcagctgtcgcaccgccttcgactggacgctctccaagctcgtccgctccaaccctgggggcttccacttcctcttcgtccacgttcaggtccccgacgaggacggatttgatgacatggatagcatctatgcttcgccggaggactttcaccaaatgaagcagagagacaagataagagggcttcatttgctcgagtactttgtaaaccaatgccatcagttagggataaaatgcgaggcatggatcagacatggagatccaaaggaggttatctgcagcgaagtgaagagagtccagcctgaccttctagttgtgggaagtaggggtcttgggccatttcagaggacaaacctcgtgcagtggcgagagctatctcgctaagtcaccgggtcggcagactctttgtatttgtggggtaaagacttgcctcggttt

SEQ ID NO: 44311 - DNA, 2941 bp, Zea Mays
gtctgccccctgctcttcgcggctctgccgcactcgtcttctctcttcctcttctctctgtctctcctaccctccgtcaccacctcgtccctatggcaagcgagcttctcccagcctcttcctaccagactatcctcctgccgcaacggacctgacggtttccctccatctggcctccctgtcgcgcgagctgatcgacccacgcaagcgcaatgccgtccagaggctagttcgagctgctgagcgctgatcacggtgaggccacccagatccacccgactgccacccggatttcgcaccttgccttttcttctctcgttcacccagctggctcggtcgctcctccctctctagtgggcaactgccaactgggcgactcgccgacgcccctacgccaggtgctcaggtcttcgtcgggtcttttgccggcgacgaacacacaccagaggaggtgccgaacggggtgaatttctctccacagaacgaaagtctgcctgccccaaagtcgacagcagcttcaacgatggcgggtagcatgcaaagcgaggcgcttgagatgcatgttgaggcctccggtgctggggaaccctcaatcgagcaactctacaacaacgtatgcgagatggagagctcaagtgagggtggctccccatcacgcgagagctttggctcggacggggaggagtctagaattgactcggagcttcgacatcttgttgctggggagatggaggccatgaaggtgattgaggaggaagaggagaatgggagtgttgccaacgttgtaccccctgctcctgctgagaatgggaccccagtaaaggaacactcttccagttcgtccaagaagtcgaagaaggcatcaaaatcacagcttgagtctgatgcctctgttggactcaatggaaaggcgtccactgaggaaggtgagagcgaggtcagcaaaccggcaagccgagttggccgacggcggaaatcaaatgccaacccacagagtggaacagaagatgctgggcttgataacccagaccttggtccatttcttcttaaacatgcaagagacttgattgcctcagaaaacccacggcgggcattgaaatatgctctccgtgccacaaagtcgtttgagaagtgtgctggtggaaagccaagcttgaacttagtgatgagtttgcatgttgttgcagcaatctactgcaacttgggaaaatatgaagaggctgtacctgtgctgcatcgatccattgagatccctgtaatcgaggaaggccaggaacatgctctcgcaaagttttctggttgcatgcagttgggggacacctatggcatgctaggtcaaactgcacactcactgcaatggtatgcttctgggcttgaaatacaaaagcaaacattgggagagcaagacccaagggttggagagacttgtcggtacttagctgaggcccatgtgcaggcactacaactcgatgaagcacaaagattgtgtcagatagcccttgacatccacagggagcatcgcgagacggcctcactagaagaaacagctgataggaggctgatgggtctaatttgtgacactaagggtgatcacgaagctgccctggagcatctagtgatggccagcatgtccatggtagccaatggtcaggagacagaggtggcctcagtggattgcagcattggtgatatctacctctccctgggccggtatgatgaggctgtgtttgcttaccagaaagctctcactgtattcaagaccagcaaaggggagaaccatgcaactgtggcttctgttttcgtgcgcctagcagatctgtacaataagacggggaagctgagggagtcaaaatcctactgtgaaaacgccctaaaaatctaccaaaagcctattccagggacttctctggaagaaatcgccactggtctaactgacgtctcagccatatatgagacgatgaatgagcacgagcaagcgctcaagctacttcagaaggccttaaaaatgtacaacaactctgccggccagcagagcacgattgctggcattgaggctcagatgggcgtgctgcactacattttgggcaactatggcgagtcctacgactccttcaagagcgcaattgcaaagctccgcacttgtggcgagaagaagtctgccttcttcgggattgccctgaaccagatggggctggcatgtgttcagaggtattcgataaacgaagcagcagaattgttcgaggaagctagaactgttctggaacaagaatacgggccataccatccggatactttaggagtctacagtaatcttgctggaacttatgacgcgatgggaaggctggatgaggccatcgagatcttggaatatgtggttggaatgcgcgaggagaagctaggtacggcaaacccagacgttgacgacgagaagcggaggcttggggagctattgaaggaggctggccgggtgcgaagcagaaaggcgaaatccctggagaatctgctcgagaccaacccgtatatcgccaccaagagaaatgccgttgctgcatgagtcactctgtcctcagatgacacggtattgtgatggaaggcgaggattgttactaaggtattcgtattcatttggtttgttcagatggggggtaacgggagtagtggtgtttacatatttggaaatatgaaaatgcttaaattgattgttgtaaagtttcaaatgctactgtttctccttttctactacctctctgaggtgcgagtttgcattcgtcagttgtacctgggtttttattacatacatgaaaaaaaaaatcaatgacacagcaaattcgatccctacttaattgaaaattaaatttgccagcgagaatcggctgttggacaagttgaagatgacaaaagcaataataatcgaacgcggtcccccatctcaggcctagat

SEQ ID NO: 44312 - DNA, 2898 bp, Zea Mays
gtgtggtccgattacaccgaggcgcgagccatcatttctctagtctgccccctgctcttcgcggctctgccgcactcgtcttctctcttcctcttctctctgtctctcctaccctccgtcaccacctcgtccctatggcaagcgagcttctcccagcctcttcctaccagactatcctcctgccgcaacggacctgacggtttccctccatctggcctccctgtcgcgcgagctgatcgacccacgcaagcgcaatgccgtccagaggctagttcgagctgctgagcgctgatcacgggtattgtgtagagctatcatctccctcggtttcttggaagaacaattatttgacataattatcaccataagatgcctggaattacagaggatggagttgttgcagaggaggtgccgaacggggtgaatttctctccacagaacgaaagtctgcctgccccaaagtcgacagcagcttcaacgatggcgggtagcatgcaaagcgaggcgcttgagatgcatgttgaggcctccggtgctggggaaccctcaatcgagcaactctacaacaacgtatgcgagatggagagctcaagtgagggtggctccccatcacgcgagagctttggctcggacggggaggagtctagaattgactcggagcttcgacatcttgttgctggggagatggaggccatgaaggtgattgaggaggaagaggagaatgggagtgttgccaacgttgtaccccctgctcctgctgagaatgggaccccagtaaaggaacactcttccagttcgtccaagaagtcgaagaaggcatcaaaatcacagcttgagtctgatgcctctgttggactcaatggaaaggcgtccactgaggaaggtgagagcgaggtcagcaaaccggcaagccgagttggccgacggcggaaatcaaatgccaacccacagagtggaacagaagatgctgggcttgataacccagaccttggtccatttcttcttaaacatgcaagagacttgattgcctcagaaaacccacggcgggcattgaaatatgctctccgtgccacaaagtcgtttgagaagtgtgctggtggaaagccaagcttgaacttagtgatgagtttgcatgttgttgcagcaatctactgcaacttgggaaaatatgaagaggctgtacctgtgctgcatcgatccattgagatccctgtaatcgaggaaggccaggaacatgctctcgcaaagttttctggttgcatgcagttgggggacacctatggcatgctaggtcaaactgcacactcactgcaatggtatgcttctgggcttgaaatacaaaagcaaacattgggagagcaagacccaagggttggagagacttgtcggtacttagctgaggcccatgtgcaggcactacaactcgatgaagcacaaagattgtgtcagatagcccttgacatccacagggagcatcgcgagacggcctcactagaagaaacagctgataggaggctgatgggtctaatttgtgacactaagggtgatcacgaagctgccctggagcatctagtgatggccagcatgtccatggtagccaatggtcaggagacagaggtggcctcagtggattgcagcattggtgatatctacctctccctgggccggtatgatgaggctgtgtttgcttaccagaaagctctcactgtattcaagaccagcaaaggggagaaccatgcaactgtggcttctgttttcgtgcgcctagcagatctgtacaataagacggggaagctgagggagtcaaaatcctactgtgaaaacgccctaaaaatctaccaaaagcctattccagggacttctctggaagaaatcgccactggtctaactgacgtctcagccatatatgagacgatgaatgagcacgagcaagcgctcaagctacttcagaaggccttaaaaatgtacaacaactctgccggccagcagagcacgattgctggcattgaggctcagatgggcgtgctgcactacattttgggcaactatggcgagtcctacgactccttcaagagcgcaattgcaaagctccgcacttgtggcgagaagaagtctgccttcttcgggattgccctgaaccagatggggctggcatgtgttcagaggtattcgataaacgaagcagcagaattgttcgaggaagctagaactgttctggaacaagaatacgggccataccatccggatactttaggagtctacagtaatcttgctggaacttatgacgcgatgggaaggctggatgaggccatcgagatcttggaatatgtggttggaatgcgcgaggagaagctaggtacggcaaacccagacgttgacgacgagaagcggaggcttggggagctattgaaggaggctggccgggtgcgaagcagaaaggcgaaatccctggagaatctgctcgagaccaacccgtatatcgccaccaagagaaatgccgttgctgcatgagtcactctgtcctcagatgacacggtattgtgatggaaggcgaggattgttactaaggtattcgtattcatttggtttgttcagatggggggtaacgggagtagtggtgtttacatatttggaaatatgaaaatgcttaaattgattgttgtaaagtttcaaatgctactgtttctccttttctactacctctctgaggtgcgagtttgcattcgtcagttgtacctgggtttttattacatacatgaaaaaaaaaatcaatgacacagcaaattcgatccctacttaattgaaaattaaatttgccagcgagaatcggctgttggacaagttgaagatgacaaaagcaataataatcgaacgcggtcccccatctcaggcctagat

SEQ ID NO: 44313 - DNA, 1144 bp, Zea Mays
gcccccggcgcctctcggacatagagtggcctccctctttttcctcgcactccgcaagacgcaagaccacctcaccagcctcctcgtccccgatctcctcccacccgcatccaagggtttccttctcgaccgtgcggaacgagccagagaacaggtttcgaggggcttcgcgtcgcaggccgccaagcccaccgggaaggagatcaaggttccaaaggctctgtttggcggcacaggcaactatgccagtgcactgttcctcacagcagctaaatctaatgcattggacaaagttgaatctgagattaaagctattgtagaggcttccaagaagagcccgttgttttctcaattcataaaggacttgtcagttccaaaagcgaccagggtgaaggctatagccgaaatatttgctgacgctgggttttcagatgttacaaagaatttcttggctgtcctggcggacaatggcaggctgaaatatattgaacgcattgcggagagatttgttgatttgactatggaacataagggggagatgaaggttgtggtcaggacagttatttcactcaccaaggaggaggagaaagaactcaaggaaaccttgcaggatatccttggggaaaacaaaactattttggttgaacagaagattgactacagcatcatgggaggattagtgattgaattcgggcagaaggtgcttgatatctcaatcaggaacagggcgaagcaaatggaggcgttcttgaggcaaccacttgacttctaacagccttttggataaaagaagcatcatcggaatgcagaggctgtcctgttgaaggttttcctgtgtctgcaattttaatctggccttttgaataaaatgtttcctctaacaagtgaagggcactgtttttattgtctcgtgggccacagatgcctgctgaacaatttatgttcatttcttcttttcttaaagaagcatgcactaagaacatgaaggatgcatgccatggaaagtttttgaaagtcattgaaacgtatgagctcctcatgcaatgcattattctccttatattcatgggtttacattaaggttcatcgattgcaaatgaaaaaaaaacgcgctaacaagtgtcacaatatgtcccttgatgtt

SEQ ID NO: 44314 - DNA, 2010 bp, Zea Mays
ttcttcttttgttgttgttttgatcaatatttatgacagagttgggagccaaacgaaggagccggctctttgtcaaccagttcagtcggtgtggaagtagaaaaatatagaaatctgtacactatcaaggccttgcctttaagtgatgtacgcttcatccgtaagtacaccccaacgtttggactggactacgtaataatcgttctctcatcaggcctggctttccctccattctatttctacaacggtggaattcgtgaattgtttgcaacactgaaacaacatgtattcatcatcaggtcggatgacgatcctaatgtttttctcgtcaacgactttcaagatccccttcagaaaagcttgtcatccttggagcttccaggagtagcctcagtagcaaatgccatgtcaagacaaaattcactcagttttactgggtcaattgatgagtccaggcatggggataatgttagacatggggcaacttctagcatgtctcagtatagctcaaagcaaaatcacaaatcaaatgatccaggtcgtgatctttcaattcaagtcttggagaaattctcattggttactaaatttgcacgagatactacatcaagcctttttcgagacaatagtggtgctcatgcttatggacgccaacaacatcaatacattttggataataaatcaactaataaacataaaaatcagtatgtaacaccagaaaaggcttcggcaccctcagcaacactcgagtcagatccattacctctcgtatggggaaaacaacgagatcacccgttaagtgtcgaagagtggacatctttcttagatcgtgaaggtaggattatggattcaaaggcactgaggaaaaaggttttctatgggggagttgatcatgctttgagaaaagaggtctggaaattcttgttggggtatcatgaatatgattcaacatatgctgagagggaataccttgctgtcatgaaacgagcagaatatgaagtcataaaatctcagtggaagagtatctcagccacccaagctaaaagattcaccaagtttagggaaagaaaaggcctaattgacaaagatgtggtgagaacagataggtccattccctattatgaaggagatgacaatcagaatgttgtagttttacgtgatattctgttaacatattccttctacaatttcgaccttggttattgccaaggaatgagtgactttttggctcccatactttatgtcatggaggatgagtctgaatcattttggtgctttgcttccctgatggaacgtctaggtgccaattttaatcgtgaccagaatggcatgcatgctcagctacttgcattatccaagcttgtggagcttcttgatccttcattgcacaactattttaggcaaaatgactgcttgaactatttcttctgtttccgctgggttcttatacaattcaaaagggagttcagtttcgaccagatcatgcttttatgggaagttctgtggtcccattatttgtcagaacatttccacttgtacttgtgcgtagcaatcttgaaaaaatatcgtcagcggataattggggagcagatggacttcgataccctccttaagttcatcaatgagctcagtggtcagatcaatcttgaccgggctatccaggacgcggaggcattgtgtactattgcaggagaaaatggggcttcctgcattccacctggaaccccaccttcaatgcccgtcgagaccgatggtggcatgtacgtgcaagaagacgaggtcttgtgagatatcggtcaccctagaaaataattgcatagaagcatcgcaagtttttatccagtagtgctttcgtcgtcgtcataaatgtgatccgttgttttacctcagctctccatcagatcttctatctcctagagcatctccatcagcctatctcatcaactgtacctaaaattagtgtttaaaaatagtgttttaggagatagagaagttgcaggtgatcttcta

SEQ ID NO: 44315 - DNA, 2000 bp, Zea Mays
ttcttcttttgttgttgttttgatcaatatttatgacagagttgggagccaaacgaaggagccggctctttgtcaaccagttcagtcggtgtggaagtagaaaaatatagaaatctgtacactatcaaggccttgcctttaagtgatgtacgcttcatccgtaagtacaccccaacgtttggactggactacgtaataatcgttctctcatcaggcctggctttccctccattctatttctacaacggtggaattcgtgaattgtttgcaacactgaaacaacatgtattcatcatcaggtcggatgacgatcctaatgtttttctcgtcaacgactttcaagatccccttcagaaaagcttgtcatccttggagcttccaggagtagcctcagtagcaaatgccatgtcaagacaaaattcactcagttttactgggtcaattgatgagtccaggcatggggataatgttagacatggggcaacttctagcatgtctcagtatagctcaaagcaaaatcacaaatcaaatgatccaggtcgtgatctttcaattcaagtcttggagaaattctcattggttactaaatttgcacgagatactacatcaagcctttttcgagacaatagtggtgctcatgcttatggacgccaacaacatcaatacattttggataataaatcaactaataaacataaaaatcagtatgtaacaccagaaaaggcttcggcaccctcagcaacactcgagtcagatccattacctctcgtatggggaaaacaacgagatcacccgttaagtgtcgaagagtggacatctttcttagatcgtgaaggtaggattatggattcaaaggcactgaggaaaaaggttttctatgggggagttgatcatgctttgagaaaagaggtctggaaattcttgttggggtatcatgaatatgattcaacatatgctgagagggaataccttgctgtcatgaaacgagcagaatatgaagtcataaaatctcagtggaagagtatctcagccacccaagctaaaagattcaccaagtttagggaaagaaaaggcctaattgacaaagatgtgataggtccattccctattatgaaggagatgacaatcagaatgttgtagttttacgtgatattctgttaacatattccttctacaatttcgaccttggttattgccaaggaatgagtgactttttggctcccatactttatgtcatggaggatgagtctgaatcattttggtgctttgcttccctgatggaacgtctaggtgccaattttaatcgtgaccagaatggcatgcatgctcagctacttgcattatccaagcttgtggagcttcttgatccttcattgcacaactattttaggcaaaatgactgcttgaactatttcttctgtttccgctgggttcttatacaattcaaaagggagttcagtttcgaccagatcatgcttttatgggaagttctgtggtcccattatttgtcagaacatttccacttgtacttgtgcgtagcaatcttgaaaaaatatcgtcagcggataattggggagcagatggacttcgataccctccttaagttcatcaatgagctcagtggtcagatcaatcttgaccgggctatccaggacgcggaggcattgtgtactattgcaggagaaaatggggcttcctgcattccacctggaaccccaccttcaatgcccgtcgagaccgatggtggcatgtacgtgcaagaagacgaggtcttgtgagatatcggtcaccctagaaaataattgcatagaagcatcgcaagtttttatccagtagtgctttcgtcgtcgtcataaatgtgatccgttgttttacctcagctctccatcagatcttctatctcctagagcatctccatcagcctatctcatcaactgtacctaaaattagtgtttaaaaatagtgttttaggagatagagaagttgcaggtgatcttcta

SEQ ID NO: 44316 - DNA, 2098 bp, Zea Mays
ttcttcttttgttgttgttttgatcaatatttatgacagagttgggagccaaacgaaggagccggctctttgtcaaccagttcagtcggtgtggaagtagaaaaatatagaaatctgtacactatcaaggccttgcctttaagtgatgtacgcttcatccgtaagtacaccccaacgtttggactggactacgtaataatcgttctctcatcaggcctggctttccctccattctatttctacaacggtggaattcgtgaattgtttgcaacactgaaacaacatgtattcatcatcaggtcggatgacgatcctaatgtttttctcgtcaacgactttcaagatccccttcagaaaagcttgtcatccttggagcttccaggagtagcctcagtagcaaatgccatgtcaagacaaaattcactcagttttactgggtcaattgatgagtccaggcatggggataatgttagacatggggcaacttctagcatgtctcagtatagctcaaagcaaaatcacaaatcaaatgatccaggtcgtgatctttcaattcaagtcttggagaaattctcattggttactaaatttgcacgagatactacatcaagcctttttcgagacaatagtggtgctcatgcttatggacgccaacaacatcaatacattttggataataaatcaactaataaacataaaaatcagtatgtaacaccagaaaaggcttcggcaccctcagcaacactcgagtcagatccattacctctcgtatggggaaaacaacgagatcacccgttaagtgtcgaagagtggacatctttcttagatcgtgaaggtaggattatggattcaaaggcactgaggaaaaaggttttctatgggggagttgatcatgctttgagaaaagaggtctggaaattcttgttggggtatcatgaatatgattcaacatatgctgagagggaataccttgctgtcatgaaacgagcagaatatgaagtcataaaatctcagtggaagagtatctcagccacccaagctaaaagattcaccaagtttagggaaagaaaaggcctaattgacaaagatgtggtgagaacagataggtccattccctattatgaaggagatgacaatcagaatgttgtagttttacgtgatattctgttaacatattccttctacaatttcgaccttggttattgccaaggaatgagtgactttttggctcccatactttatgtcatggaggatgagtctgaatcattttggtgctttgcttccctgatggaacgtctaggtgccaattttaatcgtgaccagaatggcatgcatgctcagctacttgcattatccaagcttgtggagcttcttgatccttcattgcacaactattttaggcaaaatgactgcttgaactatttcttctgtttccgctgggttcttatacaattcaaaagtttcgaccagatcatgcttttatgggaagttctgtggtcccattatttgtcagaacatttccacttgtacttgtgcgtagcaatcttgaaaaaatatcgtcagcggataattggggagcagatggacttcgataccctccttaagttcatcaatgagctcagtggtcagatcaatcttgaccgggctatccaggacgcggaggcattgtgtactattgcaggagaaaatggggcttcctgcattccacctggaaccccaccttcaatgcccgtcgagaccgatggtggcatgtacgtgcaagaagacgaggtcttgtgagatatcggtcaccctagaaaataattgcatagaagcatcgcaagtttttatccagtagtgctttcgtcgtcgtcataaatgtgatccgttgtaagtttggaagaatcatgaaaacctagagttgtgtgtatatactaccttgataaacctgtaattgatactttcactattctgtatggaaccccaggttttacctcagctctccatcagatcttctatctcctagagcatctccatcagcctatctcatcaactgtacctaaaattagtgtttaaaaatagtgttttaggagatagagaagttgcaggtgatcttcta

SEQ ID NO: 44317 - DNA, 2066 bp, Zea Mays
ttcttcttttgttgttgttttgatcaatatttatgacagagttgggagccaaacgaaggagccggctctttgtcaaccagttcagtcggtgtggaagtagaaaaatatagaaatctgtacactatcaaggccttgcctttaagtgatgtacgcttcatccgtaagtacaccccaacgtttggactggactacgtaataatcgttctctcatcaggcctggctttccctccattctatttctacaacggtggaattcgtgaattgtttgcaacactgaaacaacatgtattcatcatcaggtcggatgacgatcctaatgtttttctcgtcaacgactttcaagatccccttcagaaaagcttgtcatccttggagcttccaggagtagcctcagtagcaaatgccatgtcaagacaaaattcactcagttttactgggtcaattgatgagtccaggcatggggataatgttagacatggggcaacttctagcatgtctcagtatagctcaaagcaaaatcacaaatcaaatgatccaggtcgtgatctttcaattcaagtcttggagaaattctcattggttactaaatttgcacgagatactacatcaagcctttttcgagacaatagtggtgctcatgcttatggacgccaacaacatcaatacattttggataataaatcaactaataaacataaaaatcagtatgtaacaccagaaaaggcttcggcaccctcagcaacactcgagtcagatccattacctctcgtatggggaaaacaacgagatcacccgttaagtgtcgaagagtggacatctttcttagatcgtgaaggtaggattatggattcaaaggcactgaggaaaaaggttttctatgggggagttgatcatgctttgagaaaagaggtctggaaattcttgttggggtatcatgaatatgattcaacatatgctgagagggaataccttgctgtcatgaaacgagcagaatatgaagtcataaaatctcagtggaagagtatctcagccacccaagctaaaagattcaccaagtttagggaaagaaaaggcctaattgacaaagatgtggtgagaacagataggtccattccctattatgaaggagatgacaatcagaatgttgtagttttacgtgatattctgttaacatattccttctacaatttcgaccttggttattgccaaggaatgagtgactttttggctcccatactttatgtcatggaggatgagtctgaatcattttggtgctttgcttccctgatggaacgtctaggtgccaattttaatcgtgaccagaatggcatgcatgctcagctacttgcattatccaaggcaaaatgactgcttgaactatttcttctgtttccgctgggttcttatacaattcaaaagggagttcagtttcgaccagatcatgcttttatgggaagttctgtggtcccattatttgtcagaacatttccacttgtacttgtgcgtagcaatcttgaaaaaatatcgtcagcggataattggggagcagatggacttcgataccctccttaagttcatcaatgagctcagtggtcagatcaatcttgaccgggctatccaggacgcggaggcattgtgtactattgcaggagaaaatggggcttcctgcattccacctggaaccccaccttcaatgcccgtcgagaccgatggtggcatgtacgtgcaagaagacgaggtcttgtgagatatcggtcaccctagaaaataattgcatagaagcatcgcaagtttttatccagtagtgctttcgtcgtcgtcataaatgtgatccgttgtaagtttggaagaatcatgaaaacctagagttgtgtgtatatactaccttgataaacctgtaattgatactttcactattctgtatggaaccccaggttttacctcagctctccatcagatcttctatctcctagagcatctccatcagcctatctcatcaactgtacctaaaattagtgtttaaaaatagtgttttaggagatagagaagttgcaggtgatcttcta

SEQ ID NO: 44318 - DNA, 2103 bp, Zea Mays
ttcttcttttgttgttgttttgatcaatatttatgacagagttgggagccaaacgaaggagccggctctttgtcaaccagttcagtcggtgtggaagtagaaaaatatagaaatctgtacactatcaaggccttgcctttaagtgatgtacgcttcatccgtaagtacaccccaacgtttggactggactacgtaataatcgttctctcatcaggcctggctttccctccattctatttctacaacggtggaattcgtgaattgtttgcaacactgaaacaacatgtattcatcatcaggtcggatgacgatcctaatgtttttctcgtcaacgactttcaagatccccttcagaaaagcttgtcatccttggagcttccaggagtagcctcagtagcaaatgccatgtcaagacaaaattcactcagttttactgggtcaattgatgagtccaggcatggggataatgttagacatggggcaacttctagcatgtctcagtatagctcaaagcaaaatcacaaatcaaatgatccaggtcgtgatctttcaattcaagtcttggagaaattctcattggttactaaatttgcacgagatactacatcaagcctttttcgagacaatagtggtgctcatgcttatggacgccaacaacatcaatacattttggataataaatcaactaataaacataaaaatcagtatgtaacaccagaaaaggcttcggcaccctcagcaacactcgagatccattacctctcgtatggggaaaacaacgagatcacccgttaagtgtcgaagagtggacatctttcttagatcgtgaaggtaggattatggattcaaaggcactgaggaaaaaggttttctatgggggagttgatcatgctttgagaaaagaggtctggaaattcttgttggggtatcatgaatatgattcaacatatgctgagagggaataccttgctgtcatgaaacgagcagaatatgaagtcataaaatctcagtggaagagtatctcagccacccaagctaaaagattcaccaagtttagggaaagaaaaggcctaattgacaaagatgtggtgagaacagataggtccattccctattatgaaggagatgacaatcagaatgttgtagttttacgtgatattctgttaacatattccttctacaatttcgaccttggttattgccaaggaatgagtgactttttggctcccatactttatgtcatggaggatgagtctgaatcattttggtgctttgcttccctgatggaacgtctaggtgccaattttaatcgtgaccagaatggcatgcatgctcagctacttgcattatccaagcttgtggagcttcttgatccttcattgcacaactattttaggcaaaatgactgcttgaactatttcttctgtttccgctgggttcttatacaattcaaaagggagttcagtttcgaccagatcatgcttttatgggaagttctgtggtcccattatttgtcagaacatttccacttgtacttgtgcgtagcaatcttgaaaaaatatcgtcagcggataattggggagcagatggacttcgataccctccttaagttcatcaatgagctcagtggtcagatcaatcttgaccgggctatccaggacgcggaggcattgtgtactattgcaggagaaaatggggcttcctgcattccacctggaaccccaccttcaatgcccgtcgagaccgatggtggcatgtacgtgcaagaagacgaggtcttgtgagatatcggtcaccctagaaaataattgcatagaagcatcgcaagtttttatccagtagtgctttcgtcgtcgtcataaatgtgatccgttgtaagtttggaagaatcatgaaaacctagagttgtgtgtatatactaccttgataaacctgtaattgatactttcactattctgtatggaaccccaggttttacctcagctctccatcagatcttctatctcctagagcatctccatcagcctatctcatcaactgtacctaaaattagtgtttaaaaatagtgttttaggagatagagaagttgcaggtgatcttcta

SEQ ID NO: 44319 - DNA, 1521 bp, Zea Mays
ttcttcttttgttgttgttttgatcaatatttatgacagagttgggagccaaacgaaggagccggctctttgtcaaccagttcagtcggtgtggaagtagaaaaatatagaaatctgtacactatcaaggccttgcctttaagtgatgtacgcttcatccgtaagtacaccccaacgtttggactggactacgtaataatcgttctctcatcaggcctggctttccctccattctatttctacaacggtggaattcgtgaattgtttgcaacactgaaacaacatgtattcatcatcaggtcggatgacgatcctaatgtttttctcgtcaacgactttcaagatccccttcagaaaagcttgtcatccttggagcttccaggagtagcctcagtagcaaatgccatgtcaagacaaaattcactcagttttactgggtcaattgatgagtccaggcatggggataatgttagacatggggcaacttctagcatgtctcagtatagctcaaagcaaaatcacaaatcaaatgatccaggtcgtgatctttcaattcaagtcttggagaaattctcattggttactaaatttgcacgagatactacatcaagcctttttcgagacaatagtggtgctcatgcttatggacgccaacaacatcaatacattttggataataaatcaactaataaacataaaaatcagtatgtaacaccagaaaaggcttcggcaccctcagcaacactcgagtcagatccattacctctcgtatggggaaaacaacgagatcacccgttaagtgtcgaagagtggacatctttcttagatcgtgaaggtaggattatggattcaaaggcactgaggaaaaaggttttctatgggggagttgatcatgctttgagaaaagaggtctggaaattcttgttggggtatcatgaatatgattcaacatatgctgagagggaataccttgctgtcatgaaacgagcagaatatgaagtcataaaatctcagtggaagagtatctcagccacccaagctaaaagattcaccaagtttagggaaagaaaaggcctaattgacaaagatgtggtgagaacagataggtccattccctattatgaaggagatgacaatcagaatgttgtagttttacgtgatattctgttaacatattccttctacaatttcgaccttggttattgccaaggaatgagtgactttttggctcccatactttatgtcatggaggatgagtctgaatcattttggtgctttgcttccctgatggaacgtctaggtgccaattttaatcgtgaccagaatggcatgcatgctcagctacttgcattatccaagcttgtggagcttcttgatccttcattgcacaactattttaggcaaaatgactgcttgaactatttcttctgtttccgctgggttcttatacaattcaaaaggtctattttatcccgcagttgagcaattacgtaattgaagaaaatgtgccttacagatcag

SEQ ID NO: 44320 - DNA, 832 bp, Zea Mays
ttcttcttttgttgttgttttgatcaatatttatgacagagttgggagccaaacgaaggagccggctctttgtcaaccagttcagtcggtgtggaagtagaaaaatatagaaatctgtacactatcaaggccttgcctttaagtgatgtacgcttcatccgtaagtacaccccaacgtttggactggactacgtaataatcgttctctcatcaggcctggctttccctccattctatttctacaacggtggaattcgtgaattgtttgcaacactgaaacaacatgtattcatcatcaggtcggatgacgatcctaatgtttttctcgtcaacgactttcaagatccccttcagaaaagcttgtcatccttggagcttccaggagtagcctcagtagcaaatgccatgtcaagacaaaattcactcagttttactgggtcaattgatgagtccaggcatggggataatgttagacatggggcaacttctagcatgtctcagtatagctcaaagcaaaatcacaaatcaaatgatccaggtcgtgatctttcaattcaagtcttggagaaattctcattggttactaaatttgcacgagatactacatcaagcctttttcgagacaatagtggtgctcatgcttatggacgccaacaacatcaatacattttggataataaatcaactaataaacataaaaatcagtatgtaacaccagaaaaggcttcggcaccctcagcaacactcgagtcagatccattacctctcgtatggggaaaacaacgagatcacccgttaagtgtcgaagagggagtcgatctcaggacctaag

SEQ ID NO: 44321 - DNA, 809 bp, Zea Mays
agagtgcaaatgctggcgctgcaacagcccaagcagacaaaaaaaaatcttcaaaagcaagaaataaacatacagtagaagcttctgctgatgacaccgaaggaacatcaaaggttgttgaggaacctgcccctgagagcaagagggtatctgaatctgcagactacgatgcatcccagttgcatgagttttcccaggttgaagttggtgatgcccatgctgtagacggtgagggtgctggtgaggaagatggtgatattttggatggccaagatgcactgcctgatgtgccaatgacaccttctggaagcgagtttggagcggaacaggaagatgaggacgatgatgattcagagaggcgaaaccaatcaatcagcaagaagctatggtcattcttcactacatgacttgctgaagaggtcgtcatgtaggttatttctagcttttgtggtttcgattcatgataccccattcttggaactgtaggtcgtgtgcttttggtgattatgtactagatctcccacttgattgtgcttctctcccgtgtaattgaaatatatttgtagtggacatagtttgatggcactcacagaagtagctgatgagatgtacaatggcgatgatggtatgccctgtaaggctgtaacaccagtagcttggtttgtaattgttcttttcccccggttcgtgttacttcgttgaccttattccggggaaatattttagtgctgtgatgatggtctaaatgtttgttcgcctattgaaactaaatacaatgaattagaataccacagtccacaggagcttcg

SEQ ID NO: 44322 - DNA, 2988 bp, Zea Mays
gaagttaaactcaatcgggctgcctttgtccttaagttctgccttagcgcctcccactgttcttctcaaatggaggggctccagaagcttcttgaggatcatcaggtggagcttgaatccaaaagacgggattttgaattagaattagagagggaaaggaaatcttttgatcaaaatatgacacagaagcaagcggatttattgaaaagggagaaagatgttaaatctttggaggctaaactttctaaaagtgagcaggcattgaatgataagaagaaatcaatggaaaacttgcagaatgatcttgatgccaaatctaaggctctgaagagttgggatgaatcattgaaaaatgacgagaaaaggttactgaaagaaaagcagcaaatggatcatgaaagagaacaattggagacatacaaattggagcttgaaaagatcaaatcagcattagaagctgagaaggaaaaaatatcagaagagcagaataatctgaaactcacagcgcaagagaggcaggagcatagcttgttgatagcaaaacttaagaaggagattgaggaatacagaatgcgaagcaactccctatctgaggaaatggaggatttaaggaagcaacggcagaaatttgaagaagagtgggaacaactagacgaaaagagagccctccttgtagaggaggacaaaaggttgaacattgagaggatgaatttagaacggtggcgtgacaacgaagaaaaaaggttaaatgatatgaaactcaaaatggatgaagaatacaagcagcagctggagagtcttgagcgcaaggaaaaggctttgagtgatgatatgaagcacaagcaaatggaaaatgatgaatttctgaagggagaacgtgctgatgttcaacgtaaattgcaactcaaacggcatgaattggagatggagatggagcaaaaacaagccacgaaggagaaggaactggaagaaaaggaaaatgagttaaataagaaaatagattttgtggaaaataaactccgacatgcaattgagttgaatgagtccaagattgagaagttattattggagaaaagggaggtgcagatggaaagagaattactgctggaggaaagaaagaaaacggagactgacaaggcagatattagaagggatattgagagtctgcactcattgagcaagagtttgaaggaacgtcgagaggcatataacagggacaggagcagactcatcgaactatttgaaaagtacaaggcgtgcaaaaactgtgggatttctatttttgagggattggattctctgctgcttaaagacagtgctgaaattgagcatccaagtttggctgttgagggagatgatcatgccttgaccaccgatacatcaggtccagatacaggaacccttgttaattcaggtggtcgtttttctttgttacagaagtgttcaaggcttttcaagttctcccctagaaaaaagggtgagcagtcatcagaacaaccatcagagaggaatatatcttttggtgcaagactcgaggaagcaacacagagcgatggagattatgtgccaactcctgtctatgagatagcccacgattctttcaatgcagaggatgagctcccttctgacggtgaaaccagggagaatgaagagtctgaaaggcatgacatagctgataatgcccagatggagtcttctgttggtgtagcagataacagtatagatattctcggtactaagtcatttgatggtgctaacgacatggcagttgaagcaactattgtctctgttgatcaaaatggcgaggactctgtagttcctgctgaagcaggtgtagagcctgaaacatcagagcaaggtcggcgccagcaaaaccagagaggcagaagaaaaggtggtatgaaaagaacacggtctgttaatgctgtagttgaagatgctaagatgatacttggcgaggtttttgaggagaagactgatgatcagggagatacagtcaaggtgggtgctacacgaaagcggcggtttgctggagctacaataagtgaacaagatgaagaagggagcgaagcacattcagaaagtgtttcacttggagggcagcgccgtaagaggcggcaaactgctggggcagtgacagatgccccaggagaaagacgttacaatttgagacacagtagagctgcaaatgctggcgctgcaacagcccaagcagacaaaaaaaaatcttcaaaagcaagaaataaacatacagtagaagcttctgctgatgacaccgaaggaacatcaaaggttgttgaggaacctgcccctgagagcaagagggtatctgaatctgcagactacgatgcatcccagttgcatgagttttcccaggttgaagttggtgatgcccatgctgtagacggtgagggtgctggtgaggaagatggtgatattttggatggccaagatgcactgcctgatgtgccaatgacaccttctggaagcgagtttggagcggaacaggaagatgaggacgatgatgattcagagaggcgaaaccaatcaatcagcaagaagctatggtcattcttcactacatgacttgctgaagaggtcgtcatgtaggttatttctagcttttgtggtttcgattcatgataccccattcttggaactgtaggtcgtgtgcttttggtgattatgtactagatctcccacttgattgtgcttctctcccgtgtaattgaaatatatttgtagtggacatagtttgatggcactcacagaagtagctgatgagatgtacaatggcgatgatggtatgccctgtaaggctgtaacaccagtagcttggtttgtaattgttcttttcccccggttcgtgttacttcgttgaccttattccggggaaatattttagtgctgtgatgatggtctaaatgtttgttcgcctattgaaactaaatacaatgaattagaataccacagtccacaggagcttcg

SEQ ID NO: 44323 - DNA, 3961 bp, Zea Mays
taatgccatggtttcttgttgctttggggagggagaggtgctttggttcctggatgagctgtgaaggaactgggagcaagaagaattgatgtttactccgcagggcaaaggatggaccggctggtcgacgccaactccggccaaccagcggagcggtggtggggctcctgctgcgtcggcgccccttggaaagggcaaaggaagggtcgccgagctcgagcaggagttgcatgaatatcagtacaatatggggcttcttttgattgaaaagaaagaatgggcagcaaaatttgaagaaatcagtgaagtgctgacacagaaagaggagatactgaagagggagcaggcggcacatctgaatgctatatcagagtatgaaaggcgggaggagaacatgcggaaagcactaggtgttgagaagcaatgtgtcgctgatcttgaaaaagccttgcgtgatatacgagcagagatagctgaggttaaatttacatctgagaaaaagataacagatgctcagtctcttgaggctagtttggaggaaaaatccttggagatcgagggaaaacttcatgctgcagatgccaaacttgcagaggcaaaccgcaagaagtctcaagctgaccgtgatttagaagaggcggaagctcgtcaacgtagactggagaaggagaaactgtattttgagacagagcggaaggcccgagaaaagcaacttaaggagcaggaggaatcactgcaggaatgggagaaaaagctgaaggaaagtcagaatagacttaatgagttgcagagatctataaatgagcgagaggagagagcaaataagaatgatcaacttttcaagataaaacaggacgaactggaggaggcacgaaggacagtggaggccgctaaagttactctgaaagtcaaagaggatgatattaacaaaagactaaatgaattacatttacaggaaaaggatgctgactcaaagcgcagtgcattggaagagcaggggaaaaaattggatgagagagaggcaaaggtcactaatagagaaaaggaggggctccagaagcttcttgaggatcatcaggtggagcttgaatccaaaagacgggattttgaattagaattagagagggaaaggaaatcttttgatcaaaatatgacacagaagcaagcggatttattgaaaagggagaaagatgttaaatctttggaggctaaactttctaaaagtgagcaggcattgaatgataagaagaaatcaatggaaaacttgcagaatgatcttgatgccaaatctaaggctctgaagagttgggatgaatcattgaaaaatgacgagaaaaggttactgaaagaaaagcagcaaatggatcatgaaagagaacaattggagacatacaaattggagcttgaaaagatcaaatcagcattagaagctgagaaggaaaaaatatcagaagagcagaataatctgaaactcacagcgcaagagaggcaggagcatagcttgttgatagcaaaacttaagaaggagattgaggaatacagaatgcgaagcaactccctatctgaggaaatggaggatttaaggaagcaacggcagaaatttgaagaagagtgggaacaactagacgaaaagagagccctccttgtagaggaggacaaaaggttgaacattgagaggatgaatttagaacggtggcgtgacaacgaagaaaaaaggttaaatgatatgaaactcaaaatggatgaagaatacaagcagcagctggagagtcttgagcgcaaggaaaaggctttgagtgatgatatgaagcacaagcaaatggaaaatgatgaatttctgaagggagaacgtgctgatgttcaacgtaaattgcaactcaaacggcatgaattggagatggagatggagcaaaaacaagccacgaaggagaaggaactggaagaaaaggaaaatgagttaaataagaaaatagattttgtggaaaataaactccgacatgcaattgagttgaatgagtccaagattgagaagttattattggagaaaagggaggtgcagatggaaagagaattactgctggaggaaagaaagaaaacggagactgacaaggcagatattagaagggatattgagagtctgcactcattgagcaagagtttgaaggaacgtcgagaggcatataacagggacaggagcagactcatcgaactatttgaaaagtacaaggcgtgcaaaaactgtgggatttctatttttgagggattggattctctgctgcttaaagacagtgctgaaattgagcatccaagtttggctgttgagggagatgatcatgccttgaccaccgatacatcaggtccagatacaggaacccttgttaattcaggtggtcgtttttctttgttacagaagtgttcaaggcttttcaagttctcccctagaaaaaagggtgagcagtcatcagaacaaccatcagagaggaatatatcttttggtgcaagactcgaggaagcaacacagagcgatggagattatgtgccaactcctgtctatgagatagcccacgattctttcaatgcagaggatgagctcccttctgacggtgaaaccagggagaatgaagagtctgaaaggcatgacatagctgataatgcccagatggagtcttctgttggtgtagcagataacagtatagatattctcggtactaagtcatttgatggtgctaacgacatggcagttgaagcaactattgtctctgttgatcaaaatggcgaggactctgtagttcctgctgaagcaggtgtagagcctgaaacatcagagcaaggtcggcgccagcaaaaccagagaggcagaagaaaaggtggtatgaaaagaacacggtctgttaatgctgtagttgaagatgctaagatgatacttggcgaggtttttgaggagaagactgatgatcagggagatacagtcaaggtgggtgctacacgaaagcggcggtttgctggagctacaataagtgaacaagatgaagaagggagcgaagcacattcagaaagtgtttcacttggagggcagcgccgtaagaggcggcaaactgctggggcagtgacagatgccccaggagaaagacgttacaatttgagacacagtagagctgcaaatgctggcgctgcaacagcccaagcagacaaaaaaaaatcttcaaaagcaagaaataaacatacagtagaagcttctgctgatgacaccgaaggaacatcaaaggttgttgaggaacctgcccctgagagcaagagggtatctgaatctgcagactacgatgcatcccagttgcatgagttttcccaggttgaagttggtgatgcccatgctgtagacggtgagggtgctggtgaggaagatggtgatattttggatggccaagatgcactgcctgatgtgccaatgacaccttctggaagcgagtttggagcggaacaggaagatgaggacgatgatgattcagagaggcgaaaccaatcaatcagcaagaagctatggtcattcttcactacatgacttgctgaagaggtcgtcatgtaggttatttctagcttttgtggtttcgattcatgataccccattcttggaactgtaggtcgtgtgcttttggtgattatgtactagatctcccacttgattgtgcttctctcccgtgtaattgaaatatatttgtagtggacatagtttgatggcactcacagaagtagctgatgagatgtacaatggcgatgatggtatgccctgtaaggctgtaacaccagtagcttggtttgtaattgttcttttcccccggttcgtgttacttcgttgaccttattccggggaaatattttagtgctgtgatgatggtctaaatgtttgttcgcctattgaaactaaatacaatgaattagaataccacagtccacaggagcttcg

SEQ ID NO: 44324 - DNA, 3695 bp, Zea Mays
gaattacgagggtttctgtcctgggcggtcaaaaattctgacttggaaaccctcggtgggccgcttcctggttcttgggagggagaggtgctttggttcctggatgagctgtgaaggaactgggagcaagaagaattgatgtttactccgcagggcaaaggatggaccggctggtcgacgccaactccggccaaccagcggagcggtggtggggctcctgctgcgtcggcgccccttggaaagggcaaaggaagggtcgccgagctcgagcaggagttgcatgaatatcagtacaatatggggcttcttttgattgaaaagaaagaatgggcagcaaaatttgaagaaatcagtgaagtgctgacacagaaagaggagatactgaagagggagcaggcggcacatctgaatgctatatcagagtatgaaaggcccgagaaaagcaacttaaggagcaggaggaatcactgcaggaatgggagaaaaagctgaaggaaagtcagaatagacttaatgagttgcagagatctataaatgagcgagaggagagagcaaataagaatgatcaacttttcaagataaaacaggacgaactggaggaggcacgaaggacagtggaggccgctaaagttactctgaaagtcaaagaggatgatattaacaaaagactaaatgaattacatttacaggaaaaggatgctgactcaaagcgcagtgcattggaagagcaggggaaaaaattggatgagagagaggcaaaggtcactaatagagaaaaggaggggctccagaagcttcttgaggatcatcaggtggagcttgaatccaaaagacgggattttgaattagaattagagagggaaaggaaatcttttgatcaaaatatgacacagaagcaagcggatttattgaaaagggagaaagatgttaaatctttggaggctaaactttctaaaagtgagcaggcattgaatgataagaagaaatcaatggaaaacttgcagaatgatcttgatgccaaatctaaggctctgaagagttgggatgaatcattgaaaaatgacgagaaaaggttactgaaagaaaagcagcaaatggatcatgaaagagaacaattggagacatacaaattggagcttgaaaagatcaaatcagcattagaagctgagaaggaaaaaatatcagaagagcagaataatctgaaactcacagcgcaagagaggcaggagcatagcttgttgatagcaaaacttaagaaggagattgaggaatacagaatgcgaagcaactccctatctgaggaaatggaggatttaaggaagcaacggcagaaatttgaagaagagtgggaacaactagacgaaaagagagccctccttgtagaggaggacaaaaggttgaacattgagaggatgaatttagaacggtggcgtgacaacgaagaaaaaaggttaaatgatatgaaactcaaaatggatgaagaatacaagcagcagctggagagtcttgagcgcaaggaaaaggctttgagtgatgatatgaagcacaagcaaatggaaaatgatgaatttctgaagggagaacgtgctgatgttcaacgtaaattgcaactcaaacggcatgaattggagatggagatggagcaaaaacaagccacgaaggagaaggaactggaagaaaaggaaaatgagttaaataagaaaatagattttgtggaaaataaactccgacatgcaattgagttgaatgagtccaagattgagaagttattattggagaaaagggaggtgcagatggaaagagaattactgctggaggaaagaaagaaaacggagactgacaaggcagatattagaagggatattgagagtctgcactcattgagcaagagtttgaaggaacgtcgagaggcatataacagggacaggagcagactcatcgaactatttgaaaagtacaaggcgtgcaaaaactgtgggatttctatttttgagggattggattctctgctgcttaaagacagtgctgaaattgagcatccaagtttggctgttgagggagatgatcatgccttgaccaccgatacatcaggtccagatacaggaacccttgttaattcaggtggtcgtttttctttgttacagaagtgttcaaggcttttcaagttctcccctagaaaaaagggtgagcagtcatcagaacaaccatcagagaggaatatatcttttggtgcaagactcgaggaagcaacacagagcgatggagattatgtgccaactcctgtctatgagatagcccacgattctttcaatgcagaggatgagctcccttctgacggtgaaaccagggagaatgaagagtctgaaaggcatgacatagctgataatgcccagatggagtcttctgttggtgtagcagataacagtatagatattctcggtactaagtcatttgatggtgctaacgacatggcagttgaagcaactattgtctctgttgatcaaaatggcgaggactctgtagttcctgctgaagcaggtgtagagcctgaaacatcagagcaaggtcggcgccagcaaaaccagagaggcagaagaaaaggtggtatgaaaagaacacggtctgttaatgctgtagttgaagatgctaagatgatacttggcgaggtttttgaggagaagactgatgatcagggagatacagtcaaggtgggtgctacacgaaagcggcggtttgctggagctacaataagtgaacaagatgaagaagggagcgaagcacattcagaaagtgtttcacttggagggcagcgccgtaagaggcggcaaactgctggggcagtgacagatgccccaggagaaagacgttacaatttgagacacagtagagctgcaaatgctggcgctgcaacagcccaagcagacaaaaaaaaatcttcaaaagcaagaaataaacatacagtagaagcttctgctgatgacaccgaaggaacatcaaaggttgttgaggaacctgcccctgagagcaagagggtatctgaatctgcagactacgatgcatcccagttgcatgagttttcccaggttgaagttggtgatgcccatgctgtagacggtgagggtgctggtgaggaagatggtgatattttggatggccaagatgcactgcctgatgtgccaatgacaccttctggaagcgagtttggagcggaacaggaagatgaggacgatgatgattcagagaggcgaaaccaatcaatcagcaagaagctatggtcattcttcactacatgacttgctgaagaggtcgtcatgtaggttatttctagcttttgtggtttcgattcatgataccccattcttggaactgtaggtcgtgtgcttttggtgattatgtactagatctcccacttgattgtgcttctctcccgtgtaattgaaatatatttgtagtggacatagtttgatggcactcacagaagtagctgatgagatgtacaatggcgatgatggtatgccctgtaaggctgtaacaccagtagcttggtttgtaattgttcttttcccccggttcgtgttacttcgttgaccttattccggggaaatattttagtgctgtgatgatggtctaaatgtttgttcgcctattgaaactaaatacaatgaattagaataccacagtccacaggagcttcg

SEQ ID NO: 44325 - DNA, 4040 bp, Zea Mays
cagatccgttcggttttccattagcttggttcctgaggttcttggaattacgagggtttctgtcctgggcggtcaaaaattctgacttggaaaccctcggtgggccgcttcctggttcttgggagggagaggtgctttggttcctggatgagctgtgaaggaactgggagcaagaagaattgatgtttactccgcagggcaaaggatggaccggctggtcgacgccaactccggccaaccagcggagcggtggtggggctcctgctgcgtcggcgccccttggaaagggcaaaggaagggtcgccgagctcgagcaggagttgcatgaatatcagtacaatatggggcttcttttgattgaaaagaaagaatgggcagcaaaatttgaagaaatcagtgaagtgctgacacagaaagaggagatactgaagagggagcaggcggcacatctgaatgctatatcagagtatgaaaggcgggaggagaacatgcggaaagcactaggtgttgagaagcaatgtgtcgctgatcttgaaaaagccttgcgtgatatacgagcagagatagctgaggttaaatttacatctgagaaaaagataacagatgctcagtctcttgaggctagtttggaggaaaaatccttggagatcgagggaaaacttcatgctgcagatgccaaacttgcagaggcaaaccgcaagaagtctcaagctgaccgtgatttagaagaggcggaagctcgtcaacgtagactggagaaggagaaactgcggaaggcccgagaaaagcaacttaaggagcaggaggaatcactgcaggaatgggagaaaaagctgaaggaaagtcagaatagacttaatgagttgcagagatctataaatgagcgagaggagagagcaaataagaatgatcaacttttcaagataaaacaggacgaactggaggaggcacgaaggacagtggaggccgctaaagttactctgaaagtcaaagaggatgatattaacaaaagactaaatgaattacatttacaggaaaaggatgctgactcaaagcgcagtgcattggaagagcaggggaaaaaattggatgagagagaggcaaaggtcactaatagagaaaaggaggggctccagaagcttcttgaggatcatcaggtggagcttgaatccaaaagacgggattttgaattagaattagagagggaaaggaaatcttttgatcaaaatatgacacagaagcaagcggatttattgaaaagggagaaagatgttaaatctttggaggctaaactttctaaaagtgagcaggcattgaatgataagaagaaatcaatggaaaacttgcagaatgatcttgatgccaaatctaaggctctgaagagttgggatgaatcattgaaaaatgacgagaaaaggttactgaaagaaaagcagcaaatggatcatgaaagagaacaattggagacatacaaattggagcttgaaaagatcaaatcagcattagaagctgagaaggaaaaaatatcagaagagcagaataatctgaaactcacagcgcaagagaggcaggagcatagcttgttgatagcaaaacttaagaaggagattgaggaatacagaatgcgaagcaactccctatctgaggaaatggaggatttaaggaagcaacggcagaaatttgaagaagagtgggaacaactagacgaaaagagagccctccttgtagaggaggacaaaaggttgaacattgagaggatgaatttagaacggtggcgtgacaacgaagaaaaaaggttaaatgatatgaaactcaaaatggatgaagaatacaagcagcagctggagagtcttgagcgcaaggaaaaggctttgagtgatgatatgaagcacaagcaaatggaaaatgatgaatttctgaagggagaacgtgctgatgttcaacgtaaattgcaactcaaacggcatgaattggagatggagatggagcaaaaacaagccacgaaggagaaggaactggaagaaaaggaaaatgagttaaataagaaaatagattttgtggaaaataaactccgacatgcaattgagttgaatgagtccaagattgagaagttattattggagaaaagggaggtgcagatggaaagagaattactgctggaggaaagaaagaaaacggagactgacaaggcagatattagaagggatattgagagtctgcactcattgagcaagagtttgaaggaacgtcgagaggcatataacagggacaggagcagactcatcgaactatttgaaaagtacaaggcgtgcaaaaactgtgggatttctatttttgagggattggattctctgctgcttaaagacagtgctgaaattgagcatccaagtttggctgttgagggagatgatcatgccttgaccaccgatacatcaggtccagatacaggaacccttgttaattcaggtggtcgtttttctttgttacagaagtgttcaaggcttttcaagttctcccctagaaaaaagggtgagcagtcatcagaacaaccatcagagaggaatatatcttttggtgcaagactcgaggaagcaacacagagcgatggagattatgtgccaactcctgtctatgagatagcccacgattctttcaatgcagaggatgagctcccttctgacggtgaaaccagggagaatgaagagtctgaaaggcatgacatagctgataatgcccagatggagtcttctgttggtgtagcagataacagtatagatattctcggtactaagtcatttgatggtgctaacgacatggcagttgaagcaactattgtctctgttgatcaaaatggcgaggactctgtagttcctgctgaagcaggtgtagagcctgaaacatcagagcaaggtcggcgccagcaaaaccagagaggcagaagaaaaggtggtatgaaaagaacacggtctgttaatgctgtagttgaagatgctaagatgatacttggcgaggtttttgaggagaagactgatgatcagggagatacagtcaaggtgggtgctacacgaaagcggcggtttgctggagctacaataagtgaacaagatgaagaagggagcgaagcacattcagaaagtgtttcacttggagggcagcgccgtaagaggcggcaaactgctggggcagtgacagatgccccaggagaaagacgttacaatttgagacacagtagagctgcaaatgctggcgctgcaacagcccaagcagacaaaaaaaaatcttcaaaagcaagaaataaacatacagtagaagcttctgctgatgacaccgaaggaacatcaaaggttgttgaggaacctgcccctgagagcaagagggtatctgaatctgcagactacgatgcatcccagttgcatgagttttcccaggttgaagttggtgatgcccatgctgtagacggtgagggtgctggtgaggaagatggtgatattttggatggccaagatgcactgcctgatgtgccaatgacaccttctggaagcgagtttggagcggaacaggaagatgaggacgatgatgattcagagaggcgaaaccaatcaatcagcaagaagctatggtcattcttcactacatgacttgctgaagaggtcgtcatgtaggttatttctagcttttgtggtttcgattcatgataccccattcttggaactgtaggtcgtgtgcttttggtgattatgtactagatctcccacttgattgtgcttctctcccgtgtaattgaaatatatttgtagtggacatagtttgatggcactcacagaagtagctgatgagatgtacaatggcgatgatggtatgccctgtaaggctgtaacaccagtagcttggtttgtaattgttcttttcccccggttcgtgttacttcgttgaccttattccggggaaatattttagtgctgtgatgatggtctaaatgtttgttcgcctattgaaactaaatacaatgaattagaataccacagtccacaggagcttcg

SEQ ID NO: 44326 - DNA, 4071 bp, Zea Mays
gtgagggctcaccccgcagatccgttcggttttccattagcttggttcctgaggttcttggaattacgagggtttctgtcctgggcggtcaaaaattctgacttggaaaccctcggtgggccgcttcctggttcttgggagggagaggtgctttggttcctggatgagctgtgaaggaactgggagcaagaagaattgatgtttactccgcagggcaaaggatggaccggctggtcgacgccaactccggccaaccagcggagcggtggtggggctcctgctgcgtcggcgccccttggaaagggcaaaggaagggtcgccgagctcgagcaggagttgcatgaatatcagtacaatatggggcttcttttgattgaaaagaaagaatgggcagcaaaatttgaagaaatcagtgaagtgctgacacagaaagaggagatactgaagagggagcaggcggcacatctgaatgctatatcagagtatgaaaggcgggaggagaacatgcggaaagcactaggtgttgagaagcaatgtgtcgctgatcttgaaaaagccttgcgtgatatacgagcagagatagctgaggttaaatttacatctgagaaaaagataacagatgctcagtctcttgaggctagtttggaggaaaaatccttggagatcgagggaaaacttcatgctgcagatgccaaacttgcagaggcaaaccgcaagaagtctcaagctgaccgtgatttagaagaggcggaagctcgtcaacgtagactggagaaggagaaactgtattttgagacagagcggaaggcccgagaaaagcaacttaaggagcaggaggaatcactgcaggaatgggagaaaaagctgaaggaaagtcagaatagacttaatgagttgcagagatctataaatgagcgagaggagagagcaaataagaatgatcaacttttcaagataaaacaggacgaactggaggaggcacgaaggacagtggaggccgctaaagttactctgaaagtcaaagaggatgatattaacaaaagactaaatgaattacatttacaggaaaaggatgctgactcaaagcgcagtgcattggaagagcaggggaaaaaattggatgagagagaggcaaaggtcactaatagagaaaaggaggggctccagaagcttcttgaggatcatcaggtggagcttgaatccaaaagacgggattttgaattagaattagagagggaaaggaaatcttttgatcaaaatatgacacagaagcaagcggatttattgaaaagggagaaagatgttaaatctttggaggctaaactttctaaaagtgagcaggcattgaatgataagaagaaatcaatggaaaacttgcagaatgatcttgatgccaaatctaaggctctgaagagttgggatgaatcattgaaaaatgacgagaaaaggttactgaaagaaaagcagcaaatggatcatgaaagagaacaattggagacatacaaattggagcttgaaaagatcaaatcagcattagaagctgagaaggaaaaaatatcagaagagcagaataatctgaaactcacagcgcaagagaggcaggagcatagcttgttgatagcaaaacttaagaaggagattgaggaatacagaatgcgaagcaactccctatctgaggaaatggaggatttaaggaagcaacggcagaaatttgaagaagagtgggaacaactagacgaaaagagagccctccttgtagaggaggacaaaaggttgaacattgagaggatgaatttagaacggtggcgtgacaacgaagaaaaaaggttaaatgatatgaaactcaaaatggatgaagaatacaagcagcagctggagagtcttgagcgcaaggaaaaggctttgagtgatgatatgaagcacaagcaaatggaaaatgatgaatttctgaagggagaacgtgctgatgttcaacgtaaattgcaactcaaacggcatgaattggagatggagatggagcaaaaacaagccacgaaggagaaggaactggaagaaaaggaaaatgagttaaataagaaaatagattttgtggaaaataaactccgacatgcaattgagttgaatgagtccaagattgagaagttattattggagaaaagggaggtgcagatggaaagagaattactgctggaggaaagaaagaaaacggagactgacaaggcagatattagaagggatattgagagtctgcactcattgagcaagagtttgaaggaacgtcgagaggcatataacagggacaggagcagactcatcgaactatttgaaaagtacaaggcgtgcaaaaactgtgggatttctatttttgagggattggattctctgctgcttaaagacagtgctgaaattgagcatccaagtttggctgttgagggagatgatcatgccttgaccaccgatacatcaggtccagatacaggaacccttgttaattcaggtggtcgtttttctttgttacagaagtgttcaaggcttttcaagttctcccctagaaaaaagggtgagcagtcatcagaacaaccatcagagaggaatatatcttttggtgcaagactcgaggaagcaacacagagcgatggagattatgtgccaactcctgtctatgagatagcccacgattctttcaatgcagaggatgagctcccttctgacggtgaaaccagggagaatgaagagtctgaaaggcatgacatagctgataatgcccagatggagtcttctgttggtgtagcagataacagtatagatattctcggtactaagtcatttgatggtgctaacgacatggcagttgaagcaactattgtctctgttgatcaaaatggcgaggactctgtagttcctgctgaagcaggtgtagagcctgaaacatcagagcaaggtcggcgccagcaaaaccagagaggcagaagaaaaggtggtatgaaaagaacacggtctgttaatgctgtagttgaagatgctaagatgatacttggcgaggtttttgaggagaagactgatgatcagggagatacagtcaaggtgggtgctacacgaaagcggcggtttgctggagctacaataagtgaacaagatgaagaagggagcgaagcacattcagaaagtgtttcacttggagggcagcgccgtaagaggcggcaaactgctggggcagtgacagatgccccaggagaaagacgttacaatttgagacacagtagagctgcaaatgctggcgctgcaacagcccaagcagacaaaaaaaaatcttcaaaagcaagaaataaacatacagtagaagcttctgctgatgacaccgaaggaacatcaaaggttgttgaggaacctgcccctgagagcaagagggtatctgaatctgcagactacgatgcatcccagttgcatgagttttcccaggttgaagttggtgatgcccatgctgtagacggtgagggtgctggtgaggaagatggtgatattttggatggccaagatgcactgcctgatgtgccaatgacaccttctggaagcgagtttggagcggaacaggaagatgaggacgatgatgattcagagaggcgaaaccaatcaatcagcaagaagctatggtcattcttcactacatgacttgctgaagaggtcgtcatgtaggttatttctagcttttgtggtttcgattcatgataccccattcttggaactgtaggtcgtgtgcttttggtgattatgtactagatctcccacttgattgtgcttctctcccgtgtaattgaaatatatttgtagtggacatagtttgatggcactcacagaagtagctgatgagatgtacaatggcgatgatggtatgccctgtaaggctgtaacaccagtagcttggtttgtaattgttcttttcccccggttcgtgttacttcgttgaccttattccggggaaatattttagtgctgtgatgatggtctaaatgtttgttcgcctattgaaactaaatacaatgaattagaataccacagtccacaggagcttcg

SEQ ID NO: 44327 - DNA, 3085 bp, Zea Mays
ctcttcctctctgtcctctcccctgctgccgccccctttcccaaatctggccgcacgacgcaccagccaccaaccgcacacaccccaaacttgaaggcacaacccgagcgctcgcccgcctcgcctctgcgccgcgtccggccgccggtagcgggccggtcacttaccggaggggctccagaagcttcttgaggatcatcaggtggagcttgaatccaaaagacgggattttgaattagaattagagagggaaaggaaatcttttgatcaaaatatgacacagaagcaagcggatttattgaaaagggagaaagatgttaaatctttggaggctaaactttctaaaagtgagcaggcattgaatgataagaagaaatcaatggaaaacttgcagaatgatcttgatgccaaatctaaggctctgaagagttgggatgaatcattgaaaaatgacgagaaaaggttactgaaagaaaagcagcaaatggatcatgaaagagaacaattggagacatacaaattggagcttgaaaagatcaaatcagcattagaagctgagaaggaaaaaatatcagaagagcagaataatctgaaactcacagcgcaagagaggcaggagcatagcttgttgatagcaaaacttaagaaggagattgaggaatacagaatgcgaagcaactccctatctgaggaaatggaggatttaaggaagcaacggcagaaatttgaagaagagtgggaacaactagacgaaaagagagccctccttgtagaggaggacaaaaggttgaacattgagaggatgaatttagaacggtggcgtgacaacgaagaaaaaaggttaaatgatatgaaactcaaaatggatgaagaatacaagcagcagctggagagtcttgagcgcaaggaaaaggctttgagtgatgatatgaagcacaagcaaatggaaaatgatgaatttctgaagggagaacgtgctgatgttcaacgtaaattgcaactcaaacggcatgaattggagatggagatggagcaaaaacaagccacgaaggagaaggaactggaagaaaaggaaaatgagttaaataagaaaatagattttgtggaaaataaactccgacatgcaattgagttgaatgagtccaagattgagaagttattattggagaaaagggaggtgcagatggaaagagaattactgctggaggaaagaaagaaaacggagactgacaaggcagatattagaagggatattgagagtctgcactcattgagcaagagtttgaaggaacgtcgagaggcatataacagggacaggagcagactcatcgaactatttgaaaagtacaaggcgtgcaaaaactgtgggatttctatttttgagggattggattctctgctgcttaaagacagtgctgaaattgagcatccaagtttggctgttgagggagatgatcatgccttgaccaccgatacatcaggtccagatacaggaacccttgttaattcaggtggtcgtttttctttgttacagaagtgttcaaggcttttcaagttctcccctagaaaaaagggtgagcagtcatcagaacaaccatcagagaggaatatatcttttggtgcaagactcgaggaagcaacacagagcgatggagattatgtgccaactcctgtctatgagatagcccacgattctttcaatgcagaggatgagctcccttctgacggtgaaaccagggagaatgaagagtctgaaaggcatgacatagctgataatgcccagatggagtcttctgttggtgtagcagataacagtatagatattctcggtactaagtcatttgatggtgctaacgacatggcagttgaagcaactattgtctctgttgatcaaaatggcgaggactctgtagttcctgctgaagcaggtgtagagcctgaaacatcagagcaaggtcggcgccagcaaaaccagagaggcagaagaaaaggtggtatgaaaagaacacggtctgttaatgctgtagttgaagatgctaagatgatacttggcgaggtttttgaggagaagactgatgatcagggagatacagtcaaggtgggtgctacacgaaagcggcggtttgctggagctacaataagtgaacaagatgaagaagggagcgaagcacattcagaaagtgtttcacttggagggcagcgccgtaagaggcggcaaactgctggggcagtgacagatgccccaggagaaagacgttacaatttgagacacagtagagctgcaaatgctggcgctgcaacagcccaagcagacaaaaaaaaatcttcaaaagcaagaaataaacatacagtagaagcttctgctgatgacaccgaaggaacatcaaaggttgttgaggaacctgcccctgagagcaagagggtatctgaatctgcagactacgatgcatcccagttgcatgagttttcccaggttgaagttggtgatgcccatgctgtagacggtgagggtgctggtgaggaagatggtgatattttggatggccaagatgcactgcctgatgtgccaatgacaccttctggaagcgagtttggagcggaacaggaagatgaggacgatgatgattcagagaggcgaaaccaatcaatcagcaagaagctatggtcattcttcactacatgacttgctgaagaggtcgtcatgtaggttatttctagcttttgtggtttcgattcatgataccccattcttggaactgtaggtcgtgtgcttttggtgattatgtactagatctcccacttgattgtgcttctctcccgtgtaattgaaatatatttgtagtggacatagtttgatggcactcacagaagtagctgatgagatgtacaatggcgatgatggtatgccctgtaaggctgtaacaccagtagcttggtttgtaattgttcttttcccccggttcgtgttacttcgttgaccttattccggggaaatattttagtgctgtgatgatggtctaaatgtttgttcgcctattgaaactaaatacaatgaattagaataccacagtccacaggagcttcg

SEQ ID NO: 44328 - DNA, 4091 bp, Zea Mays
gccctcttcctctctgtcctctcccctgctgccgccccctttcccaaatctggccgcacgacgcaccagccaccaaccgcacacaccccaaacttgaaggcacaacccgagcgctcgcccgcctcgcctctgcgccgcgtccggccgccggtagcgggccggtcacttaccgggagggagaggtgctttggttcctggatgagctgtgaaggaactgggagcaagaagaattgatgtttactccgcagggcaaaggatggaccggctggtcgacgccaactccggccaaccagcggagcggtggtggggctcctgctgcgtcggcgccccttggaaagggcaaaggaagggtcgccgagctcgagcaggagttgcatgaatatcagtacaatatggggcttcttttgattgaaaagaaagaatgggcagcaaaatttgaagaaatcagtgaagtgctgacacagaaagaggagatactgaagagggagcaggcggcacatctgaatgctatatcagagtatgaaaggcgggaggagaacatgcggaaagcactaggtgttgagaagcaatgtgtcgctgatcttgaaaaagccttgcgtgatatacgagcagagatagctgaggttaaatttacatctgagaaaaagataacagatgctcagtctcttgaggctagtttggaggaaaaatccttggagatcgagggaaaacttcatgctgcagatgccaaacttgcagaggcaaaccgcaagaagtctcaagctgaccgtgatttagaagaggcggaagctcgtcaacgtagactggagaaggagaaactgcggaaggcccgagaaaagcaacttaaggagcaggaggaatcactgcaggaatgggagaaaaagctgaaggaaagtcagaatagacttaatgagttgcagagatctataaatgagcgagaggagagagcaaataagaatgatcaacttttcaagataaaacaggacgaactggaggaggcacgaaggacagtggaggccgctaaagttactctgaaagtcaaagaggatgatattaacaaaagactaaatgaattacatttacaggaaaaggatgctgactcaaagcgcagtgcattggaagagcaggggaaaaaattggatgagagagaggcaaaggtcactaatagagaaaaggaggggctccagaagcttcttgaggatcatcaggtggagcttgaatccaaaagacgggattttgaattagaattagagagggaaaggaaatcttttgatcaaaatatgacacagaagcaagcggatttattgaaaagggagaaagatgttaaatctttggaggctaaactttctaaaagtgagcaggcattgaatgataagaagaaatcaatggaaaacttgcagaatgatcttgatgccaaatctaaggctctgaagagttgggatgaatcattgaaaaatgacgagaaaaggttactgaaagaaaagcagcaaatggatcatgaaagagaacaattggagacatacaaattggagcttgaaaagatcaaatcagcattagaagctgagaaggaaaaaatatcagaagagcagaataatctgaaactcacagcgcaagagaggcaggagcatagcttgttgatagcaaaacttaagaaggagattgaggaatacagaatgcgaagcaactccctatctgaggaaatggaggatttaaggaagcaacggcagaaatttgaagaagagtgggaacaactagacgaaaagagagccctccttgtagaggaggacaaaaggttgaacattgagaggatgaatttagaacggtggcgtgacaacgaagaaaaaaggttaaatgatatgaaactcaaaatggatgaagaatacaagcagcagctggagagtcttgagcgcaaggaaaaggctttgagtgatgatatgaagcacaagcaaatggaaaatgatgaatttctgaagggagaacgtgctgatgttcaacgtaaattgcaactcaaacggcatgaattggagatggagatggagcaaaaacaagccacgaaggagaaggaactggaagaaaaggaaaatgagttaaataagaaaatagattttgtggaaaataaactccgacatgcaattgagttgaatgagtccaagattgagaagttattattggagaaaagggaggtgcagatggaaagagaattactgctggaggaaagaaagaaaacggagactgacaaggcagatattagaagggatattgagagtctgcactcattgagcaagagtttgaaggaacgtcgagaggcatataacagggacaggagcagactcatcgaactatttgaaaagtacaaggcgtgcaaaaactgtgggatttctatttttgagggattggattctctgctgcttaaagacagtgctgaaattgagcatccaagtttggctgttgagggagatgatcatgccttgaccaccgatacatcaggtccagatacaggaacccttgttaattcaggtggtcgtttttctttgttacagaagtgttcaaggcttttcaagttctcccctagaaaaaagggtgagcagtcatcagaacaaccatcagagaggaatatatcttttggtgcaagactcgaggaagcaacacagagcgatggagattatgtgccaactcctgtctatgagatagcccacgattctttcaatgcagaggatgagctcccttctgacggtgaaaccagggagaatgaagagtctgaaaggcatgacatagctgataatgcccagatggagtcttctgttggtgtagcagataacagtatagatattctcggtactaagtcatttgatggtgctaacgacatggcagttgaagcaactattgtctctgttgatcaaaatggcgaggactctgtagttcctgctgaagcaggtgtagagcctgaaacatcagagcaaggtcggcgccagcaaaaccagagaggcagaagaaaaggtggtatgaaaagaacacggtctgttaatgctgtagttgaagatgctaagatgatacttggcgaggtttttgaggagaagactgatgatcagggagatacagtcaaggtgggtgctacacgaaagcggcggtttgctggagctacaataagtgaacaagatgaagaagggagcgaagcacattcagaaagtgtttcacttggagggcagcgccgtaagaggcggcaaactgctggggcagtgacagatgccccaggagaaagacgttacaatttgagacacagtagagctgcaaatgctggcgctgcaacagcccaagcagacaaaaaaaaatcttcaaaagcaagaaataaacatacagtagaagcttctgctgatgacaccgaaggaacatcaaaggttgttgaggaacctgcccctgagagcaagagggtatctgaatctgcagactacgatgcatcccagttgcatgagttttcccaggttgaagttggtgatgcccatgctgtagacggtgagggtgctggtgaggaagatggtgatattttggatggccaagatgcactgcctgatgtgccaatgacaccttctggaagcgagtttggagcggaacaggaagatgaggacgatgatgattcagagaggcgaaaccaatcaatcagcaagaagctatggtcattcttcactacatgacttgctgaagaggtcgtcatgtaggttatttctagcttttgtggtttcgattcatgataccccattcttggaactgtaggtcgtgtgcttttggtgattatgtactagatctcccacttgattgtgcttctctcccgtgtaattgaaatatatttgtagtggacatagtttgatggcactcacagaagtagctgatgagatgtacaatggcgatgatggtatgccctgtaaggctgtaacaccagtagcttggtttgtaattgttcttttcccccggttcgtgttacttcgttgaccttattccggggaaatattttagtgctgtgatgatggtctaaatgtttgttcgcctattgaaactaaatacaatgaattagaataccacagtccacaggagcttcg

SEQ ID NO: 44329 - DNA, 4036 bp, Zea Mays
agcactgccctcttcctctctgtcctctcccctgctgccgccccctttcccaaatctggccgcacgacgcaccagccaccaaccgcacacaccccaaacttgaaggcacaacccgagcgctcgcccgcctcgcctctgcgccgcgtccggccgccggtagcgggccggtcacttaccgggcaaaggatggaccggctggtcgacgccaactccggccaaccagcggagcggtggtggggctcctgctgcgtcggcgccccttggaaagggcaaaggaagggtcgccgagctcgagcaggagttgcatgaatatcagtacaatatggggcttcttttgattgaaaagaaagaatgggcagcaaaatttgaagaaatcagtgaagtgctgacacagaaagaggagatactgaagagggagcaggcggcacatctgaatgctatatcagagtatgaaaggcgggaggagaacatgcggaaagcactaggtgttgagaagcaatgtgtcgctgatcttgaaaaagccttgcgtgatatacgagcagagatagctgaggttaaatttacatctgagaaaaagataacagatgctcagtctcttgaggctagtttggaggaaaaatccttggagatcgagggaaaacttcatgctgcagatgccaaacttgcagaggcaaaccgcaagaagtctcaagctgaccgtgatttagaagaggcggaagctcgtcaacgtagactggagaaggagaaactgtattttgagacagagcggaaggcccgagaaaagcaacttaaggagcaggaggaatcactgcaggaatgggagaaaaagctgaaggaaagtcagaatagacttaatgagttgcagagatctataaatgagcgagaggagagagcaaataagaatgatcaacttttcaagataaaacaggacgaactggaggaggcacgaaggacagtggaggccgctaaagttactctgaaagtcaaagaggatgatattaacaaaagactaaatgaattacatttacaggaaaaggatgctgactcaaagcgcagtgcattggaagagcaggggaaaaaattggatgagagagaggcaaaggtcactaatagagaaaaggaggggctccagaagcttcttgaggatcatcaggtggagcttgaatccaaaagacgggattttgaattagaattagagagggaaaggaaatcttttgatcaaaatatgacacagaagcaagcggatttattgaaaagggagaaagatgttaaatctttggaggctaaactttctaaaagtgagcaggcattgaatgataagaagaaatcaatggaaaacttgcagaatgatcttgatgccaaatctaaggctctgaagagttgggatgaatcattgaaaaatgacgagaaaaggttactgaaagaaaagcagcaaatggatcatgaaagagaacaattggagacatacaaattggagcttgaaaagatcaaatcagcattagaagctgagaaggaaaaaatatcagaagagcagaataatctgaaactcacagcgcaagagaggcaggagcatagcttgttgatagcaaaacttaagaaggagattgaggaatacagaatgcgaagcaactccctatctgaggaaatggaggatttaaggaagcaacggcagaaatttgaagaagagtgggaacaactagacgaaaagagagccctccttgtagaggaggacaaaaggttgaacattgagaggatgaatttagaacggtggcgtgacaacgaagaaaaaaggttaaatgatatgaaactcaaaatggatgaagaatacaagcagcagctggagagtcttgagcgcaaggaaaaggctttgagtgatgatatgaagcacaagcaaatggaaaatgatgaatttctgaagggagaacgtgctgatgttcaacgtaaattgcaactcaaacggcatgaattggagatggagatggagcaaaaacaagccacgaaggagaaggaactggaagaaaaggaaaatgagttaaataagaaaatagattttgtggaaaataaactccgacatgcaattgagttgaatgagtccaagattgagaagttattattggagaaaagggaggtgcagatggaaagagaattactgctggaggaaagaaagaaaacggagactgacaaggcagatattagaagggatattgagagtctgcactcattgagcaagagtttgaaggaacgtcgagaggcatataacagggacaggagcagactcatcgaactatttgaaaagtacaaggcgtgcaaaaactgtgggatttctatttttgagggattggattctctgctgcttaaagacagtgctgaaattgagcatccaagtttggctgttgagggagatgatcatgccttgaccaccgatacatcaggtccagatacaggaacccttgttaattcaggtggtcgtttttctttgttacagaagtgttcaaggcttttcaagttctcccctagaaaaaagggtgagcagtcatcagaacaaccatcagagaggaatatatcttttggtgcaagactcgaggaagcaacacagagcgatggagattatgtgccaactcctgtctatgagatagcccacgattctttcaatgcagaggatgagctcccttctgacggtgaaaccagggagaatgaagagtctgaaaggcatgacatagctgataatgcccagatggagtcttctgttggtgtagcagataacagtatagatattctcggtactaagtcatttgatggtgctaacgacatggcagttgaagcaactattgtctctgttgatcaaaatggcgaggactctgtagttcctgctgaagcaggtgtagagcctgaaacatcagagcaaggtcggcgccagcaaaaccagagaggcagaagaaaaggtggtatgaaaagaacacggtctgttaatgctgtagttgaagatgctaagatgatacttggcgaggtttttgaggagaagactgatgatcagggagatacagtcaaggtgggtgctacacgaaagcggcggtttgctggagctacaataagtgaacaagatgaagaagggagcgaagcacattcagaaagtgtttcacttggagggcagcgccgtaagaggcggcaaactgctggggcagtgacagatgccccaggagaaagacgttacaatttgagacacagtagagctgcaaatgctggcgctgcaacagcccaagcagacaaaaaaaaatcttcaaaagcaagaaataaacatacagtagaagcttctgctgatgacaccgaaggaacatcaaaggttgttgaggaacctgcccctgagagcaagagggtatctgaatctgcagactacgatgcatcccagttgcatgagttttcccaggttgaagttggtgatgcccatgctgtagacggtgagggtgctggtgaggaagatggtgatattttggatggccaagatgcactgcctgatgtgccaatgacaccttctggaagcgagtttggagcggaacaggaagatgaggacgatgatgattcagagaggcgaaaccaatcaatcagcaagaagctatggtcattcttcactacatgacttgctgaagaggtcgtcatgtaggttatttctagcttttgtggtttcgattcatgataccccattcttggaactgtaggtcgtgtgcttttggtgattatgtactagatctcccacttgattgtgcttctctcccgtgtaattgaaatatatttgtagtggacatagtttgatggcactcacagaagtagctgatgagatgtacaatggcgatgatggtatgccctgtaaggctgtaacaccagtagcttggtttgtaattgttcttttcccccggttcgtgttacttcgttgaccttattccggggaaatattttagtgctgtgatgatggtctaaatgtttgttcgcctattgaaactaaatacaatgaattagaataccacagtccacaggagcttcg

SEQ ID NO: 44330 - DNA, 1224 bp, Zea Mays
gatggttcttggccttcttgccatgaacgacaagcaacgtgacaaaaagaaaaacacggacgacatctcctgaccgctgcgtctcgtgcttttggcgtctgagcgcgctcgcaagtcgccgtctcgccgatcaggttcttttcttggcagacacaggattgtgtaagttccgccggagctcggaagccggaagccggaagcatatccacggcgcacggtttccacttccacaggcgtcaggggcagcagcagcccccgcggcggcggtgtgtccagcagcctccagcgtcgtggctcgtgggggtttcgaatattcgttgcgttgcgttagccatgaggccgcggcggtacgcgtaccgtaatcagtgattggtagccaaaacattgttcttagaccgcccgagtttgtccttgattccaaaacaacaggtttggcttgtatatgagaagcctggaatctggtgaatctcgaatctgcttcgctttttttttcttcaagtttgtagtcatgattgattacaagatatgcaaatttcaagtccaaagattggaagcagacaatgatgaattagggtaagtactacctgagtttgaggtgcattgtcatcttgatctgcatcttcatcaatttttttcttctttgagttggtttcccctttcatttttgtttgcatctctaccttatgtttttccgttctggtagctgtctgttcgttgtccttcaagattgttctcttattgggttttggatcttgatccaccatgatcatttgttatcggggtttggttttagatgttctctagctcttttgtgtcgtttgcctttttgtttggcggaaaatttgtctttggcgcatcaaaaaatcaatcgaatgttttgttttcgtttgttgtttgtacttactagctcacatgtgcaagatgacgcattgacaagatgacaagccaagaacaggagaagcaagacatcttagggctagtttgggaacactaattttccatgggattttcattttcccaagggaaaatgaactaatttcccttaggaaaatgaaaattccattggaaattagtgttcccaaactagcccttaggggtgtttggaagcgaagttttttcacagttttagaagaatactgcattattctcaaatactgcagtattatatacagaatggtgtttggcaagctggctaaaatctctgttttcaaaactgaagtattg

SEQ ID NO: 44331 - DNA, 2239 bp, Zea Mays
cgagatcgttctcgcctccctccgctccccttcccctcgtgcgcagtgcgctcctcgagcaccccacactccagatctccgaacccctcccacatgccattgccattgcactgagcggcagccaatagccaactagccacacgccatggcgcagtcctgtagttggggaatcctcctcgccgtcctcgtcgcgggactcgcggcggccgtcgccgtcccgccggcgaccgcggcggtggcgagcatcgacctcggctcggagtggcttaaggtcgcggctgtgcatcttgccccgggccgtgctccgatcgctgttgccaccaacgagatgtccaagcgcaagtccccggccctcgccgcgctcgccgacggcaaccgtctcattggggaggaggcggcgggcatcacggcgcggcacccgtccaaagtattcgcccgcgcgcgggacctcttggccaagcccttctcctacgtgcagtccgtcacggagtcgctcttcctcccctacgacctcgtccccgacgcgcgcggcgccgccgcggtccgcgccgatgacgggcaggtatactccctcgaggagatcgtcgccatggtgctccactatgccgcggggctcgccgatgcgcacgttggggcgcccgtgcgggacgctgtgatcgccgtgccgccctacttcgggcaggccgagcgccgggcgttgacgcaggccacgcagctggctggaatcaacgtgcttgctctcatcaacgagcacgctggggccgcgcttcagtacgggattgacaaggacttctccaatgcgtcgcggcatgtcatcttttacgacatgggcgctggtagcacctatgctgcattagtgtgctactcggcatacaacgccaaggagttcggaaagacagtctccgttaaccagttccaggttaaggacgttagatggaactctgaacttggaggcgtcgaaatggaaatgcgtctggtcaactattttgctgatcaattcaataagcagctcggtaatgtggttgatatccgtcagtctcccaaggcaatggctaagttgaaaaagcaagtcaaacgcaccaaagaaattcttagtgcaaacactgcagctccaatttcagtagaatctctgtataatgatgttgatttcaggagtagcataacacgtgagaaatttgaagagctctgtgaggatttatgggagcaagctctgactccagttaaagaagtgctgacacattctggcatgaagatcgatgatatctatgctgtagaactaataggaggagctaccagggttccaaaactgcaggctaaactgcaggaatttctgggtcggcgcgggctggataaacatcttgatgctgatgaagcaattgttcttggagcttcacttcatgctgctaacctgagtgacgggattaagttgaaccgtaagttgggaatgattgatggctccacttatgctttggtacttgagatagatggtccgggttatttcaaggatgaaagcattgatcaaattttggtgccaagaatgaagaaaatgccaataaagatgtttagatccatcagacataccaaggattttgatgtgtctctcaactatgacaaagcttatgaactgcctccaggcattccatcacacaagtttgcagagtattctgtatcgggactgacagatgccagtgaaaacactcccattgatgagggcaatgttcaagaaattattgcagagaatgtgctaaagaaaagaacatttagggttccattgaaggttgtggaaaaaacaactggtgctggaacaattctttcaaaggagttgtattctgaagcaaaaaataggttagaggcactcgataagaaggatgctgagcggaggaaaactgctgaacttaagaataacctagagtcatacatatattctatgaaggagaagttggaagaaagcacaggtattttgactgtctcaactgaacaggagagggaatcctttgcgcagaaacttagtgaggtgcaggattggttgtacatggacggtgaagatgctcaagctaatgaattcaaagagcgccttggtcaacttaaggccattggtgatccgattcttttcagattgagtgaattaaaagcccgaccagctgcctgtgaaaatgctcgattgtatcttgatgagctgcaaaagatttggcggagtattccccagaggacgtgggtagccgtctgtgccaatcaagaa

SEQ ID NO: 44332 - DNA, 258 bp, Zea Mays
atgggagagcaggcgattcgagctgttgattgggaatctaaccgagctgctcacctgcagattggaattggatcgatggatggaccgcggacgcccgcacgccgattggatctcctcctccttgggcggctgctaactgggttgggatgggacaggagccttcctcgccacagccgccgtgccgtgctgctcctcttctccgagacgctgggagccccgattggagacgtctggaagacgggaggcggagaggtatga

SEQ ID NO: 44333 - DNA, 5663 bp, Zea Mays
gctagatattgatctcgccagaaagtggcccaactcaatagccaggacagccttcgccagaccgtggcccatctccgactactttatcgccagcatgggttgtcgcggctgtgatatcatgtcccctggtatgatgatatactgccacaaggcttagaattaatagagtatccataccaacgaggtgcatcttctttttcggaagcctatctcgtaaaaaccttcaagttaagtgtgtttggcttatagcaatttaggatgggtgaccaaccgggaagttatctcgggtgcgcataagtgaggacaaaatgcgcacaaaaggctcgtgttggtctgtggggacaatatatgatcctagagagctgccaggagtaagtatcgtcggtccgagaatggacggggtgttacaagtgatatcagagccgaccctcgcggtttcacggacatgtgtgggttaggggttcgggtatatggcgcatggcgcatgtgggcccagaatggtcacatggcatgacatatgacgacactagacatacagacgtggccaagaggggaggttcctggattggggttgaccgacgaggacgtcggtcttctaagggagtggattgtgatatcctggccccttagatggtgatatcctggcccaaggcttaatagaattaatagagtatccataccaacgaggtgcatcttctttttcgaaagcctatctcgtaagaacctccaagttaaacgtgcttggcttggagcaattagggatgggtgaccgaccggaaaattttctcgggtgcgcatgagtgaggacagtgtgcacaacaggcgtgtgttggtctgtggggacaatatatgatcctagagagctgccaggagtaagtaccgccggtccgggagtggacggggtgttacagcggcccaacgttgtggggagggggtttcgcatactcacgtcgcccacatgccccctgcaccttcaggacttgtcttggccttcgttccgacttcagctcctactcgtctccctgttggggccattcctgtcattcatgtggtaaatcagcacgccatgacgacacgtgcgaagtccggcttccggctattggcgctcgactcctctatcgtccatcctattgttttaccgcgtagctctcactgaccccaaccatcgtctagctatgcaagagttctctacacttcttggtaaccactcttgggatctagttcagcgaccacctcgctccaatgtggtgactaccaagtgggtgttcgagcacaagttcatggctgatggttcacttgagtgctataaagcatgttgggtcctttgtagtttcactcaacaccccatgtttggtcacgataaatcttacctcctactctatgtggatgacatcgtgtcgcctctccttcgtcgcatcatcagagctctttgaaagggaattagggttacacctagtccctaattaattttggtggttgaattgcccaacacaaataattggactaactagtttgctctagtgtataagatatacaggtgtaaaaggttcacactcagccaataaaaagatcaaatattggattcaacaaaggagcaaagggacaaccgaaggcacctctggtctggggcaccggactgtccggtgtacaccggacagtgtccggtgcaccagaggaatccaactccaactcgtcaccttcgggaaaatccagagccggcgcgctataattcaccggactgtccggtgtacaccggaggaatccaactccaactcgtcacattcgggaaaatccagagccggcgcgctataattcaccggactgtccggtgtacaccggacagtgccggtgctccaacgagacgcggctctggaactcgccagcctcgggatttcacgaaggttgctccgctataattcaccggacatgtccggtgtgcaccggactgtccggtgtaccagcggagcaacgactatttcggcgccaacggctacctgcgatgcatttaatgcgtgcgcagcgcgcgcagaaggcaggcgcgcccatactggcgcaccggacaatgaacatgagatgtccggtgtgcaccggacacccaggctggcccacaagtcagaagctccaacggtcagaatccaacggcactggtgacgtggctggggcaccggacatgtccggtgtgcaccggactgtccggtgcgccatcgaacagacagcctccaccaacggtcaagtttggtggttggggctataaataccccaaccaccccaccattcattgtatccaagttttccacttctcaactacttacaagagctaggcattcaattctagacacatcaaagagatttgtcgtgttcttttgagctcttgcgcttggattgcttcttttctttctcacttgttcttgtgatcaaaactccattgtaatcaaggcaagaggcaccaattgtgtggtggcccttgcgggaagtttgattcccaagtgatttgagaagagaagctcactcggtccgagggaccgtttgagagagggaagggttgaaagagacccggcctttgtggcctcctcaacgggaagtaggtttgcgagaaccgaacctcggtaaaacaaatccgcgtgtcacactcttcatttgcttgtgatttatttttcaccctctctcgcggactcgtttatatttctaacgctaacccggcttgtagttgtgtttatatttgtaaatttcagtttcgccctattcaccccccctctaggcgactatcactcttcaatgtttgatatgaaggatttggacagccttcattatttctaggcatgcatgttcaacacactgcttcttccgttctgcttctgtctcagcgacaatatatgctggatattctagatcgtgctcgaatggttgactgtaagccgtgctccactcatgttgatcattatccgatgttgtatgttgatggtgctcctatattcggtcctacaatttttttccatccacgctggtgctctacaatacctcactttcactcgaccggatattgcatacgccactcaacaggcgtgtctccatatgcatgaccagcgagagcctcatcttgtagcaatcaagtgtattctgcgttatattcgtggcactttggacttgggtcttcacatacattcttctattcagtctaaccgtgtggtctactcagacactgattgggctggtaatcctgatacccgtaagtctactttaggctatatgtgttcctcgatgataattcatctcttagtctttcaaacgttagaatactatctctcgttctagtgcagtcgtcgaggcttcctagttacgtcagctcttgattgagctgcaaacttcattgtgctctgccactttgagataagattagcatagtttatatgtcttccaatcatgttcatcaccagcgcactgaacacattgagattgatctccacttcattcgagaacgggtggccttaaggtctgttcgcatacttcatcttccagcgtctcagttcacaaacatatttaccaaagggctgtcagtttctatgttcatggagtttcggtcctatctcaaggttctcctcaatgatgtcgtgactgcaggagggtgctagactgctatatatgtctagcggatatgtctccatgtgcatgatccacaagagcctcacttgactattgtcaagcggatccttcgataccttaacaatactctggactatgggcttctattctaacgctcctctacacgcgagttgatcatctacaaggatgctgactgggcgggtgcctagaaatatgttggtctacttcaggctatgttgtgttccttgaggacaacctcatctcatggtcctccaagcgccaacccatggtcttctactccagcgcgaggatgagtcgtcgtggccaatggcatggctaaggcgtgctggctccgatagctcctccaagagctccacagcccctcatcacgagcaatcttctactgcaacaatgtaagcatcgtctacctcaccatcaaccgggtacatcactagcgcgcgaaacatgttgggattgatctccacttcgcccaagcgtgtagccatcaaaaacgtttgtgtcctccacatctcgaagatctcgtagttcgctgacatcttcaccaagggacctccatcctcggtgttctcggagtttcgatccagtctctacatttggtgtagctagagttttgactgcggcgggtgttagtctgctatcactaagtgtgtggttgtgtatggacctagagcgtaatgcgtaacccatgtggcctattagggttagggtagagctataagaagatgcctatatatgtgtaaccctgacactcaatcaatgcaattttaggcctcctccaatagtcaaggttgttcccataagaaaaagagtcaaaatttatctttttttcttcatgaacatgcatgagagttgcatatcattatattaaaaagaaaaatgtctataaccatacgccaaatagacagccatatttttctcactattgctgagaatgatcctgtaaaggactaccttcttggtagaattaatttgataatttcaattcttctataataaaacaagattggcaacattatcctatcccactattgcaattcatatattagactcgaatctgtgataaatatactagaaagaacgtggaagttaaaattagataggaggatgcaacattgcgatcccccgatggtgctggcattaggataaattgtgatcatgcattcaaagatacaataaatttacagagtgaagtcacatacaactctaatacgagcagagagtgcatcaaatagtagcattcttccacataggggctcaccaacaccagttgcaacctttatagcctccagagcttgtaagcaaccaatcactcccggaactagtaaacgaaacaatagttagtacaccagtgcaaactatgtctaataaagtaatcaacagggcatcagtcatatatagcagcaaactatacaaactaattatacaatagctaacttaactgaggcgcctacacgataaaagcacagtaaataccacagtattaaagaacatcctaagggctgatttggtgatccgggatcacgggaggattggaggggattgagggggaaattagttcatttccccctcaatcccccccccccccccgtgatccccttgtcaccaaattaaccctaaagaaaaagccattttagtaattgcatcattgagtgaaccaacaaaaacctgtagccactgaataattaaggattaatatggacatgaaaaaagattaaaaatacacaacatcagagccaactcatgacttaaactgtcctatttgggttaagtacacatcatataaacaaagattgatgaattttaaacaggttgacaaaaaatataagtttttgtccaccgtactaatgacgagcttctacagtgtcacctaccaaccccaaggacaccactgtctgagcatctctggcaggctgccacaggtggtggagttggaaagaggcaccgatagcatgggcttccattatgatgataaacagtcaactgttagagaagacaatgaatgatgtaagaatatggtgaagcaaaagggtgcaatatctttg

SEQ ID NO: 44334 - DNA, 496 bp, Zea Mays
cgacaattctggtttatccttctccagaggattgggcttgctggtgtggcaccgcaaccgggtgaagaggacttcatggcatggtggaaaggcatctccgctcccttggggggatcttctcaggctggccttaattccatagtgatcttgggggcgtggtgtctttggaagcatcggaatgattgtgttttcaatgggatgagtccaaatctttctgctgccttagccggttggaaatgatattatgctttggaagctggctggtgccaaaggtctgtcgctgccagatgttgctacctaagtgattttgtgtttcatgtgtgattgtgtgtttggggctgttatgtttgtctatgtttctctcctcttgtaatcccatgtaattcttgtgtggcctcttggctatgacttttgtgtttttgcttcttctattaatataaaaaatacgcaattctcttgcgtattcgagaaaaataatgttgttgccagaatagac

SEQ ID NO: 44335 - DNA, 1174 bp, Zea Mays
tagtttcttcacccgtgctctctccctcatcccctgcgcataggaagccagctccttcacgtcgcctcctccctaggcggcgatcctacagagcctcgccggtcatccctgctccctcggcgtctctcccatggcgccctccctgctccttcacatggtgtggacgccagccccctctcttgttgccatggatagcccctctcccatctccttccccaagcacaagtcccatggtcgcccaaccccagctcgccctgccccagccatggacgctgtcgagccgcccgtttcctatctcccctcgccttcatcctctggctgccgcccctccctggatttcgccctctctactcgtcgatcttctctgttgtggcgcgcactggctgtcttccacctccatcggaccacgccgagctccctccttgctccagtcttctccatggtcgctcctctcctttccctgattaatactagacgcagcagcaacatgccagatctctgtagcccaggaaatttagatgagaagaaagctttagcgaggcgcttgccaagtgcttggtgaatcgcctcaaccggatatggttgtcgatctcgcggagtcgagtcgagtttagtcgtgatacgttaattaatcacgtgatgtggaggacaagagctggattaatcataagacgatgctgatggacgaagctaaagtggatgaatcaaccaagtgccaggatggaagatgctcaccaagtggtcgtcaattaataacactaacgtagtgtttatcccaggcaagccccggtgcatttgccaccttcttgctgttttaaaaatattttatcacttatatgctgcattaggtggtaggagttgaatggttaaacctttgctgcataacttccttgaattattgattatcatccttgatacctgatttgaaaagctagatatgcttagcctgcttatagacaaggaacaaaatattttgatgtatgaatcatgtttttacaaggaaaaaggggctggaatgatgaaggtatcaaaggccttgatgacttcatcatttcagtagggtacctctgacaggtaccaggttttcagaattattttaatatgagaccagacgttgagcaggaaaggtcgcccgtctgtgtcgattaaggaccgcaccgaaagtaggcttgct

SEQ ID NO: 44336 - DNA, 639 bp, Zea Mays
tagtttcttcacccgtgctctctccctcatcccctgcgcataggaagccagctccttcacgtcgcctcctccctaggcggcgatcctacagagcctcgccggtcatccctgctccctcggcgtctctcccatggcgccctccctgctccttcacatggtgtggacgccagccccctctcttgttgccatggatagcccctctcccatctccttccccaagcacaagtcccatggtcgcccaaccccagctcgccctgccccagccatggacgctgtcgagccgcccgtttcctatctcccctcgccttcatcctctggctgccgcccctccctggatttcgccctctctactcgtcgatcttctctgttgtggcgcgcactggctgtcttccacctccatcggaccacgccgagctccctccttgctccagtcttctccatggtcgctcctctcctttccctgattaatactagacgcagcagcaacatgccagatctctgtagcccaggaaatttagatgagaagaaagctttagcgaggcgcttgccaagtgcttggtgaatcgcctcaaccggatatggttgtcgatctcgcggagtcgagtcgagtttagtcgtgatacgttaattaatcacgtg

SEQ ID NO: 44337 - DNA, 2008 bp, Zea Mays
ttcccctctcgacctgcctttaattcggggaccgcgcccgccgcacgctctcccgtcccgtccgtctctccgactccctccgcgcgtcggtacggtggctctgctgatccgccccgtgcctgccatatagctgcacccgccgccacgtctagacccttcttctcgctccctcactagcccgtccctgcacctataagcggcctctccttgcctgccccctctcgcttgctgcttgctgcctttcacgcggagtgaggcagccgacggggttgctaaaggtagaacgaagcttccgcagcacagcgtcgtcgtcgaggagataaggtccagacagaggtctctagccgtgcagcggtgctgtcgttggtggcggccggcgacttggagctgtcgaggtaagcaagctggtgtggcggcgattggagctgtcgactggagcgcgcccgatccaccagagaccgtgaagctggcggccggcaagtggtgggagcggccagatgacacgggcatgcccggaatggacccaggcgggggcggcagctcgcgctacttccaccagctgctgcggccgcagcagcagcagccctcgccgctgtcgcccaattcccacgtcaagatggagcaccacaggatgtctccagacaagagccccgtcgtcggcgaggccgacgctggcgggagcggggccggcggcgaccagccgtcctcgtcggccatggtcccagtcgagggtgggggcagcggaacgggcacgcccacgcggcggccgcgcggccgcccggcgggctccaagaacaagcccaagccgcccatcatcgtgacgcgcgacagccccaacgcgctgcactcgcacgtgctggaggtggcggcgggcgccgacgtcgtggactgcgtcgcggagttcgcgcggcgccggggccgcggcgtgtgcgtgctcagcggcgggggcgccgtcgccaacgtggcgctcaggcagcccggcgcgtcgccccccgggagcatggtggccacgctgaggggccggctggagatcctctccctcaccggcacggtgctgccgccgcccgctccccccggcgccagcggcctcacggtgttcctctccggcgggcagggccaggtcgtcggcgggagcgtggtgggcccgctggtcgccgcgggccccgtcgtcctgatggccgcgtcgttcgccaacgccgtgtacgagcggctcccgctggagggggaggaggaggaggatgagacggcggcgggcgccgccggagccgaaccacaagatcaggtggcacagtcgtcggctggaccaccgggtcagcagccgacggcgtcccagtcctctggtgtgaccggaggcgatgccggcatgtcactctacaacctcgccgggaatgtaggggcataccagctaccgggagacagcttgggaggctggagtggcggcggagtccggccaccgttttagtccaaagtccatgccttgagagatatccgattcgcatcatccacaccatccgagaaccgggagttgaagctaccctgagacatcatgtatatgcaattattgtatgcatgctggatcattgttgataggagagaaggatctttcatctgggcgccatacaatataatgcatatgcgtttacacacgtggaggatgcattgcaaatcatgatgtgttttaaagacgatttatcaaatgcaagaggggaagaagctagagattggatgcatgcaagagctagctcaataaactaaaggtcagtagtagtgagatccgatgtttcgtgtttccaacttttcctctctttttccctttttttttcatgttcatttgtatttgtgttaattatattctgattgtgtgtctctcgcagtcaatcgctgtagaatggtgttttctgttataaacaatttggtcatcgcctcctctacgatcgctttaattaacccatgcatgttacagcaactctttcatgcatggtcgctctcacatacatttccttttttt

SEQ ID NO: 44338 - DNA, 2130 bp, Zea Mays
atgggccgtggcggctggacgggcggctcaatggctggacggaagacctcccgtgagctgcctcctaagactcctgctccctctaatcctatatgtgaggcagccgacggggttgctaaaggtagaacgaagcttccgcagcacagcgtcgtcgtcgaggagataaggtacgtagctcgcttctgccggaggtaaagaacaagctagactagccagccagtactcctctttgccggccggttagcgcgcatctgcaattcgatcatcactagattcctgccaagacaagtcaaaaaggtttggagtatcggaaaggagaagatctatcgtttcctgttaagctgatcatgccttgtttgtcgcttctcggctttgcgcttctgatgcactgtggcatgcaaattaagctgccttataagagccgaatgcttccctgccgtgtccaggtccagacagaggtctctagccgtgcagcggtgctgtcgttggtggcggccggcgacttggagctgtcgaggtaagcaagctggtgtggcggcgattggagctgtcgactggagcgcgcccgatccaccagagaccgtgaagctggcggccggcaagtggtgggagcggccagatgacacgggcatgcccggaatggacccaggcgggggcggcagctcgcgctacttccaccagctgctgcggccgcagcagcagcagccctcgccgctgtcgcccaattcccacgtcaagatggagcaccacaggatgtctccagacaagagccccgtcgtcggcgaggccgacgctggcgggagcggggccggcggcgaccagccgtcctcgtcggccatggtcccagtcgagggtgggggcagcggaacgggcacgcccacgcggcggccgcgcggccgcccggcgggctccaagaacaagcccaagccgcccatcatcgtgacgcgcgacagccccaacgcgctgcactcgcacgtgctggaggtggcggcgggcgccgacgtcgtggactgcgtcgcggagttcgcgcggcgccggggccgcggcgtgtgcgtgctcagcggcgggggcgccgtcgccaacgtggcgctcaggcagcccggcgcgtcgccccccgggagcatggtggccacgctgaggggccggctggagatcctctccctcaccggcacggtgctgccgccgcccgctccccccggcgccagcggcctcacggtgttcctctccggcgggcagggccaggtcgtcggcgggagcgtggtgggcccgctggtcgccgcgggccccgtcgtcctgatggccgcgtcgttcgccaacgccgtgtacgagcggctcccgctggagggggaggaggaggaggatgagacggcggcgggcgccgccggagccgaaccacaagatcaggtggcacagtcgtcggctggaccaccgggtcagcagccgacggcgtcccagtcctctggtgtgaccggaggcgatgccggcatgtcactctacaacctcgccgggaatgtaggggcataccagctaccgggagacagcttgggaggctggagtggcggcggagtccggccaccgttttagtccaaagtccatgccttgagagatatccgattcgcatcatccacaccatccgagaaccgggagttgaagctaccctgagacatcatgtatatgcaattattgtatgcatgctggatcattgttgataggagagaaggatctttcatctgggcgccatacaatataatgcatatgcgtttacacacgtggaggatgcattgcaaatcatgatgtgttttaaagacgatttatcaaatgcaagaggggaagaagctagagattggatgcatgcaagagctagctcaataaactaaaggtcagtagtagtgagatccgatgtttcgtgtttccaacttttcctctctttttccctttttttttcatgttcatttgtatttgtgttaattatattctgattgtgtgtctctcgcagtcaatcgctgtagaatggtgttttctgttataaacaatttggtcatcgcctcctctacgatcgctttaattaacccatgcatgttacagcaactctttcatgcatggtcgctctcacatacatttccttttttt

SEQ ID NO: 44339 - DNA, 2105 bp, Zea Mays
aggcaccagcagcacgcacgagtcacgacacacaatcgtcgagcgcacgcgcagacgcgctccgcttgacaccgctgacggtggccggttaagcccgagcggtggtggatggacgtgcgccggctcggaggccgcatcgcggcggcgctgagggcgctcgccgcggggggctcgctgcccatcccggcgtggatcaccaacggcctggcgatgatctcgctcgtgctctcctcctgcgacctgctccgcctctgcagcgacagagaccgacgtctccggttcccgctcggtggccgcgagttcgttaccgtggtctgccagctggcctccatcgtgtacctcttcagcccttgcggtactggtatcccatctgcgaaccccgagacccccgcctgccgcgaccagggcggctccgccgaccaaacgcgcgccgccgccgccgacgcgccggaggcattgcatggcggggcggagggcgaggacgaggagatcgtcgccgctgtggtgtccggggcgctgccgtcgcaccacctcgagtcgcgcctcggagactgccgccgcgctgccaggctgcggcgggaggcgctacggcggatgacggggcggggcgttgaggggctcccgctcgacgggatggactaccaggccatcctgggacaatgctgcgagatgcccgttgggtacgtgcagatgccggtcggggtcgccgggccgctgctcctggatgggaaacagtaccatgttcccatggctaccaccgagggatgtctcgtggccagcgtcaaccgcggctgcagagccatcgctgcgtctgggggcgccttcagcgtgctgctccgggatgcaatgtctcgtgcgcctgtcgtcaagttgccatcgatcaagagggctgcggagctcaaggcgttcgtcgagacacacaccaatttcgagactctggctgctgtcttcaatagatccagcagatttgggaagcttcaaggcattcattgtgcactagcaggacggaacctttacatgaggttcacttgtagtactggagatgctatgggaatgaatatggtgtcaaaaggtgttgaggatgtcttgggctacttgcagaatgatttccccgacatggatctcatcagcctatctggtaactattgttcagacaagaaggctgcagccgtaaactggatagaaggtcgtgggaaatctgttgtttgtgaggccagagtcaaagggggagttgtgcagagcgttcttaagaccaccgtgcaaaaactcgtcgagcttaacatcgtaaagaatctcgctggatcagctgtggccggagctcttggaggtttcaatgcccatgcaagcaatatcgttaccgccctgttcattgctacggggcaggatcctgcccagaacgttgaaagctcacagtgcatcaccatgatggaggcagtgaatgacggaggcgatcttcacatctctgtgaccatgccttccattgaggcactgtcgggggtggcacctgtcttgcttcacaggccgcatgcctgaacctgcttggcgtcaggggtccgaaccgtgactcgcctggggcaaatgctaggattcttgcaaccattgtcgccggcagcgtgctcgcaggcgagctctctctcctggcagcccttgccgctggccaactcgtgaagagccacatgaagtacaaccgatcgagcaaagacgtgccaggtgcttctgcttcttgagtatatatatatatatatatatatatatatatatatatatatatatatatatatatatatatacagcagctcgtcgggcactccaaggctccaagcgacatgtttgggcagcagtggcccaggcgagaccgacgccaaacaaacgagacaagcagagaccgactgtacagagtgtgctaaggcgagcagggccctgcttgactgttttgttctgtggacgttatgctagcgacgtacagcgcctaacagatcatgcaacttctgactgtagtaacctcctctttgttcttatgtgagccttcgtatatttaatgttcgcttataaccgtccgttcgaactcaatcatctctttgctttggatagcagaagatcagatt

SEQ ID NO: 44340 - DNA, 942 bp, Zea Mays
tagcttccaagaagtgttctacaccccgttcctaaggcaaatatggacatggttggggttggctcctgcgtcgagaaagagtttctactcctaccttggagctggttatagctgtattatagtgccaggaggtgtgcaggaaatacttcatatggatcatgattcagaggttgcttttcttaaaccaagaaaaggttttgttaagatagctattgagatgggttgccctgtagtccccgtttttgctttcggacagagctatgtttacaaatggtggaggccaggtggcaagttaattgtcaagattgctagagcaatcaaattttctccaataatcttctggggaaaactggggactcccatcccttttgcaacaccaatgcatgtgattgttggaaggccaattgaggttgtaaagaatcctcaacctaccattgatgagataaaccaagtccacggacagttcgttgttgcgatgcaagatctgttcgagaaatacaagagcagaactggataccctgatcttcagttaagagttctttgatggcgtgctgttccaatgaaaagctcttatcagctaggtttaagggataaaatggctgttcagacccatcgactcaattgatcgtagcatttgggctataatgtttttgagcacaggtccattattgaaattctgtaccccattccaaattagaagacgtttttttaatatgtagcttttctatgcagttgcatacatactatgtctaaaaatataaaaaaatatatgtctagaaagggaatatatcatctgtaaagcaagcagtcatgataattttttaaaacaacccttctatcgtacatcagctttcaaaacgatggtgcttgtgtgatgtgcccctatcatttttcatcttttttgggctcatcctcgaggggtggaatgcaaacatatgcatt

SEQ ID NO: 44341 - DNA, 2209 bp, Zea Mays
ccgattaatcggtcgataaaccgataacggttagtttaagaactctattttcccatgggatttctattttcccttaaaaatatatggttctcaaactagctctaaaagagggaaaccgagtcccatggtttttgtcaaaaaaatactttcccgacaaattaaaaccggctgggcgtctcgtgcgttctttttgttcgttttcacgtcgtcgtccgcggcaagagggagcacgctgcactctacacacgataaaagcaagatttgcccatgctagaaacacccatatgaaccaattgacctcctcctgatcgtcgtgggccagcgctgggctgacgcccgtgcaccggtcggtttctgttcggttcggcagcagggtgcgctcggtcagaaatttagtcccatcggctcggatccgcccgcccgccgtgcgcgcgcgcacgcacgcacgcctcgcgagcagatggggctggcagtggcggtgggcaggcggccgacgcagcggtccggtgtctcccgttctcgctgcgctggcaagagacccactgccgccgagccccgacaccaccggcaccgcacggagggaagaaaagaaagaaatcccgggggatcacgtcgttatcagcgaccagattcagacgcgagccgagcgggggaggcggaccacactagaactagaaccctctctacggctctactacgctacgccccatcccgcccggaccggaccggacccaccttcctccacctctctgcccgccgccggccgacccgaatgggggcgggaaccaataatggcctgagcaacggcgccgccgcagggcagcgcgcggacgacgggaccacggtgttccggggcacggcgtactcgccgctacggaccacggtggcgctcgcgctgtggctcggggccatccacttcaacgccttcctcgtcctcgcctcgctcttcctcttcccgcgccgcgtcgccgcactggtgctggcgacgcagctcttcttcatgttcctgccgctcagtgataagagcagactgggccgcaagatcgccaggttcataagcaagtacgtcattgggtattttcccgtcactttgcacgtggaagactatggcgcctttgatcccaacagggcttatgtgttcggttatgagcctcattctgttttgcccatagctgttgggatcctcggggaccttgttggattcatgccgctaccaaagatgaagattcttgcaagcagtgcggtgttctacaccccgttcctaaggcaaatatggacatggttggggttggctcctgcgtcgagaaagagtttctactcctaccttggagctggttatagctgtattatagtgccaggaggtgtgcaggaaatacttcatatggatcatgattcagaggttgcttttcttaaaccaagaaaaggttttgttaagatagctattgagatgggttgccctgtagtccccgtttttgctttcggacagagctatgtttacaaatggtggaggccaggtggcaagttaattgtcaagattgctagagcaatcaaattttctccaataatcttctggggaaaactggggtgactctctacattacatttctcttcttttgatcctgactcccatcccttttgcaacaccaatgcatgtgattgttggaaggccaattgaggttgtaaagaatcctcaacctaccattgatgagataaaccaagtccacggacagttcgttgttgcgatgcaagatctgttcgagaaatacaagagcagaactggataccctgatcttcagttaagagttctttgatggcgtgctgttccaatgaaaagctcttatcagctaggtttaagggataaaatggctgttcagacccatcgactcaattgatcgtagcatttgggctataatgtttttgagcacaggtccattattgaaattctgtaccccattccaaattagaagacgtttttttaatatgtagcttttctatgcagttgcatacatactatgtctaaaaatataaaaaaatatatgtctagaaagggaatatatcatctgtaaagcaagcagtcatgataattttttaaaacaacccttctatcgtacatcagctttcaaaacgatggtgcttgtgtgatgtgcccctatcatttttcatcttttttgggctcatcctcgaggggtggaatgcaaacatatgcatt

SEQ ID NO: 44342 - DNA, 2144 bp, Zea Mays
catgtactcacgggtcctataattgtaattgtggaggggcttaggcctaggactcggttgtcgctatcaaattgaccttcttatgggactactgtcagggtggagtatggtgacgccgcaattgcagctgaccaggcaggcgctcatgtgatcagccatgcgttccctcacacctatgggcagccccttgcacatttcctcaggaagacggctgttgtccttgatgctaaggtcatatctgaacacccggtggtcagggttggcattgtcttctgtggcaggcaatccccaggaggccacaatgttgtttggggactctatgaggctatcaaggcccacaaccaaaacagcaaactcattggtttcctcgatggtttgctagcgcagagaacattggagatcactaatgaagttcttgcttcatataaaaatcaaggtggatatgacatgcttggtcggacaaaggatcagattaggacgacagagcaggtcaatggtgcaatggctagttgccaggctttgaagttggatgctctggttataattggaggtgtcacttccaacactgacgctgctcaacttgctgagacttttgctgaggcaaagtgtgcaacgaaggttgtaggtgttcctgtaactttgaatggggacctcaagaaccagtttgttgagactactgttggctttgacaccatatgcaaggtgaatgcacaacttatcagcaatgtctgcactgatgctctatctgctgagaagtattactacttcattcgtttgatgggacgcaaggcttctcatgtggcattggaatgtgctcttcaatcacacccgaacatggtcatcctaggagaggaggtggctgcttccaaacttacaatttttgatattacgaagcagatttgtgatgcggttcaggcaagggcagaaaaagacaagaaccatggggttgttcttattcctgagggtcttgtggagagtattcctgaactatatgctctgcttcaggaaatccatggcctccatggcaaaggtgtttctgttgagaatatctcttctcagctttcaccctgggcatctgcactctttgagtttttgcccccttttatcaggaagcagctacttctccatcctgaatctgatgattcagctcaactttctcagattgagacagagaagcttctagcccagttagttgagactgagatgaacagacgtttgaaggagggcacttacaaaggaaagaagtttaatgcaatctgtcacttctttggctaccaagctaggggagcactgccttccaagtttgactgcgattatgcctatgtcttggggcatgtgtgctaccacatcatagctgccggtttgaacggttacatggccacagtgacaaatgttaagagtccagtgaacaagtggcgatgtggtgcggctcctatttcgtctatgatgactgtgcagcgatggtcgcgtggcccttcagccacccaaatcggaaagcctgctgttcacatggctagcgttgacttgaaaggaaaagcatacgatgtattgaggcagaattcttccaggtttttgttggaagatgtctacaggaacccaggtccgctccagtttgaaggaccaggtgccgattcaaagcctatctcactgtgcgtcgaggatcaagactacatgggcaggataaagaaattgcaggaatacctggagaaggtgaagagcattgtgaagcctgggtgctcgcaggatgtccttaaggcggcgctgagcgccatgtcttctgtgacggagacactgaacatcatgacctcatcgtccaccggccagactgcactgtgactcgtttggtgccgttttgtggtgcggatcagaatccccactttttccatggtgtcgattgacaaagttaggagcagtaatcctggtgccacacgggtcattcttttgtagcttcttgggagagttctgtcagttttgaattcgatagtttattatggagaggcttgttggtgagtttgagctcgaataatttttgaaacagacggattgcggaatcttaataaaccaaaatttgtgactgcattcacatttctgccagtcgtctgaatgagaaaaatgtgagagcgatctcttcatctgacggtgtt

SEQ ID NO: 44343 - DNA, 2188 bp, Zea Mays
aaattattctgtagcaatgatgatggacctatctacatgtactcacgggtcctataattgtaattgtggaggggcttaggcctaggactcggttgtcgctatcaaattgaccttcttatgggactactgtcagggtggagtatggtgacgccgcaattgcagctgaccaggcaggcgctcatgtgatcagccatgcgttccctcacacctatgggcagccccttgcacatttcctcaggaagacggctgttgtccttgatgctaaggtcatatctgaacacccggtggtcagggttggcattgtcttctgtggcaggcaatccccaggaggccacaatgttgtttggggactctatgaggctatcaaggcccacaaccaaaacagcaaactcattggtttcctcggtggatcagatggtttgctagcgcagagaacattggagatcactaatgaagttcttgcttcatataaaaatcaaggtggatatgacatgcttggtcggacaaaggatcagattaggacgacagagcaggtcaatggtgcaatggctagttgccaggctttgaagttggatgctctggttataattggaggtgtcacttccaacactgacgctgctcaacttgctgagacttttgctgaggcaaagtgtgcaacgaaggttgtaggtgttcctgtaactttgaatggggacctcaagaaccagtttgttgagactactgttggctttgacaccatatgcaaggtgaatgcacaacttatcagcaatgtctgcactgatgctctatctgctgagaagtattactacttcattcgtttgatgggacgcaaggcttctcatgtggcattggaatgtgctcttcaatcacacccgaacatggtcatcctaggagaggaggtggctgcttccaaacttacaatttttgatattacgaagcagatttgtgatgcggttcaggcaagggcagaaaaagacaagaaccatggggttgttcttattcctgagggtcttgtggagagtattcctgaactatatgctctgcttcaggaaatccatggcctccatggcaaaggtgtttctgttgagaatatctcttctcagctttcaccctgggcatctgcactctttgagtttttgcccccttttatcaggaagcagctacttctccatcctgaatctgatgattcagctcaactttctcagattgagacagagaagcttctagcccagttagttgagactgagatgaacagacgtttgaaggagggcacttacaaaggaaagaagtttaatgcaatctgtcacttctttggctaccaagctaggggagcactgccttccaagtttgactgcgattatgcctatgtcttggggcatgtgtgctaccacatcatagctgccggtttgaacggttacatggccacagtgacaaatgttaagagtccagtgaacaagtggcgatgtggtgcggctcctatttcgtctatgatgactgtgcagcgatggtcgcgtggcccttcagccacccaaatcggaaagcctgctgttcacatggctagcgttgacttgaaaggaaaagcatacgatgtattgaggcagaattcttccaggtttttgttggaagatgtctacaggaacccaggtccgctccagtttgaaggaccaggtgccgattcaaagcctatctcactgtgcgtcgaggatcaagactacatgggcaggataaagaaattgcaggaatacctggagaaggtgaagagcattgtgaagcctgggtgctcgcaggatgtccttaaggcggcgctgagcgccatgtcttctgtgacggagacactgaacatcatgacctcatcgtccaccggccagactgcactgtgactcgtttggtgccgttttgtggtgcggatcagaatccccactttttccatggtgtcgattgacaaagttaggagcagtaatcctggtgccacacgggtcattcttttgtagcttcttgggagagttctgtcagttttgaattcgatagtttattatggagaggcttgttggtgagtttgagctcgaataatttttgaaacagacggattgcggaatcttaataaaccaaaatttgtgactgcattcacatttctgccagtcgtctgaatgagaaaaatgtgagagcgatctcttcatctgacggtgtt

SEQ ID NO: 44344 - DNA, 2316 bp, Zea Mays
ggtcgcaggcagaagcagaactcacctccgcccggcccggctgtataaaaaaaaatcctctcacaccgcacacccgcatctctcccatcacagtgcgccacccgcacccaccaacgaggcaacgaaacccagtcggaagctagaccggcgacaagtgcagcgctcgccgcgatggattctgactacggcgtgccgcgcgagctgtcggaggtgcagaagaagcgcgcgctctaccagcccgaggtgcccccctgcctccagggtggagtatggtgacgccgcaattgcagctgaccaggcaggcgctcatgtgatcagccatgcgttccctcacacctatgggcagccccttgcacatttcctcaggaagacggctgttgtccttgatgctaaggtcatatctgaacacccggtggtcagggttggcattgtcttctgtggcaggcaatccccaggaggccacaatgttgtttggggactctatgaggctatcaaggcccacaaccaaaacagcaaactcattggtttcctcggtggatcagatggtttgctagcgcagagaacattggagatcactaatgaagttcttgcttcatataaaaatcaaggtggatatgacatgcttggtcggacaaaggatcagattaggacgacagagcaggtcaatggtgcaatggctagttgccaggctttgaagttggatgctctggttataattggaggtgtcacttccaacactgacgctgctcaacttgctgagacttttgctgaggcaaagtgtgcaacgaaggttgtaggtgttcctgtaactttgaatggggacctcaagaaccagtttgttgagactactgttggctttgacaccatatgcaaggtgaatgcacaacttatcagcaatgtctgcactgatgctctatctgctgagaagtattactacttcattcgtttgatgggacgcaaggcttctcatgtggcattggaatgtgctcttcaatcacacccgaacatggtcatcctaggagaggaggtggctgcttccaaacttacaatttttgatattacgaagcagatttgtgatgcggttcaggcaagggcagaaaaagacaagaaccatggggttgttcttattcctgagggtcttgtggagagtattcctgaactatatgctctgcttcaggaaatccatggcctccatggcaaaggtgtttctgttgagaatatctcttctcagctttcaccctgggcatctgcactctttgagtttttgcccccttttatcaggaagcagctacttctccatcctgaatctgatgattcagctcaactttctcagattgagacagagaagcttctagcccagttagttgagactgagatgaacagacgtttgaaggagggcacttacaaaggaaagaagtttaatgcaatctgtcacttctttggctaccaagctaggggagcactgccttccaagtttgactgcgattatgcctatgtcttggggcatgtgtgctaccacatcatagctgccggtttgaacggttacatggccacagtgacaaatgttaagagtccagtgaacaagtggcgatgtggtgcggctcctatttcgtctatgatgactgtgcagcgatggtcgcgtggcccttcagccacccaaatcggaaagcctgctgttcacatggctagcgttgacttgaaaggaaaagcatacgatgtattgaggcagaattcttccaggtttttgttggaagatgtctacaggaacccaggtccgctccagtttgaaggaccaggtgccgattcaaagcctatctcactgtgcgtcgaggatcaagactacatgggcaggataaagaaattgcaggaatacctggagaaggtgaagagcattgtgaagcctgggtgctcgcaggatgtccttaaggcggcgctgagcgccatgtcttctgtgacggagacactgaacatcatgacctcatcgtccaccggccagactgcactgtgactcgtttggtgccgttttgtggtgcggatcagaatccccactttttccatggtgtcgattgacaaagttaggagcagtaatcctggtgccacacgggtcattcttttgtagcttcttgggagagttctgtcagttttgaattcgatagtttattatggagaggcttgttggtgagtttgagctcgaataatttttgaaacagacggattgcggaatcttaataaaccaaaatttgtgactgcattcacatttctgccagtcgtctgaatgagaaaaatgtgagagcgatctcttcatctgacggtgtt

SEQ ID NO: 44345 - DNA, 4777 bp, Zea Mays
gggcttattcagttagaggtgaatcgagagttattggtttacaagaagaacaaggaagctgccttgaatttcttagaagaggatacatggctcatcttatcctagctaaacagccggttgcagcttcaaagtgcctgcttgcataaactacatttcattatagcacatcatagagacagtacgagttacaataatcaattttctgtgctgcagaatgctacttggtgggaagagaatgtcaaagcgcctgcttgcataaactacatttcattatagcacatcatagagacaatacgagttacaataatcaattttctgtgctgtagaatgctacttggtgggaagagaatgttgatcaggagatgccgcctgcttagcaagaactgatgttgcacctgctggttggatgcttttctgatctagaactgggaatgtaaaatttgcccaaggagtgtccatgtcttgttgtatgtaaatgaaaaaatatgaaattacacacagagaagtccatgtacaacatataggacatgaaaatctaaaattcaatcaatcatattatttgatacataaattcatatatatttacctttttatgatatagagattgcaggggtgcatcaaattagttgttggtggctgatgtttgtggtgtgaggcatgcttgtgttaacttgttcatctaaacaagaactataaatgttttgtgtacactatggatcaagaatcacgtccttatttgtgtagaagtctgttctttttgtgtaggtttggtctggcttaagttctaatgtccttttactgtggacgatctctaggatatgcagcttgttaaaatgattttgattgcttcgttggtcacattagttctactatcaccatgctggcttcgttggtcacattagtttccttatctcatgaaccatttttggtaaaatgaagtcttcaatgaaatggatggctgctcaattctatttttattgctctcacaattcctattcccacttgtgtgaatgaccaagcgatgatgctatcgcagatggtgtggcatgagcctacaatttcattgtagttatgaaaactgatcagtcaatgatgatgaatcatacgagacttttttacttcagcatgttttttgataggggatgaattttcatgcggtgttatgaactacaggcggaggtgagcagtgggagcgtttgcgtattaaagtgcactacactacaatacttgtttttgtatgttaagcatttactttagcttaatcaatcttgtagtttttaatgttatctttgtcgtccatgcaagaggatctccattgtgtttcgcaagacgagagtcaccaagcacctgttccgttttgtgtagaacttcacgctcattcctatcccggatacttctatccttatccggatgatggtacctagcaacaatgatagtctgtcatcgacctggacgaatagccatagatctctctcaacaatttatgtgccgtcgcaacgcacgggcacctacctaggtcgcaggcagaagcagaactcacctccgcccggcccggctgtataaaaaaaaatcctctcacaccgcacacccgcatctctcccatcacagtgcgccacccgcacccaccaacgaggcaacgaaacccagtcggaagctagaccggcgacaagtgcagcgctcgccgcgatggattctgactacggcgtgccgcgcgagctgtcggaggtgcagaagaagcgcgcgctctaccagcccgaggtgcccccctgcctccaggggactactgtcagggtggagtatggtgacgccgcaattgcagctgaccaggcaggcgctcatgtgatcagccatgcgttccctcacacctatgggcagccccttgcacatttcctcaggaagacggctgttgtccttgatgctaaggtcatatctgaacacccggtggtcagggttggcattgtcttctgtggcaggcaatccccaggaggccacaatgttgtttggggactctatgaggctatcaaggcccacaaccaaaacagcaaactcattggtttcctcggtgagtaatttgctacttttcagtaatcccctaggagcatcatattatctacattgtgtcacttaattccattttttttctgattagcatgtgcttcaatgcatgagtcctacaaataaacttggtgcatttgattgtcactgaatttttctggtaacgtctgttgttttggctcatactaataactttgtttggtgggagagggtctctaaaagagtccataggttcaagaggaggggtttccatagtgtcattatccttggagcttggtgcttgtggctctctcgtaatagggctgtttttgatggagtgagcccttccattaatttgacaaagaggttgtttctagatgagttgattagttggagtaaggcgggagcgaagcatttagacagtttgggaattattgtcgctttaaatagggtctcgtagggcccgtcaggcttccccttgtgggggaggcttgagggtttggtcttggtgttgtaattcggtccattttggacctttcctttcttaatataatgatgcgcagctctcctgcgctttcgagaaaaaaaataactttgtttggatcagattagcagataatcaaccacacataattgatgtattattttgcgtttagtcataaatatgaatgacatctgaaaatcttcgacccaactttcatgggttcatttcatccaaactagatttgcaggcatttcttagatttgcaatcctaaatcgacagcattactgttatgcatatagacacaccaaattttgggagacaccttatgttctgggctcctggccagtttcttggaccttagtttgtctggcccttgcttcctcttgcttgccagagctttgacatttagatgcatgctaacacaaattaaaattattttaatgttttctaacatattcgacctatgttgaaacaggtggatcagatggtttgctagcgcagagaacattggagatcactaatgaagttcttgcttcatataaaaatcaaggtggatatgacatgcttggtcggacaaaggatcagattaggacgacagagcaggtcaatggtgcaatggctagttgccaggctttgaagttggatgctctggttataattggaggtgtcacttccaacactgacgctgctcaacttgctgagacttttgctgaggcaaagtgtgcaacgaaggttgtaggtgttcctgtaactttgaatggggacctcaagaaccagtttgttgagactactgttggctttgacaccatatgcaaggtgaatgcacaacttatcagcaatgtctgcactgatgctctatctgctgagaagtattactacttcattcgtttgatgggacgcaaggcttctcatgtggcattggaatgtgctcttcaatcacacccgaacatggtcatcctaggagaggaggtggctgcttccaaacttacaatttttgatattacgaagcagatttgtgatgcggttcaggcaagggcagaaaaagacaagaaccatggggttgttcttattcctgagggtcttgtggagagtattcctgaactatatgctctgcttcaggaaatccatggcctccatggcaaaggtgtttctgttgagaatatctcttctcagctttcaccctgggcatctgcactctttgagtttttgcccccttttatcaggaagcagctacttctccatcctgaatctgatgattcagctcaactttctcagattgagacagagaagcttctagcccagttagttgagactgagatgaacagacgtttgaaggagggcacttacaaaggaaagaagtttaatgcaatctgtcacttctttggctaccaagctaggggagcactgccttccaagtttgactgcgattatgcctatgtcttggggcatgtgtgctaccacatcatagctgccggtttgaacggttacatggccacagtgacaaatgttaagagtccagtgaacaagtggcgatgtggtgcggctcctatttcgtctatgatgactgtgcagcgatggtcgcgtggcccttcagccacccaaatcggaaagcctgctgttcacatggctagcgttgacttgaaaggaaaagcatacgatgtattgaggcagaattcttccaggtttttgttggaagatgtctacaggaacccaggtccgctccagtttgaaggaccaggtgccgattcaaagcctatctcactgtgcgtcgaggatcaagactacatgggcaggataaagaaattgcaggaatacctggagaaggtgaagagcattgtgaagcctgggtgctcgcaggatgtccttaaggcggcgctgagcgccatgtcttctgtgacggagacactgaacatcatgacctcatcgtccaccggccagactgcactgtgactcgtttggtgccgttttgtggtgcggatcagaatccccactttttccatggtgtcgattgacaaagttaggagcagtaatcctggtgccacacgggtcattcttttgtagcttcttgggagagttctgtcagttttgaattcgatagtttattatggagaggcttgttggtgagtttgagctcgaataatttttgaaacagacggattgcggaatcttaataaaccaaaatttgtgactgcattcacatttctgccagtcgtctgaatgagaaaaatgtgagagcgatctcttcatctgacggtgtt

SEQ ID NO: 44346 - DNA, 2060 bp, Zea Mays
agacccgtcccactccaactccaggccatctccctacgcctcagacctcggtgcaaacctgccgcgaaaatagcagccgcccgttcgctctcccactcctcccgcgatgagcgacccgcggggccacgccgccggtcccgaccgtgacggggacgacccgctcgccgaggacgccaacagcgaggaagcgtggcagacgcccgagaaagagccggttgctgtgtcgaaagaggcggctgcgcggggtggggacacgaccccggacgccgaaccggagagcgatgacggagagggaggagtgggctccccggatcagatggagcccaatgcggacggggagcgcgcaccgcccgtggccgcggctgaggacccggaggggattgttggcagcgcaaaggtggagacgaacggcgaggacgccatcagccttgacgccgacggggaggaggaggacgacgatgatgacggagacgaggaggaggaggaggaggacgacgacgacgacgactccacccctgatgcgtctccgagggccgaggtgaaggtggagggcgaaagctccacggggatgacccagagtggcgccggccaccgcgtggaggtggaaccggaccccttcctcgacggtgatgactctgggacggaggaggagcaaggtgcgttcatggcggagctggagcgcttccatagggagcacagtctcgagttcaagccgcccaagttctacggcaagggcctcaactgcctcaagttatggaggcaggtcgcccacctgggaggccacgagcaggtaacggtttgtaaactatggcgtcaagttggagagactttcaggccaccaaagacctgcacgactgtttcttggtcatttcgaattttctatgagaaggcacttcttgaatacgaaaaacacaaggtccggactggtcagcttcagataccaccgcctggtttaccacagcctagtggtgctgaccgtgaggtggttgtaaatcaatcatcttctgccagagttagaagggatgctgcagcgcgtgctatgcagggttggcatgctcaccgccttctcacaaatggcacttatggggataacattttgaaggacaaagatacaatgccacttccaaatcgtgataaaaacctaagctttggggtgctcaagagaaagaaagcatctagtccagagtatgctctcaagtcgtcccgctcaaaaacaaataagtcacaggaagattctatggtcgttgacgttggagaaccagccgactgggtgaagatcaatgtgcggcagactaaagattgctttgaagtttatgcactagttccgggacttctaagagaggagcaggtgcatgttcaatcagatcctgctggacgtctggttatcacaggggatccagagcagcctgataatccttgggggatcactccgttcaagaaggtggtcaacttgccatcaagaatcgatcctcaccaaacatccgctgttgtcacgcttcatggtcagctattcgtgcgtgcaccatttggtcatcctgatatgtagatatgaaatcctgtttacttcagttttgttgactggcgatgcctcgtcatcagtgatattccttgatattactagggtttatgtcaattctgttgaggaaataggattttgtttgagcagatacatgatgtcaagctgacttagctgaaccgttctgtggttggatgctgattgctgctgttgccatctgttatcaccttgtttattactccctccgttcttttttatttgttgtggtttagtttaaaaatgaactagaggacgataaatatttgagaacggaggtagtattatagtagtggccataaagttagctgattcatgcatgtattccagtttcatggtgagattttatagagaaaggagatgttgttcgtagtagggctaatttgacattatgattacttattgttctttattatttttcttctgtattataaatgcctctctgggtcactccaggcgccttaatgttgcatttttgtgcataacgccggttcctatggtttatgaa

SEQ ID NO: 44347 - DNA, 1938 bp, Zea Mays
agacccgtcccactccaactccaggccatctccctacgcctcagacctcggtgcaaacctgccgcgaaaatagcagccgcccgttcgctctcccactcctcccgcgatgagcgacccgcggggccacgccgccggtcccgaccgtgacggggacgacccgctcgccgaggacgccaacagcgaggaagcgtggcagacgcccgagaaagagccggttgctgtgtcgaaagaggcggctgcgcggggtggggacacgaccccggacgccgaaccggagagcgatgacggagagggaggagtgggctccccggatcagatggagcccaatgcggacggggagcgcgcaccgcccgtggccgcggctgaggacccggaggggattgttggcagcgcaaaggtggagacgaacggcgaggacgccatcagccttgacgccgacggggaggaggaggacgacgatgatgacggagacgaggaggaggaggaggaggacgacgacgacgacgactccacccctgatgcgtctccgagggccgaggtgaaggtggagggcgaaagctccacggggatgacccagagtggcgccggccaccgcgtggaggtggaaccggaccccttcctcgacggtgatgactctgggacggaggaggagcaaggtgcgttcatggcggagctggagcgcttccatagggagcacagtctcgagttcaagccgcccaagttctacggcaagggcctcaactgcctcaagttatggaggcaggtcgcccacctgggaggccacgagcaggtaacggtttgtaaactatggcgtcaagttggagagactttcaggccaccaaagacctgcacgactgtttcttggtcatttcgaattttctatgagaaggcacttcttgaatacgaaaaacacaaggtccggactggtcagcttcagataccaccgcctggtttaccacagcctagtggtgctgaccgtgaggtggttgtaaatcaatcatcttctgccagagttagaagggatgctgcagcgcgtgctatgcagggttggcatgctcaccgccttctcacaaatggcacttatggggataacattttgaaggacaaagatacaatgccacttccaaatcgtgataaaaacctaagctttggggtgctcaagagaaagaaagcatctagtccagagtatgctctcaagtcgtcccgctcaaaaacaaataagtcacaggaagattctatggtcgttgacgttggagaaccagccgactgggtgaagatcaatgtgcggcagactaaagattgctttgaagtttatgcactagttccgggacttctaagagaggaggtgcatgttcaatcagatcctgctggacgtctggttatcacaggggatccagagcagcctgataatccttgggggatcactccgttcaagaaggtggtcaacttgccatcaagaatcgatcctcaccaaacatccgctgttgtcacgcttcatgggtttatgtcaattctgttgaggaaataggattttgtttgagcagatacatgatgtcaagctgacttagctgaaccgttctgtggttggatgctgattgctgctgttgccatctgttatcaccttgtttattactccctccgttcttttttatttgttgtggtttagtttaaaaatgaactagaggacgataaatatttgagaacggaggtagtattatagtagtggccataaagttagctgattcatgcatgtattccagtttcatggtgagattttatagagaaaggagatgttgttcgtagtagggctaatttgacattatgattacttattgttctttattatttttcttctgtattataaatgcctctctgggtcactccaggcgccttaatgttgcatttttgtgcataacgccggttcctatggtttatgaa

SEQ ID NO: 44348 - DNA, 1949 bp, Zea Mays
agacccgtcccactccaactccaggccatctccctacgcctcagacctcggtgcaaacctgccgcgaaaatagcagccgcccgttcgctctcccactcctcccgcgatgagcgacccgcggggccacgccgccggtcccgaccgtgacggggacgacccgctcgccgaggacgccaacagcgaggaagcgtggcagacgcccgagaaagagccggttgctgtgtcgaaagaggcggctgcgcggggtggggacacgaccccggacgccgaaccggagagcgatgacggagagggaggagtgggctccccggatcagatggagcccaatgcggacggggagcgcgcaccgcccgtggccgcggctgaggacccggaggggattgttggcagcgcaaaggtggagacgaacggcgaggacgccatcagccttgacgccgacggggaggaggaggacgacgatgatgacggagacgaggaggaggaggaggaggacgacgacgacgacgactccacccctgatgcgtctccgagggccgaggtgaaggtggagggcgaaagctccacggggatgacccagagtggcgccggccaccgcgtggaggtggaaccggaccccttcctcgacggtgatgactctgggacggaggaggagcaaggtgcgttcatggcggagctggagcgcttccatagggagcacagtctcgagttcaagccgcccaagttctacggcaagggcctcaactgcctcaagttatggaggcaggtcgcccacctgggaggccacgagcaggtaacggtttgtaaactatggcgtcaagttggagagactttcaggccaccaaagacctgcacgactgtttcttggtcatttcgaattttctatgagaaggcacttcttgaatacgaaaaacacaaggtccggactggtcagcttcagataccaccgcctggtttaccacagcctagtggtgctgaccgtgaggtggttgtaaatcaatcatcttctgccagagttagaagggatgctgcagcgcgtgctatgcagggttggcatgctcaccgccttctcacaaatggcacttatggggataacattttgaaggacaaagatacaatgccacttccaaatcgtgataaaaacctaagctttggggtgctcaagagaaagaaagcatctagtccagagtatgctctcaagtcgtcccgctcaaaaacaaataagtcacaggaagattctatggtcgttgacgttggagaaccagccgactgggtgaagatcaatgtgcggcagactaaagattgctttgaagtttatgcactagttccgggacttctaagagaggaggtgcatgttcaatcagatcctgctggacgtctggttatcacaggggatccagagcagcctgataatccttgggggatcactccgttcaagaaggtggtcaacttgccatcaagaatcgatcctcaccaaacatccgctgttgtcacgcttcatggtcagctattcggtttatgtcaattctgttgaggaaataggattttgtttgagcagatacatgatgtcaagctgacttagctgaaccgttctgtggttggatgctgattgctgctgttgccatctgttatcaccttgtttattactccctccgttcttttttatttgttgtggtttagtttaaaaatgaactagaggacgataaatatttgagaacggaggtagtattatagtagtggccataaagttagctgattcatgcatgtattccagtttcatggtgagattttatagagaaaggagatgttgttcgtagtagggctaatttgacattatgattacttattgttctttattatttttcttctgtattataaatgcctctctgggtcactccaggcgccttaatgttgcatttttgtgcataacgccggttcctatggtttatgaa

SEQ ID NO: 44349 - DNA, 2015 bp, Zea Mays
agacccgtcccactccaactccaggccatctccctacgcctcagacctcggtgcaaacctgccgcgaaaatagcagccgcccgttcgctctcccactcctcccgcgatgagcgacccgcggggccacgccgccggtcccgaccgtgacggggacgacccgctcgccgaggacgccaacagcgaggaagcgtggcagacgcccgagaaagagccggttgctgtgtcgaaagaggcggctgcgcggggtggggacacgaccccggacgccgaaccggagagcgatgacggagagggaggagtgggctccccggatcagatggagcccaatgcggacggggagcgcgcaccgcccgtggccgcggctgaggacccggaggggattgttggcagcgcaaaggtggagacgaacggcgaggacgccatcagccttgacgccgacggggaggaggaggacgacgatgatgacggagacgaggaggaggaggaggaggacgacgacgacgacgactccacccctgatgcgtctccgagggccgaggtgaaggtggagggcgaaagctccacggggatgacccagagtggcgccggccaccgcgtggaggtggaaccggaccccttcctcgacggtgatgactctgggacggaggaggagcaaggtgcgttcatggcggagctggagcgcttccatagggagcacagtctcgagttcaagccgcccaagttctacggcaagggcctcaactgcctcaagttatggaggcaggtcgcccacctgggaggccacgagcaggtaacggtttgtaaactatggcgtcaagttggagagactttcaggccaccaaagacctgcacgactgtttcttggtcatttcgaattttctatgagaaggcacttcttgaatacgaaaaacacaaggtccggactggtcagcttcagataccaccgcctggtttaccacagcctagtggtgctgaccgtgaggtggttgtaaatcaatcatcttctgccagagttagaagggatgctgcagcgcgtgctatgcagggttggcatgctcaccgccttctcacaaatggcacttatggggataacattttgaaggacaaagatacaatgccacttccaaatcgtgataaaaacctaagctttggggtgctcaagagaaagaaagcatctagtccagaggaagattctatggtcgttgacgttggagaaccagccgactgggtgaagatcaatgtgcggcagactaaagattgctttgaagtttatgcactagttccgggacttctaagagaggaggtgcatgttcaatcagatcctgctggacgtctggttatcacaggggatccagagcagcctgataatccttgggggatcactccgttcaagaaggtggtcaacttgccatcaagaatcgatcctcaccaaacatccgctgttgtcacgcttcatggtcagctattcgtgcgtgcaccatttggtcatcctgatatgtagatatgaaatcctgtttacttcagttttgttgactggcgatgcctcgtcatcagtgatattccttgatattactagggtttatgtcaattctgttgaggaaataggattttgtttgagcagatacatgatgtcaagctgacttagctgaaccgttctgtggttggatgctgattgctgctgttgccatctgttatcaccttgtttattactccctccgttcttttttatttgttgtggtttagtttaaaaatgaactagaggacgataaatatttgagaacggaggtagtattatagtagtggccataaagttagctgattcatgcatgtattccagtttcatggtgagattttatagagaaaggagatgttgttcgtagtagggctaatttgacattatgattacttattgttctttattatttttcttctgtattataaatgcctctctgggtcactccaggcgccttaatgttgcatttttgtgcataacgccggttcctatggtttatgaa

SEQ ID NO: 44350 - DNA, 838 bp, Zea Mays
caaaaaggtgtcaacacagtgtttttgttttaataaattacataaattacagttgcagccgtcaagcagccgactttaatcagagaccgactttagcgaacatatttttccgaatggaaaacctctagtgttatagagctcacgtatcaagtattaaggaacttgggacaggaaaagaaaagacaaaaattagatcgcgtttctttcaatctcagtcgtgacctgctcgatggcgggctggccgcgggggaggtggctcgttccgtggtgcttgtctggcatcgtaacgatcgacgcgccaccgtcggatgcctttgggactttgcacggtggcgactgtctcttcctctcaagtagggccaaaacatagacagaaagatccacctactctgccaccttcgcagtttcgcatgtcaaaaacatgaccaaagaaaaaaaaaacaagtggcttcgtccatgcatcgattgcccgagccaaaggtcgattcttgagcgcagtcatcgccaactccgcgcttagctaatagtactatagtagcatcagcaaaaaaaattaggagctagaaaacagaggagtcgggcaccaagtgcaacgcatcatgcccaacatggaggggggcgagcgccgaaacaaagaggccgcctttggagtcaaagacctgagagtgaggacgacgtgacaggctgcttcggggggcggagcagatcgggcggacgccgcgcctcaccctctctcggtctctccccttctctcctgtcccccggacaggaaaacgagcggtggtgcctgcaggatttgcagggaggaggaaggaggagggagcctgaccgcctcggt

SEQ ID NO: 44351 - DNA, 1712 bp, Zea Mays
tcacggctcatctcccctccgttcctcggcttgtcctcttcctccggccttccttttcgtgccgtgcggtacagtgcaaagacaaagctttcccctctccgccccccgccgtcgcccccacacgcgcacagaacccccccgcccccaattccaaatcccgagtgcccgcggccacagaccgacccccatcacacacgcgcatcgcgccaccccatccgtcaccgtcgacccgcgagcacccatggcgaagggaggaggtggaggccagcgcgagggtagcgccctgaagagggcggcgatcgtcgcaggggggctcgcgctggcctgggtcaccgtggagaccgctttcaggcccttaatgggccgcctccgcgctgccatctccagctccaccgacaccgcccgcgaccccgaccaggaggagcctcccgcgcctgcctctgcggcggaggcggagaaggcgtccgcaccagaggagcctgccgcggtggaggagaaagtcgaggagaaggtggtcgagttggaggagaaggtggaggaggccgccgccgacaaggccgagtgaaggcgacggccacatggcgccctgtctggctgctcttctgaacgggttcttgaggttagccgggatcgaatccaagatcgtttaaaataaaacctgtgtttaaacgtttatcatgcaaattatattggattagcatgtgtgcaattttcgtttgtccaggctgagaactaaggaaccatggtgcacatcaagccactaaccattatgctgaaatgcaaatcagatagtgacttggaaaacataggaagttgcgttcatgtccatgtacgctctggtcggtttttttccttcgtcgttagagaagtattagattgaagttgaatctgtacaatcctattcagtacaaatttgagtctttattgaaccaagtaccaaaactaactgaaaacagaggtaactttaaaatcccaaatgcatactgcatcgtagaaggtggtgggcataaatatctatggaaaatgtccttagcttggtttggctttaatctgtaccgacttctacagtattttttttgtctatatggattatatctgcagcagtctaaacaaccggctttaatccgaagcgaacaacccaatgcacaagagttaaaaaaaaacttgagataaatatgcagtgtgtattcgtgctctgcttctgaacatgtaagcatagcctgaaacgttcatccagttagcacatggcggattggtggcggcaagtatagtgcaagaaacaatcagcgactgcaagccaagcaatcgcaacgaccggttcgggtaactgtttgcatccaaccgtgctcataccagctgccagcctgccacgccatgagaggaagaaaaacgtagtcagagaaggccagaaagctaagaaaagagcagggagtaaaacctgagctggagacatgagaaaacagaggaatcggcaaggctagaaaaaaagcgtcttgtgtgtgcatctcaagctactgcagtggcctccgcatcagtagaagcggtgtgtacgcaagatctctatttctttgcactacgatttggccgccacgttagaagaagaggaggaagagaacaacattgacatgaatgctactgataaatatttatttcctaattttacaatgtatgctacagttatatacctcatgttatacacttctattcttgta

SEQ ID NO: 44352 - DNA, 1408 bp, Zea Mays
gtcgaagcagagcccgccccttcccgcgccgttctttttggttcccctgtccccgccgctgccgaaaaaccgccgatggaggtcgtcgccgccgcgaagcagaaggcgaagaagcatatacacctcttctactgctccgaatgcgaggagctcgctctcaaggtcgccgccagctccgacgtcatcgagctccagtctatcaactggcggagcttcgacgacgggttcccgaacctgttcatcaacaaggcccacgacatccgggggcagcacgtggcgttcctggcctccttcagctcgccggcggtcatattcgagcaggtctccgtcatcttcgcgctgcccaagctcttcatcgcctcgttcacgctcgtgctgcccttcttccccacgggctccttcgagcgcgtcgaggaggagggcgacgtcgccaccgccttcaccctcgcgcacatcctctccatgatccccaagtcgcgcggcgggcccaccagcgtcgtcatctacgacatccacgccctccaggagaggttctacttcggggacgacgtcctgccatgcttcgagacggggatcccgctcctgctgcagcgcctccgccagctcccggacgcagagaatatcaccattgcctttccagatgatggagcgtggaagcggttccacaagctgttgcagcactttccaatgtctgtaacaaggttcgtgaaggtgacaagagaatagttcgtataaaggaaggaaatcctgaaggccgtcatgttgttattgttgatgatttagtgcaatctgggggaactcttagagaatgccagaaagttctagcttcacatggcgcttcaaaagtaagtgcttatgtgacccatgctgtgttccctaagcagtcatacgaaaatttcatggcgtctaactctgctgggccaggcgaccagctcgcttacttctggatcacggactcatgcccgcacacaataaaagccatcgggcaaagacctccgtttgaggttctgagccttgctggctcgattgctgacgctcttcagatatgagcgcgtacactgactggtagacggggggcttgaaccgtgggatgcccgtcagatcgagaacttgtaccgtgagatgagctgctcctgctttttttccctaaatgtaggagtttgttccggttccttgaaaaaagcaaataatgtggagcaagttttaagtacctgaaggttccacaaacagcgctgtgaattgatgataaaatcaggcattgggatactcacatctgtgtgtacttactgtcgatgctcgcttccgtttgaagttcgcgagaccagtgcttctttcctgagtcctgaccctatgttggagtaccgttgccgtgcattcaacagaggccagtgcttctttcctgtgtcaa

SEQ ID NO: 44353 - DNA, 3838 bp, Zea Mays
gattcgccccagtttctctgaaacgaagtagacagccaccgtcttcccgggccacggcgatcatcaccgccgcggcgccgcccatatcgacagcagagccgctcgcccagtagcctcacctcgcccgcgcttgtggcggccatggaggactacccagaggagctgcggacgccgccggtgtcgctcgtgtcaatcgtggggtgcccagagctgcacccctcgatctcggcggcactcagctcccagcagccgcccatgaatactctggccctccccgacttcgccaaggtctccatcctggcccgcagcggtaagccccgcgaccctctcgcaccgccgcacccccccgcgggaatcctcaagaaggactggctccttaaacaccgcacccgtgccccggccgccgtcgccgcgctgttccgtgctgaccaggtctccgacgatcctgcccagtggctcaaggcctgctccgatctcgaaaacctcaagtatgttgcgttgttgatcccaaattgacttcgcgcggtcagagatttagttacgagtcttaagatgctaatgtacaacttatcaaccacttgggaactaggaagcaccacccacactttattggcagcagctagtagtataaccgaagttggcggcaagtgatttttgtttgtcgcacaggtctgcaattcagaggaaaaacactaaattattggtggtccttgtgcaggctcaagctagtgatgagttaagtgaggatgtaacggttgccctgaggaaacgtgcggaaatcgattccaatcacttggttgtgttggttgagcacgatgaagcagaatggaacagatctctgaacaaattgaagagtgtgtttgcggagttatgtgtagcattctataaagaggaagggctaaggataaaggctcgcattgagaaattttttttgcttctgtcgagctgagcatccggtactgcttcaaggttgctatttatgcggagtttagaagggattggccagaagcattgaagttctatgaggaaggtgttcgtgttttgcgtgaggtctgatcacatcccttttcttatcaggtgttcgtgttttgcgtgagatgattggaacttcgacaaggttgcctccaacccaacgcctagttgagataaaagcagttgccgagcaatttcactttaagatatcgaccttgctacttcatgctgggaaagcggtagaagcaatcacatggttccgtaagcatatcagaagctatgcacgggttcttggaacaccagaagttgcttttcttcactgggaatggtttagccggcagttcctcgtctttggtgagttgatagaaacaacatctacaactattccagatacattatctcctagatttggcactgcagactatggattgactgagtgggaatttcagccagcatactactatcagttagcggcaacttacttgagagagaagaggtatgccatcgaatgttcatcatcaatggctaatcttacaacagaagttaatggagtacctgagtcagtaatgccttctgtatatgttggccaatatgtgcgcttgtttgagcaaggagatacagttagtatactacccctttctgatactgaatacaccagctatgctttgtcagaagctgaaagatttcaagattcttatgagataatagcactgttcagaaaagcttatgaatcatttcagagcctaggtgctacaagaatcgcttctgtctgtagcggtggaatggccatggaatattatgcagctggggattttagcaatgcaaaacagctttttgataatgttgctggtctgtaccgcaaagagggttggaccactttgctctgggagaacctaggatacttgagagagtgctcaatgaaacttaattccccaaaggattttatcagttattccctagagatggctgcattaccattattttctcgtagtgaagaggaaaatcgagaaaacaaaattaagagtgggcctgcaggttcccctaccatttccaggagagagaatatacagcaggaagttattaatgttttggaaagaaatcagtcatcagagggaaccgatgatggatttaataatgcgatggaagaagttactcaccttgatattgatcagataagttcgctaagaatggtacttactacgtctgttgcttttcttgatcaatctgtaaaacctggttcacctttgcttgtcagcgtgtcactcttatctcatcttccttctccagttgtggttgatcagttggaggttcaattcaatcaatctgactgtaactttgtgatacatagtagacaggaagattctcctcctttctattcaaatttgcatgaccaagttgttcaagatacttctcttacactcttcaccaatagatggatgcggttgacacatgaagcaaaatcagagcccgccccttcccgcgccgttctttttggttcccctgtccccgccgctgccgaaaaaccgccgatggaggtcgtcgccgccgcgaagcagaaggcgaagaagcatatacacctcttctactgctccgaatgcgaggagctcgctctcaaggtcgccgccagctccgacgtcatcgagctccagtctatcaactggcggagcttcgacgacgggttcccgaacctgttcatcaacaaggcccacgacatccgggggcagcacgtggcgttcctggcctccttcagctcgccggcggtcatattcgagcaggtctccgtcatcttcgcgctgcccaagctcttcatcgcctcgttcacgctcgtgctgcccttcttccccacgggctccttcgagcgcgtcgaggaggagggcgacgtcgccaccgccttcaccctcgcgcacatcctctccatgatccccaagtcgcgcggcgggcccaccagcgtcgtcatctacgacatccacgccctccaggagaggttctacttcggggacgacgtcctgccatgcttcgagacggggatcccgctcctgctgcagcgcctccgccagctcccggacgcagagaatatcaccattgcctttccagatgatggagcgtggaagcggttccacaagctgttgcagcactttccaatgatagtctgtaacaaggttcgtgaaggtgacaagagaatagttcgtataaaggaaggaaatcctgaaggccgtcatgttgttattgttgatgatttagtgcaatctgggggaactcttagagaatgccagaaagttctagcttcacatggcgcttcaaaagtaagtgcttatgtgacccatgctgtgttccctaagcagtcatacgaaaatttcatggcgtctaactctgctgggccaggcgaccagctcgcttacttctggatcacggactcatgcccgcacacaataaaagccatcgggcaaagacctccgtttgaggttctgagccttgctggctcgattgctgacgctcttcagatatgagcgcgtacactgactggtagacggggggcttgaaccgtgggatgcccgtcagatcgagaacttgtaccgtgagatgagctgctcctgctttttttccctaaatgtaggagtttgttccggttccttgaaaaaagcaaataatgtggagcaagttttaagtacctgaaggttccacaaacagcgctgtgaattgatgataaaatcaggcattgggatactcacatctgtgtgtacttactgtcgatgctcgcttccgtttgaagttcgcgagaccagtgcttctttcctgagtcctgaccctatgttggagtaccgttgccgtgcattcaacagaggccagtgcttctttcctgtgtcaa

SEQ ID NO: 44354 - DNA, 3610 bp, Zea Mays
gattcgccccagtttctctgaaacgaagtagacagccaccgtcttcccgggccacggcgatcatcaccgccgcggcgccgcccatatcgacagcagagccgctcgcccagtagcctcacctcgcccgcgcttgtggcggccatggaggactacccagaggagctgcggacgccgccggtgtcgctcgtgtcaatcgtggggtgcccagagctgcacccctcgatctcggcggcactcagctcccagcagccgcccatgaatactctggccctccccgacttcgccaaggtctccatcctggcccgcagcggtaagccccgcgaccctctcgcaccgccgcacccccccgcgggaatcctcaagaaggactggctccttaaacaccgcacccgtgccccggccgccgtcgccgcgctgttccgtgctgaccaggtctccgacgatcctgcccagtggctcaaggcctgctccgatctcgaaaacctcaagtctgcaattcagaggaaaaacactaaattattggtggtccttgtgcaggctcaagctagtgatgagttaagtgaggatgtaacggttgccctgaggaaacgtgcggaaatcgattccaatcacttggttgtgttggttgagcacgatgaagcagaatggaacagatctctgaacaaattgaagagtgtgtttgcggagttatgtgtagcattctataaagaggaagggctaaggataaaggctcgcattgagaaattttttttgcttctgtcgagctgagcatccggtactgcttcaaggttgctatttatgcggagtttagaagggattggccagaagcattgaagttctatgaggaaggtgttcgtgttttgcgtgagatgattggaacttcgacaaggttgcctccaacccaacgcctagttgagataaaagcagttgccgagcaatttcactttaagatatcgaccttgctacttcatgctgggaaagcggtagaagcaatcacatggttccgtaagcatatcagaagctatgcacgggttcttggaacaccagaagttgcttttcttcactgggaatggtttagccggcagttcctcgtctttggtgagttgatagaaacaacatctacaactattccagatacattatctcctagatttggcactgcagactatggattgactgagtgggaatttcagccagcatactactatcagttagcggcaacttacttgagagagaagaggtatgccatcgaatgttcatcatcaatggctaatcttacaacagaagttaatggagtacctgagtcagtaatgccttctgtatatgttggccaatatgtgcgcttgtttgagcaaggagatacagttagtatactacccctttctgatactgaatacaccagctatgctttgtcagaagctgaaagatttcaagattcttatgagataatagcactgttcagaaaagcttatgaatcatttcagagcctaggtgctacaagaatcgcttctgtctgtagcggtggaatggccatggaatattatgcagctggggattttagcaatgcaaaacagctttttgataatgttgctggtctgtaccgcaaagagggttggaccactttgctctgggagaacctaggatacttgagagagtgctcaatgaaacttaattccccaaaggattttatcagttattccctagagatggctgcattaccattattttctcgtagtgaagaggaaaatcgagaaaacaaaattaagagtgggcctgcaggttcccctaccatttccaggagagagaatatacagcaggaagttattaatgttttggaaagaaatcagtcatcagagggaaccgatgatggatttaataatgcgatggaagaagttactcaccttgatattgatcagataagttcgctaagaatggtacttactacgtctgttgcttttcttgatcaatctgtaaaacctggttcacctttgcttgtcagcgtgtcactcttatctcatcttccttctccagttgtggttgatcagttggaggttcaattcaatcaatctgactgtaactttgtgatacatagtagacaggaagattctcctcctttctattcaaatttgcatgaccaagttgttcaagatacttctcttacactcttcaccaatagatggatgcggttgacacatgaagcaaaatcagagcccgccccttcccgcgccgttctttttggttcccctgtccccgccgctgccgaaaaaccgccgatggaggtcgtcgccgccgcgaagcagaaggcgaagaagcatatacacctcttctactgctccgaatgcgaggagctcgctctcaaggtcgccgccagctccgacgtcatcgagctccagtctatcaactggcggagcttcgacgacgggttcccgaacctgttcatcaacaaggcccacgacatccgggggcagcacgtggcgttcctggcctccttcagctcgccggcggtcatattcgagcaggtctccgtcatcttcgcgctgcccaagctcttcatcgcctcgttcacgctcgtgctgcccttcttccccacgggctccttcgagcgcgtcgaggaggagggcgacgtcgccaccgccttcaccctcgcgcacatcctctccatgatccccaagtcgcgcggcgggcccaccagcgtcgtcatctacgacatccacgccctccaggagaggttctacttcggggacgacgtcctgccatgcttcgagacggggatcccgctcctgctgcagcgcctccgccagctcccggacgcagagaatatcaccattgcctttccagatgatggagcgtggaagcggttccacaagctgttgcagcactttccaatgatagtctgtaacaaggttcgtgaaggtgacaagagaatagttcgtataaaggaaggaaatcctgaaggccgtcatgttgttattgttgatgatttagtgcaatctgggggaactcttagagaatgccagaaagttctagcttcacatggcgcttcaaaagtaagtgcttatgtgacccatgctgtgttccctaagcagtcatacgaaaatttcatggcgtctaactctgctgggccaggcgaccagctcgcttacttctggatcacggactcatgcccgcacacaataaaagccatcgggcaaagacctccgtttgaggttctgagccttgctggctcgattgctgacgctcttcagatatgagcgcgtacactgactggtagacggggggcttgaaccgtgggatgcccgtcagatcgagaacttgtaccgtgagatgagctgctcctgctttttttccctaaatgtaggagtttgttccggttccttgaaaaaagcaaataatgtggagcaagttttaagtacctgaaggttccacaaacagcgctgtgaattgatgataaaatcaggcattgggatactcacatctgtgtgtacttactgtcgatgctcgcttccgtttgaagttcgcgagaccagtgcttctttcctgagtcctgaccctatgttggagtaccgttgccgtgcattcaacagaggccagtgcttctttcctgtgtcaa

SEQ ID NO: 44355 - DNA, 4002 bp, Zea Mays
gattcgccccagtttctctgaaacgaagtagacagccaccgtcttcccgggccacggcgatcatcaccgccgcggcgccgcccatatcgacagcagagccgctcgcccagtagcctcacctcgcccgcgcttgtggcggccatggaggactacccagaggagctgcggacgccgccggtgtcgctcgtgtcaatcgtggggtgcccagagctgcacccctcgatctcggcggcactcagctcccagcagccgcccatgaatactctggccctccccgacttcgccaaggtctccatcctggcccgcagcggtctccgacgatcctgcccagtggctcaaggcctgctccgatctcgaaaacctcaagtctgcaattcagaggaaaaacactaaattattggtggtccttgtgcaggctcaagctagtgatgagttaagtgaggatgtaacggttgccctgaggaaacgtgcggaaatcgattccaatcacttggttgtgttggttgagcacgatgaagcagaatggaacagatctctgaacaaattgaagagtgtgtttgcggagttatgtgtagcattctataaagaggaagggctaaggataaaggctcgcattgagaaattttttttgcttctgtcgagctgagcatccggtactgcttcaaggttgctatttatgcggagtttagaagggattggccagaagcattgaagttctatgaggaaggtgttcgtgttttgcgtgagatgattggaacttcgacaaggttgcctccaacccaacgcctagttgagataaaagcagttgccgagcaatttcactttaagatatcgaccttgctacttcatgctgggaaagcggtagaagcaatcacatggttccgtaagcatatcagaagctatgcacgggttcttggaacaccagaagttgcttttcttcactgggaatggtttagccggcagttcctcgtctttggtgagttgatagaaacaacatctacaactattccagatacattatctcctagatttggcactgcagactatggattgactgagtgggaatttcagccagcatactactatcagttagcggcaacttacttgagagagaagaggtatgccatcgaatgttcatcatcaatggctaatcttacaacagaagttaatggagtacctgagtcagtaatgccttctgtatatgttggccaatatgtgcgcttgtttgagcaaggagatacagttagtatactacccctttctgatactgaatacaccagctatgctttgtcagaagctgaaagatttcaagattcttatgagataatagcactgttcagaaaagcttatgaatcatttcagagcctaggtgctacaagaatcgcttctgtctgtagcggtggaatggccatggaatattatgcagctggggattttagcaatgcaaaacagctttttgataatgttgctggtctgtaccgcaaagagggttggaccactttgctctgggagaacctaggatacttgagagagtgctcaatgaaacttaattccccaaaggattttatcagttattccctagagatggctgcattaccattattttctcgtagtgaagaggaaaatcgagaaaacaaaattaagagtgggcctgcaggttcccctaccatttccaggagagagaatatacagcaggaagttattaatgttttggaaagaaatcagtcatcagagggaaccgatgatggatttaataatgcgatggaagaagttactcaccttgatattgatcagataagttcgctaagaatgttgtggttgatcagttggaggttcaattcaatcaatctgactgtaactttgtgatacatagtagacaggaagattctcctcctttctattcaaatttgcatgaccaagttgttcaagatacttctcttacactcttcaccaatagatggatgcggttgacacatgaagcaaaatcaggacagagtggaaaactagaatgtttgtctgtgaaggcgacaataaaaaaaatgccttgtgatttgctgccacgctgaaagccctgcttccatggaagacttcccattatggaaatttgagaaccaagtggagacattgcccacaagggaccctctgctcttgccttttctggacagaaacttattcaagttgaagagccagatgctcaagttgaccttgtcttaaattctgctggcccagctttagttggagaattatttactgtaccggtgagcatagagtcaaaagagcatgcagtccattctggtgagctgaaaattaacctcgttgatgccagaggtggtggtatgttgttgagtccaagggaagcggaagattctgaaagtcaccatgttgaacttcttggtgtctcaactgtgtccgaggacaaagagtcgaaggaagaggccgatagcataagaaatatccagtattcatttggggttatatctgttcccacattgggtgtgggtgattcctggtcgtgcaaactagaaatcaaacggcatcgagcaaaatcagtcatgctttatgtttcacttatagtgtgtttggtttgaggaataaagtgattcatcttcttctcactcctcacttttttatttggtttgtggaatataatgggttgatccatcaccacctcattcctcataagctaataattagtatatacatgtggagtgggttgattccaccaaaattgatggaatgaacttatgatgcatcactttatgaagcatagactgactctacaaaccaaacacaccattagttactccctaggttcaagtgaagaagaagcatcgcaccggcttaacgtccatagaagcatgcgaattgaagggcagaccccccttattagttagccaccagtttttgagaccatttaggcgagaaccgttgttgctatatcagggatcaggtcctcaggaagtgatgatgaaaaatgttctcttgctatgaatgagtctaacgtgcttattgtgactgctagaaactgcactgacgtgcctttgcatttgcattcgatgaccattcaacctgatggatccgccgccgcttgttgtgggcgtggagtgccctccctacgccgtccttgggatccctttcaccgtctatttgaaggttcacaattcaacgtcttttgcttcaggaaatcaagtactccctcgtcgatccccagaatttcgttttctctggtgctcacagtcacgccttctccatcctgccaaaatcagagcacactgttagccataagcttgtgcctcttggttccggctctcagcagttaccaaggatcacggtgacttcggtgcggtattctgccgcgttgactccttcagcctcggcagcgaccgtctttgtgtaacccggccagtgagcctaaattcaacttggaaactagccgtgcccgtgcagtatcggatgagatcgtgagttgagacgacctgagcaacctgaagtctccactctcctgacacttgttttagctcggcccgggctgcatgccatgcgagataaggtatgcttgctaccggaaagaccatcagtttggccttttacgttgatgttggagaaacgaatcagattcttgtcggcgaaaaaaaagggattgtcgctgtgcaaaagttttggcgttgtttttttttttgaggtttcgatttttgtagtgcttctggattaaccacatgtccgtaacttatgattacttcattgttttgggcccaagggtacaacaacatactacacaggacaggaggaggataggctgttgtaaatcaccatcccaccagtcaggaggataggctgcatgcttcgtgatggcagggccatggaggagaaaaccaacgcgtccttgactccttgagcaagtagcccgtcgcgttcatccggcggcgcgctccatgccgatccgtctcggcgtcgcatacggcatatgccagtcgccttcgcgtcggtctatataccggggaa

SEQ ID NO: 44356 - DNA, 4043 bp, Zea Mays
gattcgccccagtttctctgaaacgaagtagacagccaccgtcttcccgggccacggcgatcatcaccgccgcggcgccgcccatatcgacagcagagccgctcgcccagtagcctcacctcgcccgcgcttgtggcggccatggaggactacccagaggagctgcggacgccgccggtgtcgctcgtgtcaatcgtggggtgcccagagctgcacccctcgatctcggcggcactcagctcccagcagccgcccatgaatactctggccctccccgacttcgccaaggtctccatcctggcccgcagcggtctgcaattcagaggaaaaacactaaattattggtggtccttgtgcaggctcaagctagtgatgagttaagtgaggatgtaacggttgccctgaggaaacgtgcggaaatcgattccaatcacttggttgtgttggttgagcacgatgaagcagaatggaacagatctctgaacaaattgaagagtgtgtttgcggagttatgtgtagcattctataaagaggaagggctaaggataaaggctcgcattgagaaattttttttgcttctgtcgagctgagcatccggtactgcttcaaggttgctatttatgcggagtttagaagggattggccagaagcattgaagttctatgaggaaggtgttcgtgttttgcgtgagatgattggaacttcgacaaggttgcctccaacccaacgcctagttgagataaaagcagttgccgagcaatttcactttaagatatcgaccttgctacttcatgctgggaaagcggtagaagcaatcacatggttccgtaagcatatcagaagctatgcacgggttcttggaacaccagaagttgcttttcttcactgggaatggtttagccggcagttcctcgtctttggtgagttgatagaaacaacatctacaactattccagatacattatctcctagatttggcactgcagactatggattgactgagtgggaatttcagccagcatactactatcagttagcggcaacttacttgagagagaagaggtatgccatcgaatgttcatcatcaatggctaatcttacaacagaagttaatggagtacctgagtcagtaatgccttctgtatatgttggccaatatgtgcgcttgtttgagcaaggagatacagttagtatactacccctttctgatactgaatacaccagctatgctttgtcagaagctgaaagatttcaagattcttatgagataatagcactgttcagaaaagcttatgaatcatttcagagcctaggtgctacaagaatcgcttctgtctgtagcggtggaatggccatggaatattatgcagctggggattttagcaatgcaaaacagctttttgataatgttgctggtctgtaccgcaaagagggttggaccactttgctctgggagaacctaggatacttgagagagtgctcaatgaaacttaattccccaaaggattttatcagttattccctagagatggctgcattaccattattttctcgtagtgaagaggaaaatcgagaaaacaaaattaagagtgggcctgcaggttcccctaccatttccaggagagagaatatacagcaggaagttattaatgttttggaaagaaatcagtcatcagagggaaccgatgatggatttaataatgcgatggaagaagttactcaccttgatattgatcagataagttcgctaagaatggtacttactacgtctgttgcttttcttgatcaatctgtaaaacctggttcacctttgcttgtcagcgtgtcactcttatctcatcttccttctccagttgtggttgatcagttggaggttcaattcaatcaatctgactgtaactttgtgatacatagtagacaggaagattctcctcctttctattcaaatttgcatgaccaagttgttcaagatacttctcttacactcttcaccaatagatggatgcggttgacacatgaagcaaaatcaggacagagtggaaaactagaatgtttgtctgtgaaggcgacaataaaaaaaatgccttgtgatttgctgccacgctgaaagccctgcttccatggaagacttcccattatggaaatttgagaaccaagtggagacattgcccacaagggaccctctgctcttgccttttctggacagaaacttattcaagttgaagagccagatgctcaagttgaccttgtcttaaattctgctggcccagctttagttggagaattatttactgtaccggtgagcatagagtcaaaagagcatgcagtccattctggtgagctgaaaattaacctcgttgatgccagaggtggtggtatgttgttgagtccaagggaagcggaagattctgaaagtcaccatgttgaacttcttggtgtctcaactgtgtccgaggacaaagagtcgaaggaagaggccgatagcataagaaatatccagtattcatttggggttatatctgttcccacattgggtgtgggtgattcctggtcgtgcaaactagaaatcaaacggcatcgagcaaaatcagtcatgctttatgtttcacttatagtgtgtttggtttgaggaataaagtgattcatcttcttctcactcctcacttttttatttggtttgtggaatataatgggttgatccatcaccacctcattcctcataagctaataattagtatatacatgtggagtgggttgattccaccaaaattgatggaatgaacttatgatgcatcactttatgaagcatagactgactctacaaaccaaacacaccattagttactccctaggttcaagtgaagaagaagcatcgcaccggcttaacgtccatagaagcatgcgaattgaagggcagaccccccttattagttagccaccagtttttgagaccatttaggcgagaaccgttgttgctatatcagggatcaggtcctcaggaagtgatgatgaaaaatgttctcttgctatgaatgagtctaacgtgcttattgtgactgctagaaactgcactgacgtgcctttgcatttgcattcgatgaccattcaacctgatggatccgccgccgcttgttgtgggcgtggagtgccctccctacgccgtccttgggatccctttcaccgtctatttgaaggttcacaattcaacgtcttttgcttcaggaaatcaagtactccctcgtcgatccccagaatttcgttttctctggtgctcacagtcacgccttctccatcctgccaaaatcagagcacactgttagccataagcttgtgcctcttggttccggctctcagcagttaccaaggatcacggtgacttcggtgcggtattctgccgcgttgactccttcagcctcggcagcgaccgtctttgtgtaacccggccagtgagcctaaattcaacttggaaactagccgtgcccgtgcagtatcggatgagatcgtgagttgagacgacctgagcaacctgaagtctccactctcctgacacttgttttagctcggcccgggctgcatgccatgcgagataaggtatgcttgctaccggaaagaccatcagtttggccttttacgttgatgttggagaaacgaatcagattcttgtcggcgaaaaaaaagggattgtcgctgtgcaaaagttttggcgttgtttttttttttgaggtttcgatttttgtagtgcttctggattaaccacatgtccgtaacttatgattacttcattgttttgggcccaagggtacaacaacatactacacaggacaggaggaggataggctgttgtaaatcaccatcccaccagtcaggaggataggctgcatgcttcgtgatggcagggccatggaggagaaaaccaacgcgtccttgactccttgagcaagtagcccgtcgcgttcatccggcggcgcgctccatgccgatccgtctcggcgtcgcatacggcatatgccagtcgccttcgcgtcggtctatataccggggaa

SEQ ID NO: 44357 - DNA, 2292 bp, Zea Mays
gattcgccccagtttctctgaaacgaagtagacagccaccgtcttcccgggccacggcgatcatcaccgccgcggcgccgcccatatcgacagcagagccgctcgcccagtagcctcacctcgcccgcgcttgtggcggccatggaggactacccagaggagctgcggacgccgccggtgtcgctcgtgtcaatcgtggggtgcccagagctgcacccctcgatctcggcggcactcagctcccagcagccgcccatgaatactctggccctccccgacttcgccaaggtctccatcctggcccgcagcggtaagccccgcgaccctctcgcaccgccgcacccccccgcgggaatcctcaagaaggactggctccttaaacaccgcacccgtgccccggccgccgtcgccgcgctgttccgtgctgaccaggtctccgacgatcctgcccagtggctcaaggcctgctccgatctcgaaaacctcaagtctgcaattcagaggaaaaacactaaattattggtggtccttgtgcaggctcaagctagtgatgagttaagtgaggatgtaacggttgccctgaggaaacgtgcggaaatcgattccaatcacttggttgtgttggttgagcacgatgaagcagaatggaacagatctctgaacaaattgaagagtgtgtttgcggagttatgtgtagcattctataaagaggaagggctaaggataaaggctcgcattgagaaattttttttgcttctgtcgagctgagcatccggtactgcttcaaggttgctatttatgcggagtttagaagggattggccagaagcattgaagttctatgaggaaggtgttcgtgttttgcgtgagatgattggaacttcgacaaggttgcctccaacccaacgcctagttgagataaaagcagttgccgagcaatttcactttaagatatcgaccttgctacttcatgctgggaaagcggtagaagcaatcacatggttccgtaagcatatcagaagctatgcacgggttcttggaacaccagaagttgcttttcttcactgggaatggtttagccggcagttcctcgtctttggtgagttgatagaaacaacatctacaactattccagatacattatctcctagatttggcactgcagactatggattgactgagtgggaatttcagccagcatactactatcagttagcggcaacttacttgagagagaagaggtatgccatcgaatgttcatcatcaatggctaatcttacaacagaagttaatggagtacctgagtcagtaatgccttctgtatatgttggccaatatgtgcgcttgtttgagcaaggagatacagttagtatactacccctttctgatactgaatacaccagctatgctttgtcagaagctgaaagatttcaagattcttatgagataatagcactgttcagaaaagcttatgaatcatttcagagcctaggtgctacaagaatcgcttctgtctgtagcggtggaatggccatggaatattatgcagctggggattttagcaatgcaaaacagctttttgataatgttgctggtctgtaccgcaaagagggttggaccactttgctctgggagaacctaggatacttgagagagtgctcaatgaaacttaattccccaaaggattttatcagttattccctagagatggctgcattaccattattttctcgtagtgaagaggaaaatcgagaaaacaaaattaagagtgggcctgcaggttcccctaccatttccaggagagagaatatacagcaggaagttattaatgttttggaaagaaatcagtcatcagagggaaccgatgatggatttaataatgcgatggaagaagttactcaccttgatattgatcagataagttcgctaagaatgacaggaagattctcctcctttctattcaaatttgcatgaccaagttgttcaagatacttctcttacactcttcaccaatagatggatgcggttgacacatgaagcaaaatcagggtacaacaacatactacacaggacaggaggaggataggctgttgtaaatcaccatcccaccagtcaggaggataggctgcatgcttcgtgatggcagggccatggaggagaaaaccaacgcgtccttgactccttgagcaagtagcccgtcgcgttcatccggcggcgcgctccatgccgatccgtctcggcgtcgcatacggcatatgccagtcgccttcgcgtcggtctatataccggggaa

SEQ ID NO: 44358 - DNA, 2123 bp, Zea Mays
ggagaagacggaagactgcagaaactcctgaggaggaggacgcggggaataaaatcgagcgataaaaaaaggctgatggatgctaccactgttgattccaaatggatctctcccgccactgaagatgggtccatggacaggcgaggaaacccagctgtcaagacaaccaccggaagatggagatctgccatcctgctgctagctaactatgggctcgcgacgtgcgccttcttcggcgtcggcgtgaacctcgtggtgttcctgcgccgggtgctccaccagggcaacgccgaggcggccaacagcatcagcaagtggactgggaccgtctacatcttctcgctcatcggcgccttcctcagcgactcctactggggccgatacgtcacgtgcgccgtcttccagatcatctacgtgatggggctggtggtcctgtcgctcgcgtcatggctcttgctggtgaagccgtccggctgcggcggcgtcaaggcgcactgcgacgggccgtcggcgcccggcgtcgcgctgttctacctgtccacctacatgatcgcgttcggcaacggagggtaccagccttccatcgcgacgttcgggtcggaccagttcgacgagacggaccccgaggaggcgcgctccaaggtggccttcttcagctacttctacctggcgctcaacgtcggctccctgctctccaacacggtgctggtgtactacgaggactcggggcggtgggtcatggggttctgggtctcggcggccgccgcggcgctggcgctcgtgctcttcctgctcggcacgcccggctaccgccacttcaagccgagcggcaacccgctcacccgcgtcgcgcaggtgttcgtcgccgcgctgcgcaagtggcgcgccgaggtcccgcgtggcgagctcctccacgaggtggtggaagcaggagaggaccctaaggtctcgggcatccgcaagatccttcacagcgacgggctcaggttcctcgacaaggcggcgacgatcacggaggaggaggaggaggagggtccgtggcggctctgcacggtgacgcaggtggaggaggtgaagtgcatcctgaggatgctgcccatctggctgtgcacgatcgtgtactcggtggtgttcacccagatggcgtcgctgttcgtggagcagggcgccaccatggacaccaacatcgggtcgttccacttccccgccgcgagcatgtcgctgttcgacgtcctcagcgtgctggcgttcatcgccatctaccggcgggtgctggtgcccgtcatggcgcggctgtcaggcaacccgcagggcctgaccgagctgcagcgcatgggcgtcgggctcgtgatcggcatggcggcgatggtggtggcgggcgtggtggaggtggagcggctgaagcgcgtggcggccccggaccagccgagctccctgagcgtgctgtggcaggtgccgcagtacgcgctgatcggggcgtcggaggtgttcatgtacgtggggcagctggagttcttcaacgggcaggcgcccgacggcgtcaagagcttcggcagcgcgctgtgcatggcgtccatctcgctggggaactacgtgagcatcatgctggtgagcgtagtcacgagcctcaccgccggtgagaagcgtccggggtggatccctgggaaccttaactcaggacacctcgacaggttctacttcctcctcgccgctctctcgctcgtggacctcgccgtctacgtcgcctgtgccatgtggtacaagggcatcaagcttgacggcggcgacggcgataacaggagaaaggtctctgcgcacgtctagctagccactgcatactggacctcgggccttcagttttcaggttcagagacgtgccgggctggcccctggccgtatgcccgtatagtcttatagagagaggagagagagagagaggaaataaaatgtcaaagaatatgtaaccatccgctcggcgttggatggcccatgttgttatgtatctttggtcagatgatccaagtaacctcatgtgaagtactaatgcaataattatatatggatagtacactatctgtgccttaggacggcacgtaattatatttaatgatgagtgattttag

SEQ ID NO: 44359 - DNA, 2587 bp, Zea Mays
tccccactcggcgtctgctgctgcattgccgtgccgccagtggagaggagatcagtgatcgttggccactgcactagctgcacgaaggtactcgatacttgttgagagagagagagagagagtgctgatcaccggccgccgccacttctactgggagttttttgtccggtaaatgactggaggccttgccggcgtcgtcgtcgcggtacaggttaaacaaatcttgccggctcaacgcttcgttaggagaagacggaagactgcagaaactcctgaggaggaggacgcggggaataaaatcgagcgataaaaaaagtatcctgttagagatatgtagtgtgtactacgcatttcagagttcacatgcagtcgtaattaacaggttcattttggtcggaacagttgctgagtttccacatcatgcatggaactgaaatatacatatgcaggaccaggactgctgtggaacagtatcctgaactaaacagctaaaatacacagtagaaactaataaactcactggacactggacagggctgatggatgctaccactgttgattccaaatggatctctcccgccactgaagatgggtccatggacaggcgaggaaacccagctgtcaagacaaccaccggaagatggagatctgccatcctgctgctagctaactatgggctcgcgacgtgcgccttcttcggcgtcggcgtgaacctcgtggtgttcctgcgccgggtgctccaccagggcaacgccgaggcggccaacagcatcagcaagtggactgggaccgtctacatcttctcgctcatcggcgccttcctcagcgactcctactggggccgatacgtcacgtgcgccgtcttccagatcatctacgtgatggggctggtggtcctgtcgctcgcgtcatggctcttgctggtgaagccgtccggctgcggcggcgtcaaggcgcactgcgacgggccgtcggcgcccggcgtcgcgctgttctacctgtccacctacatgatcgcgttcggcaacggagggtaccagccttccatcgcgacgttcgggtcggaccagttcgacgagacggaccccgaggaggcgcgctccaaggtggccttcttcagctacttctacctggcgctcaacgtcggctccctgctctccaacacggtgctggtgtactacgaggactcggggcggtgggtcatggggttctgggtctcggcggccgccgcggcgctggcgctcgtgctcttcctgctcggcacgcccggctaccgccacttcaagccgagcggcaacccgctcacccgcgtcgcgcaggtgttcgtcgccgcgctgcgcaagtggcgcgccgaggtcccgcgtggcgagctcctccacgaggtggtggaagcaggagaggaccctaaggtctcgggcatccgcaagatccttcacagcgacgggctcaggttcctcgacaaggcggcgacgatcacggaggaggaggaggaggagggtccgtggcggctctgcacggtgacgcaggtggaggaggtgaagtgcatcctgaggatgctgcccatctggctgtgcacgatcgtgtactcggtggtgttcacccagatggcgtcgctgttcgtggagcagggcgccaccatggacaccaacatcgggtcgttccacttccccgccgcgagcatgtcgctgttcgacgtcctcagcgtgctggcgttcatcgccatctaccggcgggtgctggtgcccgtcatggcgcggctgtcaggcaacccgcagggcctgaccgagctgcagcgcatgggcgtcgggctcgtgatcggcatggcggcgatggtggtggcgggcgtggtggaggtggagcggctgaagcgcgtggcggccccggaccagccgagctccctgagcgtgctgtggcaggtgccgcagtacgcgctgatcggggcgtcggaggtgttcatgtacgtggggcagctggagttcttcaacgggcaggcgcccgacggcgtcaagagcttcggcagcgcgctgtgcatggcgtccatctcgctggggaactacgtgagcatcatgctggtgagcgtagtcacgagcctcaccgccggtgagaagcgtccggggtggatccctgggaaccttaactcaggacacctcgacaggttctacttcctcctcgccgctctctcgctcgtggacctcgccgtctacgtcgcctgtgccatgtggtacaagggcatcaagcttgacggcggcgacggcgataacaggagaaaggtctctgcgcacgtctagctagccactgcatactggacctcgggccttcagttttcaggttcagagacgtgccgggctggcccctggccgtatgcccgtatagtcttatagagagaggagagagagagagaggaaataaaatgtcaaagaatatgtaaccatccgctcggcgttggatggcccatgttgttatgtatctttggtcagatgatccaagtaacctcatgtgaagtactaatgcaataattatatatggatagtacactatctgtgccttaggacggcacgtaattatatttaatgatgagtgattttag

SEQ ID NO: 44360 - DNA, 2562 bp, Zea Mays
ccagctttctcttcataaatacgcggccgtgcgtcccccgaacccccgcacctcctatccgctccccactcggcgtctgctgctgcattgccgtgccgccagtggagaggagatcagtgatcgttggccactgcactagctgcacgaaggtactcgatacttgttgagagagagagagagagagtgctgatcaccggccgccgccacttctactgggagttttttgtccggtaaatgactggaggccttgccggcgtcgtcgtcgcggtacagggctgatggatgctaccactgttgattccaaatggatctctcccgccactgaagatgggtccatggacaggcgaggaaacccagctgtcaagacaaccaccggaagatggagatctgccatcctgctgctaggtaaaagcttgttttttatttaaaaaatagaaagaaagaaagaaagaaagaaagaaagagagagagagatgttgtaaacatctcacatgatgcctgatgagtaatgcttccctctggcctctgtacatgattgctagctactagattctgattctgtaaagaactccagattcgaacagttaattcaactgtgtaatttatcgccgcaaccctttccgtctctgttaccgatgcagctaactatgggctcgcgacgtgcgccttcttcggcgtcggcgtgaacctcgtggtgttcctgcgccgggtgctccaccagggcaacgccgaggcggccaacagcatcagcaagtggactgggaccgtctacatcttctcgctcatcggcgccttcctcagcgactcctactggggccgatacgtcacgtgcgccgtcttccagatcatctacgtgatggggctggtggtcctgtcgctcgcgtcatggctcttgctggtgaagccgtccggctgcggcggcgtcaaggcgcactgcgacgggccgtcggcgcccggcgtcgcgctgttctacctgtccacctacatgatcgcgttcggcaacggagggtaccagccttccatcgcgacgttcgggtcggaccagttcgacgagacggaccccgaggaggcgcgctccaaggtggccttcttcagctacttctacctggcgctcaacgtcggctccctgctctccaacacggtgctggtgtactacgaggactcggggcggtgggtcatggggttctgggtctcggcggccgccgcggcgctggcgctcgtgctcttcctgctcggcacgcccggctaccgccacttcaagccgagcggcaacccgctcacccgcgtcgcgcaggtgttcgtcgccgcgctgcgcaagtggcgcgccgaggtcccgcgtggcgagctcctccacgaggtggtggaagcaggagaggaccctaaggtctcgggcatccgcaagatccttcacagcgacgggctcaggttcctcgacaaggcggcgacgatcacggaggaggaggaggaggagggtccgtggcggctctgcacggtgacgcaggtggaggaggtgaagtgcatcctgaggatgctgcccatctggctgtgcacgatcgtgtactcggtggtgttcacccagatggcgtcgctgttcgtggagcagggcgccaccatggacaccaacatcgggtcgttccacttccccgccgcgagcatgtcgctgttcgacgtcctcagcgtgctggcgttcatcgccatctaccggcgggtgctggtgcccgtcatggcgcggctgtcaggcaacccgcagggcctgaccgagctgcagcgcatgggcgtcgggctcgtgatcggcatggcggcgatggtggtggcgggcgtggtggaggtggagcggctgaagcgcgtggcggccccggaccagccgagctccctgagcgtgctgtggcaggtgccgcagtacgcgctgatcggggcgtcggaggtgttcatgtacgtggggcagctggagttcttcaacgggcaggcgcccgacggcgtcaagagcttcggcagcgcgctgtgcatggcgtccatctcgctggggaactacgtgagcatcatgctggtgagcgtagtcacgagcctcaccgccggtgagaagcgtccggggtggatccctgggaaccttaactcaggacacctcgacaggttctacttcctcctcgccgctctctcgctcgtggacctcgccgtctacgtcgcctgtgccatgtggtacaagggcatcaagcttgacggcggcgacggcgataacaggagaaaggtctctgcgcacgtctagctagccactgcatactggacctcgggccttcagttttcaggttcagagacgtgccgggctggcccctggccgtatgcccgtatagtcttatagagagaggagagagagagagaggaaataaaatgtcaaagaatatgtaaccatccgctcggcgttggatggcccatgttgttatgtatctttggtcagatgatccaagtaacctcatgtgaagtactaatgcaataattatatatggatagtacactatctgtgccttaggacggcacgtaattatatttaatgatgagtgattttag

SEQ ID NO: 44361 - DNA, 2405 bp, Zea Mays
cgaacaccgccaccaacacttactccggtgccggtcggccgggtcgtgcgtgcccctgcccccctccggcctccggctcccagctttctcttcataaatacgcggccgtgcgtcccccgaacccccgcacctcctatccgctccccactcggcgtctgctgctgcattgccgtgccgccagtggagaggagatcagtgatcgttggccactgcactagctgcacgaaggtactcgatacttgttgagagagagagagagagagtgctgatcaccggccgccgccacttctactgggagttttttgtccggtaaatgactggaggccttgccggcgtcgtcgtcgcggtacagggctgatggatgctaccactgttgattccaaatggatctctcccgccactgaagatgggtccatggacaggcgaggaaacccagctgtcaagacaaccaccggaagatggagatctgccatcctgctgctagctaactatgggctcgcgacgtgcgccttcttcggcgtcggcgtgaacctcgtggtgttcctgcgccgggtgctccaccagggcaacgccgaggcggccaacagcatcagcaagtggactgggaccgtctacatcttctcgctcatcggcgccttcctcagcgactcctactggggccgatacgtcacgtgcgccgtcttccagatcatctacgtgatggggctggtggtcctgtcgctcgcgtcatggctcttgctggtgaagccgtccggctgcggcggcgtcaaggcgcactgcgacgggccgtcggcgcccggcgtcgcgctgttctacctgtccacctacatgatcgcgttcggcaacggagggtaccagccttccatcgcgacgttcgggtcggaccagttcgacgagacggaccccgaggaggcgcgctccaaggtggccttcttcagctacttctacctggcgctcaacgtcggctccctgctctccaacacggtgctggtgtactacgaggactcggggcggtgggtcatggggttctgggtctcggcggccgccgcggcgctggcgctcgtgctcttcctgctcggcacgcccggctaccgccacttcaagccgagcggcaacccgctcacccgcgtcgcgcaggtgttcgtcgccgcgctgcgcaagtggcgcgccgaggtcccgcgtggcgagctcctccacgaggtggtggaagcaggagaggaccctaaggtctcgggcatccgcaagatccttcacagcgacgggctcaggttcctcgacaaggcggcgacgatcacggaggaggaggaggaggagggtccgtggcggctctgcacggtgacgcaggtggaggaggtgaagtgcatcctgaggatgctgcccatctggctgtgcacgatcgtgtactcggtggtgttcacccagatggcgtcgctgttcgtggagcagggcgccaccatggacaccaacatcgggtcgttccacttccccgccgcgagcatgtcgctgttcgacgtcctcagcgtgctggcgttcatcgccatctaccggcgggtgctggtgcccgtcatggcgcggctgtcaggcaacccgcagggcctgaccgagctgcagcgcatgggcgtcgggctcgtgatcggcatggcggcgatggtggtggcgggcgtggtggaggtggagcggctgaagcgcgtggcggccccggaccagccgagctccctgagcgtgctgtggcaggtgccgcagtacgcgctgatcggggcgtcggaggtgttcatgtacgtggggcagctggagttcttcaacgggcaggcgcccgacggcgtcaagagcttcggcagcgcgctgtgcatggcgtccatctcgctggggaactacgtgagcatcatgctggtgagcgtagtcacgagcctcaccgccggtgagaagcgtccggggtggatccctgggaaccttaactcaggacacctcgacaggttctacttcctcctcgccgctctctcgctcgtggacctcgccgtctacgtcgcctgtgccatgtggtacaagggcatcaagcttgacggcggcgacggcgataacaggagaaaggtctctgcgcacgtctagctagccactgcatactggacctcgggccttcagttttcaggttcagagacgtgccgggctggcccctggccgtatgcccgtatagtcttatagagagaggagagagagagagaggaaataaaatgtcaaagaatatgtaaccatccgctcggcgttggatggcccatgttgttatgtatctttggtcagatgatccaagtaacctcatgtgaagtactaatgcaataattatatatggatagtacactatctgtgccttaggacggcacgtaattatatttaatgatgagtgattttag

SEQ ID NO: 44362 - DNA, 2866 bp, Zea Mays
ttttggtgcaatgtgaagtatgaggtagtcgaggctgcaaagcggctccatttgaaggagcatgtggttttggacggttctggcaatcctgtaaaattagctgctacagtcgaatgcaagggcattgttgggagtgatgacaggcattacattttggatctgatgagagtgactcctcgagattctaactacattggacaagggcaccgcttctgtgtgctgagacctgaacttatagcatcatttgttgaggctgaatccatgaaacaatcgttgaagcagaaggttccagatgctccagttgcaagtacttctgatgctaaggctacctctgttgaagcagatgacaagtctgaagaaagctctgttcatacacacaaggaaaatgacaactcaagctccgagattcttttcaatccaaatgtgtttacggagtacaagcttgatggcagtccagaggaaatcgctgccgacgaagagttggtaaaaagggctggtacatatcttatagacatagtgatcccaaaaattgttcaggatctatgctcccttgatatctcccctatggatggacagactttaaccgatgcattgcatctccatgggataaatattaggtatctgggcaagattgcaggcatggtcaaacatttaccacacttacaggacttgttttctgctgaaataatagttagatctgcaaagcatgttatcaaggatatactgaggcaaagtttggatcatgatattgggccagctattgctcatttcttgaactgtttcatggggaaagttttaggtgcttctacagagggtagtctaagtgacatgcagtcaaagactctgaagggccatgaaaatagccaaactcaaaagtctactaaaggccataaactgagcaatgctgctgcttcaagaaaaagcttgtcagcttattctcatctaacctctgatggaatttggtttagcattaaggaatttgcaaaatcaaaatatcagtttgaagtgccagatgatgcaaggctttcagccaaaagggtagctgttctccgaaatctttgccaaaaggtaggaataacaattgctgcacgtaaatatgatcttgatgcttcaactccatttgaagcctcagatattttaaatctccaaccagtcgtcaagcattctgttccaacctgtacggaagcaaaaaatcttatggaagcagggaaagtcaggatggctgagggaacattgaatgaggcatatgcattgttttctgaagccttttcactgcttcaacagataactggtcccatgcacaaggatgctgcaaattgttgccggtaccttgctatggttttgtaccatgctggtgatacagctggggcagttgtgcagcaacatagggaactcatcataaacgagagatgtcttggtcttgatcatccagacacagcccacagttatggtaacatggccttattctatcatgggctcaatcaaactgagctggcactgcggcacatgtctcgcacactgctgctgctaagtttggcgtcaggacctgatcacccggatgttgcagcaactcttataaatgttgcaatgatgtaccaggatgccagtaatatgaataccgctctcaggtatcttcaagaagcccttatgaagaatgagcgacttcttgggcctgtccatgttcaaacagctgtgtgctatcatgctctagccattgcatttagttgtatgagcttatataagctttcaattcagcatgaaaagaagacatatgatatactggtaaaacaattaggggaaaatgactcacggactgaagactcaaaaaattggttgaatacatttaagcttcgagaagagcaggtcaacgcccagaagcagaagggccaggaagctaatgcatccgataacgctgttaaattcttgaaggcaaaccctgcagttttacaagcaatgaaggctgctgcgatccaatcaggtggtgtgtcagcaaatgtcaacaggtcgctcaatgctgcagtcgttggagaaggtgtaccacgactgagaggagtggatgagcgagctgctcgagcgactgcagaagcacggaagaaagctgctgcaagaggccttaatgtccgtaatggccctgtggcaaaccatgcgtctgatgaactagctcagattctcaaactcatcaacgctgtttcggggtcttccactcctggctctgcaaagactgaggtatctgcctctgaagggcaggcaacgaatggatgtattcaaaatggaactgacactgaaccgaaggctgcggataccaacgggctatctgcatcggttaagtccactgtcaacgcaccatttggactggggacaacattggagtcgaagaagcagaaatcgaagcaaaagtcgtagaaaacctgtgcttggaatttcctttagcaacagttttggactgtagagtgatttgggtttttgacctttataggattgccacgttcacgtggtggaagagttcatttgtttttgttggaggttttttaggaggtctcaataatcattacaagaaagaagacaattgtttcgaatcatcattgatagaccactgatgagatattggctaatccttaagttaataaatcttcagtcgatacaatacctgtttaaagcatccttgtgatggctgctattgtttgtcgtacggcatatgctggtataccgttaatgtagttcttgatcatcgtatctttttctagaaggtatacccgtacaatgttgccaactattttattattgctatcgataattattgaactaggctgagcgctgttgcttggcctggccgtgaattatttctagcatcactttttgacagaca

SEQ ID NO: 44363 - DNA, 3261 bp, Zea Mays
atggaacaaccacaatgcaatgcgcctttgcaggcagtggggcaagaaaagccgagggagaggaggaagcgacgctaccggcgatgcgtggctgaacaattgagggagagttttgctgtcgacgccgactatgaatacatttcaaaggaccacaagccagattgccaaaatgggtccagcagaagcaccaaggtttcctccccagatgtgatcactaagccagaccatgatgaatctgctgaggtagttgactcaaaatccgaagaggcacaaatcacagatagtgagcaggcaacatatgcttctgccaacaatgacttaaaaggaactaaggcctatcaagaagctgatgtttctggcctttacaatcttgcgatggcaataattgattacagaggtcacagggttgtagctcagagtatcatacctggtattcttcaaggagacaagtctgattctcttctgtatggctctgttgataatggcaagaagatatcttggaacgaaacattccattcaaaggtagtcgaggctgcaaagcggctccatttgaaggagcatgtggttttggacggttctggcaatcctgtaaaattagctgctacagtcgaatgcaagggcattgttgggagtgatgacaggcattacattttggatctgatgagagtgactcctcgagattctaactacattggacaagggcaccgcttctgtgtgctgagacctgaacttatagcatcatttgttgaggctgaatccatgaaacaatcgttgaagcagaaggttccagatgctccagttgcaagtacttctgatgctaaggctacctctgttgaagcagatgacaagtctgaagaaagctctgttcatacacacaaggaaaatgacaactcaagctccgagattcttttcaatccaaatgtgtttacggagtacaagcttgatggcagtccagaggaaatcgctgccgacgaagagttggtaaaaagggctggtacatatcttatagacatagtgatcccaaaaattgttcaggatctatgctcccttgatatctcccctatggatggacagactttaaccgatgcattgcatctccatgggataaatattaggtatctgggcaagattgcaggcatggtcaaacatttaccacacttacaggacttgttttctgctgaaataatagttagatctgcaaagcatgttatcaaggatatactgaggcaaagtttggatcatgatattgggccagctattgctcatttcttgaactgtttcatggggaaagttttaggtgcttctacagagggtagtctaagtgacatgcagtcaaagactctgaagggccatgaaaatagccaaactcaaaagtctactaaaggccataaactgagcaatgctgctgcttcaagaaaaagcttgtcagcttattctcatctaacctctgatggaatttggtttagcattaaggaatttgcaaaatcaaaatatcagtttgaagtgccagatgatgcaaggctttcagccaaaagggtagctgttctccgaaatctttgccaaaaggtaggaataacaattgctgcacgtaaatatgatcttgatgcttcaactccatttgaagcctcagatattttaaatctccaaccagtcgtcaagcattctgttccaacctgtacggaagcaaaaaatcttatggaagcagggaaagtcaggatggctgagggaacattgaatgaggcatatgcattgttttctgaagccttttcactgcttcaacagataactggtcccatgcacaaggatgctgcaaattgttgccggtaccttgctatggttttgtaccatgctggtgatacagctggggcagttgtgcagcaacatagggaactcatcataaacgagagatgtcttggtcttgatcatccagacacagcccacagttatggtaacatggccttattctatcatgggctcaatcaaactgagctggcactgcggcacatgtctcgcacactgctgctgctaagtttggcgtcaggacctgatcacccggatgttgcagcaactcttataaatgttgcaatgatgtaccaggatgccagtaatatgaataccgctctcagcatgaaaagaagacatatgatatactggtaaaacaattaggggaaaatgactcacggactgaagactcaaaaaattggttgaatacatttaagcttcgagaagagcagttattttatcgtcaatctgcacaggtcaacgcccagaagcagaagggccaggaagctaatgcatccgataacgctgttaaattcttgaaggcaaaccctgcagttttacaagcaatgaaggctgctgcgatccaatcaggtggtgtgtcagcaaatgtcaacaggtcgctcaatgctgcagtcgttggagaaggtgtaccacgactgagaggagtggatgagcgagctgctcgagcgactgcagaagcacggaagaaagctgctgcaagaggccttaatgtccgtaatggccctgtggcaaaccatgcgtctgatgaactagctcagattctcaaactcatcaacgctgtttcggggtcttccactcctggctctgcaaagactgaggtatctgcctctgaagggcaggcaacgaatggatgtattcaaaatggaactgacactgaaccgaaggctgcggataccaacgggctatctgcatcggttaagtccactgtcaacgcaccatttggactggggacaacattggagtcgaagaagcagaaatcgaagcaaaagtcgtagaaaacctgtgcttggaatttcctttagcaacagttttggactgtagagtgatttgggtttttgacctttataggattgccacgttcacgtggtggaagagttcatttgtttttgttggaggttttttaggaggtctcaataatcattacaagaaagaagacaattgtttcgaatcatcattgatagaccactgatgagatattggctaatccttaagttaataaatcttcagtcgatacaatacctgtttaaagcatccttgtgatggctgctattgtttgtcgtacggcatatgctggtataccgttaatgtagttcttgatcatcgtatctttttctagaaggtatacccgtacaatgttgccaactattttattattgctatcgataattattgaactaggctgagcgctgttgcttggcctggccgtgaattatttctagcatcactttttgacagaca

SEQ ID NO: 44364 - DNA, 3324 bp, Zea Mays
atggaacaaccacaatgcaatgcgcctttgcaggcagtggggcaagaaaagccgagggagaggaggaagcgacgctaccggcgatgcgtggctgaacaattgagggagagttttgctgtcgacgccgactatgaatacatttcaaaggaccacaagccagattgccaaaatgggtccagcagaagcaccaaggtttcctccccagatgtgatcactaagccagaccatgatgaatctgctgaggtagttgactcaaaatccgaagaggcacaaatcacagatagtgagcaggcaacatatgcttctgccaacaatgacttaaaaggaactaaggcctatcaagaagctgatgtttctggcctttacaatcttgcgatggcaataattgattacagaggtcacagggttgtagctcagagtatcatacctggtattcttcaaggagacaagtctgattctcttctgtatggctctgttgataatggcaagaagatatcttggaacgaaacattccattcaaaggtagtcgaggctgcaaagcggctccatttgaaggagcatgtggttttggacggttctggcaatcctgtaaaattagctgctacagtcgaatgcaagggcattgttgggagtgatgacaggcattacattttggatctgatgagagtgactcctcgagattctaactacattggacaagggcaccgcttctgtgtgctgagacctgaacttatagcatcatttgttgaggctgaatccatgaaacaatcgttgaagcagaaggttccagatgctccagttgcaagtacttctgatgctaaggctacctctgttgaagcagatgacaagtctgaagaaagctctgttcatacacacaaggaaaatgacaactcaagctccgagattcttttcaatccaaatgtgtttacggagtacaagcttgatggcagtccagaggaaatcgctgccgacgaagagttggtaaaaagggctggtacatatcttatagacatagtgatcccaaaaattgttcaggatctatgctcccttgatatctcccctatggatggacagactttaaccgatgcattgcatctccatgggataaatattaggtatctgggcaagattgcaggcatggtcaaacatttaccacacttacaggacttgttttctgctgaaataatagttagatctgcaaagcatgttatcaaggatatactgaggcaaagtttggatcatgatattgggccagctattgctcatttcttgaactgtttcatggggaaagttttaggtgcttctacagagggtagtctaagtgacatgcagtcaaagactctgaagggccatgaaaatagccaaactcaaaagtctactaaaggccataaactgagcaatgctgctgcttcaagaaaaagcttgtcagcttattctcatctaacctctgatggaatttggtttagcattaaggaatttgcaaaatcaaaatatcagtttgaagtgccagatgatgcaaggctttcagccaaaagggtagctgttctccgaaatctttgccaaaaggtaggaataacaattgctgcacgtaaatatgatcttgatgcttcaactccatttgaagcctcagatattttaaatctccaaccagtcgtcaagcattctgttccaacctgtacggaagcaaaaaatcttatggaagcagggaaagtcaggatggctgagggaacattgaatgaggcatatgcattgttttctgaagccttttcactgcttcaacagataactggtcccatgcacaaggatgctgcaaattgttgccggtaccttgctatggttttgtaccatgctggtgatacagctggggcagttgtgcagcaacatagggaactcatcataaacgagagatgtcttggtcttgatcatccagacacagcccacagttatggtaacatggccttattctatcatgggctcaatcaaactgagctggcactgcggcacatgtctcgcacactgctgctgctaagtttggcgtcaggacctgatcacccggatgttgcagcaactcttataaatgttgcaatgatgtaccaggatgccagtaatatgaataccgctctcaggtatcttcaagaagcccttatgaagaatgagcgacttcttgggcctgtccatgttcaaacagctgtgtgctatcatgctctagccattgcatttagttgtatgagcttatataagctttcaattcaggggaaaatgactcacggactgaagactcaaaaaattggttgaatacatttaagcttcgagaagagcaggtcaacgcccagaagcagaagggccaggaagctaatgcatccgataacgctgttaaattcttgaaggcaaaccctgcagttttacaagcaatgaaggctgctgcgatccaatcaggtggtgtgtcagcaaatgtcaacaggtcgctcaatgctgcagtcgttggagaaggtgtaccacgactgagaggagtggatgagcgagctgctcgagcgactgcagaagcacggaagaaagctgctgcaagaggccttaatgtccgtaatggccctgtggcaaaccatgcgtctgatgaactagctcagattctcaaactcatcaacgctgtttcggggtcttccactcctggctctgcaaagactgaggtatctgcctctgaagggcaggcaacgaatggatgtattcaaaatggaactgacactgaaccgaaggctgcggataccaacgggctatctgcatcggttaagtccactgtcaacgcaccatttggactggggacaacattggagtcgaagaagcagaaatcgaagcaaaagtcgtagaaaacctgtgcttggaatttcctttagcaacagttttggactgtagagtgatttgggtttttgacctttataggattgccacgttcacgtggtggaagagttcatttgtttttgttggaggttttttaggaggtctcaataatcattacaagaaagaagacaattgtttcgaatcatcattgatagaccactgatgagatattggctaatccttaagttaataaatcttcagtcgatacaatacctgtttaaagcatccttgtgatggctgctattgtttgtcgtacggcatatgctggtataccgttaatgtagttcttgatcatcgtatctttttctagaaggtatacccgtacaatgttgccaactattttattattgctatcgataattattgaactaggctgagcgctgttgcttggcctggccgtgaattatttctagcatcactttttgacagaca

SEQ ID NO: 44365 - DNA, 3357 bp, Zea Mays
atggaacaaccacaatgcaatgcgcctttgcaggcagtggggcaagaaaagccgagggagaggaggaagcgacgctaccggcgatgcgtggctgaacaattgagggagagttttgctgtcgacgccgactatgaatacatttcaaaggaccacaagccagattgccaaaatgggtccagcagaagcaccaaggtttcctccccagatgtgatcactaagccagaccatgatgaatctgctgaggtagttgactcaaaatccgaagaggcacaaatcacagatagtgagcaggcaacatatgcttctgccaacaatgacttaaaaggaactaaggcctatcaagaagctgatgtttctggcctttacaatcttgcgatggcaataattgattacagaggtcacagggttgtagctcagagtatcatacctggtattcttcaaggagacaagtctgattctcttctgtatggctctgttgataatggcaagaagatatcttggaacgaaacattccattcaaaggtagtcgaggctgcaaagcggctccatttgaaggagcatgtggttttggacggttctggcaatcctgtaaaattagctgctacagtcgaatgcaagggcattgttgggagtgatgacaggcattacattttggatctgatgagagtgactcctcgagattctaactacattggacaagggcaccgcttctgtgtgctgagacctgaacttatagcatcatttgttgaggctgaatccatgaaacaatcgttgaagcagaaggttccagatgctccagttgcaagtacttctgatgctaaggctacctctgttgaagcagatgacaagtctgaagaaagctctgttcatacacacaaggaaaatgacaactcaagctccgagattcttttcaatccaaatgtgtttacggagtacaagcttgatggcagtccagaggaaatcgctgccgacgaagagttggtaaaaagggctggtacatatcttatagacatagtgatcccaaaaattgttcaggatctatgctcccttgatatctcccctatggatggacagactttaaccgatgcattgcatctccatgggataaatattaggtatctgggcaaggcatggtcaaacatttaccacacttacaggacttgttttctgctgaaataatagttagatctgcaaagcatgttatcaaggatatactgaggcaaagtttggatcatgatattgggccagctattgctcatttcttgaactgtttcatggggaaagttttaggtgcttctacagagggtagtctaagtgacatgcagtcaaagactctgaagggccatgaaaatagccaaactcaaaagtctactaaaggccataaactgagcaatgctgctgcttcaagaaaaagcttgtcagcttattctcatctaacctctgatggaatttggtttagcattaaggaatttgcaaaatcaaaatatcagtttgaagtgccagatgatgcaaggctttcagccaaaagggtagctgttctccgaaatctttgccaaaaggtaggaataacaattgctgcacgtaaatatgatcttgatgcttcaactccatttgaagcctcagatattttaaatctccaaccagtcgtcaagcattctgttccaacctgtacggaagcaaaaaatcttatggaagcagggaaagtcaggatggctgagggaacattgaatgaggcatatgcattgttttctgaagccttttcactgcttcaacagataactggtcccatgcacaaggatgctgcaaattgttgccggtaccttgctatggttttgtaccatgctggtgatacagctggggcagttgtgcagcaacatagggaactcatcataaacgagagatgtcttggtcttgatcatccagacacagcccacagttatggtaacatggccttattctatcatgggctcaatcaaactgagctggcactgcggcacatgtctcgcacactgctgctgctaagtttggcgtcaggacctgatcacccggatgttgcagcaactcttataaatgttgcaatgatgtaccaggatgccagtaatatgaataccgctctcaggtatcttcaagaagcccttatgaagaatgagcgacttcttgggcctgtccatgttcaaacagctgtgtgctatcatgctctagccattgcatttagttgtatgagcttatataagctttcaattcagcatgaaaagaagacatatgatatactggtaaaacaattaggggaaaatgactcacggactgaagactcaaaaaattggttgaatacatttaagcttcgagaagagcaggtcaacgcccagaagcagaagggccaggaagctaatgcatccgataacgctgttaaattcttgaaggcaaaccctgcagttttacaagcaatgaaggctgctgcgatccaatcaggtggtgtgtcagcaaatgtcaacaggtcgctcaatgctgcagtcgttggagaaggtgtaccacgactgagaggagtggatgagcgagctgctcgagcgactgcagaagcacggaagaaagctgctgcaagaggccttaatgtccgtaatggccctgtggcaaaccatgcgtctgatgaactagctcagattctcaaactcatcaacgctgtttcggggtcttccactcctggctctgcaaagactgaggtatctgcctctgaagggcaggcaacgaatggatgtattcaaaatggaactgacactgaaccgaaggctgcggataccaacgggctatctgcatcggttaagtccactgtcaacgcaccatttggactggggacaacattggagtcgaagaagcagaaatcgaagcaaaagtcgtagaaaacctgtgcttggaatttcctttagcaacagttttggactgtagagtgatttgggtttttgacctttataggattgccacgttcacgtggtggaagagttcatttgtttttgttggaggttttttaggaggtctcaataatcattacaagaaagaagacaattgtttcgaatcatcattgatagaccactgatgagatattggctaatccttaagttaataaatcttcagtcgatacaatacctgtttaaagcatccttgtgatggctgctattgtttgtcgtacggcatatgctggtataccgttaatgtagttcttgatcatcgtatctttttctagaaggtatacccgtacaatgttgccaactattttattattgctatcgataattattgaactaggctgagcgctgttgcttggcctggccgtgaattatttctagcatcactttttgacagaca

SEQ ID NO: 44366 - DNA, 3366 bp, Zea Mays
gcatggaacaaccacaatgcaatgcgcctttgcaggcagtggggcaagaaaagccgagggagaggaggaagcgacgctaccggcgatgcgtggctgaacaattgagggagagttttgctgtcgacgccgactatgaatacatttcaaaggaccacaagccagattgccaaaatgggtccagcagaagcaccaaggtttcctccccagatgtgatcactaagccagaccatgatgaatctgctgaggtagttgactcaaaatccgaagaggcacaaatcacagatagtgagcaggcaacatatgcttctgccaacaatgacttaaaaggaactaaggcctatcaagaagctgatgtttctggcctttacaatcttgcgatggcaataattgattacagaggtcacagggttgtagctcagagtatcatacctggtattcttcaaggagacaagtctgattctcttctgtatggctctgttgataatggcaagaagatatcttggaacgaaacattccattcaaaggtagtcgaggctgcaaagcggctccatttgaaggagcatgtggttttggacggttctggcaatcctgtaaaattagctgctacagtcgaatgcaagggcattgttgggagtgatgacaggcattacattttggatctgatgagagtgactcctcgagattctaactacattggacaagggcaccgcttctgtgtgctgagacctgaacttatagcatcatttgttgaggctgaatccatgaaacaatcgttgaagcagaaggttccagatgctccagttgcaagtacttctgatgctaaggctacctctgttgaagcagatgacaagtctgaagaaagctctgttcatacacacaaggaaaatgacaactcaagctccgagattcttttcaatccaaatgtgtttacggagtacaagcttgatggcagtccagaggaaatcgctgccgacgaagagttggtaaaaagggctggtacatatcttatagacatagtgatcccaaaaattgttcaggatctatgctcccttgatatctcccctatggatggacagactttaaccgatgcattgcatctccatgggataaatattaggtatctgggcaagattgcaggcatggtcaaacatttaccacacttacaggacttgttttctgctgaaataatagttagatctgcaaagcatgttatcaaggatatactgaggcaaagtttggatcatgatattgggccagctattgctcatttcttgaactgtttcatggggaaagttttaggtgcttctacagagggtagtctaagtgacatgcagtcaaagactctgaagggccatgaaaatagccaaactcaaaagtctactaaaggccataaactgagcaatgctgctgcttcaagaaaaagcttgtcagcttattctcatctaacctctgatggaatttggtttagcattaaggaatttgcaaaatcaaaatatcagtttgaagtgccagatgatgcaaggctttcagccaaaagggtagctgttctccgaaatctttgccaaaaggtaggaataacaattgctgcacgtaaatatgatcttgatgcttcaactccatttgaagcctcagatattttaaatctccaaccagtcgtcaagcattctgttccaacctgtacggaagcaaaaaatcttatggaagcagggaaagtcaggatggctgagggaacattgaatgaggcatatgcattgttttctgaagccttttcactgcttcaacagataactggtcccatgcacaaggatgctgcaaattgttgccggtaccttgctatggttttgtaccatgctggtgatacagctggggcagttgtgcagcaacatagggaactcatcataaacgagagatgtcttggtcttgatcatccagacacagcccacagttatggtaacatggccttattctatcatgggctcaatcaaactgagctggcactgcggcacatgtctcgcacactgctgctgctaagtttggcgtcaggacctgatcacccggatgttgcagcaactcttataaatgttgcaatgatgtaccaggatgccagtaatatgaataccgctctcaggtatcttcaagaagcccttatgaagaatgagcgacttcttgggcctgtccatgttcaaacagctgtgtgctatcatgctctagccattgcatttagttgtatgagcttatataagctttcaattcagcatgaaaagaagacatatgatatactggtaaaacaattaggggaaaatgactcacggactgaagactcaaaaaattggttgaatacatttaagcttcgagaagagcaggtcaacgcccagaagcagaagggccaggaagctaatgcatccgataacgctgttaaattcttgaaggcaaaccctgcagttttacaagcaatgaaggctgctgcgatccaatcaggtggtgtgtcagcaaatgtcaacaggtcgctcaatgctgcagtcgttggagaaggtgtaccacgactgagaggagtggatgagcgagctgctcgagcgactgcagaagcacggaagaaagctgctgcaagaggccttaatgtccgtaatggccctgtggcaaaccatgcgtctgatgaactagctcagattctcaaactcatcaacgctgtttcggggtcttccactcctggctctgcaaagactgaggtatctgcctctgaagggcaggcaacgaatggatgtattcaaaatggaactgacactgaaccgaaggctgcggataccaacgggctatctgcatcggttaagtccactgtcaacgcaccatttggactggggacaacattggagtcgaagaagcagaaatcgaagcaaaagtcgtagaaaacctgtgcttggaatttcctttagcaacagttttggactgtagagtgatttgggtttttgacctttataggattgccacgttcacgtggtggaagagttcatttgtttttgttggaggttttttaggaggtctcaataatcattacaagaaagaagacaattgtttcgaatcatcattgatagaccactgatgagatattggctaatccttaagttaataaatcttcagtcgatacaatacctgtttaaagcatccttgtgatggctgctattgtttgtcgtacggcatatgctggtataccgttaatgtagttcttgatcatcgtatctttttctagaaggtatacccgtacaatgttgccaactattttattattgctatcgataattattgaactaggctgagcgctgttgcttggcctggccgtgaattatttctagcatcactttttgacagaca

SEQ ID NO: 44367 - DNA, 4801 bp, Zea Mays
cttttagacatgaccaatgccctatgcacaatatgctgccacagtctaagctggtgcatgcgcagcgatggccgacggaaagaaaaataaggaaaagaagcaaaccaacgcgagcgtgtgacccagactggcagactcccagtcgcagaggccgcacgagagattaggatggtctgcccatccgtataaaaggcgcggccggcgattgcagccccctccgtcctcgttctcgtcttcgcgccgcctctcatcttccgtgagccgaagcttcggcggcggcggaatatggcggggaaaaccaagggtgggaagaacaaaggaaaggcgcagggcgctggtcagtccgcctctgctgagccagaggtgccggcgactgacggagccgaagtggtgaatccagagaatggggaagtaaacgaaccccccgtcacggaggatggtgtgaaaaatgttgagaaaggagacggggatgccctggaggttgtgcagcctgcaagaaagccagctgaaggagagcttcatctatacgctgttcctgtcaggacacaatcaggtgaaaagcttgagctgcagctaagcccaggagattctgttattgatgttaaacaattccttttggatgctcctgaaacatgcttctatacatgctacaatttgatattgcatactgaagatgggtcagctcatcagttggaagactacaatgaaatatctgaaatagcagatataacttctagtggatgttcactggagatggttgctgcaatatacgatgagaggtctattaggtcacatctccgacgtgtgagggagctactatctctgtctagtctttatgtttccctatcaacatccttagctctgcatcaggagtctgctcaaggaaaatctgcaggtcctgaaaaaggccctattcaggagcttgatggtttaaatttcatggaggatagtgctggcgctctcactaatttattggcttctgcaccagcagagataaaatgtgttggaagcattgttttttcgtctttcaatcctccgcctagttatcggagtagcaaaggaagtatatttgactcgaaacctacaaaacaaggactggaggccagcactctcataggcctactacagaagatcagtaccaaatttaagaaaggttttcgtgaactcttggatcgcagggcatcggctcatccatttgagaatgttcagtctttgcttccagtgacttcttggttaggagcttttcctgtgccagagcatagaagggatgaagccagggctgaggactcggttgtgttgtcgtatggcaccgaattaattggcatgcagagagactggaatgaagaattgcagtcctgccaggagtttcctcatggcaatcctcaagaaaggatattgcgtggcagagcacgctataaagtaacatgtgattttgtggatgctgcagtaaaaggtgcagttggtgtcattaatagatgcatacccccaataaatccaactgacccagaatgttttcatatgtatgttcacaacaatattttctttagttttgctgtcgacgccgactatgaatacatttcaaaggaccacaagccagattgccaaaatgggtccagcagaagcaccaaggtttcctccccagatgtgatcactaagccagaccatgatgaatctgctgaggtagttgactcaaaatccgaagaggcacaaatcacagatagtgagcaggcaacatatgcttctgccaacaatgacttaaaaggaactaaggcctatcaagaagctgatgtttctggcctttacaatcttgcgatggcaataattgattacagaggtcacagggttgtagctcagagtatcatacctggtattcttcaaggagacaagtctgattctcttctgtatggctctgttgataatggcaagaagatatcttggaacgaaacattccattcaaaggtagtcgaggctgcaaagcggctccatttgaaggagcatgtggttttggacggttctggcaatcctgtaaaattagctgctacagtcgaatgcaagggcattgttgggagtgatgacaggcattacattttggatctgatgagagtgactcctcgagattctaactacattggacaagggcaccgcttctgtgtgctgagacctgaacttatagcatcatttgttgaggctgaatccatgaaacaatcgttgaagcagaaggttccagatgctccagttgcaagtacttctgatgctaaggctacctctgttgaagcagatgacaagtctgaagaaagctctgttcatacacacaaggaaaatgacaactcaagctccgagattcttttcaatccaaatgtgtttacggagtacaagcttgatggcagtccagaggaaatcgctgccgacgaagagttggtaaaaagggctggtacatatcttatagacatagtgatcccaaaaattgttcaggatctatgctcccttgatatctcccctatggatggacagactttaaccgatgcattgcatctccatgggataaatattaggtatctgggcaagattgcaggcatggtcaaacatttaccacacttacaggacttgttttctgctgaaataatagttagatctgcaaagcatgttatcaaggatatactgaggcaaagtttggatcatgatattgggccagctattgctcatttcttgaactgtttcatggggaaagttttaggtgcttctacagagggtagtctaagtgacatgcagtcaaagactctgaagggccatgaaaatagccaaactcaaaagtctactaaaggccataaactgagcaatgctgctgcttcaagaaaaagcttgtcagcttattctcatctaacctctgatggaatttggtttagcattaaggaatttgcaaaatcaaaatatcagtttgaagtgccagatgatgcaaggctttcagccaaaagggtagctgttctccgaaatctttgccaaaaggtaggaataacaattgctgcacgtaaatatgatcttgatgcttcaactccatttgaagcctcagatattttaaatctccaaccagtcgtcaagcattctgttccaacctgtacggaagcaaaaaatcttatggaagcagggaaagtcaggatggctgagggaacattgaatgaggcatatgcattgttttctgaagccttttcactgcttcaacagataactggtcccatgcacaaggatgctgcaaattgttgccggtaccttgctatggttttgtaccatgctggtgatacagctggggcagttgtgcagcaacatagggaactcatcataaacgagagatgtcttggtcttgatcatccagacacagcccacagttatggtaacatggccttattctatcatgggctcaatcaaactgagctggcactgcggcacatgtctcgcacactgctgctgctaagtttggcgtcaggacctgatcacccggatgttgcagcaactcttataaatgttgcaatgatgtaccaggatgccagtaatatgaataccgctctcaggtatcttcaagaagcccttatgaagaatgagcgacttcttgggcctgtccatgttcaaacagctgtgtgctatcatgctctagccattgcatttagttgtatgagcttatataagctttcaattcagcatgaaaagaagacatatgatatactggtaaaacaattaggggaaaatgactcacggactgaagactcaaaaaattggttgaatacatttaagcttcgagaagagcaggtcaacgcccagaagcagaagggccaggaagctaatgcatccgataacgctgttaaattcttgaaggcaaaccctgcagttttacaagcaatgaaggctgctgcgatccaatcaggtggtgtgtcagcaaatgtcaacaggtcgctcaatgctgcagtcgttggagaaggtgtaccacgactgagaggagtggatgagcgagctgctcgagcgactgcagaagcacggaagaaagctgctgcaagaggccttaatgtccgtaatggccctgtggcaaaccatgcgtctgatgaactagctcagattctcaaactcatcaacgctgtttcggggtcttccactcctggctctgcaaagactgaggtatctgcctctgaagggcaggcaacgaatggatgtattcaaaatggaactgacactgaaccgaaggctgcggataccaacgggctatctgcatcggttaagtccactgtcaacgcaccatttggactggggacaacattggagtcgaagaagcagaaatcgaagcaaaagtcgtagaaaacctgtgcttggaatttcctttagcaacagttttggactgtagagtgatttgggtttttgacctttataggattgccacgttcacgtggtggaagagttcatttgtttttgttggaggttttttaggaggtctcaataatcattacaagaaagaagacaattgtttcgaatcatcattgatagaccactgatgagatattggctaatccttaagttaataaatcttcagtcgatacaatacctgtttaaagcatccttgtgatggctgctattgtttgtcgtacggcatatgctggtataccgttaatgtagttcttgatcatcgtatctttttctagaaggtatacccgtacaatgttgccaactattttattattgctatcgataattattgaactaggctgagcgctgttgcttggcctggccgtgaattatttctagcatcactttttgacagaca

SEQ ID NO: 44368 - DNA, 4894 bp, Zea Mays
cttttagacatgaccaatgccctatgcacaatatgctgccacagtctaagctggtgcatgcgcagcgatggccgacggaaagaaaaataaggaaaagaagcaaaccaacgcgagcgtgtgacccagactggcagactcccagtcgcagaggccgcacgagagattaggatggtctgcccatccgtataaaaggcgcggccggcgattgcagccccctccgtcctcgttctcgtcttcgcgccgcctctcatcttccgtgagccgaagcttcggcggcggcggaatatggcggggaaaaccaagggtgggaagaacaaaggaaaggcgcagggcgctggtcagtccgcctctgctgagccagaggtgccggcgactgacggagccgaagtggtgaatccagagaatggggaagtaaacgaaccccccgtcacggaggatggtgtgaaaaatgttgagaaaggagacggggatgccctggaggttgtgcagcctgcaagaaagccagctgaaggagagcttcatctatacgctgttcctgtcaggacacaatcaggtgaaaagcttgagctgcagctaagcccaggagattctgttattgatgttaaacaattccttttggatgctcctgaaacatgcttctatacatgctacaatttgatattgcatactgaagatgggtcagctcatcagttggaagactacaatgaaatatctgaaatagcagatataacttctagtggatgttcactggagatggttgctgcaatatacgatgagaggtctattaggtcacatctccgacgtgtgagggagctactatctctgtctagtctttatgtttccctatcaacatccttagctctgcatcaggagtctgctcaaggaaaatctgcaggtcctgaaaaaggccctattcaggagcttgatggtttaaatttcatggaggatagtgctggcgctctcactaatttattggcttctgcaccagcagagataaaatgtgttggaagcattgttttttcgtctttcaatcctccgcctagttatcggaggttacatggagatctcatttatattgatgttacaacactagaaggaaataaatactgcattaccggaagctccaaatttttttatgttaacagtagcaaaggaagtatatttgactcgaaacctacaaaacaaggactggaggccagcactctcataggcctactacagaagatcagtaccaaatttaagaaaggttttcgtgaactcttggatcgcagggcatcggctcatccatttgagaatgttcagtctttgcttccagtgacttcttggttaggagcttttcctgtgccagagcatagaagggatgaagccagggctgaggactcggttgtgttgtcgtatggcaccgaattaattggcatgcagagagactggaatgaagaattgcagtcctgccaggagtttcctcatggcaatcctcaagaaaggatattgcgtggcagagcacgctataaagtaacatgtgattttgtggatgctgcagtaaaaggtgcagttggtgtcattaatagatgcatacccccaataaatccaactgacccagaatgttttcatatgtatgttcacaacaatattttctttagttttgctgtcgacgccgactatgaatacatttcaaaggaccacaagccagattgccaaaatgggtccagcagaagcaccaaggtttcctccccagatgtgatcactaagccagaccatgatgaatctgctgaggtagttgactcaaaatccgaagaggcacaaatcacagatagtgagcaggcaacatatgcttctgccaacaatgacttaaaaggaactaaggcctatcaagaagctgatgtttctggcctttacaatcttgcgatggcaataattgattacagaggtcacagggttgtagctcagagtatcatacctggtattcttcaaggagacaagtctgattctcttctgtatggctctgttgataatggcaagaagatatcttggaacgaaacattccattcaaaggtagtcgaggctgcaaagcggctccatttgaaggagcatgtggttttggacggttctggcaatcctgtaaaattagctgctacagtcgaatgcaagggcattgttgggagtgatgacaggcattacattttggatctgatgagagtgactcctcgagattctaactacattggacaagggcaccgcttctgtgtgctgagacctgaacttatagcatcatttgttgaggctgaatccatgaaacaatcgttgaagcagaaggttccagatgctccagttgcaagtacttctgatgctaaggctacctctgttgaagcagatgacaagtctgaagaaagctctgttcatacacacaaggaaaatgacaactcaagctccgagattcttttcaatccaaatgtgtttacggagtacaagcttgatggcagtccagaggaaatcgctgccgacgaagagttggtaaaaagggctggtacatatcttatagacatagtgatcccaaaaattgttcaggatctatgctcccttgatatctcccctatggatggacagactttaaccgatgcattgcatctccatgggataaatattaggtatctgggcaagattgcaggcatggtcaaacatttaccacacttacaggacttgttttctgctgaaataatagttagatctgcaaagcatgttatcaaggatatactgaggcaaagtttggatcatgatattgggccagctattgctcatttcttgaactgtttcatggggaaagttttaggtgcttctacagagggtagtctaagtgacatgcagtcaaagactctgaagggccatgaaaatagccaaactcaaaagtctactaaaggccataaactgagcaatgctgctgcttcaagaaaaagcttgtcagcttattctcatctaacctctgatggaatttggtttagcattaaggaatttgcaaaatcaaaatatcagtttgaagtgccagatgatgcaaggctttcagccaaaagggtagctgttctccgaaatctttgccaaaaggtaggaataacaattgctgcacgtaaatatgatcttgatgcttcaactccatttgaagcctcagatattttaaatctccaaccagtcgtcaagcattctgttccaacctgtacggaagcaaaaaatcttatggaagcagggaaagtcaggatggctgagggaacattgaatgaggcatatgcattgttttctgaagccttttcactgcttcaacagataactggtcccatgcacaaggatgctgcaaattgttgccggtaccttgctatggttttgtaccatgctggtgatacagctggggcagttgtgcagcaacatagggaactcatcataaacgagagatgtcttggtcttgatcatccagacacagcccacagttatggtaacatggccttattctatcatgggctcaatcaaactgagctggcactgcggcacatgtctcgcacactgctgctgctaagtttggcgtcaggacctgatcacccggatgttgcagcaactcttataaatgttgcaatgatgtaccaggatgccagtaatatgaataccgctctcaggtatcttcaagaagcccttatgaagaatgagcgacttcttgggcctgtccatgttcaaacagctgtgtgctatcatgctctagccattgcatttagttgtatgagcttatataagctttcaattcagcatgaaaagaagacatatgatatactggtaaaacaattaggggaaaatgactcacggactgaagactcaaaaaattggttgaatacatttaagcttcgagaagagcaggtcaacgcccagaagcagaagggccaggaagctaatgcatccgataacgctgttaaattcttgaaggcaaaccctgcagttttacaagcaatgaaggctgctgcgatccaatcaggtggtgtgtcagcaaatgtcaacaggtcgctcaatgctgcagtcgttggagaaggtgtaccacgactgagaggagtggatgagcgagctgctcgagcgactgcagaagcacggaagaaagctgctgcaagaggccttaatgtccgtaatggccctgtggcaaaccatgcgtctgatgaactagctcagattctcaaactcatcaacgctgtttcggggtcttccactcctggctctgcaaagactgaggtatctgcctctgaagggcaggcaacgaatggatgtattcaaaatggaactgacactgaaccgaaggctgcggataccaacgggctatctgcatcggttaagtccactgtcaacgcaccatttggactggggacaacattggagtcgaagaagcagaaatcgaagcaaaagtcgtagaaaacctgtgcttggaatttcctttagcaacagttttggactgtagagtgatttgggtttttgacctttataggattgccacgttcacgtggtggaagagttcatttgtttttgttggaggttttttaggaggtctcaataatcattacaagaaagaagacaattgtttcgaatcatcattgatagaccactgatgagatattggctaatccttaagttaataaatcttcagtcgatacaatacctgtttaaagcatccttgtgatggctgctattgtttgtcgtacggcatatgctggtataccgttaatgtagttcttgatcatcgtatctttttctagaaggtatacccgtacaatgttgccaactattttattattgctatcgataattattgaactaggctgagcgctgttgcttggcctggccgtgaattatttctagcatcactttttgacagaca

SEQ ID NO: 44369 - DNA, 2144 bp, Zea Mays
atggaacaaccacaatgcaatgcgcctttgcaggcagtggggcaagaaaagccgagggagaggaggaagcgacgctaccggcgatgcgtggctgaacaattgagggagagttttgctgtcgacgccgactatgaatacatttcaaaggaccacaagccagattgccaaaatgggtccagcagaagcaccaaggtttcctccccagatgtgatcactaagccagaccatgatgaatctgctgaggtagttgactcaaaatccgaagaggcacaaatcacagatagtgagcaggcaacatatgcttctgccaacaatgacttaaaaggaactaaggcctatcaagaagctgatgtttctggcctttacaatcttgcgatggcaataattgattacagaggtcacagggttgtagctcagcatctttttgtatattattatgccaaactgtcacaaatgagtatcatacctggtattcttcaaggagacaagtctgattctcttctgtatggctctgttgataatggcaagaagatatcttggaacgaaacattccattcaaaggtagtcgaggctgcaaagcggctccatttgaaggagcatgtggttttggacggttctggcaatcctgtaaaattagctgctacagtcgaatgcaagggcattgttgggagtgatgacaggcattacattttggatctgatgagagtgactcctcgagattctaactacattggacaagggcaccgcttctgtgtgctgagacctgaacttatagcatcatttgttgaggctgaatccatgaaacaatcgttgaagcagaaggttccagatgctccagttgcaagtacttctgatgctaaggctacctctgttgaagcagatgacaagtctgaagaaagctctgttcatacacacaaggaaaatgacaactcaagctccgagattcttttcaatccaaatgtgtttacggagtacaagcttgatggcagtccagaggaaatcgctgccgacgaagagttggtaaaaagggctggtacatatcttatagacatagtgatcccaaaaattgttcaggatctatgctcccttgatatctcccctatggatggacagactttaaccgatgcattgcatctccatgggataaatattaggtatctgggcaagattgcaggcatggtcaaacatttaccacacttacaggacttgttttctgctgaaataatagttagatctgcaaagcatgttatcaaggatatactgaggcaaagtttggatcatgatattgggccagctattgctcatttcttgaactgtttcatggggaaagttttaggtgcttctacagagggtagtctaagtgacatgcagtcaaagactctgaagggccatgaaaatagccaaactcaaaagtctactaaaggccataaactgagcaatgctgctgcttcaagaaaaagcttgtcagcttattctcatctaacctctgatggaatttggtttagcattaaggaatttgcaaaatcaaaatatcagtttgaagtgccagatgatgcaaggctttcagccaaaagggtagctgttctccgaaatctttgccaaaaggtaggaataacaattgctgcacgtaaatatgatcttgatgcttcaactccatttgaagcctcagatattttaaatctccaaccagtcgtcaagcattctgttccaacctgtacggaagcaaaaaatcttatggaagcagggaaagtcaggatggctgagggaacattgaatgaggcatatgcattgttttctgaagccttttcactgcttcaacagataactggtcccatgcacaaggatgctgcaaattgttgccggtaccttgctatggttttgtaccatgctggtgatacagctggggcagttgtgcagcaacatagggaactcatcataaacgagagatgtcttggtcttgatcatccagacacagcccacaggcatgatgccagtaatatgaataccgctctcagcatgaaaagaagacatatgatatactggtaaaacaattaggggaaaatgactcacggactgaagactcaaaaaattggttgaatacatttaagcttcgagaagagcagttattttatcgtcaatctgca

SEQ ID NO: 44370 - DNA, 1470 bp, Zea Mays
atggaacaaccacaatgcaatgcgcctttgcaggcagtggggcaagaaaagccgagggagaggaggaagcgacgctaccggcgatgcgtggctgaacaattgagggagagttttgctgtcgacgccgactatgaatacatttcaaaggaccacaagccagattgccaaaatgggtccagcagaagcaccaaggtttcctccccagatgtgatcactaagccagaccatgatgaatctgctgaggtagttgactcaaaatccgaagaggcacaaatcacagatagtgagcaggcaacatatgcttctgccaacaatgacttaaaaggaactaaggcctatcaagaagctgatgtttctggcctttacaatcttgcgatggcaataattgattacagaggtcacagggttgtagctcagcatctttttgtatattattatgccaaactgtcacaaatgagtatcatacctggtattcttcaaggagacaagtctgattctcttctgtatggctctgttgataatggcaagaagatatcttggaacgaaacattccattcaaaggtagtcgaggctgcaaagcggctccatttgaaggagcatgtggttttggacggttctggcaatcctgtaaaattagctgctacagtcgaatgcaagggcattgttgggagtgatgacaggcattacattttggatctgatgagagtgactcctcgagattctaactacattggacaagggcaccgcttctgtgtgctgagacctgaacttatagcatcatttgttgaggctgaatccatgaaacaatcgttgaagcagaaggttccagatgctccagttgcaagtacttctgatgctaaggctacctctgttgaagcagatgacaagtctgaagaaagctctgttcatacacacaaggaaaatgacaactcaagctccgagattcttttcaatccaaatgtgtttacggagtacaagcttgatggcagtccagaggaaatcgctgccgacgaagagttggtaaaaagggctggtacatatcttatagacatagtgatcccaaaaattgttcaggatctatgctcccttgatatctcccctatggatggacagactttaaccgatgcattgcatctccatgggataaatattaggtatctgggcaaggtgagtctatatgtggaccagctaaaattgacattacatttcatctgttttgttcattatatgattcttgtttcagattgcaggcatggtcaaacatttaccacacttacaggacttgttttctgctgaaataatagttagatctgcaaagcatgttatcaaggatatactgaggcaaagtttggatcatgatattgggccagctattgctcatttcttgaactgtttcatggggaaagttttaggtgcttctacagagggtagtctaagtgacatgcagtcaaagactctgaagtttcattt

SEQ ID NO: 44371 - DNA, 1329 bp, Zea Mays
ttttgatcgaatccatcttggctgggcgtcccgctgaggtggaggagtctcgattggaatatggcggggaaaaccaagggtgggaagaacaaaggaaaggcgcagggcgctggtcagtccgcctctgctgagccagaggtgccggcgactgacggagccgaagtggtgaatccagagaatggggaagtaaacgaaccccccgtcacggaggatggtgtgaaaaatgttgagaaaggagacggggatgccctggaggttgtgcagcctgcaagaaagccagctgaaggagagcttcatctatacgctgttcctgtcaggacacaatcaggtgaaaagcttgagctgcagctaagcccaggagattctgttattgatgttaaacaattccttttggatgctcctgaaacatgcttctatacatgctacaatttgatattgcatactgaagatgggtcagctcatcagttggaagactacaatgaaatatctgaaatagcagatataacttctagtggatgttcactggagatggttgctgcaatatacgatgagaggtctattaggtcacatctccgacgtgtgagggagctactatctctgtctagtctttatgtttccctatcaacatccttagctctgcatcaggagtctgctcaaggaaaatctgcaggtcctgaaaaaggccctattcaggagcttgatggtttaaatttcatggaggatagtgctggcgctctcactaatttattggcttctgcaccagcagagataaaatgtgttggaagcattgttttttcgtctttcaatcctccgcctagttatcggagtagcaaaggaagtatatttgactcgaaacctacaaaacaaggactggaggccagcactctcataggcctactacagaagatcagtaccaaatttaagaaaggttttcgtgaactcttggatcgcagggcatcggctcatccatttgagaatgttcagtctttgcttccagtgacttcttggttaggagcttttcctgtgccagagcatagaagggatgaagccagggctgaggactcggttgtgttgtcgtatggcaccgaattaattggcatgcagagagactggaatgaagaattgcagtcctgccaggagtttcctcatggcaatcctcaagaaaggatattgcgtggcagagcacgctataaagtaacatgtgattttgtggatgctgcagtaaaaggtgcagttggtgtcattaatagatgcatacccccaataaatccaactgacccagaatgttttcatatagtaaacaatgtcaacaggttctatgttgcatga

SEQ ID NO: 44372 - DNA, 1527 bp, Zea Mays
cttttagacatgaccaatgccctatgcacaatatgctgccacagtctaagctggtgcatgcgcagcgatggccgacggaaagaaaaataaggaaaagaagcaaaccaacgcgagcgtgtgacccagactggcagactcccagtcgcagaggccgcacgagagattaggatggtctgcccatccgtataaaaggcgcggccggcgattgcagccccctccgtcctcgttctcgtcttcgcgccgcctctcatcttccgtgagccgaagcttcggcggcggcggaatatggcggggaaaaccaagggtgggaagaacaaaggaaaggcgcagggcgctggtcagtccgcctctgctgagccagaggtgccggcgactgacggagccgaagtggtgaatccagagaatggggaagtaaacgaaccccccgtcacggaggatggtgtgaaaaatgttgagaaaggagacggggatgccctggaggttgtgcagcctgcaagaaagccagctgaaggagagcttcatctatacgctgttcctgtcaggacacaatcagatgggtcagctcatcagttggaagactacaatgaaatatctgaaatagcagatataacttctagtggatgttcactggagatggttgctgcaatatacgatgagaggtctattaggtcacatctccgacgtgtgagggagctactatctctgtctagtctttatgtttccctatcaacatccttagctctgcatcaggagtctgctcaaggaaaatctgcaggtcctgaaaaaggccctattcaggagcttgatggtttaaatttcatggaggatagtgctggcgctctcactaatttattggcttctgcaccagcagagataaaatgtgttggaagcattgttttttcgtctttcaatcctccgcctagttatcggaggttacatggagatctcatttatattgatgttacaacactagaaggaaataaatactgcattaccggaagctccaaatttttttatgttaacagtagcaaaggaagtatatttgactcgaaacctacaaaacaaggactggaggccagcactctcataggcctactacagaagatcagtaccaaatttaagaaaggttttcgtgaactcttggatcgcagggcatcggctcatccatttgagaatgttcagtctttgcttccagtgacttcttggttaggagcttttcctgtgccagagcatagaagggatgaagccagggctgaggactcggttgtgttgtcgtatggcaccgaattaattggcatgcagagagactggaatgaagaattgcagtcctgccaggagtttcctcatggcaatcctcaagaaaggatattgcgtggcagagcacgctataaagtaacatgtgattttgtggatgctgcagtaaaaggtgcagttggtgtcattaatagatgcatacccccaataaatccaactgacccagaatgttttcatatagtaaacaatgtcaacaggttctatgttgcatga

SEQ ID NO: 44373 - DNA, 1425 bp, Zea Mays
ggagataaagtttcaacctgtgagtgttgatatagtagggctcgattaccacctatcaggaatatggcggggaaaaccaagggtgggaagaacaaaggaaaggcgcagggcgctggtcagtccgcctctgctgagccagaggtgccggcgactgacggagccgaagtggtgaatccagagaatggggaagtaaacgaaccccccgtcacggaggatggtgtgaaaaatgttgagaaaggagacggggatgccctggaggttgtgcagcctgcaagaaagccagctgaaggagagcttcatctatacgctgttcctgtcaggacacaatcaggtgaaaagcttgagctgcagctaagcccaggagattctgttattgatgttaaacaattccttttggatgctcctgaaacatgcttctatacatgctacaatttgatattgcatactgaagatgggtcagctcatcagttggaagactacaatgaaatatctgaaatagcagatataacttctagtggatgttcactggagatggttgctgcaatatacgatgagaggtctattaggtcacatctccgacgtgtgagggagctactatctctgtctagtctttatgtttccctatcaacatccttagctctgcatcaggagtctgctcaaggaaaatctgcaggtcctgaaaaaggccctattcaggagcttgatggtttaaatttcatggaggatagtgctggcgctctcactaatttattggcttctgcaccagcagagataaaatgtgttggaagcattgttttttcgtctttcaatcctccgcctagttatcggaggttacatggagatctcatttatattgatgttacaacactagaaggaaataaatactgcattaccggaagctccaaatttttttatgttaacagtagcaaaggaagtatatttgactcgaaacctacaaaacaaggactggaggccagcactctcataggcctactacagaagatcagtaccaaatttaagaaaggttttcgtgaactcttggatcgcagggcatcggctcatccatttgagaatgttcagtctttgcttccagtgacttcttggttaggagcttttcctgtgccagagcatagaagggatgaagccagggctgaggactcggttgtgttgtcgtatggcaccgaattaattggcatgcagagagactggaatgaagaattgcagtcctgccaggagtttcctcatggcaatcctcaagaaaggatattgcgtggcagagcacgctataaagtaacatgtgattttgtggatgctgcagtaaaaggtgcagttggtgtcattaatagatgcatacccccaataaatccaactgacccagaatgttttcatatagtaaacaatgtcaacaggttctatgttgcatga

SEQ ID NO: 44374 - DNA, 498 bp, Zea Mays
cccaaaaaaaacatcgcggtaccgaaccaactaatttccgagccgcataaaaaacaggagggaagcatatggatgctcacggtcttcttcagattgggctttcgggccttgatggcggcggcgaggaggcgggggaggcggtcagactcagaggcctcgaggtgggacggccacaaatccgggcccttgtaacagaggaacacatggcgctcgtggaaccccaccgtcccgaccagcttctccttcccgagctccggacgctggaacccgaactctgcgcctggatccggcaccgcggccgcggcggcgaaggccgcgtccgtagcgtcagccgccggagccggagccgcgaggggggcatcaccttgcgtaggggaggccatgagcaggcggagtggcagtagacggcggcgggttggtacgcgctgcgaggaagagagtggtcgtggtggaaatggaaattgcttgaggagtttgggaaaaatatgcaacatctcc

SEQ ID NO: 44375 - DNA, 6817 bp, Zea Mays
ttgtccacgtcaaaatgggtcagccctctgcaaaaatattatttcacagattgaaaattaacagattagtttactttgacgcataaataccacatgtttattagttaccacgcttgcagcttacttatatctgatcatatctggaaagatcaacacatctccatttgatgattcagtgccatcttctccttcacagatggtcaatttgatctgtgacatggtaaaacatagcagccattggatatatatgtggaagaaagatgaatcagcaaatactaccaaacttacaacctttttcggaagcatttctttccaaaaagtaggctagagttaaaacccaaaagaaccaacaagtcaagattcgggcactccatgcactcctattcgaggctaaatctttgggtatattccatcatttcaagtctcattttactacctcttttacaacttcggtctttattttcctcttttcttattgctatcgcactttaagatcccactacacactggtgcatctgaaggtctctattgggcatgtccaaatcatctcaaccgatgttggtcaagcttttttttcaattggtgctacccctatcctatcaagtatatcatcattctagacttgatcacttcttgtatggccacaaatccaacacaacatatgcattttcgcagcacttactgttaaacatgtcatctttttgtaggccaacattttgtaccattatggtgcgcgactctcctgtgtggttcgagaaaaaaacattatgcaccatacaacatagcaggtctaatcgttgttctataaacttgccttttagcttttgtggtaccctcttattatatagaacaccagatgtttaatgtcatttcatccaccctgctttgattctatggcttaagtcttcatcaacatcctagtatctctgtagcattgatcctaaatacctaaaggtgtccttcctaggcactacttgaccttccaaattaacatcaccttccccatgtgtagtgtcgaaatcacatcttatatattcggttttagttttactaactctgaaaactttggactctagagtctcccgccataactctagtttcctatttactcatgtccgattttcattaactagcactacattgtctgcaaaaaacatacaaaaaaactcgaccggggagggaaagaccgccctcccggtattatattaagaagaggccgaaacatgttctcgaccgagaaaacccccaaaccgtggccccctatcactaacgggccaatcaactgcccacttagtaacgacccagccggagggtggcacgctgtatatcgatccccgagagcggacggggcacagcgaggcgatttttttaaccatgcccaaaatttgccatcgagggagatcgaacccgagacctagaggtgctactcggaagccttaaccattactctagaggcccttttgctctgcaaaaatcatacaccaaggaatatctccttgcatgtccctttggaccttatccatcatcaaggtaaaaaggtaagggttcaaagctgatccatgatgtagtgctattctaatcgttaagtcatgtgtttccatcacttgttcaaacactagccacaacattgttgtacatgtccttaatgagtccaacgtatttcgttggaactttttgtttgtccaaagcccgtcacataacatttcttggtgttttgttgtaagcctctccaagtcaatgaaaatcatgtgtaggtccttttactccctatactgctccatcatttgtctttttaagaaaatggcttccatggttgaccttctaggcatgaaaccaaattggttcaaaaagaccctcgttattcctctcaaacgatgctcgataactctctcgtggcttcatagtatggctcataaacttaattccccggtaaaaattacaattgtgaaagaataacatgcaacaagaagacaacaaactagctcaaaacaataggtaatacaatctcaaggagcctttataacgaaagcactagttgtttgtttgttatttgggacacgacaatagtcaagatcagtttgttgcctatattatatgaggtgataaaaacttctgcgtttttcctacagttagaacagttcggatcctaccatataatttggataacagtataacagagcagaaacctagagacatggacagtgacaatggattcggtaacatcttatagacacacaggacgtttttgcgtttcttccaaaccatcaactatgcaaatcatatgatcaatagcaacactcataaacaatagaggcaatgatttttacgtttcggactaaaacgattcaattaggaacaagttaatctggagctcaaccaatatatgtcaaacccattcaagtcatagctaaatacatgtaacagtatatgccaagaacataggaatatcgatgattcacgcagaagaaaatgggcaaagatttaaacaaactgcagtaagctattacttagatgacacttgagggggaaagagactagaatctataagtaacattgaaaaaacaaacagggcaaatgacccctcaagcttcaaataatcattaaccaaaactgacaccaactcatggtaccattagaaaataactatgtcaacaacccaaataaggggcagaagaaccatatagtgttcatataactacctcttaaacttaagtactggaaatgaatcatgggtgccaagcaaaaagtaagagatccagctaaacaactaaaattagaattaaaaatgttgccgaaactactaaaaacacgattcatgagaccatggaatatgaataaataacaacagatgggattggaatgggaccatgaataacaacaacataaccctaacaagtagaggagacatatatagttcatttatgcatacctcttaaacttaagcatcagaaaagaaccatggaatatgaataaataaaatgtaaggagagtccaaagtatggcgattggatctagacaaatagatgtattaagccagtcaattcatggacaaccgtgctccgtctaccgtctagttaaacaaaaccagaacatataagttcaacacataatgccaaaccgcaaataaactagagtcacagagcccaatttctatatattagagctgggagcaaagacgtgctcctatgttgtgaactgtgatgcactcgcaagatagtcccgatactcagccctcccgtaggaggccctaggagtaaaccagatctatatcttctccccccccctctactaacaccctgcccctccttatatagagaggtaaccctaacttaatagttaagcaacataacaaaccccacctggccagcactgttcacgcgctacagtaaccgcacgtgaacagttagcgcggctaacataaccataatgacctagttgatgggcttaaggcccataacattccatccctccttaaaaacagctcgtccgcgagctgtagtcaagaagaattgacccatactaaactagcacttaatgactcaatattaagtcttttacatctcgacttagtattttattcacctagaaaaaaattgaaccacgtcagtggtcagatctattgaagaaggacgcgtcggtggccagatcgaccgatgacagacgtggctgcggtggcgcagagggctccctgcgcctggtgttgtagctcaggtgaccacgccgtgacggaggccaaggtggttgacgtcgaccacagctgcgacgatgcagcggatggctgtctgtggtgcagaagattgatggccacgacgcggaggattggtagctgtggcgtggagggttatcccgtagcagcgcctctacaggttgggccaccatggcggccgattgttgcagattgggcgagcagatccacgcacagccgtagtcgagccacgcctggacctccacaagcacgaaagcgggctgcagtagtggcacagccacctcaatgtagaacgcagcctccacctcctccctgggtgtgtccggttgcagcccatcgaccccatcgtcctcgacccggccgcctccgcccgcgcccaggccgccctcgctcgcgcctaggttgcctgtgcccaggcagcccgcggtagaagcggaggggctaacccacgcctgcttgagcttggccggacaagcgtcgtgggaatccaaacgggcattgatggcgacgagttgctcgaggacgaggtccatcttggcggagtaggtcacatgatcgtcgtgcgcgctggccatggtggcgatgcgcgcgtagtggctccgatagtccgataccaatttgttgtgaactgtgatgcacttgcaagatagtcctggtactcagccctcccgtagaaggccctaggagtaaaccagatctatatcttcttcccccctctactaacaccctgcccctccttatatagagaggtaaccctaacttaatagttaagcaacataacaaaccctatctggtcggcattgttcacgcgctacagtaatcacacgtgaacagtggccgcagctaacgtaaccataatgacctaactaatgggcttaaggcccataacatcctagcgtgtccacgtcgtcacttttctttatagtcgtacgatcgtgatcgaaggaacaaccgttcttctgacctttcatcataccgacgcgccacgacacttccagcagagtccagagtccagaccgaagaatgcctcctcttctacacaaacacccaccatggccagggcttacacgagaccagcaggaacggcgtcgccgagttggtggccgccattgtgtccccgacgacgacgaacactgtctgccgccgccctcttcacctccatcggattgtcatctccaccggcctcctcgcgctggtcctccgatcctctgatgtctcctcgcgcggtcgcgcccgtcctccaatgcccgactccgtcgtcctcgccactgacccatccacaggtaaagcctttatcccaatattaattcgtatcctgcaccaaggagttgctgtgcgcttgattcgccgcatctgagtgtcacggccacgactgcgcgccctccatcgcctcccaccgtcggggcatcgaccctgcatcctacacggtctggtgctggggaatggggaggagcatcgccctgctcttcattaacgaacacattctgattttttatcttggtctggtgacctgtgtgacctgtaaagtaacgtgggagtgtaggattaattttcctgaatcacctagatgtacaggtatatctatgtactgtagctcttgctacatgcataggagactccataatccatggtggatctattagcctattaccaaggctaactcatctgccacctgacctgtgcagaaagcgtcgtttctagaagaatggctgaaataattatgtgcttcattcagtaactccaagcaccagccgcccttggcaattgagaatttgagaccataaacaatgaggctggtttcagcacaaatgtcactcagaaagctatgttattttctgtcttgaagtccctacttggcatatacacgggcagaaaccagtaggttgttacccagagatttaagcaactagctaaaggcattgcgtgaatgatgagcagtgaacagttgttgtggtctccaccctccattaacaagcaacaacaagatattggtcgtctacccatcaggtcggagagcccatccctaaattctcttggtgacttcatgccaaacctcatgaactccaacgaactgtctttgagcacatcattgttttgtggcctttaagaccaatattttattgattcgatgcatgtatatttctactcaacaagcagcaccattacaatacaacatctagatggctcatgctgctatatctgtatattgaactgttcttctactgtaaataattaactattcaaataattctgttttaattctatatgtacatctatacgcctattgctacccgatatttctaaagtaatactcttttaactgtgtaagcacatcgtcaacgactcgcgcaagcgtgagcaatttactagtagcacgaagtgtttcctatgccaagtgcaagccccaagccaagattcagaaaggtacgagaaacaaccaatctactacggattaaggttttggatgagggaatcctcggtgttgcccgacttcaggctcctccatctccaacaccgacatgacagcgacgccaaggggagcagtgtctccaaaacctcgctccgctgaaaaacttaaacaggttaaggcgaattagttttttggacagcggccatgtgactgctcgccgagctgcactgcggcatttactgacttcaacgacactgtgaactcatcttcgctcaagttcctcgttatgattacaaatgagtttctcgctcttttttctgttagatgtgttaagatagatttaatctgttatatgaacaacatgcttttatttgttataatcttctacagattctagtggtgtattcagtaacgtgaacagaaaatccgccaaagcactctgtggacaagggtcctaaggctatcttcggtggatcacgtaaaataggggtagtgacactgtttgatactgtttgcactttgtagagtgaagtttaaacaggagatgagatcggattttaaataggagatgagattggggatgggatagtaaatctgctcgatatggcctaaaagctcacatgaaaactaacctcgcccttatccagacaaacgaaccacgtgataccggggtctgttccaaacctctaactaacaattag

SEQ ID NO: 44376 - DNA, 2492 bp, Zea Mays
gcatagcaaattagaaaaactagactgactgataatctggaacagaaggagtaattagtaactaataaaaggaaaaaaatgacataactacccggtgcccataaagctcactcagccgagcgcccggatgatttgcacgtcagcccataaagctcctatttttcttggcccgacccagctgaagcaccacttcgaggccgcttcttagcaaggcccagagttaaatcgtccgtgggcgtggcgctcctctcgcggttagggttttagggtcttcgtctcccgctcccccgggtccattcgcacccaacgcagctacagacggtctccatggcgaagaaaggggcgaagagaaagcagcagttgccgccggctcccacggcgaagaacgggagcaaggctgtgctcccactgaagggccgcgaagagagcgcccaagaagcagaaggttctggagtcctccgacgattctgatacggagcagcagcagcagcttcaggaggaggactccgacctcgacgtttcctctgattccgacgccgaggagctctctgggtcggacgctgaggctgacgagctctcgggctcggacgccgatgctgacggaggctcgacccgcggcgacgacatggatgatgacgacgacgacgaagatggtgaaagcgatgatgactctcttgcggacgacttcctcgctggtagcgacgaaggaagcgagggtggtgactctggtctggagtcagatgggtctgatgaccttgaggcaaagtcacgagcaattgacgagcagaaactcaaggcggaagaagatgcagaggaggaacttcaaaccaacataagatcagaatctgatgaattcagattacccacaacagaggagctggaggaagaggcacacagaccgcctaacctaccaaatctcaaaaggaggatatccgaaattgtacgagtgctctcaaacttcagcaaactgaggcagaaagatgttccgcgaaaagattatatcaatcaactgaaaactgacgtcatgtcatactacggatataatgattttcttgttgaagcgttaattgagatgttcccagctgttgagcttgttgagttactggaagcctttgagaaaagaccgcctgagtgcttgcggacaaatacactgaagagccggaggagggatcttgctgctgctcttataccaagaggatttaatttggacccgataggaaaatggtcaaaggtaggattagttgtctatgactccaccatttcagctggtgctactactgaatatatggctggacattacatgaaacaaggtgcaagttctttcttgccagtgatggcacttgctccacaggagaaggagcgaattgttgatatggcagctgctccaggcggtaagactacatacattggcgctcttatgaagaatactggaatcatctatgcaaatgagttcaatgagaaaaggttgcatgggcttatgggaaacatccatcgaatgggcgtgacaaataccataatttgtaactacgatggtaaagagctacccaaagttcttgggatgaattcggttgacagagtattgctggatgctccctgcacaggaactgggaccatttggaaggatctacagatcaaaacttcaaaggacattgaagacatcaggaactgtgcctttgtccaaaaggcctggttctctaaatagagcaaaataaccatggtggctagcgagtagcgcccacaagccactgaccatcgcccagcagcataagctatgctttttcaccgttctaaaatggcctaggaggtgttcagtcttatggtgctacatcactagtccctttgttaattgatgtggacttttcctcgttgattggatcgtacagctttgcaaaatgaaggaagaaattgattgatttgaagtccacgtgggaaagagctgcgtaaactactgagatttgtttagtttgaacaatctctccgttaatttatatatggttaaatgtactttctcgtatattggattaaaaagaaaacataaatggaatacccaactcccaaatctcttggctctgccactgatgcagttataagattggaagggaaatttggggtttggatatgcacgaggggcatgttggtataaaattatttcctttcttttgctttaactggtataaaattggtccacggcacaggtgtatcaaggaggggcaaacagcctagcagattccattttaaaaagatgggcgaacaagcaaactaaaaataaaacaggacaaatcagtagttaaaattcaaacgcaacaagattaccagaaaccacgtattataaatgagggcaagtacatattaagggcccgtttggcacagctccagctcctgattctaagcgaggatctggaggagccgtgccaaacgggtattttttaaactgattctcgtgtggagccgaaagattgggagtcgtttttgtgaagaaatgtgggatctaa

SEQ ID NO: 44377 - DNA, 1474 bp, Zea Mays
ccgaggtttaaggccttttggcatcggatctgcttcgcctctgcgagatctccggattttgatcaaagttgcttctcgtcgaagtttcgctggatttcctctggattaaacaagcgagtcacgtggctcagttcgtgatcacgttatgatcctttcatatgtacctttccgaactgctcgcggagaggcacaagcttaccccgttcatcccagtgatcccacatagtgtacggttgctgaatcaagaaatttttcgtgtttccacactattggagaacgcgtctcttttaaatcaaagtggccttgaacatggtagtccactaacaacgggaggattatattcaaacggagcagctactgacatgaatgggtggccatcagcatttcaatcagaaagttctccagcttatagctggcttggaggatctcaaggcagctcctctggactcattgtcaagaaaacaatgaaggtcgatatcccagtagacaaatatccaacatacaattttgttggccgcatccttggtccaagaggaaattccttgaagcgggtggaggcaaatacggattgccgcgtgctaataagaggtcgtggcagcatcaaagatccagcacgggaggaaatgatgcgagggaagccaggatatgagcatctgaatgaacctctccatatattggttgaggcagagctacctgttgacatcattgatgctcggctgatgcaagcccgcgagatccttcaagatctgctaaagcctgtggatgaatcccaggacttcttcaagaagcagcagctccgggagctcgcgatgcttaatggcaccctgcgtgaggaagggatgcagaggttcggttcagcgtcccctttccacaacagccttggaatgaagagagccaagacaagggggtgatgaagaaagtcgcaagcatcatgaagggagaacttaaatcatcatctattctgaggccaatcctgtgtacgaatggggggttgccttgctggctactggcccaatacggtctcgcgccaccagcatcgcggcgcgggcggccgtgcacgataaaacatatatctggagttgtgtctactgggggagttgagtttggttatgcgccatgggttgttacgctatatattgggctgtgcaggcttttgtagcaatgtggtttgtgtaaatgctcatttggagcgtttggaagctctcggcttgtatttctttcttatcgagatagtattcaaggacgctgtttgggatttgaagcaatgctctaaactgcgacaagcatggaggcttgatctgtttcattcgaatctcttgtttgacactatcaataaccagtgcatacaagtagtgaactggcgtcttaagttgcatcttcaattcggattctgctttgttgatgcaggataatctaaattaatgcatgtaatgcacttgaaattaatatatcttctttttccaaaaaaaaagaa

SEQ ID NO: 44378 - DNA, 2064 bp, Zea Mays
cttcgcttcgcccacgtctcccgctcccctgcttcgtgtctgctccgatcggttgcgccctggacgagcgggttggggcctggttcgtgcgttctggagagcatccaagtttccacggtttgaatctagcgtagcatgccgaggtttaaggccttttggcatcggatctgcttcgcctctgcgagatctccggattttgatcaaagttgcttctcgtcgaagtttcgctggatttcctctggattaaacaagcgagtcacgtggctcagttcgtgatcacgttatgatcctttcatatgtacctttccgaactgctcgcggagaggcacaagcttaccccgttcatcccagtgatcccacatagtgtacggttgctgaatcaagaaatttttcgtgtttccacactattggagaacgcgtctcttttaaatcaaagtggccttgaacatggtagtccactaacaacgggaggattatattcaaacggagcagctactgacatgaatgggtggccatcagcatttcaatcagaaagttctccagcttatagctggcttggaggatctcaaggcagctcctctggactcattgtcaagaaaacaatgaaggtcgatatcccagtagacaaatatccaacatacaattttgttggccgcatccttggtccaagaggaaattccttgaagcgggtggaggcaaatacggattgccgcgtgctaataagaggtcgtggcagcatcaaagatccagcacgggtaaacattcagattagtgcctcttaatcttatggacttggtagttagatgtactcagaaatttgaagaattggagattatgtattaaatattttccccgaaggatcttgatgtatgaaatatgaactatggacctatggacattcaaagcaagatcaaccctgataccctctggctaggaaaatatggatgttttatagtttgttcctgcacgtttcttttttcaaaatgttttctgttatgtacctttcactttgtgtcttggtatgaaagcccacactggctatctggtgattatttaaaaaaacactttctttctggaacttgccagagaggggccatccatcctttagatggcatagctacctttatgcatgtgtacatctagtgggttttctgtttactttgtgctatctatgggattggggttcacatacactattgtttttcaggaggaaatgatgcgagggaagccaggatatgagcatctgaatgaacctctccatatattggttgaggcagagctacctgttgacatcattgatgctcggctgatgcaagcccgcgagatccttcaagatctgctaaagcctgtggatgaatcccaggacttcttcaagaagcagcagctccgggagctcgcgatgcttaatggcaccctgcgtgaggaagggatgcagaggttcggttcagcgtcccctttccacaacagccttggaatgaagagagccaagacaagggggtgatgaagaaagtcgcaagcatcatgaagggagaacttaaatcatcatctattctgaggccaatcctgtgtacgaatggggggttgccttgctggctactggcccaatacggtctcgcgccaccagcatcgcggcgcgggcggccgtgcacgataaaacatatatctggagttgtgtctactgggggagttgagtttggttatgcgccatgggttgttacgctatatattgggctgtgcaggcttttgtagcaatgtggtttgtgtaaatgctcatttggagcgtttggaagctctcggcttgtatttctttcttatcgagatagtattcaaggacgctgtttgggatttgaagcaatgctctaaactgcgacaagcatggaggcttgatctgtttcattcgaatctcttgtttgacactatcaataaccagtgcatacaagtagtgaactggcgtcttaagttgcatcttcaattcggattctgctttgttgatgcaggataatctaaattaatgcatgtaatgcacttgaaattaatatatcttctttttccaaaaaaaaagaa

SEQ ID NO: 44379 - DNA, 1463 bp, Zea Mays
cttcgcttcgcccacgtctcccgctcccctgcttcgtgtctgctccgatcggttgcgccctggacgagcgggttggggcctggttcgtgcgttctggagagcatccaagtttccacggtttgaatctagcgtagcatgccgaggtttaaggccttttggcatcggatctgcttcgcctctgcgagatctccggattttgatcaaagttgcttctcgtcgaagtttcgctggatttcctctggattaaacaagcgagtcacgtggctcagttcgtgatcacgttatgatcctttcatatgtacctttccgaactgctcgcggagaggcacaagcttaccccgttcatcccagtgatcccacatagtgtacggttgctgaatcaagagttctccagcttatagctggcttggaggatctcaaggcagctcctctggactcattgtcaagaaaacaatgaaggtcgatatcccagtagacaaatatccaacatacaattttgttggccgcatccttggtccaagaggaaattccttgaagcgggtggaggcaaatacggattgccgcgtgctaataagaggtcgtggcagcatcaaagatccagcacgggaggaaatgatgcgagggaagccaggatatgagcatctgaatgaacctctccatatattggttgaggcagagctacctgttgacatcattgatgctcggctgatgcaagcccgcgagatccttcaagatctgctaaagcctgtggatgaatcccaggacttcttcaagaagcagcagctccgggagctcgcgatgcttaatggcaccctgcgtgaggaagggatgcagaggttcggttcagcgtcccctttccacaacagccttggaatgaagagagccaagacaagggggtgatgaagaaagtcgcaagcatcatgaagggagaacttaaatcatcatctattctgaggccaatcctgtgtacgaatggggggttgccttgctggctactggcccaatacggtctcgcgccaccagcatcgcggcgcgggcggccgtgcacgataaaacatatatctggagttgtgtctactgggggagttgagtttggttatgcgccatgggttgttacgctatatattgggctgtgcaggcttttgtagcaatgtggtttgtgtaaatgctcatttggagcgtttggaagctctcggcttgtatttctttcttatcgagatagtattcaaggacgctgtttgggatttgaagcaatgctctaaactgcgacaagcatggaggcttgatctgtttcattcgaatctcttgtttgacactatcaataaccagtgcatacaagtagtgaactggcgtcttaagttgcatcttcaattcggattctgctttgttgatgcaggataatctaaattaatgcatgtaatgcacttgaaattaatatatcttctttttccaaaaaaaaagaa

SEQ ID NO: 44380 - DNA, 1703 bp, Zea Mays
agtaccaccaccgggagaccgggcaccgctcgcaacctccgtccacgccacggctactattcacttcacttgttaccgcgcgcggcgcgcctaccactactctctactcatcactccccagcgggcggccacgcgcacgcacccataaaagtcctcgctccaccccctccaactcccgtcccctctccctccctccttccccgccgccgccgccgccatccaccaggtcagctccagcggacgacgtctcaacagtctcgcgccactgagatctcgccgagggagggagagcagcaggcagcagcagacatgtcgtcggggcggtacatggcgtactcgccctcgccgtcgaccaccccgcactccccccgcatccacggcctccgcaccccctctgccgccgtcgccgagcaggagaagtacctttccgaactgctcgcggagaggcacaagcttaccccgttcatcccagtgatcccacatagtgtacggttgctgaatcaagaaatttttcgtgtttccacactattggagaacgcgtctcttttaaatcaaagtggccttgaacatggtagtccactaacaacgggaggattatattcaaacggagcagctactgacatgaatgggtggccatcagcatttcaatcagaaagttctccagcttatagctggcttggaggatctcaaggcagctcctctggactcattgtcaagaaaacaatgaagtacaattttgttggccgcatccttggtccaagaggaaattccttgaagcgggtggaggcaaatacggattgccgcgtgctaataagaggtcgtggcagcatcaaagatccagcacgggaggaaatgatgcgagggaagccaggatatgagcatctgaatgaacctctccatatattggttgaggcagagctacctgttgacatcattgatgctcggctgatgcaagcccgcgagatccttcaagatctgctaaagcctgtggatgaatcccaggacttcttcaagaagcagcagctccgggagctcgcgatgcttaatggcaccctgcgtgaggaagggatgcagaggttcggttcagcgtcccctttccacaacagccttggaatgaagagagccaagacaagggggtgatgaagaaagtcgcaagcatcatgaagggagaacttaaatcatcatctattctgaggccaatcctgtgtacgaatggggggttgccttgctggctactggcccaatacggtctcgcgccaccagcatcgcggcgcgggcggccgtgcacgataaaacatatatctggagttgtgtctactgggggagttgagtttggttatgcgccatgggttgttacgctatatattgggctgtgcaggcttttgtagcaatgtggtttgtgtaaatgctcatttggagcgtttggaagctctcggcttgtatttctttcttatcgagatagtattcaaggacgctgtttgggatttgaagcaatgctctaaactgcgacaagcatggaggcttgatctgtttcattcgaatctcttgtttgacactatcaataaccagtgcatacaagtagtgaactggcgtcttaagttgcatcttcaattcggattctgctttgttgatgcaggataatctaaattaatgcatgtaatgcacttgaaattaatatatcttctttttccaaaaaaaaagaa

SEQ ID NO: 44381 - DNA, 2185 bp, Zea Mays
agtaccaccaccgggagaccgggcaccgctcgcaacctccgtccacgccacggctactattcacttcacttgttaccgcgcgcggcgcgcctaccactactctctactcatcactccccagcgggcggccacgcgcacgcacccataaaagtcctcgctccaccccctccaactcccgtcccctctccctccctccttccccgccgccgccgccgccatccaccaggtcagctccagcggacgacgtctcaacagtctcgcgccactgagatctcgccgagggagggagagcagcaggcagcagcagacatgtcgtcggggcggtacatggcgtactcgccctcgccgtcgaccaccccgcactccccccgcatccacggcctccgcaccccctctgccgccgtcgccgagcaggagaagtacctttccgaactgctcgcggagaggcacaagcttaccccgttcatcccagtgatcccacatagtgtacggttgctgaatcaagaaatttttcgtgtttccacactattggagaacgcgtctcttttaaatcaaagtggccttgaacatggtagtccactaacaacgggaggattatattcaaacggagcagctactgacatgaatgggtggccatcagcatttcaatcagaaagttctccagcttatagctggcttggaggatctcaaggcagctcctctggactcattgtcaagaaaacaatgaaggtcgatatcccagtagacaaatatccaacatacaattttgttggccgcatccttggtccaagaggaaattccttgaagcgggtggaggcaaatacggattgccgcgtgctaataagaggtcgtggcagcatcaaagatccagcacgggtaaacattcagattagtgcctcttaatcttatggacttggtagttagatgtactcagaaatttgaagaattggagattatgtattaaatattttccccgaaggatcttgatgtatgaaatatgaactatggacctatggacattcaaagcaagatcaaccctgataccctctggctaggaaaatatggatgttttatagtttgttcctgcacgtttcttttttcaaaatgttttctgttatgtacctttcactttgtgtcttggtatgaaagcccacactggctatctggtgattatttaaaaaaacactttctttctggaacttgccagagaggggccatccatcctttagatggcatagctacctttatgcatgtgtacatctagtgggttttctgtttactttgtgctatctatgggattggggttcacatacactattgtttttcaggaggaaatgatgcgagggaagccaggatatgagcatctgaatgaacctctccatatattggttgaggcagagctacctgttgacatcattgatgctcggctgatgcaagcccgcgagatccttcaagatctgctaaagcctgtggatgaatcccaggacttcttcaagaagcagcagctccgggagctcgcgatgcttaatggcaccctgcgtgaggaagggatgcagaggttcggttcagcgtcccctttccacaacagccttggaatgaagagagccaagacaagggggtgatgaagaaagtcgcaagcatcatgaagggagaacttaaatcatcatctattctgaggccaatcctgtgtacgaatggggggttgccttgctggctactggcccaatacggtctcgcgccaccagcatcgcggcgcgggcggccgtgcacgataaaacatatatctggagttgtgtctactgggggagttgagtttggttatgcgccatgggttgttacgctatatattgggctgtgcaggcttttgtagcaatgtggtttgtgtaaatgctcatttggagcgtttggaagctctcggcttgtatttctttcttatcgagatagtattcaaggacgctgtttgggatttgaagcaatgctctaaactgcgacaagcatggaggcttgatctgtttcattcgaatctcttgtttgacactatcaataaccagtgcatacaagtagtgaactggcgtcttaagttgcatcttcaattcggattctgctttgttgatgcaggataatctaaattaatgcatgtaatgcacttgaaattaatatatcttctttttccaaaaaaaaagaa

SEQ ID NO: 44382 - DNA, 2322 bp, Zea Mays
cgaccgaggcagcagtagtatcgtcaccaaggaagagggccgaagggcggaggaaggcgggtataaaatttggcgggttctcggttccgccggcgaagcgtttacttcttcggccgcgatctcgaggagggagggagcgagcgagcgggaagaaagaggggggcgcgcgcgcgcccatgttttgacctcgcccggcgtcgtctcggcagcgatctagatctgaggttctgaggttcttgattgagcggtcacaagacctgtcactgcaatggtcgccaagatgttgccatgctcatggatctcggcgtgcgtgctcgtgctgctcttgagcctgcacccgcgtgtccatgccttctacctccccggcaccttcatgcacacctactcccctggagaggtgatctcggccaaggtcaactcgctcacctctatcgagaccgagctgcccttcagctactacagcctgccatactgcaagcctctggatggcgtcaagaagagtgccgagaaccttggtgagatcctcatgggtgaccagatcgacaactctccataccgcttccaagttaatgtcaatgagtcagtattcctttgcaccacggacccgctcaccaaggagcaggccgagctgctcaagaggagggcacgagatctgtaccaggtcaacatggtcctggacaatttaccggtcatgcggttcaccgagcagaacggcgtgataatccagtggactgggttcccagttgggtacaacccgatagggagcaacgaggattatatcattaaccacctcaagttcagagtcttggtccatcagtaccaggcgcagggcgacgttgtggtcacgagtgaggatggtgttgcaatggtagagtctgatcgcaagagtgggttccagattgttgggtttgaggtcgtgccttgcagcgtaagacgtgatcctgagtccatgtccaagctcaagatgtatgacaaggtcgactctgtgaattgcccgttggagcttgagaaatctcaggcgatccgtgagaatgagcggatcacatttacctatgaggttgagtatgtcaagagcaacatcaagtggccgtccaggtgggatgcgtatctgaagatggatggtgccaaggtccactggttctcgatcatgaactcgatgatggttgtcttcttcctggctggtatcgtgtttgtcatattcttgaggacggttcgaagggacctgacaaggtatgaggagatggacaaggaggcacaagctcagatgaacgaggagctctcaggatggaaacttgttgttggggatgtcttcagagagcccagctttccaaagttgctgtgcgttatggtcgctgatggtatccagatcactggtatggcagttgttacaattgtgtttgctgccctgggatttctctcacctgcttccaggggaatgctcctgaccggaatgatcattctctacctcttccttggtatcattgccggatacgttggtgtccgtgtctggaggactatcaagggaacctcggaagggtggaaatctgttgcttggctgactgcatgcttcttccctgggattgtgttcatcatcctcactgtgcttaactccattctgtggggcaagaagagcactggagctctacccatctcactgttcttcaccctcctggccctgtggttctgcatctctgtgccactcacacttattggaggcttgctaggcacacgtgctgcaagcatcgactaccctgtccgaaccaaccagatcccacgagagatccctgagcgcaagttcccctcatggttgcttgtgctcggtgcgggaacattgccatttggtactctcttcattgagctcttcttcatcctttccagcatttggttgggaaggttctactatgtctttggcttcctgttcattgtcctcttcctgctggtcatagtctgtggtgaggtttctctggtcctgacctacatgcacctttgcgtggaggactggaaatggtggtggaaggccttctttgcttctggctctgtcgcattctatgtgttcctctactctattaactacctggtgttcgatctcaggagcctgagcggaccagtttctgccacactctaccttggctattccctgatcatggcccttgcaatcatgctctccactggcgccattggtttcctgctctccttctacttcgtccactacctcttctcgtctgttaagattgattagaggtgtgccccgctgcctctttctgcaatagagtcatctgatcatgaaaccggtgcagcagcatctccaacgacaaagctgag

SEQ ID NO: 44383 - DNA, 2433 bp, Zea Mays
gtcactagggcttgggatttcatttcttcatccgttggttctgaggttcttgattgagcggtcacaagacctgtcactgcaatggtcgccaagatgttgccatgctcatggatctcggcgtgcgtgctcgtgctgctcttgagcctgcacccgcgtgtccatgccttctacctccccggcaccttcatgcacacctactcccctggagaggtgatctcggccaaggtcaactcgctcacctctatcgagaccgagctgcccttcagctactacagcctgccatactgcaagcctctggatggcgtcaagaagagtgccgagaaccttggtgagatcctcatgggtgaccagatcgacaactctccataccgcttccaagttaatgtcaatgagtcagtattcctttgcaccacggacccgctcaccaaggagcaggccgagctgctcaagaggagggcacgagatctgtaccaggtcaacatggtcctggacaatttaccggtcatgcggttcaccgagcagaacggcgtgataatccagtggactgggttcccagttgggtacaacccgatagggagcaacgaggattatatcattaaccacctcaagttcagagtcttggtccatcagtaccaggcgcagggcgacgttgtggtcacgagtgaggatggtgttgcaatggtagagtctgatcgcaagagtgggttccagattgttgggtttgaggtcgtgccttgcagcgtaagacgtgatcctgagtccatgtccaagctcaagatgtatgacaaggtcgactctgtgaattgcccgttggagcttgagaaatctcaggcgatccgtgagaatgagcggatcacatttacctatgaggttgagtatgtcaagagcaacatcaagtggccgtccaggtgggatgcgtatctgaagatggatggtgccaaggtccactggttctcgatcatgaactcgatgatggttgtcttcttcctggctggtatcgtgtttgtcatattcttgaggacggttcgaagggacctgacaaggtatgaggagatggacaaggaggcacaagctcagatgaacgaggagctctcaggatggaaacttgttgttggggatgtcttcagagagcccagctttccaaagttgctgtgcgttatggtcgctgatggtatccagatcactggtatggcagttgttacaattgtgtttgctgccctgggatttctctcacctgcttccaggggaatgctcctgaccggaatgatcattctctacctcttccttggtatcattgccggatacgttggtgtccgtgtctggaggactatcaagggaacctcggaagggtggaaatctgttgcttggctgactgcatgcttcttccctgggattgtgttcatcatcctcactgtgcttaactccattctgtggggcaagaagagcactggagctctacccatctcactgttcttcaccctcctggccctgtggttctgcatctctgtgccactcacacttattggaggcttgctaggcacacgtgctgcaagcatcgactaccctgtccgaaccaaccagatcccacgagagatccctgagcgcaagttcccctcatggttgcttgtgctcggtgcgggaacattgccatttggtactctcttcattgagctcttcttcatcctttccagcatttggttgggaaggttctactatgtctttggcttcctgttcattgtcctcttcctgctggtcatagtctgtggtgaggtttctctggtcctgacctacatgcacctttgcgtggaggactggaaatggtggtggaaggccttctttgcttctggctctgtcgcattctatgtgttcctctactctattaactacctggtgttcgatctcaggagcctgagcggaccagtttctgccacactctaccttggctattccctgatcatggcccttgcaatcatgctctccactggcgccattggtttcctgctctccttctacttcgtccactacctcttctcgtctgttaagattgattagaggtgtgccccgctgcctctttctgcaatagagtcatctgatcatggtaatagttaccctcttagaaatactacacaataaatcaaatggaaaaaatggatacatggcaacgcccatggcttttggtcatgattaattcaatcatttagcgcagcacagtcactcaagttgaaacttaattcttaggaatgattgtaagttcttcagctatgtttattgcactttgtaataccattcagttttgcttgctctgggcatttgtgagcagcctttggttttggaacacttgagatctattcaatatgaaaatgaagctattcatttacagttcgttactattctgggaaggttatattgtaacatgggtgccacattagctgt

SEQ ID NO: 44384 - DNA, 2376 bp, Zea Mays
gtcttgatgagccaaagccatttagcttgcagcgcccaactcttatatatcagatttgggataccaagtccaccaaggtccagcggtctggtgactttatcccacgccacaaggcaatgcccacctttcacatcttttctacccttccacaagaaacctcgtcgaattttgtcaatagcactgataacccacttgggaacattcatggcgatgaaaagatatacggggattgcagagagcacgaaccggaccaaggctgccctgccagcaaggtttagtagtggagccttccaaccgggcagccggttagctatccactgcaaaaggtccctcctccccaacttcttatcagaaacagccagctgggaggagatccatcatatactctaggcagaataggtagggtatgaattgattaggcaaggatcaatctgttattgggtgtttctataaaccatgtgatccttacctggatatgtggaactctattttggactgaccgctggctgcatggtcaatgcatctcagaaattgtcccttctctgttaaatagagtttcaaaaagattgagaaaaaggaaaacagttcagcaagctctcagggataacagttgggtcatagacatctctggtagtttaccagaagtgattgtcgaattcttagtaatttgggacttaacacagaatattcagttgcagcctggaatacctgatgctttcctttggctactaggtgcttcgggggagtactctgctaaaacagcataccaacgtttcttggctggttctgtggattttgagccgagtgaaaggatatggaagagttgggcgcccccctaagtgcaaattcttcatttggcttgcttcccttaataggtattggacgcagatcgtctagcacgtagaggtcttgaccacctggggaaatgcgttctttgcgatcagcagcaggagacaattcaacacattttgatttcatgtgtcttctccaggaatatatggtggcagatcttaagtagagtggggctacaacttgtgtcactagggctggaggtatctatgttccaggattggtggagtgttgttgaaggtcttgtgccagttttgcacagaaatgtttcaacacattggttattcttgtggcttggtggatctggaagcacagaaatgcttgtgttttttatggtgtttctccaaacacgagttcagttctacagcatatccatgaggatgccaggctttgggaatttgcaggtgctaaggcactgagaaggttgtggccttgatttggggatgtcttagttatttctctttttttgtatagtcctttgtttggtttgtttggttttttcctgctttctttggatatttatcaccttgtacgtggtcttctttagacctttctctctacttaatataatgatgcgcagttctcctgcgtgttcgagaaaaaaaatcaatcaatactattctagctacatttctacacaaacgtcactctatgaacagtgtaaaacagcgttttacacaaccatatgcacgatctactggagacagcctacgcacttataggggttttttaaaaatttgtcccaaaatagatgtacttttagacataggacaacctagctctagtaatttttctcctttctgtacttccaaagtacattagttacatgttagatcaactttaggggtacataggtaatttcctagtagcattgatcttatcattcattacctagaagtgtgtttattttacagagggagtactctatgcacattgtgccgtagcaaaaacctaccacacagcacattacacaatttggcagcctgggcaacagcaggactttatgaaacatacacaacagaaactcgatatcatcaaaagatgtgttttaagaaggtatcgaccaaatatagacctgtgggtccccacaaagttgtcctaaagatatatccacctgacaacggttaagggattacccagcaaaatcacaagcttacatcagatgatggtccctgtagttcttttgaacaatgactcaacgagtggcaatgttttggccttcaatgtgaaattttagcatcacaaacttgccaattttaataaattagtaaaaccaacttttgtttataagttcaactcacattgcctgagtgtgaacaaagattttgtttagtaaaaagaaatgatataaaaggtatcatggcactcgagccataaaggcaaaagccaaagcaattctaaacagcatgacatccataaaacatggcaggtaccttctttgtcttctccagatcaaactcaatggactttatcctgtcaaaagaatcttgtatggcccgatccttatcctgtggaagctctggaggc

SEQ ID NO: 44385 - DNA, 2047 bp, Zea Mays
cctctagttctattctaaattatctatcaatcgaattaattaacaatactggtgtggcagtgccgaatatgaaattccgggtggcatgtttatttactctgaaatgtaatcagtgtctcattagtgtgtcgggcttactgttccctagcaataggcatcaagggcctgtttgggttggagtaacttcaaatgaaaagcataggaataagaaaacagaggaaatatagttcatgtgcatttggaatggaggatacaaccatccatttcttattgaatactgcagtgggggcattgggcccccctatgcgccgcctcttccacatgctgcggcgtctaccaggttctgagaaaccttcaagtcgcctgtcagcttcaaagtgggaagcaaagcgagaacatttcccagtgcgcgcacggcctgaggtgacaggtatttatatcttatgggaagaaatccagtggtgagctattgctttcatatggttttgttccaaaagagggaacaaatccaaatgattcagttgaactgttggtgtctcttgataagtctgataattgctataaagagaaattacaagcactgaagcgaaatggtttgtcagaatctgaaagtttccctttgcgggtcacaggatggccagttgagctgatggcttatgccttccttgtggtcagtccacctgacatgagtcaatgctttgaggagatggctgctgctgcatctaataaaacttcatccaaacctggattgaattatcctgacctggaagaacaggcccttcagtttatcttggactgctgtgaatctaatatagaaaaatatacaaagtacttagaggtgacatcctttccatgccatctcttgcgcactacaacctctcataagatcttgacaatctgttatcctatcatcatcatcatcgtcatcatcatttgatcctgtcatcctttgataaatgcttttgtacacaaatcaccgtgatcagttttcagagtgaaccgataatgtttcagggtggcgctggctctccagaagttccaatgaatgcaaagcaagccaacagaacattactgctaaaacagctagcaagagatctgtgcatcagtgaacggagaatcctgtatcgcacacaatatatattgcgtagaagattgagggacatgagaggcggcgaacttagagctctgtcacttttcaacgggctgagaaaactctttaaataaatggatcggctatcttatcttggcagatcttactggacagatttgatttctccagtaacatggtgctttgaccttgccgccaaagcctcagatacttgtatgccaaatcagactgcagtccaggctctcggccgcaaatttcatctagatgctagaaacaagtaaaccttcgatgaaggatagctgtgcgttgagattgaacaacccagagcttatatgtatgtgtgtaatgtagattcagtccaaccatggagtcgttttacgctaggtgcgagcctggccttctgttacgtatataattataaatccagtagccagcaaggcaaccccccacccccatgtgtacacaggatcgatctcagaacagatgatttggttctcccttcatcatgcttcaactttgtccattacccccttctcttagctctcagactgttgtggaaaggggacgctgaaccggatactgccattaagcattgcaagctcccgtagctgctgctgctacttcaaaacgtcatgggattcatcctgcaaagtagaaaacaggaactatcaggtatcagttcttcaagatggactaagagcaagctacataggagtttaaaagataattgtcagatcttaaacgaaacccgcgggcctgcatcagccaagcatcagttatttcaacaagtagctctgctttaaccaatatatgtgaaagtgtctagatttctagttgggatttagacgattaataacaacattagattattgtgattaacgtgtattttgcataaagaaattgagtcagatcttaataataaaaattgattgagcttat

SEQ ID NO: 44386 - DNA, 3077 bp, Zea Mays
agcggataagcccccgcgccggtgcctacacagtacacactgaccacgtcagtttcgccatggctacctcctccaccaccgcgctccactcgcagttccggccaccgctgcgcgctccccgccatctccgtccgcttccacactcgtattcctcctcctcccgcactcgcggctgcgctcctgtccgggcctcagcggcgtccgcatccgcgccggcccagcgggagatcgccgcgggcgtcccgtggggctgcgagatcgagtccctggagagcgcggcatcgttggagcggtggctcatagactcgggcctaccggagcaacgcttggccatccaacgcgtggacatcggcgagcgcggcctcgtcgccctcaagaacatacgcaagggggagaagctgctcttcgtgcccccttccctcgtcatcaccgccgattcagagtggggtcgccctgaggtgggagatgtgatgaaaaggaactccgtgccggactggccgcttatcgctacttacctcataagtgaagccagtttagagggctcgtcgaggtggatcagctacatagcagcgttgccgaggcagccttactcgcttttatactgccttcatgtgttattgcaggactcgtgcagagctagatgcatacttagtggcctcaccaatcaggaaacgtgcaattcagaggataactgatgtgattgggacatacaacgaccttcgagaccgtatattttccaggcatccagatttgttccctgaagaggtgtataacatagagacatttctatggtcctttgggattctgttctcacgcctggttcgcttgccatcaatggatggaagggttgcactagttccttgggcagatatgcttaatcatagccccgaggtggaaacattcttggatttcgataagtcatcgcgaggaatagttttcaccactgaccgctcatatcaaccaggtgagcaggtatttatatcttatgggaagaaatccagtggtgagctattgctttcatatggttttgttccaaaagagggaacaaatccaaatgattcagttgaactgttggtgtctcttgataagtctgataattgctataaagagaaattacaagcactgaagcgaaatggtttgtcagagtaagttctcattatactcatcaggtgatattttaccctcttcatgtggaacatgataatatcatttctatcaatataaaacatatttcttgaactgttttttcgttttctatattgtaaccatgctaaatgaccatttgttggattagaacagtcctcaaacatcactgatttcttattgttacttcgacatagtattcagaatagaatacaaaaatatagtactcagaatagattacgaaaatcatgattgcatagtagatgtaaaatgcattttattgagacagaaaccagttcttttaccagaataagccagcttatgccatctaattttgtttgggggaaactgaacctactatcagctcagcatcatgtacatcattctctgtttatttgaattccatgtgatgattttacaatgtatatttctgatattatcagatttgcgtagttgtattgacaaaagtggatctgataaccatttacagatctgaaagtttccctttgcgggtcacaggatggccagttgagctgatggcttatgccttccttgtggtcagtccacctgacatgagtcaatgctttgaggagatggctgctgctgcatctaataaaacttcatccaaacctggattgaattatcctgacctggaagaacaggcccttcagtttatcttggactgctgtgaatctaatatagaaaaatatacaaagtacttagaggtgacatcctttccatgccatctcttgcgcactacaacctctcataagatcttgacaatctgttatcctatcatcatcatcatcgtcatcatcatttgatcctgtcatcctttgataaatgcttttgtacacaaatcaccgtgatcagttttcagagtgaaccgataatgtttcagggtggcgctggctctccagaagttccaatgaatgcaaagcaagccaacagaacattactgctaaaacagctagcaagagatctgtgcatcagtgaacggagaatcctgtatcgcacacaatatatattgcgtagaagattgagggacatgagaggcggcgaacttagagctctgtcacttttcaacgggctgagaaaactctttaaataaatggatcggctatcttatcttggcagatcttactggacagatttgatttctccagtaacatggtgctttgaccttgccgccaaagcctcagatacttgtatgccaaatcagactgcagtccaggctctcggccgcaaatttcatctagatgctagaaacaagtaaaccttcgatgaaggatagctgtgcgttgagattgaacaacccagagcttatatgtatgtgtgtaatgtagattcagtccaaccatggagtcgttttacgctaggtgcgagcctggccttctgttacgtatataattataaatccagtagccagcaaggcaaccccccacccccatgtgtacacaggatcgatctcagaacagatgatttggttctcccttcatcatgcttcaactttgtccattacccccttctcttagctctcagactgttgtggaaaggggacgctgaaccggatactgccattaagcattgcaagctcccgtagctgctgctgctacttcaaaacgtcatgggattcatcctgcaaagtagaaaacaggaactatcaggtatcagttcttcaagatggactaagagcaagctacataggagtttaaaagataattgtcagatcttaaacgaaacccgcgggcctgcatcagccaagcatcagttatttcaacaagtagctctgctttaaccaatatatgtgaaagtgtctagatttctagttgggatttagacgattaataacaacattagattattgtgattaacgtgtattttgcataaagaaattgagtcagatcttaataataaaaattgattgagcttat

SEQ ID NO: 44387 - DNA, 3050 bp, Zea Mays
agcggataagcccccgcgccggtgcctacacagtacacactgaccacgtcagtttcgccatggctacctcctccaccaccgcgctccactcgcagttccggccaccgctgcgcgctccccgccatctccgtccgcttccacactcgtattcctcctcctcccgcactcgcggctgcgctcctgtccgggcctcagcggcgtccgcatccgcgccggcccagcgggagatcgccgcgggcgtcccgtggggctgcgagatcgagtccctggagagcgcggcatcgttggagcggtggctcatagactcgggcctaccggagcaacgcttggccatccaacgcgtggacatcggcgagcgcggcctcgtcgccctcaagaacatacgcaagggggagaagctgctcttcgtgcccccttccctcgtcatcaccgccgattcagagtggggtcgccctgaggtgggagatgtgatgaaaaggaactccgtgccggactggccgcttatcgctacttacctcataagtgaagccagtttagagggctcgtcgaggtggatcagctacatagcagcgttgccgaggcagccttactcgcttttatactggactcgtgcagagctagatgcatacttagtggcctcaccaatcaggaaacgtgcaattcagaggataactgatgtgattgggacatacaacgaccttcgagaccgtatattttccaggcatccagatttgttccctgaagaggtgtataacatagagacatttctatggtcctttgggattctgttctcacgcctggttcgcttgccatcaatggatggaagggttgcactagttccttgggcagatatgcttaatcatagccccgaggtggaaacattcttggatttcgataagtcatcgcgaggaatagttttcaccactgaccgctcatatcaaccaggtatttatatcttatgggaagaaatccagtggtgagctattgctttcatatggttttgttccaaaagagggaacaaatccaaatgattcagttgaactgttggtgtctcttgataagtctgataattgctataaagagaaattacaagcactgaagcgaaatggtttgtcagagtaagttctcattatactcatcaggtgatattttaccctcttcatgtggaacatgataatatcatttctatcaatataaaacatatttcttgaactgttttttcgttttctatattgtaaccatgctaaatgaccatttgttggattagaacagtcctcaaacatcactgatttcttattgttacttcgacatagtattcagaatagaatacaaaaatatagtactcagaatagattacgaaaatcatgattgcatagtagatgtaaaatgcattttattgagacagaaaccagttcttttaccagaataagccagcttatgccatctaattttgtttgggggaaactgaacctactatcagctcagcatcatgtacatcattctctgtttatttgaattccatgtgatgattttacaatgtatatttctgatattatcagatttgcgtagttgtattgacaaaagtggatctgataaccatttacagatctgaaagtttccctttgcgggtcacaggatggccagttgagctgatggcttatgccttccttgtggtcagtccacctgacatgagtcaatgctttgaggagatggctgctgctgcatctaataaaacttcatccaaacctggattgaattatcctgacctggaagaacaggcccttcagtttatcttggactgctgtgaatctaatatagaaaaatatacaaagtacttagaggtgacatcctttccatgccatctcttgcgcactacaacctctcataagatcttgacaatctgttatcctatcatcatcatcatcgtcatcatcatttgatcctgtcatcctttgataaatgcttttgtacacaaatcaccgtgatcagttttcagagtgaaccgataatgtttcagggtggcgctggctctccagaagttccaatgaatgcaaagcaagccaacagaacattactgctaaaacagctagcaagagatctgtgcatcagtgaacggagaatcctgtatcgcacacaatatatattgcgtagaagattgagggacatgagaggcggcgaacttagagctctgtcacttttcaacgggctgagaaaactctttaaataaatggatcggctatcttatcttggcagatcttactggacagatttgatttctccagtaacatggtgctttgaccttgccgccaaagcctcagatacttgtatgccaaatcagactgcagtccaggctctcggccgcaaatttcatctagatgctagaaacaagtaaaccttcgatgaaggatagctgtgcgttgagattgaacaacccagagcttatatgtatgtgtgtaatgtagattcagtccaaccatggagtcgttttacgctaggtgcgagcctggccttctgttacgtatataattataaatccagtagccagcaaggcaaccccccacccccatgtgtacacaggatcgatctcagaacagatgatttggttctcccttcatcatgcttcaactttgtccattacccccttctcttagctctcagactgttgtggaaaggggacgctgaaccggatactgccattaagcattgcaagctcccgtagctgctgctgctacttcaaaacgtcatgggattcatcctgcaaagtagaaaacaggaactatcaggtatcagttcttcaagatggactaagagcaagctacataggagtttaaaagataattgtcagatcttaaacgaaacccgcgggcctgcatcagccaagcatcagttatttcaacaagtagctctgctttaaccaatatatgtgaaagtgtctagatttctagttgggatttagacgattaataacaacattagattattgtgattaacgtgtattttgcataaagaaattgagtcagatcttaataataaaaattgattgagcttat

SEQ ID NO: 44388 - DNA, 1022 bp, Zea Mays
cacggcggcgcttatctacccgtggcatctcgcatcccaaccggtggccgttgcagctcccagccgtgtccctcgcagcaccagtggtggccaccatcgctcacgtttgtgcttcctcagctcgcgacggcgcgcgtcaagggcgtcacgcgtccccgtcagcggtcctcgcagcgtctgacggcggcgagcctcgctcgtggctgcgctctcctgcacgcggttgcgtgtcccggctggtggcagcgcgcatcaagaccgtcgatgatccctgacgaacgctagcgcaacacttgtaaggaaattaacaccgcaatatcacctacaaagaaaggccgtgaggaaccggtgcgcgccaccttggcgacggaactggtgctccggcctctgagctgtgatggagcaagatgttggtggtgacaacagtcattcgcagttcatcaacaatgatctgaggattatgcccgctgatgaggatgggccatctcagtccattaacaatggtagcagtgctgcccctattaacttagaggagggtgctgctaccaacaatggtactgaagatgcaaatacttcagaaaatgttgatggtaagaagcataaaagaatttgcacatctaaagtgtggcaggattttgaaccactatataagactgtagacggcaagaggatcaggtatggtggtaagtgtcactggtgcaaatgtacattgactgctgtgtctactagtggtactggtcatttgcttaggcatcaacgtgattgcaaagttaagctttctaagcagggcaagcagtcagtccttaagtttaaccctgatggttctgtgcgtaactgggattactgtcctgatcgtgctagaactcagatgtgtaggttgattgctaggcttgatcttccacttaattttgctgagtcacctgcttttgaggagtatattagactatctcataatcctgtctttaagaaagtatctcatcaaactactgctagggactttgtcaagttctttaatgatcgtc

SEQ ID NO: 44389 - DNA, 853 bp, Zea Mays
tgggttacttagtggcttctaaaggaccacatctcctcgcaccaactggaagtgacctgcagcgtcatggttctgagggcaccgtttttgctggattccactatgatcttaatttcttgacgatacatggccgaagtagattcccaggccttaacatctggttaaggaatggtaaaaagatggaggtgaaagtccctgttggttgccttctaattcagtctggaaaacagctggaatggcttactggtggcgattgtttggctggaatgcatgaggtagtggtaactaagaggacactagaggccatagcgctagcgaaagaacagaatagaagcttgtggagggtttcatcaacactgttcgcgcacattgcttcggatgcaattcttaagccgctcggccactttgctgaaacacctgatgctcattcctatccacctatatgcgctggggattatgtcgagcaggagctttcagtgattaacctgaagggaaaggattaagtatagactctatgcagctggtgcatctggatatcttatgaattgacagatatcaggatgcaacactaaatcaccccaactgacaattgggtatccgtttccaaatgctgctgtactgaaggtggttaagttggcccgaagacatgcttgttcattgcttgctcttgttaagatagtggatacccttctttgtgaaccacatatcacttatgaaaataaaatgtatagcttcctcataaatctgtctttctccttgaaactgatatccggctagttcagacatctgtagtgtctgatgtagttccgaaacagagaaacttttcgatcgaccaaaaatatacttctcacgc

SEQ ID NO: 44390 - DNA, 1278 bp, Zea Mays
tgggtaccgtatggtcatccctcatccggacggctctaaacactgaactcacggtgctgagattaacagcacttcggttggatttggatcagtcccgtgatcggaccacattgttggtgtcacacccgaaggggtggaggtgcctcgcagtttggtcgacaagaacatgcaggagaagatcaggagcatgcctaaggactttaggccagccactcctaaagggccggacccgaaatggcgatacatgtggagagtgggtcctcgccctacaaacacccgttttaaggagctgaactcagaacctgttatccctgagggattacctgagtgggaagagatgatggattcctggggttctaaaatgatttctgcaattgaggttgttgctgagatggctgcaataggctttggcctatcgaaggatgcatttacttctttgatgaaagagggaccacatctcctcgcaccaactggaagtgacctgcagcgtcatggttctgagggcaccgtttttgctggattccactatgatcttaatttcttgacgatacatggccgaagtagattcccaggccttaacatctggttaaggaatggtaaaaagatggaggtgaaagtccctgttggttgccttctaattcagtctggaaaacagctggaatggcttactggtggcgattgtttggctggaatgcatgaggtagtggtaactaagaggacactagaggccatagcgctagcgaaagaacagaatagaagcttgtggagggtttcatcaacactgttcgcgcacattgcttcggatgcaattcttaagccgctcggccactttgctgaaacacctgatgctcattcctatccacctatatgcgctggggattatgtcgagcaggagctttcagtgattaacctgaagggaaaggattaagtatagactctatgcagctggtgcatctggatatcttatgaattgacagatatcaggatgcaacactaaatcaccccaactgacaattgggtatccgtttccaaatgctgctgtactgaaggtggttaagttggcccgaagacatgcttgttcattgcttgctcttgttaagatagtggatacccttctttgtgaaccacatatcacttatgaaaataaaatgtatagcttcctcataaatctgtctttctccttgaaactgatatccggctagttcagacatctgtagtgtctgatgtagttccgaaacagagaaacttttcgatcgaccaaaaatatacttctcacgc

SEQ ID NO: 44391 - DNA, 2696 bp, Zea Mays
taaagaattgtggttgtagccaatttattaacaaacaggatatcggtatggagctggttcatttaaaaggaagatactacattttaccaattggttctacaagctgaagattaatatcattgtaatagaaatgtctcgaacaatcatattttaatctcccctctcccgtgtacaatcaccaaaactaagcataatccaacatccaaaagcaccaaaatatctttagttcgaagtctacttgcctattagcagtgcatttttattccttttgatactgaaaactaagtatccttccggcagaggtctgaacttaaaatcatctaataaacaccgcagcaactgacgcgacagacactcccagagcgcaagagatggccatcacccgtgtccggagcagcatgaggttaacgttcttcgtagcctggaggcacaacgtgagcacctgcagcctcgcgttggcctccatcttctggaagaaggcgatgggcttgatggcgcggcgtagcaccagggcgaccgcgaaggggaacgcgaacgccgccactccctgcactgccgcggcggatccgacaccgagaggcggagcaccgtaagatatccacgcgccggcggcgaggtgcgctcctccgaggagcgcgagcgagccgctgaggcgctgcacggtgcggcggagcgcgtcgagctcccgccgcgtttcgtcggccagcggcgacgtatcgcgctccaccgtggggccctcgatctcctggtgccgcatctcatccggcgacgcgggcgcggatggggcgccttggctgggctctgatgtcgtggaggaggggttggggctggggtttgagggcgcggagaagaagcggcggccgggattcaggaggatgaaggggtcgcggccatgggtgaatgttttaggtatggggaagtgcgcggcggcgacagccgttgggctcaggaggcggtgggagaggcgcgagagcgccatcggaggcggagcctgcaacaacgctgcaagcctgacgaggaaaggtcgcggcggcggcggctcgcctgtttcggatttctgaaaagttgtctcccgtttccccagtcaagagtcaaggcgtaatctgggaatacgtttgctcccctcgtatgcgggtagggacacgctcgccggcaggttcgggctgccttcctccacaatccagcggctgccgcacggctcggcctcggtcctacagctacaagaaccatctctctctctctctctcctctcactcactcactccccccattcctacctttcttctcctccacctcgtcaggcaccctcaaaccctcgccgcaagaaagaagaggaacatgtgtaccggcacccgtgggaccgggtgacagcggcggcgtggcgcaagttcacggatccggcctcctgtacggcgctctcccacgtcgcagacgttcacaccctacaccgccgcctcgactccgacacgggccgcctccaggccgcgcgctccatcaccgtgcggtccccgccgctccctttcgtcctgcgccgactcctcccgtccgccgcggcgtccccaaacggcgccgcgctctgccactgcgtcgagacctcgctcgtggacgcccagcgccgcgccatggacgtcgtcgtgcgcaacgtcagcctccggggcctcatcgaggtcgaggagcgcgcctcctacagaccacatccggaccggcccgacgactggacgcagttcaggcaggagaccacgatccggtgccgcccgctcgcggccctcgccgccgtcgctgagaaggtcgagacccggtgcgccgagaggtttctgcagaatagcgccaaggggagggaggtcgtcgagcggatctgccggtacctcgaggccgagtccgccggcgccgcgccctccgtaacctgatctcgtttgcacatctttgcttgatccgaacggatccaagggttcctcgatctgtgctgtgtgcgcccggataaatcgaaccccgcctgctaggcgcttgcttttcttcattttttgtgtgtgaaatgatgagctgaattcggaatagaataaagcttctggtcatacttgtttcttctgttgtaagtatgtggaaccgctttaacctccctgattttgatcatgagccttgccaaattctaatttgctaataaatttaaatgctatgaaatcactgatgtttgttgtgttattttgattgactgaatggttgctcatgctttgattgactagatttagtggtgttctcattcacagaaaagggtgaggtcattgatctgttgttctttaagctggtagcagattgtccccttggttgattggtaagaatagtatgacatcgtgaagtaaaatactttccatatctagtctattctagcaatgtgtcattcttgaagctgggcaggtagtgtttaatggtagataccccatagctttttgtcgtacacttcgctaatacttttatctgtggaaccattttgataatctccccttccaactctttgtgcttgctcttgcaaatttgagatattacataagttatacatatcggtgctttaatctattcaaggcatgtccagataaatcagaaagtgaaccgatgtgtcattcttgaagctgggcacagtatttctgtctcctttgtacatttggtttattggtaagaatggcatgacatatattgtggat

SEQ ID NO: 44392 - DNA, 465 bp, Zea Mays
ccagcagaataattgttcagccttcccgaacttcaacttcagcacctcgcaccatggggactacgtcggctttgcatccgagccactttgccttgtcggcctggacatcgtgtccgtttccgagccccatggagaaaccgccgccgagttcatcagcaacttctcttcgtgccttactgaccatgagtggaactgcatcgttcgtgctggcactcccagggacgtgctgacagagttctacaggtacactttcttgcatagggaatttatcggtagacaacatatgcattggcagaatcagcacttcagtcacggcatattgctttgtatatgttgggagctaaaacatctgtctgctgatcctggaaatcctctatgcaaatctataacgacaaagtaccgtacgattcctaaaatttcttcagaattagctgaaatgaaatattcctgatgttgcaaatcagc

SEQ ID NO: 44393 - DNA, 1759 bp, Zea Mays
gggcgatcccgagcgagtggagctcttgcgtcttgccactttgccagttgccacgctccgggctcctcggcaaacacacagcaccagctaagctagctcacgcccgccgaggccatatccttcccagcacgccgtagacgccgacgcttgacgccatgcaggagttccaatccatcccggggctggcggggcggctgttcggcggggcagcggccgccggcctccggcgcgcgcaggggcagtgcggcggcgggggtgcctcggccgcggcggccgtgaagtgcccgcggtgcgagtccaccaacaccaagttctgctactacaacaactacaacctgtcgcagccgcgccacttctgcaagggctgccggcggtactggaccaagggcggcacgctgcggcacgtgctctccctccacgtcctcgtcgactactacgacgacgcgaagctgcaccgcctccccggcggctccgcggacgtgtccacgctgttccaggcctcgggcgacgcgccggggagcgcgggcatggtgagggtcgcggagcgccggggcgggcgcgtggccttcgcgcccgaggacgacgcggggagcgccgccgccgccgtgttctacgtcgggcccgtccacgaggcgccctacaacatctcggtcctctgggtgagcggcgtgatctcgtcccccgcggccgaggcgcccgcggcggcggccgaccggccgccgagcaggcgcaacgtgtcggacgtcatgtccgagaacgggtgcgggcgcttcgccggcctcgtcgccgccacgggcgacgcggccgcgacgttcgagaggcaggccgacggcggcggcgggctcacgctgttctgcccggcggacagggcggtggaggcgttccagcccacgctgaacagcctctccgccgacgcccggctcgcggtcgtgctgtaccacggcgcgccggggcaccactccatgcaggcgctgcgggcgggcgaccaggacctgcgcacggcggcctcgctcgacgggggcaggtcccacttggccctggccgtgcgcaacgtccgcggcagggtgacgctgctggcctccgcgacgcgcgacgtggccagggtcacccgcacgctcgcggacgaggaggccgtcgccgtgtatatgatcgacgcggtgctggtgccgggtaacctcacggcgcaaggaactgcaggggggacggagcacggcgagctcacgtccggttcgggcggggaagaagacggcggaggaggcggtgttcgccagagcagtggctccagggctctggctccggctccgtgctggctaccgcgtggatggttcgccgcttgggcgcttctgctcgctcttctggcggcgtttgcggcgtctggttgagtgatcgatcggcgggtcgtccgttcgtcttccaccggcgtcgattgttactgttaggttgtgatctgtgtccgtgtgcgcgtgcgtgtcgatcatgtctgtgcttaaatttttcgtcgactctgtgtcagtcccattgaaacctgtcgttatgcttttgagtgaaagtgaccgatgatcatatatgcagatgcctgagactgtgagttgaggtggagtctgttcaaacgaaattaagggcttcatcggttcgtttccacaactcaggcgtgtcgatcgcgtaacagcatatccaagctcaaactgtggacgtgtttggttgcttgcatatgtgtgtccttgcattgtaggatgcagtagctgttgtttggttgttg

SEQ ID NO: 44394 - DNA, 475 bp, Zea Mays
tgttgatgaaaaacccttttgtaccacctgttgatgagaaaaaaaaactcagacaaatgtctatatattcaattcctcatcttctaagaacttaatgctaagaaacaagaacatcaaaactgtttcaggacatgaaagaattggacatgtaaatactaaatagtgactaaaatacaggaattaggcatgaaagaataataaataatcctgtttgaagttctgagcatgcttgtatataacaccagaagtaactaaatagcagatttaagcaagtaaacaatagaggtaagtaaataacaccagaggtaactaaatagcagattttactaaagagttcaaacaaaactaaagagttacacaacctaaagagttcaaacaaaaactagaagtagcaacttgatgaataatgaaaagacccacaagcagaccaacacagagaactattggttgtgcaccataacaaaactaaagttcc

SEQ ID NO: 44395 - DNA, 1077 bp, Zea Mays
ctgcaatttactttagtaccaactgctcaaagcctcagaatcagaaaagtacaaagctgttatcctacgtatagacagccctggtggtgatgctcttgcttctgatctgatgtggagagaaatccgacttctagccaactctaaacctgtagttgcttcgatgtctgatgttgctgcaagtgggggctactacatggcaatggctgcaccagtaattgttgctgagaaactgactctcacagggtcaattggagttgttacagggaagttctgccttcaaaagttatatgagaggattgatttcaataaagaaattatatccaagggtcgatatgctgagcttaatgttaatgatcaacgacctttaagaccagacgaggcagagctttttgaaaagtcagcacaaaatgcttatgcattgtttcgtgataaagcagccatgtcgcgatcaatgagtgttgatcagatggagagtgttgctcaaggtcgagtgtggagcggccatgatgcgttttcaagagggttggttgattcagtaggtggactctcacaagctcttgctattgcaaaacagaaagctaatatacccaaggataagaagatccagctagttgaagtttcaaagccctctccatcattaccggagatcttatccggcattggaggttcgttgcttggagttgacagggcagtgaagggagtgctccaggacatgacctccctaagtggagtccaagctaggatggatggaattctgtttgaaagtttaggagacatgtcaggagaaaaccagttattgttgcttgtaaaagatatcatgaactattttgattaattctagcattcaggtccttatgttccaaacatttgtatttagagatgaggggaaattcataatgtcactacacatctatcttgcacagaaacaggtagcttgtgatttgtgtagttaatttagcattgtatatgccattttattcttttgcactgatgactaaaaatatcatgattgatatactgggcaaaagtaaaaggaactccaccttttcttatgcatgatattaactctaatcccca

SEQ ID NO: 44396 - DNA, 1216 bp, Zea Mays
ctcgcccttgtaaatactcgcgtgttagtaaaaagactcttggattacaaggtggaggagaacaaattgctataatcagagcatctggaagtataacacggactcgtagcccattgagtgctcctagttcaggcattgtcgctgagcagttaattgagaagatacgaactgttagagaatcagaaaagtacaaagctgttatcctacgtatagacagccctggtggtgatgctcttgcttctgatctgatgtggagagaaatccgacttctagccaactctaaacctgtagttgcttcgatgtctgatgttgctgcaagtgggggctactacatggcaatggctgcaccagtaattgttgctgagaaactgactctcacagggtcaattggagttgttacagggaagttctgccttcaaaagttatatgagaggattgatttcaataaagaaattatatccaagggtcgatatgctgagcttaatgttaatgatcaacgacctttaagaccagacgaggcagagctttttgaaaagtcagcacaaaatgcttatgcattgtttcgtgataaagcagccatgtcgcgatcaatgagtgttgatcagatggagagtgttgctcaaggtcgagtgtggagcggccatgatgcgttttcaagagggttggttgattcagtaggtggactctcacaagctcttgctattgcaaaacagaaagctaatatacccaaggataagaagatccagctagttgaagtttcaaagccctctccatcattaccggagatcttatccggcattggaggttcgttgcttggagttgacagggcagtgaagggagtgctccaggacatgacctccctaagtggagtccaagctaggatggatggaattctgtttgaaagtttaggagacatgtcaggagaaaaccagttattgttgcttgtaaaagatatcatgaactattttgattaattctagcattcaggtccttatgttccaaacatttgtatttagagatgaggggaaattcataatgtcactacacatctatcttgcacagaaacaggtagcttgtgatttgtgtagttaatttagcattgtatatgccattttattcttttgcactgatgactaaaaatatcatgattgatatactgggcaaaagtaaaaggaactccaccttttcttatgcatgatattaactctaatcccca

SEQ ID NO: 44397 - DNA, 1621 bp, Zea Mays
gagcacttgccgtttatgctctcctatatctgatcagttgaagacacgcttctcatcagggctgtcgctaccacaaatctgtgagaattttgttaaggcagcatatgacccacgaatctcagggatttatctgcacatagagccactgagatgtgggtgggcgaaggtggatgagatcagaaggcacattgtggatttcaagaagtctggtaaatttgttgttggttatatgcctgtttgtggggagaaagaatactatcttgcttgcgcgtgtggtgagctatatgcacctccaagtgcttatgttgccctgtttggcctaactgttcagcaaacatttctcagaggtaatgacattactaaaggagagagtagggcagaaagacaagaaaagtctgcgtatggttgactacagtaaatactcgcgtgttagtaaaaagactcttggattacaaggtggaggagaacaaattgctataatcagagcatctggaagtataacacggactcgtagcccattgagtgctcctagttcaggcattgtcgctgagcagttaattgagaagatacgaactgttagagaatcagaaaagtacaaagctgttatcctacgtatagacagccctggtggtgatgctcttgcttctgatctgatgtggagagaaatccgacttctagccaactctaaacctgtagttgcttcgatgtctgatgttgctgcaagtgggggctactacatggcaatggctgcaccagtaattgttgctgagaaactgactctcacagggtcaattggagttgttacagggaagttctgccttcaaaagttatatgagaggattgatttcaataaagaaattatatccaagggtcgatatgctgagcttaatgttaatgatcaacgacctttaagaccagacgaggcagagctttttgaaaagtcagcacaaaatgcttatgcattgtttcgtgataaagcagccatgtcgcgatcaatgagtgttgatcagatggagagtgttgctcaaggtcgagtgtggagcggccatgatgcgttttcaagagggttggttgattcagtaggtggactctcacaagctcttgctattgcaaaacagaaagctaatatacccaaggataagaagatccagctagttgaagtttcaaagccctctccatcattaccggagatcttatccggcattggaggttcgttgcttggagttgacagggcagtgaagggagtgctccaggacatgacctccctaagtggagtccaagctaggatggatggaattctgtttgaaagtttaggagacatgtcaggagaaaaccagttattgttgcttgtaaaagatatcatgaactattttgattaattctagcattcaggtccttatgttccaaacatttgtatttagagatgaggggaaattcataatgtcactacacatctatcttgcacagaaacaggtagcttgtgatttgtgtagttaatttagcattgtatatgccattttattcttttgcactgatgactaaaaatatcatgattgatatactgggcaaaagtaaaaggaactccaccttttcttatgcatgatattaactctaatcccca

SEQ ID NO: 44398 - DNA, 1978 bp, Zea Mays
tttgcttccggcacggagcacttgccgtttatgctctcctatatctgatcagttgaagacacgcttctcatcagggctgtcgctaccacaaatctgtgagaattttgttaaggcagcatatgacccacgaatctcagggatttatctgcacatagagccactgagatgtgggtgggcgaaggtggatgagatcagaaggcacattgtggatttcaagaagtctggtaaatttgttgttggttatatgcctgtttgtggggagaaagaatactatcttgcttgcgcgtgtggtgagctatatgcacctccaagtgcttatgttgccctgtttggcctaactgttcagcaaacatttctcagaggtgtccttgagaaagttggaattgaaccggaaattcaaagaattggtaaatacaaaagtgccggagatcaacttgcacgcaagagcatgtcaaatgaagttagggagatgctggcagcactgcttgacaatatttatggaaactggctggaaacaatatcttctacacatggtaatttcagcagatttgttttacgcgtgttaagagaaaaaatgtcattgcagagtttgctctacagggaagaaaaaagaagaaattgagggatttattaattcaggggtctaccaggttgccagactcaaggaagaaggttgggtaacagatttactgtatgatgatgaggtaatgacattactaaaggagagagtagggcagaaagacaagaaaagtctgcgtatggttgactacagtaaatactcgcgtgttagtaaaaagactcttggattacaaggtggaggagaacaaattgctataatcagagcatctggaagtataacacggactcgtagcccattgagtgctcctagttcaggcattgtcgctgagcagttaattgagaagatacgaactgttagagaatcagaaaagtacaaagctgttatcctacgtatagacagccctggtggtgatgctcttgcttctgatctgatgtggagagaaatccgacttctagccaactctaaacctgtagttgcttcgatgtctgatgttgctgcaagtgggggctactacatggcaatggctgcaccagtaattgttgctgagaaactgactctcacagggtcaattggagttgttacagggaagttctgccttcaaaagttatatgagaggattgatttcaataaagaaattatatccaagggtcgatatgctgagcttaatgttaatgatcaacgacctttaagaccagacgaggcagagctttttgaaaagtcagcacaaaatgcttatgcattgtttcgtgataaagcagccatgtcgcgatcaatgagtgttgatcagatggagagtgttgctcaaggtcgagtgtggagcggccatgatgcgttttcaagagggttggttgattcagtaggtggactctcacaagctcttgctattgcaaaacagaaagctaatatacccaaggataagaagatccagctagttgaagtttcaaagccctctccatcattaccggagatcttatccggcattggaggttcgttgcttggagttgacagggcagtgaagggagtgctccaggacatgacctccctaagtggagtccaagctaggatggatggaattctgtttgaaagtttaggagacatgtcaggagaaaaccagttattgttgcttgtaaaagatatcatgaactattttgattaattctagcattcaggtccttatgttccaaacatttgtatttagagatgaggggaaattcataatgtcactacacatctatcttgcacagaaacaggtagcttgtgatttgtgtagttaatttagcattgtatatgccattttattcttttgcactgatgactaaaaatatcatgattgatatactgggcaaaagtaaaaggaactccaccttttcttatgcatgatattaactctaatcccca

SEQ ID NO: 44399 - DNA, 2288 bp, Zea Mays
gtggcaacaaatcaaccgccccagaggtatccgcctccggcctatcccctccactcccgaccccgcgatccccagacccggtccaccagaccaccacgccgcctccgctttcttccctgcctctactagtctacttcaactgcagccatccgccattcccgaagcttccagaagctcgcctgcaatggcgaggcttctcgtgctccgcacggcgccgtaccgtcactctgcccacctttgcgctgccaccctcctcgtgctccctccctcccagcaccgccacttcgcctccttcacctcccctgccccctttgccgcgcgccgcatcctcccctcgccactccgccttcctatccgcgcagtggagtcctcgcccgggcccaccaaagaggatcaggagccgtctccggccgccagtgaggcccaggagcagctagcgcccgcggtgcctgcgttcgaggtcgaagagcttgggtgggggacccagctcgccgtcaagctccgcatgctcgtagcgccgccgtggcagcgtgtccgcaagggaagcgtcctcaacatgaagcttcgcggcgagatatctgatcagttgaagacacgcttctcatcagggctgtcgctaccacaaatctgtgagaattttgttaaggcagcatatgacccacgaatctcagggatttatctgcacatagagccactgagatgtgggtgggcgaaggtggatgagatcagaaggcacattgtggatttcaagaagtctggtaaatttgttgttggttatatgcctgtttgtggggagaaagaatactatcttgcttgcgcgtgtggtgagctatatgcacctccaagtgcttatgttgccctgtttggcctaactgttcagcaaacatttctcagagagtttgctctacagggaagaaaaaagaagaaattgagggatttattaattcaggggtctaccaggttgccagactcaaggaagaaggttgggtaacagatttactgtatgatgatgaggtaatgacattactaaaggagagagtagggcagaaagacaagaaaagtctgcgtatggttgactacagtaaatactcgcgtgttagtaaaaagactcttggattacaaggtggaggagaacaaattgctataatcagagcatctggaagtataacacggactcgtagcccattgagtgctcctagttcaggcattgtcgctgagcagttaattgagaagatacgaactgttagagaatcagaaaagtacaaagctgttatcctacgtatagacagccctggtggtgatgctcttgcttctgatctgatgtggagagaaatccgacttctagccaactctaaacctgtagttgcttcgatgtctgatgttgctgcaagtgggggctactacatggcaatggctgcaccagtaattgttgctgagaaactgactctcacagggtcaattggagttgttacagggaagttctgccttcaaaagttatatgagaggattgatttcaataaagaaattatatccaagggtcgatatgctgagcttaatgttaatgatcaacgacctttaagaccagacgaggcagagctttttgaaaagtcagcacaaaatgcttatgcattgtttcgtgataaagcagccatgtcgcgatcaatgagtgttgatcagatggagagtgttgctcaaggtcgagtgtggagcggccatgatgcgttttcaagagggttggttgattcagtaggtggactctcacaagctcttgctattgcaaaacagaaagctaatatacccaaggataagaagatccagctagttgaagtttcaaagccctctccatcattaccggagatcttatccggcattggaggttcgttgcttggagttgacagggcagtgaagggagtgctccaggacatgacctccctaagtggagtccaagctaggatggatggaattctgtttgaaagtttaggagacatgtcaggagaaaaccagttattgttgcttgtaaaagatatcatgaactattttgattaattctagcattcaggtccttatgttccaaacatttgtatttagagatgaggggaaattcataatgtcactacacatctatcttgcacagaaacaggtagcttgtgatttgtgtagttaatttagcattgtatatgccattttattcttttgcactgatgactaaaaatatcatgattgatatactgggcaaaagtaaaaggaactccaccttttcttatgcatgatattaactctaatcccca

SEQ ID NO: 44400 - DNA, 2440 bp, Zea Mays
gtggcaacaaatcaaccgccccagaggtatccgcctccggcctatcccctccactcccgaccccgcgatccccagacccggtccaccagaccaccacgccgcctccgctttcttccctgcctctactagtctacttcaactgcagccatccgccattcccgaagcttccagaagctcgcctgcaatggcgaggcttctcgtgctccgcacggcgccgtaccgtcactctgcccacctttgcgctgccaccctcctcgtgctccctccctcccagcaccgccacttcgcctccttcacctcccctgccccctttgccgcgcgccgcatcctcccctcgccactccgccttcctatccgcgcagtggagtcctcgcccgggcccaccaaagaggatcaggagccgtctccggccgccagtgaggcccaggagcagctagcgcccgcggtgcctgcgttcgaggtcgaagagcttgggtgggggacccagctcgccgtcaagctccgcatgctcgtagcgccgccgtggcagcgtgtccgcaagggaagcgtcctcaacatgaagcttcgcggcgagatatctgatcagttgaagacacgcttctcatcagggctgtcgctaccacaaatctgtgagaattttgttaaggcagcatatgacccacgaatctcagggatttatctgcacatagagccactgagatgtgggtgggcgaaggtggatgagatcagaaggcacattgtggatttcaagaagtaaatttgttgttggttatatgcctgtttgtggggagaaagaatactatcttgcttgcgcgtgtggtgagctatatgcacctccaagtgcttatgttgccctgtttggcctaactgttcagcaaacatttctcagaggtgtccttgagaaagttggaattgaaccggaaattcaaagaattggtaaatacaaaagtgccggagatcaacttgcacgcaagagcatgtcaaatgaagttagggagatgctggcagcactgcttgacaatatttatggaaactggctggaaacaatatcttctacacatgggaagaaaaaagaagaaattgagggatttattaattcaggggtctaccaggttgccagactcaaggaagaaggttgggtaacagatttactgtatgatgatgaggtaatgacattactaaaggagagagtagggcagaaagacaagaaaagtctgcgtatggttgactacagtaaatactcgcgtgttagtaaaaagactcttggattacaaggtggaggagaacaaattgctataatcagagcatctggaagtataacacggactcgtagcccattgagtgctcctagttcaggcattgtcgctgagcagttaattgagaagatacgaactgttagagaatcagaaaagtacaaagctgttatcctacgtatagacagccctggtggtgatgctcttgcttctgatctgatgtggagagaaatccgacttctagccaactctaaacctgtagttgcttcgatgtctgatgttgctgcaagtgggggctactacatggcaatggctgcaccagtaattgttgctgagaaactgactctcacagggtcaattggagttgttacagggaagttctgccttcaaaagttatatgagaggattgatttcaataaagaaattatatccaagggtcgatatgctgagcttaatgttaatgatcaacgacctttaagaccagacgaggcagagctttttgaaaagtcagcacaaaatgcttatgcattgtttcgtgataaagcagccatgtcgcgatcaatgagtgttgatcagatggagagtgttgctcaaggtcgagtgtggagcggccatgatgcgttttcaagagggttggttgattcagtaggtggactctcacaagctcttgctattgcaaaacagaaagctaatatacccaaggataagaagatccagctagttgaagtttcaaagccctctccatcattaccggagatcttatccggcattggaggttcgttgcttggagttgacagggcagtgaagggagtgctccaggacatgacctccctaagtggagtccaagctaggatggatggaattctgtttgaaagtttaggagacatgtcaggagaaaaccagttattgttgcttgtaaaagatatcatgaactattttgattaattctagcattcaggtccttatgttccaaacatttgtatttagagatgaggggaaattcataatgtcactacacatctatcttgcacagaaacaggtagcttgtgatttgtgtagttaatttagcattgtatatgccattttattcttttgcactgatgactaaaaatatcatgattgatatactgggcaaaagtaaaaggaactccaccttttcttatgcatgatattaactctaatcccca

SEQ ID NO: 44401 - DNA, 3219 bp, Zea Mays
gtggcaacaaatcaaccgccccagaggtatccgcctccggcctatcccctccactcccgaccccgcgatccccagacccggtccaccagaccaccacgccgcctccgctttcttccctgcctctactagtctacttcaactgcagccatccgccattcccgaagcttccagaagctcgcctgcaatggcgaggcttctcgtgctccgcacggcgccgtaccgtcactctgcccacctttgcgctgccaccctcctcgtgctccctccctcccagcaccgccacttcgcctccttcacctcccctgccccctttgccgcgcgccgcatcctcccctcgccactccgccttcctatccgcgcagtggagtcctcgcccgggcccaccaaagaggatcaggagccgtctccggccgccagtgaggcccaggagcagctagcgcccgcggtgcctgcgttcgaggtcgaagagcttgggtgggggacccagctcgccgtcaagctccgcatgctcgtagcgccgccgtggcagcgtgtccgcaagggaagcgtcctcaacatgaagcttcgcggcgagatatctgatcagttgaagacacgcttctcatcagggctgtcgctaccacaaatctgtgagaattttgttaaggcagcatatgacccacgaatctcagggatttatctgcacatagagccactgagatgtgggtgggcgaaggtggatgagatcagaaggcacattgtggatttcaagaagtctggtaaatttgttgttggttatatgcctgtttgtggggagaaagaatactatcttgcttgcgcgtgtggtgagctatatgcacctccaagtgcttatgttgccctgtttggcctaactgttcagcaaacatttctcagaggtgtccttgagaaagttggaattgaaccggaaattcaaagaattggtaaatacaaaagtgccggagatcaacttgcacgcaagagcatgtcaaatgaagttagggagatgctggcagcactgcttgacaatatttatggaaactggctggaaacaatatcttctacacatgggaagaaaaaagaagaaattgagggatttattaattcaggggtctaccaggttgccagactcaaggaagaaggttgggtaacagatttactgtatgatgatgagatgccagcaacacaggaggatgaagccgctaaagttccggcctttgagggtaggcaagttcatgaaggcgagagcagtgtatgttggggggatggcaatgtcagtggtagcccaaaagagattcacccgggtttggagtctgcctttataggcgagccaggcgaaaaacacactatgggggagtgtgggaggacctccatgatttttcagcattttgaagaggaggtccgagtgcagggagccatcctttttagcaagaacacactgcctgctatctggcgcatcataggccgcccgctcaaggagagcttgcaacagccaggatctgtagagctcgtgagtttgaatttcggctggagaaagatctctgccttcctcaaggtcgtcgaacaatgcgatgaggaagacaaggttgaagtctccaagcgggaaccaaggaccttgaaccgaggtgtagaggttagagagttcaacgaggaaggaaggggagaggtggtggtaatgacattactaaaggagagagtagggcagaaagacaagaaaagtctgcgtatggttgactacagttatctaagggatgatgatgagtcgcgagcagctgccgagctgcggtgtccgctcagccagtggcgccgtggcagagtcaatcccatgactcccgttgcccatcgcattgtcgcctgtgaggtgggtgctgtgggctattgggttttctttgcgtgggctgaagaagtgaagaatacccgggaatttcgtttcgttttgggcaaggagaggggggtggggacagtttcgcctccactggactccgcccctgcccacagtgaagattctctttacagtaaatactcgcgtgttagtaaaaagactcttggattacaaggtggaggagaacaaattgctataatcagagcatctggaagtataacacggactcgtagcccattgagtgctcctagttcaggcattgtcgctgagcagttaattgagaagatacgaactgttagagaatcagaaaagtacaaagctgttatcctacgtatagacagccctggtggtgatgctcttgcttctgatctgatgtggagagaaatccgacttctagccaactctaaacctgtagttgcttcgatgtctgatgttgctgcaagtgggggctactacatggcaatggctgcaccagtaattgttgctgagaaactgactctcacagggtcaattggagttgttacagggaagttctgccttcaaaagttatatgagaggattgatttcaataaagaaattatatccaagggtcgatatgctgagcttaatgttaatgatcaacgacctttaagaccagacgaggcagagctttttgaaaagtcagcacaaaatgcttatgcattgtttcgtgataaagcagccatgtcgcgatcaatgagtgttgatcagatggagagtgttgctcaaggtcgagtgtggagcggccatgatgcgttttcaagagggttggttgattcagtaggtggactctcacaagctcttgctattgcaaaacagaaagctaatatacccaaggataagaagatccagctagttgaagtttcaaagccctctccatcattaccggagatcttatccggcattggaggttcgttgcttggagttgacagggcagtgaagggagtgctccaggacatgacctccctaagtggagtccaagctaggatggatggaattctgtttgaaagtttaggagacatgtcaggagaaaaccagttattgttgcttgtaaaagatatcatgaactattttgattaattctagcattcaggtccttatgttccaaacatttgtatttagagatgaggggaaattcataatgtcactacacatctatcttgcacagaaacaggtagcttgtgatttgtgtagttaatttagcattgtatatgccattttattcttttgcactgatgactaaaaatatcatgattgatatactgggcaaaagtaaaaggaactccaccttttcttatgcatgatattaactctaatcccca

SEQ ID NO: 44402 - DNA, 2401 bp, Zea Mays
gtggcaacaaatcaaccgccccagaggtatccgcctccggcctatcccctccactcccgaccccgcgatccccagacccggtccaccagaccaccacgccgcctccgctttcttccctgcctctactagtctacttcaactgcagccatccgccattcccgaagcttccagaagctcgcctgcaatggcgaggcttctcgtgctccgcacggcgccgtaccgtcactctgcccacctttgcgctgccaccctcctcgtgctccctccctcccagcaccgccacttcgcctccttcacctcccctgccccctttgccgcgcgccgcatcctcccctcgccactccgccttcctatccgcgcagtggagtcctcgcccgggcccaccaaagaggatcaggagccgtctccggccgccagtgaggcccaggagcagctagcgcccgcggtgcctgcgttcgaggtcgaagagcttgggtgggggacccagctcgccgtcaagctccgcatgctcgtagcgccgccgtggcagcgtgtccgcaagggaagcgtcctcaacatgaagcttcgcggcgagatatctgatcagttgaagacacgcttctcatcagggctgtcgctaccacaaatctgtgagaattttgttaaggcagcatatgacccacgaatctcagggatttatctgcacatagagccactgagatgtgggtgggcgaaggtggatgagatcagaaggcacattgtggatttcaagaagtctggtaaatttgttgttggttatatgcctgtttgtggggagaaagaatactatcttgcttgcgcgtgtggtgagctatatgcacctccaagtgcttatgttgccctgtttggcctaactgttcagcaaacatttctcagaggtgtccttgagaaagttggaattgaaccggaaattcaaagaattggtaaatacaaaagtgccggagatcaacttgcacgcaagagcatgtcaaatgaagttagggagatgctggcagcactgcttgacaatatttatggaaactggctggaaacaatatcttctacacatgggaagaaaaaagaagaaattgagggatttattaattcaggggtctaccaggttgccagactcaaggaagaaggttgggtaacagatttactgtatgatgatgaggtaatgacattactaaaggagagagtagggcagaaagacaagaaaagtctgcgtatggttgactacagtaaatactcgcgtgttagtaaaaagactcttggattacaaggtggaggagaacaaattgctataatcagagcatctggaagtataacacggactcgtagcccattgagtgctcctagttcaggcattgtcgctgagcagttaattgagaagatacgaactgttagagaatcagaaaagtacaaagctgttatcctacgtatagacagccctggtggtgatgctcttgcttctgatctttgcttcgatgtctgatgttgctgcaagtgggggctactacatggcaatggctgcaccagtaattgttgctgagaaactgactctcacagggtcaattggagttgttacagggaagttctgccttcaaaagttatatgagaggattgatttcaataaagaaattatatccaagggtcgatatgctgagcttaatgttaatgatcaacgacctttaagaccagacgaggcagagctttttgaaaagtcagcacaaaatgcttatgcattgtttcgtgataaagcagccatgtcgcgatcaatgagtgttgatcagatggagagtgttgctcaaggtcgagtgtggagcggccatgatgcgttttcaagagggttggttgattcagtaggtggactctcacaagctcttgctattgcaaaacagaaagctaatatacccaaggataagaagatccagctagttgaagtttcaaagccctctccatcattaccggagatcttatccggcattggaggttcgttgcttggagttgacagggcagtgaagggagtgctccaggacatgacctccctaagtggagtccaagctaggatggatggaattctgtttgaaagtttaggagacatgtcaggagaaaaccagttattgttgcttgtaaaagatatcatgaactattttgattaattctagcattcaggtccttatgttccaaacatttgtatttagagatgaggggaaattcataatgtcactacacatctatcttgcacagaaacaggtagcttgtgatttgtgtagttaatttagcattgtatatgccattttattcttttgcactgatgactaaaaatatcatgattgatatactgggcaaaagtaaaaggaactccaccttttcttatgcatgatattaactctaatcccca

SEQ ID NO: 44403 - DNA, 2943 bp, Zea Mays
gtggcaacaaatcaaccgccccagaggtatccgcctccggcctatcccctccactcccgaccccgcgatccccagacccggtccaccagaccaccacgccgcctccgctttcttccctgcctctactagtctacttcaactgcagccatccgccattcccgaagcttccagaagctcgcctgcaatggcgaggcttctcgtgctccgcacggcgccgtaccgtcactctgcccacctttgcgctgccaccctcctcgtgctccctccctcccagcaccgccacttcgcctccttcacctcccctgccccctttgccgcgcgccgcatcctcccctcgccactccgccttcctatccgcgcagtggagtcctcgcccgggcccaccaaagaggatcaggagccgtctccggccgccagtgaggcccaggagcagctagcgcccgcggtgcctgcgttcgaggtcgaagagcttgggtgggggacccagctcgccgtcaagctccgcatgctcgtagcgccgccgtggcagcgtgtccgcaagggaagcgtcctcaacatgaagcttcgcggcgagatatctgatcagttgaagacacgcttctcatcagggctgtcgctaccacaaatctgtgagaattttgttaaggcagcatatgacccacgaatctcagggatttatctgcacatagagccactgagatgtgggtgggcgaaggtggatgagatcagaaggcacattgtggatttcaagaagtctggtaaatttgttgttggttatatgcctgtttgtggggagaaagaatactatcttgcttgcgcgtgtggtgagctatatgcacctccaagtgcttatgttgccctgtttggcctaactgttcagcaaacatttctcagaggtgtccttgagaaagttggaattgaaccggaaattcaaagaattggtaaatacaaaagtgccggagatcaacttgcacgcaagagcatgtcaaatgaagttagggagatgctggcagcactgcttgacaatatttatggaaactggctggaaacaatatcttctacacatgggaagaaaaaagaagaaattgagggatttattaattcaggggtctaccaggttgccagactcaaggaagaaggttgggtaacagatttactgtatgatgatgagatgccagcaacacaggaggatgaagccgctaaagttccggcctttgagggtaggcaagttcatgaaggcgagagcagtgtatgttggggggatggcaatgtcagtggtagcccaaaagagattcacccgggtttggagtctgcctttataggcgagccaggcgaaaaacacactatgggggagtgtgggaggacctccatgatttttcagcattttgaagaggaggtccgagtgcagggagccatcctttttagcaagaacacactgcctgctatctggcgcatcataggccgcccgctcaaggagagcttgcaacagccaggatctgtagagctcgtgagtttgaatttcggctggagaaagatctctgccttcctcaaggtcgtcgaacaatgcgatgaggaagacaaggttgaagtctccaagcgggaaccaaggaccttgaaccgaggtgtagaggttagagagttcaacgaggaaggaaggggagaggtggtggtaatgacattactaaaggagagagtagggcagaaagacaagaaaagtctgcgtatggttgactacagtaaatactcgcgtgttagtaaaaagactcttggattacaaggtggaggagaacaaattgctataatcagagcatctggaagtataacacggactcgtagcccattgagtgctcctagttcaggcattgtcgctgagcagttaattgagaagatacgaactgttagagaatcagaaaagtacaaagctgttatcctacgtatagacagccctggtggtgatgctcttgcttctgatctgatgtggagagaaatccgacttctagccaactctaaacctgtagttgcttcgatgtctgatgttgctgcaagtgggggctactacatggcaatggctgcaccagtaattgttgctgagaaactgactctcacagggtcaattggagttgttacagggaagttctgccttcaaaagttatatgagaggattgatttcaataaagaaattatatccaagggtcgatatgctgagcttaatgttaatgatcaacgacctttaagaccagacgaggcagagctttttgaaaagtcagcacaaaatgcttatgcattgtttcgtgataaagcagccatgtcgcgatcaatgagtgttgatcagatggagagtgttgctcaaggtcgagtgtggagcggccatgatgcgttttcaagagggttggttgattcagtaggtggactctcacaagctcttgctattgcaaaacagaaagctaatatacccaaggataagaagatccagctagttgaagtttcaaagccctctccatcattaccggagatcttatccggcattggaggttcgttgcttggagttgacagggcagtgaagggagtgctccaggacatgacctccctaagtggagtccaagctaggatggatggaattctgtttgaaagtttaggagacatgtcaggagaaaaccagttattgttgcttgtaaaagatatcatgaactattttgattaattctagcattcaggtccttatgttccaaacatttgtatttagagatgaggggaaattcataatgtcactacacatctatcttgcacagaaacaggtagcttgtgatttgtgtagttaatttagcattgtatatgccattttattcttttgcactgatgactaaaaatatcatgattgatatactgggcaaaagtaaaaggaactccaccttttcttatgcatgatattaactctaatcccca

SEQ ID NO: 44404 - DNA, 1715 bp, Zea Mays
gtggcaacaaatcaaccgccccagaggtatccgcctccggcctatcccctccactcccgaccccgcgatccccagacccggtccaccagaccaccacgccgcctccgctttcttccctgcctctactagtctacttcaactgcagccatccgccattcccgaagcttccagaagctcgcctgcaatggcgaggcttctcgtgctccgcacggcgccgtaccgtcactctgcccacctttgcgctgccaccctcctcgtgctccctccctcccagcaccgccacttcgcctccttcacctcccctgccccctttgccgcgcgccgcatcctcccctcgccactccgccttcctatccgcgcagtggagtcctcgcccgggcccaccaaagaggatcaggagccgtctccggccgccagtgaggcccaggagcagctagcgcccgcggtgcctgcgttcgaggtcgaagagcttgggtgggggacccagctcgccgtcaagctccgcatgctcgtagcgccgccgtggcagcgtgtccgcaagggaagcgtcctcaacatgaagcttcgcggcgagatatctgatcagttgaagacacgcttctcatcagggctgtcgctaccacaaatctgtgagaattttgttaaggcagcatatgacccacgaatctcagggatttatctgcacatagagccactgagatgtgggtgggcgaaggtggatgagatcagaaggcacattgtggatttcaagaagtctggtaaatttgttgttggttatatgcctgtttgtggggagaaagaatactatcttgcttgcgcgtgtggtgagctatatgcacctccaagtgcttatgttgccctgtttggcctaactgttcagcaaacatttctcagaggtgtccttgagaaagttggaattgaaccggaaattcaaagaattggtaaatacaaaagtgccggagatcaacttgcacgcaagagcatgtcaaatgaagttagggagatgctggcagcactgcttgacaatatttatggaaactggctggaaacaatatcttctacacatgggaagaaaaaagaagaaattgagggatttattaattcaggggtctaccaggttgccagactcaaggaagaaggttgggtaacagatttactgtatgatgatgaggtaatgacattactaaaggagagagtagggcagaaagacaagaaaagtctgcgtatggttgactacagatccagctagttgaagtttcaaagccctctccatcattaccggagatcttatccggcattggaggttcgttgcttggagttgacagggcagtgaagggagtgctccaggacatgacctccctaagtggagtccaagctaggatggatggaattctgtttgaaagtttaggagacatgtcaggagaaaaccagttattgttgcttgtaaaagatatcatgaactattttgattaattctagcattcaggtccttatgttccaaacatttgtatttagagatgaggggaaattcataatgtcactacacatctatcttgcacagaaacaggtagcttgtgatttgtgtagttaatttagcattgtatatgccattttattcttttgcactgatgactaaaaatatcatgattgatatactgggcaaaagtaaaaggaactccaccttttcttatgcatgatattaactctaatcccca

SEQ ID NO: 44405 - DNA, 1930 bp, Zea Mays
gtggcaacaaatcaaccgccccagaggtatccgcctccggcctatcccctccactcccgaccccgcgatccccagacccggtccaccagaccaccacgccgcctccgctttcttccctgcctctactagtctacttcaactgcagccatccgccattcccgaagcttccagaagctcgcctgcaatggcgaggcttctcgtgctccgcacggcgccgtaccgtcactctgcccacctttgcgctgccaccctcctcgtgctccctccctcccagcaccgccacttcgcctccttcacctcccctgccccctttgccgcgcgccgcatcctcccctcgccactccgccttcctatccgcgcagtggagtcctcgcccgggcccaccaaagaggatcaggagccgtctccggccgccagtgaggcccaggagcagctagcgcccgcggtgcctgcgttcgaggtcgaagagcttgggtgggggacccagctcgccgtcaagctccgcatgctcgtagcgccgccgtggcagcgtgtccgcaagggaagcgtcctcaacatgaagcttcgcggcgagatatctgatcagttgaagacacgcttctcatcagggctgtcgctaccacaaatctgtgagaattttgttaaggcagcatatgacccacgaatctcagggatttatctgcacatagagccactgagatgtgggtgggcgaaggtggatgagatcagaaggcacattgtggatttcaagaagtctggtaaatttgttgttggttatatgcctgtttgtggggagaaagaatactatcttgcttgcgcgtgtggtgagctatatgcacctccaagtgcttatgttgccctgtttggcctaactgttcagcaaacatttctcagagaatcagaaaagtacaaagctgttatcctacgtatagacagccctggtggtgatgctcttgcttctgatctgatgtggagagaaatccgacttctagccaactctaaacctgtagttgcttcgatgtctgatgttgctgcaagtgggggctactacatggcaatggctgcaccagtaattgttgctgagaaactgactctcacagggtcaattggagttgttacagggaagttctgccttcaaaagttatatgagaggattgatttcaataaagaaattatatccaagggtcgatatgctgagcttaatgttaatgatcaacgacctttaagacgaggcagagctttttgaaaagtcagcacaaaatgcttatgcattgtttcgtgataaagcagccatgtcgcgatcaatgagtgttgatcagatggagagtgttgctcaaggtcgagtgtggagcggccatgatgcgttttcaagagggttggttgattcagtaggtggactctcacaagctcttgctattgcaaaacagaaagctaatatacccaaggataagaagatccagctagttgaagtttcaaagccctctccatcattaccggagatcttatccggcattggaggttcgttgcttggagttgacagggcagtgaagggagtgctccaggacatgacctccctaagtggagtccaagctaggatggatggaattctgtttgaaagtttaggagacatgtcaggagaaaaccagttattgttgcttgtaaaagatatcatgaactattttgattaattctagcattcaggtccttatgttccaaacatttgtatttagagatgaggggaaattcataatgtcactacacatctatcttgcacagaaacaggtagcttgtgatttgtgtagttaatttagcattgtatatgccattttattcttttgcactgatgactaaaaatatcatgattgatatactgggcaaaagtaaaaggaactccaccttttcttatgcatgatattaactctaatcccca

SEQ ID NO: 44406 - DNA, 2436 bp, Zea Mays
gtggcaacaaatcaaccgccccagaggtatccgcctccggcctatcccctccactcccgaccccgcgatccccagacccggtccaccagaccaccacgccgcctccgctttcttccctgcctctactagtctacttcaactgcagccatccgccattcccgaagcttccagaagctcgcctgcaatggcgaggcttctcgtgctccgcacggcgccgtaccgtcactctgcccacctttgcgctgccaccctcctcgtgctccctccctcccagcaccgccacttcgcctccttcacctcccctgccccctttgccgcgcgccgcatcctcccctcgccactccgccttcctatccgcgcagtggagtcctcgcccgggcccaccaaagaggatcaggagccgtctccggccgccagtgaggcccaggagcagctagcgcccgcggtgcctgcgttcgaggtcgaagagcttgggtgggggacccagctcgccgtcaagctccgcatgctcgtagcgccgccgtggcagcgtgtccgcaagggaagcgtcctcaacatgaagcttcgcggcgagatatctgatcagttgaagacacgcttctcatcagggctgtcgctaccacaaatctgtgagaattttgttaaggcagcatatgacccacgaatctcagggatttatctgcacatagagccactgagatgtgggtgggcgaaggtggatgagatcagaaggcacattgtggatttcaagaagtctggtaaatttgttgttggttatatgcctgtttgtggggagaaagaatactatcttgcttgcgcgtgtggtgagctatatgcacctccaagtgcttatgttgccctgtttggcctaactgttcagcaaacatttctcagaggtgtccttgagaaagttggaattgaaccggaaattcaaagaattggtaaatacaaaagtgccggagatcaacttgcacgcaagagcatgtcaaatgaagttagggagatgctggcagcactgcttgacaatatttatggaaactggctggaaacaatatcttctacacatgggaagaaaaaagaagaaattgagggatttattaattcaggggtctaccaggttgccagactcaaggaagaaggttgggtaacagatttactgtatgatgatgaggtaatgacattactaaaggagagagtagggcagaaagacaagaaaagtctgcgtatggttgactacagtaaatactcgcgtgttagtaaaaagactcttggattacaaggtggaggagaacaaattgctataatcagagcatctggaagtataacacggactcgtagcccattgagtgctcctagttcaggcattgtcgctgagcagttaattgagaagatacgaactgttagagaatcagaaaagtacaaagctgttatcctacgtatagacagccctggtggtgatgctcttgcttctgatctgatgtggagagaaatccgacttctagccaactctaaacctgtagttgcttcgatgtctgatgttgctgcaagtgggggctactacatggcaatggctgcaccagtaattgttgctgagaaactgactctcacagggtcaattggagttgttacagggaagttctgccttcaaaagttatatgagaggattgatttcaataaagaaattatatccaagggtcgatatgctgagcttaatgttaatgatcaacgacctttaagaccagacgaggcagagctttttgaaaagtcagcacaaaatgcttatgcattgtttcgtgataaagcagccatgtcgcgatcaatgagtatggagagtgttgctcaaggtcgagtgtggagcggccatgatgcgttttcaagagggttggttgattcagtaggtggactctcacaagctcttgctattgcaaaacagaaagctaatatacccaaggataagaagatccagctagttgaagtttcaaagccctctccatcattaccggagatcttatccggcattggaggttcgttgcttggagttgacagggcagtgaagggagtgctccaggacatgacctccctaagtggagtccaagctaggatggatggaattctgtttgaaagtttaggagacatgtcaggagaaaaccagttattgttgcttgtaaaagatatcatgaactattttgattaattctagcattcaggtccttatgttccaaacatttgtatttagagatgaggggaaattcataatgtcactacacatctatcttgcacagaaacaggtagcttgtgatttgtgtagttaatttagcattgtatatgccattttattcttttgcactgatgactaaaaatatcatgattgatatactgggcaaaagtaaaaggaactccaccttttcttatgcatgatattaactctaatcccca

SEQ ID NO: 44407 - DNA, 758 bp, Zea Mays
gtggacccgacctgccattttatagcaacttcagtgagtaagctttcgctaaaaccctagctccaaaaaacgaactagaaacgaccgcgaagccacaggtcgaaggcggcggcggcgatggggagcgacacggagacggagaagaaggcctcggtggcgctgatgtccatcgcgaaacccctcgctggaaagaagctctgcaagcggaccctcaagctcgtgcgacgaggtgaaggataaactgaagtcggactatgaccaagttgtaacggaagtcgctgaggctacatctgcaatgttctgaggaccacattatctgagaatccggcaattccctgtgcacgtctttcttggtgtagtatcctgcccagcttctgtgaaccgaaccaatatgttttgcacggtggctggagcgagatatgactatgagtttacctatatgctatggaccatccttgttggcggcatatgattctaccagtgattagatctagccaattacaatcagttctgtgagcagactgtttccttgtgttgtcagatctcggtagctagtgtgtgcgttccaggtctttttgatcttatcacaagatgtgctcgtgatacttgtgttgaaggaactgtggtatcttagcgccttatatcaagattagtttttggcttctgctcgtattgggtaaaacttggaatgtagagcatcccgtcaatgccctaaacaatgataagcaaaagatccagcggcaaaatggccttagttt

SEQ ID NO: 44408 - DNA, 440 bp, Zea Mays
gtggacccgacctgccattttatagcaacttcagtgagtaagctttcgctaaaaccctagctccaaaaaacgaactagaaacgaccgcgaagccacaggtcgaaggcggcggcggcgatggggagcgacacggagacggagaagaaggcctcggtggcgctgatgtccatcgcgaaacccctcgctggaaagaagctctgcaagcggaccctcaagctcgtgcgacgagcctccgaggcgaagtgcctcaagcgcggagtcaaagaggtagtcaagagcattcgccgcgggaacaaaggattgtgtgtgatcgctggaaatatttctcctattgatgtgattacacatgttccgatactatgtgaggaagctaatgttccttacgtatatgttccatcaaaagagttatttattcataccggatgcttatgatagaagac

SEQ ID NO: 44409 - DNA, 1533 bp, Zea Mays
acattcccagagtcattagcgctacagggggaggcaggaagccgcgcgcgtgcccgtttgtggccgaaatcgcagcgcgggtgggtagaccgtagaagactgcagggccggccagccgagcagagctgccgaagccaccacccacccatggcccccgtccccgtgtcggtgtcggccaccctcgcgccgccgccggcggcgccgccaaaggcaacatccaggagctgggaacggcgtgcgccggctgacgccgcgttcgcggccgcctcttccgtcgccatctcggccgcgttgctgacactgacgccggccgcgcccgccgcggccttgtccaaggaggacgtcgccggctcgcttaccaaggccgtggacacggtgagccaggccatcgacgtcggcggcaaggccgctgagcaggtggcggccgtgctcaaggcgttgggcgaggccgtcaagccggcgcttccggtcctgaagagcgccagcgacgaggccctcaagctggccgcgcccgtggtgtccgccgcctccaagcaggccacggaggcactccagggcgccggcgtcgaccccgcccccgttctgtccgtcgccaagaccgcagcggagcagagcacgaaggtgatcgacgccgcgaagcccgtggcctcggcggccgtggagaccatcacgtcgctgggccccgaggactacgtcgtggccgccggagcggcgtttctcgcgtacctcctcgtgccgccggtctggtcgctggtctcgtccagcctccgcggttacaaaggcgacctgaccccggcgcaagcactggacaaggtgaccacgcagggctacgtcctgatcgacgtgcggagcgacaaggacaaggccaaggcaggattgccgcagctgccatcgaacgcgaagaacaagctcgtctctgtgccgctggaagaccttccgagcaagctgaagggcatggtgcgcaacgcgaagaaagccgaggcggagatcgccgctctgaagatatcctacctcaagaagatcggaaagggctccaacgtcatcatcatggactccgacgtcgccaagactgtggcgaagacgctggacagcgtggggttcaagaactgctgggtcatggccggcggcttctctggccggaaagggtgggcgcagagccgtctcggaacggattcctacaacctatccgtggtcgaagtcgtcacgccgtcacgtgtgatccctgctgtcgcaggccgccgcactgggacgaccgctgcacgcattgggacggcctcgtcggcgtccagagcgactactcgcaagcttcttcccggcggcgtagactgatgatgagtggagctgaaactgaaacaactcccaagtgtaaatccatatgtttcttttattttcagatgcaacttttggtctgtgcgttcattttttttcttttgcagtaataacacaattttgtgtccgtaaatagggactgtcatcttctacacagtaaactatctcaaagtatgtctacatactagtcggttgtccgtgcgc

SEQ ID NO: 44410 - DNA, 1013 bp, Zea Mays
ttttttatagtgctcatttttttaatggaataattaataaataaatgtttcataggcattcctttataagtaaatattaaaacatttaattttgaatatggttaaagatctattctcttgaaaaaaaaatctttgaagggtgcgatttaatttgtagtgagctatatgttttggcgcatttacttaaaagaatggaatagtaacagaagtaaaataaaatatactttgcatcatgcgtgattttcttgtattgttgcactcatatttgaatttataatctggatttggatttgaagtaaggtttaaaacagaaataagacaacaggaaaataaaacaaaaaaatgaagcctaaaatctacgtgaaaacccatggccgtttggccactagtcaagacgtggacataatctttttcgattttattaatcccctagccgatgatgactccatcccatcattcacgtcgcctggtctatttggggcaccgcggtgtgggtcccacgggcagagtaatcaacggatgcctcaatgtcttgcacctctgacgggtggggttgagggtgtcaggttcttctttcctggatgctcggccttgtccgttgctgcagccacaatttcttcgtgccctcgagattttcggaatatggttgagatcctgcctaagcagtacatataacctggtgccagcccactcctctgattaacgaagccgccgaaccacctcctatcgctaccaaaccagcagcgccaatggggtcagggtgaaaccgccgacgccgttcctcaacttcgccatcggtcggagtctgccaggcggcccggtttgggaacgccaatgctgggagagaaattaagatcgacctgtgtggatcttcctcaagcgcgagatgtagggatggatggcctcggccatggtgttcccttgccggtgcgggtctcaccgcggtgccgcaaccccgacgtggaccgatctcgtctcaaccttgtcgctgcgtgaggacacgtgtcatctga

SEQ ID NO: 44411 - DNA, 2706 bp, Zea Mays
gtccgctcgaccaccacgagggagtgggctgtgactcggacagcaccaaaacctcgcccgccatggcgtcgccgtcgtcgtctccgccgccgaagctgccgatccccggccgccgcaacatactcatcaccagcgccttaccctatgtgaataacgtcccgcacctcgggaacatcatcggatgcgttctgagcgccgacgtgttcgcgcgctactgcaggctacgcgggtacaacgcgctctacatatgcgggacggacgagtacgggacggccacggagaccaaggccatggaggaggagtgctcgcccaaggagatctgtgacaagtaccatgctatccacagtgaggtttacaagtggtttgacatagaatttgacaaatttgggcgtacatcctctcctcaacagacaacaatctgccaagcaattttccataaattgatggaaaacaattggctatcagaaaacaccatgcagcaggtttctgctttgcagctttactgtgatacatgtcaaaggtttttggcagatagacttgtagaaggagcatgcccaacagaagggtgtactaataaagctgcgcgaggtgatcaatgtgacaattgcagccacatgttgaatccaactgaactaattgatccaaagtgtaaggtctgtaagaatactcctcatattcgtgaaacggatcacttgttcttggatctccctcgaatagaagacaagttggtaaactacattaatgatacttcagtagctggtatgtggagtcaaaatgccattcaagctacaaatgcatggttaaaggaaggactaaaatcacgctgtatcacaagagatcttaaatggggagttcctgttccaattgagaagtataaagataaggttttctatgtctggttcgatgcaccgattggctacgtgtccatcacatcatcttatacacctgagtgggagaggtggtggaagaatcctgataatgtggaattatttcagttcatgggcaaagataatgtgccatttcatacgatcatgtttccttcaacactactaggaactggtgaaaattggacaatgatgaagaccatttgtgtcaccgaatatctaaattacgaaggaggaaaattctccaagagtaagggtatcggagttttcggtaatgatgccaaggataccaatattcctcctgaagtatggcgatactacctgcttatgaatcgacctgaggcatcagatacactctttacctggactgatttgcaagccaaattgaacagcgaattgttaaacaacttgggaaatttcatcaatcgtgtgctaagctttattgcaaaaccagctggggctggatatgattcaattatacccgatgctcctggtgctgagtcacatccatcgacaagtgtcattgcagaaaaagttagtaaatcggttgaacaatatcttgatgcaatggaaaaggtaaagctgaaacaaggactgaagagtgcaatgggcatctctactgatggaaatcgttatttgcaggacagcgaattttggaaactttataaggacaatccagcaagctgtgcgattgtgatgaaaacttcagttggtcttgtatatctccttgcctgtctcctggaacctttcatgccttccttttcaaaagaagtgctacgtcaattaaacctgtccccagaagaaaatatttctttcagtgaagaaaatggcgaaagtgtgaaggcaaaacccccttgggatcttgtaccagcagggcacaaaatagggaggcctgtacctctgtttgaggaattggtgagtgagtatagggaaaaatatgcgggcagtcaagctgagaggaactcgaaagcagtggctgacgctgaagccacaaaaattgctaaccaaacccaaagcatagcattatctggaggctcaaaaaaggaacaaaagaaacagtctggtaactcaaaatcaaaggtggctgaggcagaattatccgttgcaaagttggagattcgagtggggcttatcagaaaagcggagaagcatccagacgccgattcgctgtatgtagaggaaatcgatgttggagaggaggctccaagaacggtggttagtggccttgtcaaatacattcctcttgaagaaatacagaaccggaaagtctgtgttctctgcaatctgaaaccggtggtgatgcgtggtataaaatcggatgccatggttttggctgcttctaatgaggaccatactagggttgagctggtcgagccaccagcggatgctgccgtgggggagagggtgacctttgccgggcactccggtgagaccgaggcttctctcagtggcaagagcaaggtgtgggagaagctagcggctgacctgcgtagcaatggcgaccttgtggcctgctaccaagatgtccccttcatgacttcggctggagtctgcaaggtacagacaatagcgaatggggaaatccgctagatgacgcgatgcctgaaggcagcgtgacgccgtggcctaactgccgtctgatgttactgaagtactagctgattggttttttgttgtaaattttctccttggatctgaattttcttgtattgaaaattggcaatagagaaaacgacggtgtttaattaattctgtggtggagatgggttgccatggaatgtatgacaccgttgtcgtggagccatgcaaaccgataagctag

SEQ ID NO: 44412 - DNA, 2713 bp, Zea Mays
gtccgctcgaccaccacgagggagtgggctgtgactcggacagcaccaaaacctcgcccgccatggcgtcgccgtcgtcgtctccgccgccgaagctgccgatccccggccgccgcaacatactcatcaccagcgccttaccctatgtgaataacgtcccgcacctcgggaacatcatcggatgcgttctgagcgccgacgtgttcgcgcgctactgcaggctacgcgggtacaacgcgctctacatatgcgggacggacgagtacgggacggccacggagaccaaggccatggaggaggagtgctcgcccaaggagatctgtgacaagtaccatgctatccacagtgaggtttacaagtggtttgacatagaatttgacaaatttgggcgtacatcctctcctcaacagacaacaatctgccaagcaattttccataaattgatggaaaacaattggctatcagaaaacaccatgcagcagctttactgtgatacatgtcaaaggtttttggcagatagacttgtagaaggagcatgcccaacagaagggtgtactaataaagctgcgcgaggtgatcaatgtgacaattgcagccacatgttgaatccaactgaactaattgatccaaagtgtaaggtctgtaagaatactcctcatattcgtgaaacggatcacttgttcttggatctccctcgaatagaagacaagttggtaaactacattaatgatacttcagtagctggtatgtggagtcaaaatgccattcaagctacaaatgcatggttaaaggaaggactaaaatcacgctgtatcacaagagatcttaaatggggagttcctgttccaattgagaagtataaagataagttattttcaggttttctatgtctggttcgatgcaccgattggctacgtgtccatcacatcatcttatacacctgagtgggagaggtggtggaagaatcctgataatgtggaattatttcagttcatgggcaaagataatgtgccatttcatacgatcatgtttccttcaacactactaggaactggtgaaaattggacaatgatgaagaccatttgtgtcaccgaatatctaaattacgaaggaggaaaattctccaagagtaagggtatcggagttttcggtaatgatgccaaggataccaatattcctcctgaagtatggcgatactacctgcttatgaatcgacctgaggcatcagatacactctttacctggactgatttgcaagccaaattgaacagcgaattgttaaacaacttgggaaatttcatcaatcgtgtgctaagctttattgcaaaaccagctggggctggatatgattcaattatacccgatgctcctggtgctgagtcacatccatcgacaagtgtcattgcagaaaaagttagtaaatcggttgaacaatatcttgatgcaatggaaaaggtaaagctgaaacaaggactgaagagtgcaatgggcatctctactgatggaaatcgttatttgcaggacagcgaattttggaaactttataaggacaatccagcaagctgtgcgattgtgatgaaaacttcagttggtcttgtatatctccttgcctgtctcctggaacctttcatgccttccttttcaaaagaagtgctacgtcaattaaacctgtccccagaagaaaatatttctttcagtgaagaaaatggcgaaagtgtgaaggcaaaacccccttgggatcttgtaccagcagggcacaaaatagggaggcctgtacctctgtttgaggaattgaaagatgaaaaggtgagtgagtatagggaaaaatatgcgggcagtcaagctgagaggaactcgaaagcagtggctgacgctgaagccacaaaaattgctaaccaaacccaaagcatagcattatctggaggctcaaaaaaggaacaaaagaaacagtctggtaactcaaaatcaaaggtggctgaggcagaattatccgttgcaaagttggagattcgagtggggcttatcagaaaagcggagaagcatccagacgccgattcgctgtatgtagaggaaatcgatgttggagaggaggctccaagaacggtggttagtggccttgtcaaatacattcctcttgaagaaatacagaaccggaaagtctgtgttctctgcaatctgaaaccggtggtgatgcgtggtataaaatcggatgccatggttttggctgcttctaatgaggaccatactagggttgagctggtcgagccaccagcggatgctgccgtgggggagagggtgacctttgccgggcactccggtgagaccgaggcttctctcagtggcaagagcaaggtgtgggagaagctagcggctgacctgcgtagcaatggcgaccttgtggcctgctaccaagatgtccccttcatgacttcggctggagtctgcaaggtacagacaatagcgaatggggaaatccgctagatgacgcgatgcctgaaggcagcgtgacgccgtggcctaactgccgtctgatgttactgaagtactagctgattggttttttgttgtaaattttctccttggatctgaattttcttgtattgaaaattggcaatagagaaaacgacggtgtttaattaattctgtggtggagatgggttgccatggaatgtatgacaccgttgtcgtggagccatgcaaaccgataagctag

SEQ ID NO: 44413 - DNA, 2732 bp, Zea Mays
ccattggagcggcagcggtttatatagaggcaaaaacccgccggccgtcaacgtccgctcgaccaccacgagggagtgggctgtgactcggacagcaccaaaacctcgcccgccatggcgtcgccgtcgtcgtctccgccgccgaagctgccgatccccggccgccgcaacatactcatcaccagcgccttaccctatgtgaataacgtcccgcacctcgggaacatcatcggatgcgttctgagcgccgacgtgttcgcgcgctactgcaggctacgcgggtacaacgcgctctacatatgcgggacggacgagtacgggacggccacggagaccaaggccatggaggaggagtgctcgcccaaggagatctgtgacaagtaccatgctatccacagtgaggtttacaagtggtttgacatagaatttgacaaatttgggcgtacatcctctcctcaacagacaacaatctgccaagcaattttccataaattgatggaaaacaattggctatcagaaaacaccatgcagcaggtttttggcagatagacttgtagaaggagcatgcccaacagaagggtgtactaataaagctgcgcgaggtgatcaatgtgacaattgcagccacatgttgaatccaactgaactaattgatccaaagtgtaaggtctgtaagaatactcctcatattcgtgaaacggatcacttgttcttggatctccctcgaatagaagacaagttggtaaactacattaatgatacttcagtagctggtatgtggagtcaaaatgccattcaagctacaaatgcatggttaaaggaaggactaaaatcacgctgtatcacaagagatcttaaatggggagttcctgttccaattgagaagtataaagataaggttttctatgtctggttcgatgcaccgattggctacgtgtccatcacatcatcttatacacctgagtgggagaggtggtggaagaatcctgataatgtggaattatttcagttcatgggcaaagataatgtgccatttcatacgatcatgtttccttcaacactactaggaactggtgaaaattggacaatgatgaagaccatttgtgtcaccgaatatctaaattacgaaggaggaaaattctccaagagtaagggtatcggagttttcggtaatgatgccaaggataccaatattcctcctgaagtatggcgatactacctgcttatgaatcgacctgaggcatcagatacactctttacctggactgatttgcaagccaaattgaacagcgaattgttaaacaacttgggaaatttcatcaatcgtgtgctaagctttattgcaaaaccagctggggctggatatgattcaattatacccgatgctcctggtgctgagtcacatccatcgacaagtgtcattgcagaaaaagttagtaaatcggttgaacaatatcttgatgcaatggaaaaggtaaagctgaaacaaggactgaagagtgcaatgggcatctctactgatggaaatcgttatttgcaggacagcgaattttggaaactttataaggacaatccagcaagctgtgcgattgtgatgaaaacttcagttggtcttgtatatctccttgcctgtctcctggaacctttcatgccttccttttcaaaagaagtgctacgtcaattaaacctgtccccagaagaaaatatttctttcagtgaagaaaatggcgaaagtgtgaaggcaaaacccccttgggatcttgtaccagcagggcacaaaatagggaggcctgtacctctgtttgaggaattgaaagatgaaaaggtgagtgagtatagggaaaaatatgcgggcagtcaagctgagaggaactcgaaagcagtggctgacgctgaagccacaaaaattgctaaccaaacccaaagcatagcattatctggaggctcaaaaaaggaacaaaagaaacagtctggtaactcaaaatcaaaggtggctgaggcagaattatccgttgcaaagttggagattcgagtggggcttatcagaaaagcggagaagcatccagacgccgattcgctgtatgtagaggaaatcgatgttggagaggaggctccaagaacggtggttagtggccttgtcaaatacattcctcttgaagaaatacagaaccggaaagtctgtgttctctgcaatctgaaaccggtggtgatgcgtggtataaaatcggatgccatggttttggctgcttctaatgaggaccatactagggttgagctggtcgagccaccagcggatgctgccgtgggggagagggtgacctttgccgggcactccggtgagaccgaggcttctctcagtggcaagagcaaggtgtgggagaagctagcggctgacctgcgtagcaatggcgaccttgtggcctgctaccaagatgtccccttcatgacttcggctggagtctgcaaggtacagacaatagcgaatggggaaatccgctagatgacgcgatgcctgaaggcagcgtgacgccgtggcctaactgccgtctgatgttactgaagtactagctgattggttttttgttgtaaattttctccttggatctgaattttcttgtattgaaaattggcaatagagaaaacgacggtgtttaattaattctgtggtggagatgggttgccatggaatgtatgacaccgttgtcgtggagccatgcaaaccgataagctag

SEQ ID NO: 44414 - DNA, 2792 bp, Zea Mays
gtcagaatctgttggtacacaggcacaaaagctgtccgcttcgaacccgggaaggcgatcggcgtaagaatccattggagcggcagcggtttatatagaggcaaaaacccgccggccgtcaacgtccgctcgaccaccacgagggagtgggctgtgactcggacagcaccaaaacctcgcccgccatggcgtcgccgtcgtcgtctccgccgccgaagctgccgatccccggccgccgcaacatactcatcaccagcgccttaccctatgtgaataacgtcccgcacctcgggaacatcatcggatgcgttctgagcgccgacgtgttcgcgcgctactgcaggctacgcgggtacaacgcgctctacatatgcgggacggacgagtacgggacggccacggagaccaaggccatggaggaggagtgctcgcccaaggagatctgtgacaagtaccatgctatccacagtgaggtttacaagtggtttgacatagaatttgacaaatttgggcgtacatcctctcctcaacagacaacaatctgccaagcaattttccataaattgatggaaaacaattggctatcagaaaacaccatgcagcagatagacttgtagaaggagcatgcccaacagaagggtgtactaataaagctgcgcgaggtgatcaatgtgacaattgcagccacatgttgaatccaactgaactaattgatccaaagtgtaaggtctgtaagaatactcctcatattcgtgaaacggatcacttgttcttggatctccctcgaatagaagacaagttggtaaactacattaatgatacttcagtagctggtatgtggagtcaaaatgccattcaagctacaaatgcatggttaaaggaaggactaaaatcacgctgtatcacaagagatcttaaatggggagttcctgttccaattgagaagtataaagataaggttttctatgtctggttcgatgcaccgattggctacgtgtccatcacatcatcttatacacctgagtgggagaggtggtggaagaatcctgataatgtggaattatttcagttcatgggcaaagataatgtgccatttcatacgatcatgtttccttcaacactactaggaactggtgaaaattggacaatgatgaagaccatttgtgtcaccgaatatctaaattacgaaggaggaaaattctccaagagtaagggtatcggagttttcggtaatgatgccaaggataccaatattcctcctgaagtatggcgatactacctgcttatgaatcgacctgaggcatcagatacactctttacctggactgatttgcaagccaaattgaacagcgaattgttaaacaacttgggaaatttcatcaatcgtgtgctaagctttattgcaaaaccagctggggctggatatgattcaattatacccgatgctcctggtgctgagtcacatccatcgacaagtgtcattgcagaaaaagttagtaaatcggttgaacaatatcttgatgcaatggaaaaggtaaagctgaaacaaggactgaagagtgcaatgggcatctctactgatggaaatcgttatttgcaggacagcgaattttggaaactttataaggacaatccagcaagctgtgcgattgtgatgaaaacttcagttggtcttgtatatctccttgcctgtctcctggaacctttcatgccttccttttcaaaagaagtgctacgtcaattaaacctgtccccagaagaaaatatttctttcagtgaagaaaatggcgaaagtgtgaaggcaaaacccccttgggatcttgtaccagcagggcacaaaatagggaggcctgtacctctgtttgaggaattgaaagatgaaaaggtgagtgagtatagggaaaaatatgcgggcagtcaagctgagaggaactcgaaagcagtggctgacgctgaagccacaaaaattgctaaccaaacccaaagcatagcattatctggaggctcaaaaaaggaacaaaagaaacagtctggtaactcaaaatcaaaggtggctgaggcagaattatccgttgcaaagttggagattcgagtggggcttatcagaaaagcggagaagcatccagacgccgattcgctgtatgtagaggaaatcgatgttggagaggaggctccaagaacggtggttagtggccttgtcaaatacattcctcttgaagaaatacagaaccggaaagtctgtgttctctgcaatctgaaaccggtggtgatgcgtggtataaaatcggatgccatggttttggctgcttctaatgaggaccatactagggttgagctggtcgagccaccagcggatgctgccgtgggggagagggtgacctttgccgggcactccggtgagaccgaggcttctctcagtggcaagagcaaggtgtgggagaagctagcggctgacctgcgtagcaatggcgaccttgtggcctgctaccaagatgtccccttcatgacttcggctggagtctgcaaggtacagacaatagcgaatggggaaatccgctagatgacgcgatgcctgaaggcagcgtgacgccgtggcctaactgccgtctgatgttactgaagtactagctgattggttttttgttgtaaattttctccttggatctgaattttcttgtattgaaaattggcaatagagaaaacgacggtgtttaattaattctgtggtggagatgggttgccatggaatgtatgacaccgttgtcgtggagccatgcaaaccgataagctag

SEQ ID NO: 44415 - DNA, 2827 bp, Zea Mays
atcagcgtcagaatctgttggtacacaggcacaaaagctgtccgcttcgaacccgggaaggcgatcggcgtaagaatccattggagcggcagcggtttatatagaggcaaaaacccgccggccgtcaacgtccgctcgaccaccacgagggagtgggctgtgactcggacagcaccaaaacctcgcccgccatggcgtcgccgtcgtcgtctccgccgccgaagctgccgatccccggccgccgcaacatactcatcaccagcgccttaccctatgtgaataacgtcccgcacctcgggaacatcatcggatgcgttctgagcgccgacgtgttcgcgcgctactgcaggctacgcgggtacaacgcgctctacatatgcgggacggacgagtacgggacggccacggagaccaaggccatggaggaggagtgctcgcccaaggagatctgtgacaagtaccatgctatccacagtgaggtttacaagtggtttgacatagaatttgacaaatttgggcgtacatcctctcctcaacagacaacaatctgccaagcaattttccataaattgatggaaaacaattggctatcagaaaacaccatgcagcagctttactgtgatacatgtcaaaggtttttggcagatagacttgtagaaggagcatgcccaacagaagggtgtactaataaagctgcgcgaggtgatcaatgtgacaattgcagccacatgttgaatccaactgaactaattgatccaaagtgtaaggtctgtaagaatactcctcatattcgtgaaacggatcacttgttcttggatctccctcgaatagaagacaagttggtaaactacattaatgatacttcagtagctggtatgtggagtcaaaatgccattcaagctacaaatgcatggttaaaggaaggactaaaatcacgctgtatcacaagagatcttaaatggggagttcctgttccaattgagaagtataaagataaggttttctatgtctggttcgatgcaccgattggctacgtgtccatcacatcatcttatacacctgagtgggagaggtggtggaagaatcctgataatgtggaattatttcagttcatgggcaaagataatgtgccatttcatacgatcatgtttccttcaacactactaggaactggtgaaaattggacaatgatgaagaccatttgtgtcaccgaatatctaaattacgaaggaggaaaattctccaagagtaagggtatcggagttttcggtaatgatgccaaggataccaatattcctcctgaagtatggcgatactacctgcttatgaatcgacctgaggcatcagatacactctttacctggactgatttgcaagccaaattgaacagcgaattgttaaacaacttgggaaatttcatcaatcgtgtgctaagctttattgcaaaaccagctggggctggatatgattcaattatacccgatgctcctggtgctgagtcacatccatcgacaagtgtcattgcagaaaaagttagtaaatcggttgaacaatatcttgatgcaatggaaaaggtaaagctgaaacaaggactgaagagtgcaatgggcatctctactgatggaaatcgttatttgcagcgaattttggaaactttataaggacaatccagcaagctgtgcgattgtgatgaaaacttcagttggtcttgtatatctccttgcctgtctcctggaacctttcatgccttccttttcaaaagaagtgctacgtcaattaaacctgtccccagaagaaaatatttctttcagtgaagaaaatggcgaaagtgtgaaggcaaaacccccttgggatcttgtaccagcagggcacaaaatagggaggcctgtacctctgtttgaggaattgaaagatgaaaaggtgagtgagtatagggaaaaatatgcgggcagtcaagctgagaggaactcgaaagcagtggctgacgctgaagccacaaaaattgctaaccaaacccaaagcatagcattatctggaggctcaaaaaaggaacaaaagaaacagtctggtaactcaaaatcaaaggtggctgaggcagaattatccgttgcaaagttggagattcgagtggggcttatcagaaaagcggagaagcatccagacgccgattcgctgtatgtagaggaaatcgatgttggagaggaggctccaagaacggtggttagtggccttgtcaaatacattcctcttgaagaaatacagaaccggaaagtctgtgttctctgcaatctgaaaccggtggtgatgcgtggtataaaatcggatgccatggttttggctgcttctaatgaggaccatactagggttgagctggtcgagccaccagcggatgctgccgtgggggagagggtgacctttgccgggcactccggtgagaccgaggcttctctcagtggcaagagcaaggtgtgggagaagctagcggctgacctgcgtagcaatggcgaccttgtggcctgctaccaagatgtccccttcatgacttcggctggagtctgcaaggtacagacaatagcgaatggggaaatccgctagatgacgcgatgcctgaaggcagcgtgacgccgtggcctaactgccgtctgatgttactgaagtactagctgattggttttttgttgtaaattttctccttggatctgaattttcttgtattgaaaattggcaatagagaaaacgacggtgtttaattaattctgtggtggagatgggttgccatggaatgtatgacaccgttgtcgtggagccatgcaaaccgataagctag

SEQ ID NO: 44416 - DNA, 2856 bp, Zea Mays
ggtgcatcagcgtcagaatctgttggtacacaggcacaaaagctgtccgcttcgaacccgggaaggcgatcggcgtaagaatccattggagcggcagcggtttatatagaggcaaaaacccgccggccgtcaacgtccgctcgaccaccacgagggagtgggctgtgactcggacagcaccaaaacctcgcccgccatggcgtcgccgtcgtcgtctccgccgccgaagctgccgatccccggccgccgcaacatactcatcaccagcgccttaccctatgtgaataacgtcccgcacctcgggaacatcatcggatgcgttctgagcgccgacgtgttcgcgcgctactgcaggctacgcgggtacaacgcgctctacatatgcgggacggacgagtacgggacggccacggagaccaaggccatggaggaggagtgctcgcccaaggagatctgtgacaagtaccatgctatccacagtgaggtttacaagtggtttgacatagaatttgacaaatttgggcgtacatcctctcctcaacagacaacaatctgccaagcaattttccataaattgatggaaaacaattggctatcagaaaacaccatgcagcagctttactgtgatacatgtcaaaggtttttggcagatagacttgtagaaggagcatgcccaacagaagggtgtactaataaagctgcgcgaggtgatcaatgtgacaattgcagccacatgttgaatccaactgaactaattgatccaaagtgtaagggtattgtgttttttgtaggtctgtaagaatactcctcatattcgtgaaacggatcacttgttcttggatctccctcgaatagaagacaagttggtaaactacattaatgatacttcagtagctggtatgtggagtcaaaatgccattcaagctacaaatgcatggttaaaggaaggactaaaatcacgctgtatcacaagagatcttaaatggggagttcctgttccaattgagaagtataaagataaggttttctatgtctggttcgatgcaccgattggctacgtgtccatcacatcatcttatacacctgagtgggagaggtggtggaagaatcctgataatgtggaattatttcagttcatgggcaaagataatgtgccatttcatacgatcatgtttccttcaacactactaggaactggtgaaaattggacaatgatgaagaccatttgtgtcaccgaatatctaaattacgaaggaggaaaattctccaagagtaagggtatcggagttttcggtaatgatgccaaggataccaatattcctcctgaagtatggcgatactacctgcttatgaatcgacctgaggcatcagatacactctttacctggactgatttgcaagccaaattgaacagcgaattgttaaacaacttgggaaatttcatcaatcgtgtgctaagctttattgcaaaaccagctggggctggatatgattcaattatacccgatgctcctggtgctgagtcacatccatcgacaagtgtcattgcagaaaaagttagtaaatcggttgaacaatatcttgatgcaatggaaaaggtaaagctgaaacaaggactgaagagtgcaatgggcatctctactgatggaaatcgttatttgcaggacagcgaattttggaaactttataaggacaatccagcaagctgtgcgattgtgatgaaaacttcagttggtcttgtatatctccttgcctgtctcctggaacctttcatgccttccttttcaaaagaagtgctacgtcaattaaacctgtccccagaagaaaatatttctttcagtgaagaaaatggcgaaagtgtgaaggcaaaacccccttgggatcttgtaccagcagggcacaaaatagggaggcctgtacctctgtttgaggaattgaaagatgaaaaggtgagtgagtatagggaaaaatatgcgggcagtcaagctgagaggaactcgaaagcagtggctgacgctgaagccacaaaaattgctaaccaaacccaaagcatagcattatctggaggctcaaaaaaggaacaaaagaaacagtctggtaactcaaaatcaaaggtggctgaggcagaattatccgttgcaaagttggagattcgagtggggcttatcagaaaagcggagaagcatccagacgccgattcgctgtatgtagaggaaatcgatgttggagaggaggctccaagaacggtggttagtggccttgtcaaatacattcctcttgaagaaatacagaaccggaaagtctgtgttctctgcaatctgaaaccggtggtgatgcgtggtataaaatcggatgccatggttttggctgcttctaatgaggaccatactagggttgagctggtcgagccaccagcggatgctgccgtgggggagagggtgacctttgccgggcactccggtgagaccgaggcttctctcagtggcaagagcaaggtgtgggagaagctagcggctgacctgcgtagcaatggcgaccttgtggcctgctaccaagatgtccccttcatgacttcggctggagtctgcaaggtacagacaatagcgaatggggaaatccgctagatgacgcgatgcctgaaggcagcgtgacgccgtggcctaactgccgtctgatgttactgaagtactagctgattggttttttgttgtaaattttctccttggatctgaattttcttgtattgaaaattggcaatagagaaaacgacggtgtttaattaattctgtggtggagatgggttgccatggaatgtatgacaccgttgtcgtggagccatgcaaaccgataagctag

SEQ ID NO: 44417 - DNA, 2591 bp, Zea Mays
atctggacgtgcgccgtcagcaagatggcaactactccggcgctgtcacgcgaccctgcttcccgtcccgagctcgacgctggcctgatatatagcattggagtttgttggacctttggtggctagtcccgtccaaaagaatcgcaactcgcaaggcagcagagagcgaaggaggccaaggccatcgctctcctagcctcggagacttgcctttgcatacacatccccccggagggcggtgtgagggcatggctgcaaccgtgaggagggctgcttcctccgtcctctctcgcttcctcctcacaaagccttcgccttcgcctgcttctgccgccggcaataagtccgctctcctcggagcaggggctgctgctcttcacaggttcagcaccgcaccggcatccgcggccgcggccgcagaggagccgatccagcccgcggtggaggtgaagcacacccagctcctcatcaatggcaacttcgtcgacgctgcttctgacgttcccgacgctggacccgcgcaccggcgaggtcatcgcgcgcgtcgccgagggcgacagcgaggacatcgaccgcgccgtggccgccgcccgcagggccttcgacgagggcccgtggccgaggatgaccgcctacgagcggtgccgcgtgctgctgcgcttcgcggacctgatcgagcggcacgcggaggaggtcgcggcgctggagacgtgggacaacggcaagacgctggcgcaggcggcgggggccgaggtgcccatggtggcgcggtgcgtccggtactacgccgggtgggcggacaagatccacggcctggtggcgccggccgacggcgcgcaccacgtgcaggtgctgcacgagccggtcggcgtggccggccagatcatcccctggaacttcccgctgctcatgttcgcctggaaggtcggcccggcgctcgcctgcggcaacaccgtcgtcctcaagaccgccgagcagacgccgctctccgcgctctacgtggccaacctcctccacgaggctgggctccccgagggcgttctgaacgtggtgtccggcttcggcccgacggccggcgcagcgctctgcagccacatgggtgtcgacaagcttgcgttcacgggatcgacgggcacggggcagatcgtgctcgagctggcggcgaggagcaaccttaagccggtgacgctggagctcggtggcaagtcccctttcatcgtcatggacgacgccgacgtcgaccaggccgtcgagctcgcgcaccaggcggtcttcttcaaccagggccaatgctgctgcgccgggtcgcggacgttcgtgcacgagcgcgtgtacgacgagttcgtggagaagtccaaggcccgcgccctgaagcgcgtcgtcggcgaccccttcagggacggggtcgaacaggggcctcagatcgacggcgagcaattcaacaagatcttgcggtacgtccagtccggcgtcgacagcggtgccaccctcgtcgccggcggcgacagggtaggcgacaggggcttctacatacagccgacggtgtttgccgacgccaaggacgaaatgaagatcgctcgggaggagatattcgggccggtgcaaaccattctcaagttcagcggcgtggaggaggtgatccggcgcgcgaacgcgacgccctacgggctggcggcgggggtgttcacgcggagcctggacgcggccaacaccctgtcgcgggcgctgcgggcgggcaccgtgtgggtgaactgctacgacgtgttcgacgccaccatcccgttcggcggctacaagatgagcggcgtcgggcgggagaagggcatctacgccctccgcaactacctccagacaaaggccgtcgtcacacccatcaagaaccccgcatggctgtaaatcacatcctccgtccttgcccgcacggcgctgcgccggttctcggagaacgtgacgaataaaacaaacggtttggttaaaaagacaaggacgacggaaaatgggtcatttttatctcccttagagcatctccaacaatgcctcaaactaatgcctcaaatcgaaatatagggctctacacaggaaaaaccactccaacagtgcctcaattcaacaaattttgtcaaaaaactatagggcaccctctcaagtgcctcaaatatactacaccgtagtgggctgccctataatctagatttggggctttactgttggagcggggtgttttgttggtgccctaaattctataaaatttacttattttaaaattataaggcatttttataggtcacgttgttggagatgctcttaacaagcaccaccctagtcacgttttcatcgaactttaaaagcacgcgaattgctcagctctcaaaaccatttaaattacccattaggagaggttttcatggtgattttagcttttttttaattaatgtttggttgcaatgacaggacaggatgagatgagacgatctcttgtatctcttaaacaagtttgtttggttgagggtcaagtgttgggacaagactaggggtgggcattttaaaaccgaaaatcaaacccgaaccggaaccgaacccgaatagaccga

SEQ ID NO: 44418 - DNA, 1616 bp, Zea Mays
attaaccgtacacgcggacgggcgcggggcgccgtaggcccctagctgcggtgatccgccgctctcgcagcaccgtcgcgctcgcctccgcccgcccgctcgtcgagtggacgcgcgctgcaccgcgactccagtcatggctagtgttaccgattctttcgtggcggatcttgatgagctattggagtataggacagagaagactatcctggagatgaaaacgcagagacagaaaacttggaagatgatgctaatgatagtgtccctgacctgaaatctcttgatcttgatagtgtctaaaaacatcagaaggcacaatggtataaagacataatgaagacatgatcacaatggcagaaacgacaactggtggggagcctctttctgaagataatttagtaaatactattgaagcatccgacagagctcttaaccttgatgccgacaaagaagatgatacttgaatttttgaagggcagaatgggatacgttgcacgaaaccttgccgccattgttggcagtgctgttgcctcgaaaccgagtcgtgctgccgtgttggtggtttgggagcactggccaaaatgcccgcttgtaatgtgctgcactgctgcttctcggtgcaaaaaagacaaatctgtctggattctctactgcgtcagtgcagtctcgtattggttatctagaacaaactgaagtattatttgaaagcacacctccatctttaagatttcagtctagtagacttatagctgcaaagtcaacactagcaacaaggatcgattgtataaggctatcttcagcagtttactcattctcatctcttattttaacctacactctataaacagtgcattttacagtacaaaacagtgttttacatgttcatatgcacgatctgctggctatagcctaagagatgatccaactagaacggttgtgcagaacttgttagaagaaattagtaagaagattgaaaactggcaacaactaccacctgcaaggcttccaaagccaattccaattccagactttatgcctaaaaagaaacgaggggttgttggctccggaaaatgaaggaaagataatttatttgaaactttctcatgtccaaattgattaaaactattgtacttcatgtaaaagattgctatataatgcccattcacatgtctcatttgcattttgcaatttgttatattactcgagttccctggttgcattacctgtttggctgtttgtcttagttgcattttgcaacttactttgttatatcactctgagtgacccttcaatttcctcttacctttttgtatttgggaactcaattgtgaagatatgcacagaccaacacgatgaagcttgtgaatcggatgaagtttagcatgccagaggagagcacattgggtgatggcttagggaaaggttacggcttgcttgggcaggctggaagcgggaagctacgtgtgtcagctggtcaaagcaaactttctactaaaattgctaaaattttcaaagagaacagttctgagagtagtgtgtgaagattggggttgacatcaagcttagcattttcgccagttcaattgaatgctcgtgcattagacgacgggcgggcc

SEQ ID NO: 44419 - DNA, 2151 bp, Zea Mays
ctaggctacgcttccggattatgtgatctctctatgggctagtgttaccgattctttcgtggcggatcttgatgagctattggagtataggacagagaagactatcctggagatgaaaacgcagagacagaaaacttggaagatgatgctaatgatagtgtccctgacctgaaatctcttgatcttgatagtgtctaaaaacatcagaaggcacaatggtataaagacataatgaagatgcacttgaaaggtgactccaatcaaggggccattctgcaagatcaagataccagcttgttgttgattgcaatgcttcatcagtagatattgacaatgagattactataatccacaatttcatacgtgacaagttcaagctaaaggaccctctactagaatcctgtgttcactatccgattgattatgcccgtgttgtctggaagattggaaatgacatggacttaacacttgatttgaaagttatttaccttctgcagacatgatcacaatggcagaaacgacaactggtggggagcctctttctgaagataatttagtaaatactattgaagcatccgacagagctcttaaccttgatgccgacaaagaagatgatacttgaatttttgaagggcagaatgggatacgttgcacgaaaccttgccgccattgttggcagtgctgttgcctcgaaaccgagtcgtgctgccgtgttggtggtttgggagcactggccaaaatgcccgcttgtaatgtgctgcactgctgcttctcggtgcaaaaaagacaaatctgtctggattctctactgcgtcagtgcagtctcgtattggttatctagaacaaactgaagtattatttgaaagcacacctccatctttaagatttcagtctagtagacttatagctgcaaagtcaacactagcaacaaggatcgattgtataaggctatcttcagcagtttactcattctcatctcttattttaacctacactctataaacagtgcattttacagtacaaaacagtgttttacatgttcatatgcacgatctgctggctatagcctaagagatgatccaactagaacggttgtgcagaacttgttagaagaaattagtaagaagattgaaaactggcaacaactaccacctgcaaggcttccaaagccaattccaattccagactttatgcctaaaaagaaacgaggggttgttggctccggaaaatgaaggaaagataatttatttgaaactttctcatgtccaaattgattaaaactattgtacttcatgtaaaagattgctatataatgcccattcacatgtctcatttgcattttgcaatttgttatattactcgagttccctggttgcattacctgtttggctgtttgtcttagttgcattttgcaacttactttgttatatcactctgagtgacccttcaatttcctcttacctttttgtatttgggaactcaattgtgaagatatgcacagaccaacacgatgaagcttgtgaatcggatgaagtttagcatgccagaggagagcacattgggtgatggcttagggaaaggttacggcttgcttgggcaggctggaagcgggaagctacgtgtgtcagctggtcaaagcaaactttctactaaaattgctaaaattttcaaagagaacagttctgagagtagtgtgtgaagattggggttgacatcaagcttagcattttcgccagttcaatgccagtgatgaagggactaggtgcatagaagaattaagaagagcaactctcggatccgaactgctctttaatttgcttgctccaaagtcatcatcgacaacgctcgctgtactttcttggaagtcaccacgcagcttaagccacaaaaatataccatgtaatcttgacttgatgctccgtcgtatgattctagatgcagctttttgactgctacttttttctttcttgtttgcgcttatgatcgctacagtttccccttatctttggtcctcctatcagttttttacatacagctctactttcttctgtgcccctgtgtgtgatccatctttctccctctcccggaaaagacaaccaacaggagacgatgtggctgcatatatttatatatatatacaatacaaatcga

SEQ ID NO: 44420 - DNA, 3314 bp, Zea Mays
ctttctgctaggctacgcttccggattatgtgatctctctatgggctagtgttaccgattctttcgtggcggatcttgatgagctattggagtataggacagagaagactatcctggagatgaaaacgcagagacagaaaacttggaagatgatgctaatgatagtgtccctgacctgaaatctcttgatcttgatagtgtctaaaaacatcagaaggcacaatggtataaagacataatgaagatgcacttgaaaggtgactccaatcaaggggccattctgcaagatcaagataccagcttgttgttgattgcaatgcttcatcagtagatattgacaatgagattactataatccacaatttcatacgtgacaagttcaagctaaaggaccctctactagaatcctgtgttcactatccgattgattatgcccgtgttgtctggaagattggaaatgacatggacttaacacttgatttgaaagttatttaccttctgcagacatgatcacaatggcagaaacgacaactggtggggagcctctttctgaagataatttagtaaatactattgaagcatccgacagagctcttaaccttgatgccgacaaagaagatgatacttgaatttttgaagggcagaatgggatacgttgcacgaaaccttgccgccattgttggcagtgctgttgcctcgaaaccgagtcgtgctgccgtgttggtggtttgggagcactggccaaaatgcccgcttgtaatgtgctgcactgctgcttctcggtgcaaaaaagacaaatctgtctggattctctactgcgtcagtgcagtctcgtattggttatctagaacaaactgaagtattatttgaaagcacacctccatctttaagatttcagtctagtagacttatagctgcaaagtcaacactagcaacaaggatcgattgtataaggctatcttcagcagtttactcattctcatctcttattttaacctacactctataaacagtgcattttacagtacaaaacagtgttttacatgttcatatgcacgatctgctggctatagcctaagagatgatccaactagaacggttgtgcagaacttgttagaagaaattagtaagaagattgaaaactggcaacaactaccacctgcaaggcttccaaagccaattccaattccagactttatgcctaaaaagaaacgaggggttgttggctccggaaaatgaaggaaagataatttatttgaaactttctcatgtccaaattgattaaaactattgtacttcatgtaaaagattgctatataatgcccattcacatgtctcatttgcattttgcaatttgttatattactcgagttccctggttgcattacctgtttggctgtttgtcttagttgcattttgcaacttactttgttatatcactctgagtgacccttcaatttcctcttacctttttgtatttgggaactcaattgtgaagatatgcacagaccaacacgatgaagcttgtgaatcggatgaagtttagcatgccagaggagagcacattgggtgatggcttagggaaaggttacggcttgcttgggcaggctggaagcgggaagctacgtgtgtcagctggtcaaagcaaactttctactaaaattgctaaaatgtaagcgatttatacgtgagtgacggtgttgaaatatataagtgaattgagtattttcttccgtcagtttaaatttttgggtttaactggttagtgcatactaacatgtaggtcttctgattctaggggcgaagctacttggttagcggtggatgcacatacatcccttcaaatccaaaattcagttataataatcaaaatttcaccatataagcatctctcatatcctattcttatgcacccacaagagagttgcaccccctttatatccataactataacaaaaaagcaaacacgtcaacagtgtgatggactgatggtagtgttagagtggacgtactaaccagttcaatcaaagagcctttaaacttttcggttgaactggttagtgtgtccactctaataagttatcaaagtcagagggctcgagttcgaatcatgacagagactttatttgtgcctccacccatttatttctatgtttgcacctttctctttggctgcacatgattagggtgttgaagtgtataagtggatttgttaccttctcctatctgattaagcttttgggttgaagatgttagtgtgtccaatctaacatggtatgaaagctacaggtcttaagttcgaattctgatagaggctttatttgtgcctccattcatttatttccacgtttgtgcgtccctttctctctagttgtgtttgcgcctttctttctagatggacgtgagtgacagtgttaaagtatataaatgaattgattatcttcttccatcagtttaaaattttggattcaactgttagtgtatactaacatgtaggtcttctggctatctattagtattcaaatcttagttgcataaaagaaatgccccttgctgtgtaactatctacagcttttgggggtcttttctcgaccctgtatccctgtagttggagttaaaccttggggagtcgaaattgtttacctggcagcatatatgccattgcaccggataccattcccaatagacactgctttattatgcatgctgctgccctgaacttatacattcttcaagaaaaagcttatttgtctgcacttgtaatcttaacagtcccttttttacaatacgtacctcgtcattaatctgttttggtatacttacatcagtttcaaagagaacagttctgagagtagtgtgtgaagattggggttgacatcaagcttagcattttcgccagttcaatgccagtgatgaagggactaggtgcatagaagaattaagaagagcaactctcggatccgaactgctctttaatttgcttgctccaaagtcatcatcgacaacgctcgctgtactttcttggaagtcaccacgcagcttaagccacaaaaatataccatgtaatcttgacttgatgctccgtcgtatgattctagatgcagctttttgactgctacttttttctttcttgtttgcgcttatgatcgctacagtttccccttatctttggtcctcctatcagttttttacatacagctctactttcttctgtgcccctgtgtgtgatccatctttctccctctcccggaaaagacaaccaacaggagacgatgtggctgcatatatttatatatatatacaatacaaatcga

SEQ ID NO: 44421 - DNA, 1614 bp, Zea Mays
attaaccgtacacgcggacgggcgcggggcgccgtaggcccctagctgcggtgatccgccgctctcgcagcaccgtcgcgctcgcctccgcccgcccgctcgtcgagtggacgcgcgctgcaccgcgactccagtcatggctagtgttaccgattctttcgtggcggatcttgatgagctattggagtataggacagagaagactatcctggagatgaaaacgcagagacagaaaacttggaagatgatgctaatgatagtgtccctgacctgaaatctcttgatcttgatagtgtctaaaaacatcagaaggcacaatggtataaagacataatgaagatgcacttgaaaggtgactccaatcaaggggccattctgcaagatcaagataccagcttgttgttgattgcaatgcttcatcagtagatattgacaatgagattactataatccacaatttcatacgtgacaagttcaagctaaaggaccctctactagaatcctgtgttcactatccgattgattatgcccgtgttgtctggaagattggaaatgacatggacttaacacttgatttgaaagttatttaccttctgcagacatgatcacaatggcagaaacgacaactggtggggagcctctttctgaagataatttagtaaatactattgaagcatccgacagagctcttaaccttgatgccgacaaagaagatgatacttgaatttttgaagggcagaatgggatacgttgcacgaaaccttgccgccattgttggcagtgctgttgcctcgaaaccgagtcgtgctgccgtgttggtggtttgggagcactggccaaaatgcccgcttgtaatgtgctgcactgctgcttctcggtgcaaaaaagacaaatctgtctggattctctactgcgtcagtgcagtctcgtattggttatctagaacaaactgaaatatgcacagaccaacacgatgaagcttgtgaatcggatgaagtttagcatgccagaggagagcacattgggtgatggcttagggaaaggttacggcttgcttgggcaggctggaagcgggaagctacgtgtgtcagctggtcaaagcaaactttctactaaaattgctaaaattttcaaagagaacagttctgagagtagtgtgtgaagattggggttgacatcaagcttagcattttcgccagttcaatgccagtgatgaagggactaggtgcatagaagaattaagaagagcaactctcggatccgaactgctctttaatttgcttgctccaaagtcatcatcgacaacgctcgctgtactttcttggaagtcaccacgcagcttaagccacaaaaatataccatgtaatcttgacttgatgctccgtcgtatgattctagatgcagctttttgactgctacttttttctttcttgtttgcgcttatgatcgctacagtttccccttatctttggtcctcctatcagttttttacatacagctctactttcttctgtgcccctgtgtgtgatccatctttctccctctcccggaaaagacaaccaacaggagacgatgtggctgcatatatttatatatatatacaatacaaatcga

SEQ ID NO: 44422 - DNA, 2269 bp, Zea Mays
cgctctctctttttttattaaccgtacacgcggacgggcgcggggcgccgtaggcccctagctgcggtgatccgccgctctcgcagcaccgtcgcgctcgcctccgcccgcccgctcgtcgagtggacgcgcgctgcaccgcgactccagtcatggctagtgttaccgattctttcgtggcggatcttgatgagctattggagtataggacagagaagactatcctggagatgaaaacgcagagacagaaaacttggaagatgatgctaatgatagtgtccctgacctgaaatctcttgatcttgatagtgtctaaaaacatcagaaggcacaatggtataaagacataatgaagatgcacttgaaaggtgactccaatcaaggggccattctgcaagatcaagataccagcttgttgttgattgcaatgcttcatcagtagatattgacaatgagattactataatccacaatttcatacgtgacaagttcaagctaaaggaccctctactagaatcctgtgttcactatccgattgattatgcccgtgttgtctggaagattggaaatgacatggacttaacacttgatttgaaagttatttaccttctgcagacatgatcacaatggcagaaacgacaactggtggggagcctctttctgaagataatttagtaaatactattgaagcatccgacagagctcttaaccttgatgccgacaaagaagatgatacttgaatttttgaagggcagaatgggatacgttgcacgaaaccttgccgccattgttggcagtgctgttgcctcgaaaccgagtcgtgctgccgtgttggtggtttgggagcactggccaaaatgcccgcttgtaatgtgctgcactgctgcttctcggtgcaaaaaagacaaatctgtctggattctctactgcgtcagtgcagtctcgtattggttatctagaacaaactgaagtattatttgaaagcacacctccatctttaagatttcagtctagtagacttatagctgcaaagtcaacactagcaacaaggatcgattgtataaggctatcttcagcagtttactcattctcatctcttattttaacctacactctataaacagtgcattttacagtacaaaacagtgttttacatgttcatatgcacgatctgctggctatagcctaagagatgatccaactagaacggttgtgcagaacttgttagaagaaattagtaagaagattgaaaactggcaacaactaccacctgcaaggcttccaaagccaattccaattccagactttatgcctaaaaagaaacgaggggttgttggctccggaaaatgaaggaaagataatttatttgaaactttctcatgtccaaattgattaaaactattgtacttcatgtaaaagattgctatataatgcccattcacatgtctcatttgcattttgcaatttgttatattactcgagttccctggttgcattacctgtttggctgtttgtcttagttgcattttgcaacttactttgttatatcactctgagtgacccttcaatttcctcttacctttttgtatttgggaactcaattgtgaagatatgcacagaccaacacgatgaagcttgtgaatcggatgaagtttagcatgccagaggagagcacattgggtgatggcttagggaaaggttacggcttgcttgggcaggctggaagcgggaagctacgtgtgtcagctggtcaaagcaaactttctactaaaattgctaaaattttcaaagagaacagttctgagagtagtgtgtgaagattggggttgacatcaagcttagcattttcgccagttcaatgccagtgatgaagggactaggtgcatagaagaattaagaagagcaactctcggatccgaactgctctttaatttgcttgctccaaagtcatcatcgacaacgctcgctgtactttcttggaagtcaccacgcagcttaagccacaaaaatataccatgtaatcttgacttgatgctccgtcgtatgattctagatgcagctttttgactgctacttttttctttcttgtttgcgcttatgatcgctacagtttccccttatctttggtcctcctatcagttttttacatacagctctactttcttctgtgcccctgtgtgtgatccatctttctccctctcccggaaaagacaaccaacaggagacgatgtggctgcatatatttatatatatatacaatacaaatcga

SEQ ID NO: 44423 - DNA, 934 bp, Zea Mays
attaaccgtacacgcggacgggcgcggggcgccgtaggcccctagctgcggtgatccgccgctctcgcagcaccgtcgcgctcgcctccgcccgcccgctcgtcgagtggacgcgcgctgcaccgcgactccagtcatggctagtgttaccgattctttcgtggcggatcttgatgagctattggagtataggacagagaagactatcctggagatgaaaacgcagagacagaaaacttggaagatgatgctaatgatagtgtccctgacctgaaatctcttgatcttgatagtgtctaaaaacatcagaaggcacaatggtataaagacataatgaagacatgatcacaatggcagaaacgacaactggtggggagcctctttctgaagataatttagtaaatactattgaagcatccgacagagctcttaaccttgatgccgacaaagaagatgatacttgaatttttgaagggcagaatgggatacgttgcacgaaaccttgccgccattgttggcagtgctgttgcctcgaaaccgagtcgtgctgccgtgttggtggtttgggagcactggccaaaatgcccgcttgtaatgtgctgcactgctgcttctcggtgcaaaaaagacaaatctgtctggattctctactgcgtcagtgcagtctcgtattggttatctagaacaaactgaaatatgcacagaccaacacgatgaagcttgtgaatcggatgaagtttagcatgccagaggagagcacattgggtgatggcttagggaaaggttacggcttgcttgggcaggctggaagcgggaagctacgtgtgtcagctggtcaaagcaaactttctactaaaattgctaaaattttcaaagagaacagttctgagagtagtgtgtgaagattggggttgacatcaagcttagcattttc

SEQ ID NO: 44424 - DNA, 2633 bp, Zea Mays
gttcactatcacacgttgtgtgcgtgttaccgattctttcgtggcggatcttgatgagctattggagtataggacagagaagactatcctggagatgaaaacgcagagacagaaaacttggaagatgatgctaatgatagtgtccctgacctgaaatctcttgatcttgatagtgtctaaaaacatcagaaggcacaatggtataaagacataatgaagatgcacttgaaaggtgactccaatcaaggggccattctgcaagatcaagataccagcttgttgttgattgcaatgcttcatcagtagatattgacaatgagattactataatccacaatttcatacgtgacaagttcaagctaaaggaccctctactagaatcctgtgttcactatccgattgattatgcccgtgttgtctggaagattggaaatgacatggacttaacacttgatttgaaagttatttaccttctgcagacatgatcacaatggcagaaacgacaactggtggggagcctctttctgaagataatttagtaaatactattgaagcatccgacagagctcttaaccttgatgccgacaaagaagatgatacttgaatttttgaagggcagaatgggatacgttgcacgaaaccttgccgccattgttggcagtgctgttgcctcgaaaccgagtcgtgctgccgtgttggtggtttgggagcactggccaaaatgcccgcttgtaatgtgctgcactgctgcttctcggtgcaaaaaagacaaatctgtctggattctctactgcgtcagtgcagtctcgtattggttatctagaacaaactgaagtattatttgaaagcacacctccatctttaagatttcagtctagtagacttatagctgcaaagtcaacactagcaacaaggatcgattgtataaggctatcttcagcagtttactcattctcatctcttattttaacctacactctataaacagtgcattttacagtacaaaacagtgttttacatgttcatatgcacgatctgctggctatagcctaagagatgatccaactagaacggttgtgcagaacttgttagaagaaattagtaagaagattgaaaactggcaacaactaccacctgcaaggcttccaaagccaattccaattccagactttatgcctaaaaagaaacgaggggttgttggctccggaaaatgaaggaaagataatttatttgaaactttctcatgtccaaattgattaaaactattgtacttcatgtaaaagattgctatataatgcccattcacatgtctcatttgcattttgcaatttgttatattactcgagttccctggttgcattacctgtttggctgtttgtcttagttgcattttgcaacttactttgttatatcactctgagtgacccttcaatttcctcttacctttttgtatttgggaactcaattgtgaagatatgcacagaccaacacgatgaagcttgtgaatcggatgaagtttagcatgccagaggagagcacattgggtgatggcttagggaaaggttacggcttgcttgggcaggctggaagcgggaagctacgtgtgtcagctggtcaaagcaaactttctactaaaattgctaaaatgggcgaagctacttggttagcggtggatgcacatacatcccttcaaatccaaaattcagttataataatcaaaatttcaccatataagcatctctcatatcctattcttatgcacccacaagagagttgcaccccctttatatccataactataacaaaaaagcaaacacgtcaacagtgtgatggactgatggtagtgttagagtggacgtactaaccagttcaatcaaagagcctttaaacttttcggttgaactggttagtgtgtccactctaataagttatcaaagtcagagggctcgagttcgaatcatgacagagactttatttgtgcctccacccatttatttctatgtttgcacctttctctttggctgcacatgattagggtgttgaagtgtataagtggatttgttaccttctcctatctgattaagcttttgggttgaagatgttagtgtgtccaatctaacatggtatgaaagctacaggtcttaagttcgaattctgatagaggctttatttgtgcctccattcatttatttccacgtttgtgcgtccctttctctctagttgtgtttgcgcctttctttctagatggacgtgagtgacagtgttaaagtatataaatgaattgattatcttcttccatcagtttaaaattttggattcaactgttagtgtatactaacatgtaggtcttctggctatctattagtattcaaatcttagttgcataaaagaaatgccccttgctgtgtaactatctacagcttttgggggtcttttctcgaccctgtatccctgtagttggagttaaaccttggggagtcgaaattgtttacctggcagcatatatgccattgcaccggataccattcccaatagacactgctttattatgcatgctgctgccctgaacttatacattcttcaagaaaaagcttatttgtctgcacttgtaatcttaacagtcccttttttac

SEQ ID NO: 44425 - DNA, 2240 bp, Zea Mays
attaaccgtacacgcggacgggcgcggggcgccgtaggcccctagctgcggtgatccgccgctctcgcagcaccgtcgcgctcgcctccgcccgcccgctcgtcgagtggacgcgcgctgcaccgcgactccagtcatggctagtgttaccgattctttcgtggcggatcttgatgagctattggagtataggacagagaagactatcctggagatgaaaacgcagagacagaaaacttggaagatgatgctaatgatagtgtccctgacctgaaatctcttgatcttgatagtgtctaaaaacatcagaaggcacaatggtataaagacataatgaagatgcacttgaaaggtgactccaatcaaggggccattctgcaagatcaagataccagcttgttgttgattgcaatgcttcatcagtagatattgacaatgagattactataatccacaatttcatacgtgacaagttcaagctaaaggaccctctactagaatcctgtgttcactatccgattgattatgcccgtgttgtctggaagattggaaatgacatggacttaacacttgatttgaaagttatttaccttctgcagacatgatcacaatggcagaaacgacaactggtggggagcctctttctgaagataatttagtaaatactattgaagcatccgacagagctcttaaccttgatgccgacaaagaagatgatacttgaatttttgaagggcagaatgggatacgttgcacgaaaccttgccgccattgttggcagtgctgttgcctcgaaaccgagtcgtgctgccgtgttggtggtttgggagcactggccaaaatgcccgcttgtaatgtgctgcactgctgcttctcggtgcaaaaaagacaaatctgtctggattctctactgcgtcagtgcagtctcgtattggttatctagaacaaactgaaatatgcacagaccaacacgatgaagcttgtgaatcggatgaagtttagcatgccagaggagagcacattgggtgatggcttagggaaaggttacggcttgcttgggcaggctggaagcgggaagctacgtgtgtcagctggtcaaagcaaactttctactaaaattgctaaaatgtaagcgatttatacgtgagtgacggtgttgaaatatataagtgaattgagtattttcttccgtcagtttaaatttttgggtttaactggttagtgcatactaacatgtaggtcttctgattctaggggcgaagctacttggttagcggtggatgcacatacatcccttcaaatccaaaattcagttataataatcaaaatttcaccatataagcatctctcatatcctattcttatgcacccacaagagagttgcaccccctttatatccataactataacaaaaaagcaaacacgtcaacagtgtgatggactgatggtagtgttagagtggacgtactaaccagttcaatcaaagagcctttaaacttttcggttgaactggttagtgtgtccactctaataagttatcaaagtcagagggctcgagttcgaatcatgacagagactttatttgtgcctccacccatttatttctatgtttgcacctttctctttggctgcacatgattagggtgttgaagtgtataagtggatttgttaccttctcctatctgattaagcttttgggttgaagatgttagtgtgtccaatctaacatggtatgaaagctacaggtcttaagttcgaattctgatagaggctttatttgtgcctccattcatttatttccacgtttgtgcgtccctttctctctagttgtgtttgcgcctttctttctagatggacgtgagtgacagtgttaaagtatataaatgaattgattatcttcttccatcagtttaaaattttggattcaactgttagtgtatactaacatgtaggtcttctggctatctattagtattcaaatcttagttgcataaaagaaatgccccttgctgtgtaactatctacagcttttgggggtcttttctcgaccctgtatccctgtagttggagttaaaccttggggagtcgaaattgtttacctggcagcatatatgccattgcaccggataccattcccaatagacactgctttattatgcatgctgctgccctgaacttatacattcttcaagaaaaagcttatttgtctgcacttgtaatcttaacagtcccttttttac

SEQ ID NO: 44426 - DNA, 2768 bp, Zea Mays
attaaccgtacacgcggacgggcgcggggcgccgtaggcccctagctgcggtgatccgccgctctcgcagcaccgtcgcgctcgcctccgcccgcccgctcgtcgagtggacgcgcgctgcaccgcgactccagtcatggctagtgttaccgattctttcgtggcggatcttgatgagctattggagtataggacagagaagactatcctggagatgaaaacgcagagacagaaaacttggaagatgatgctaatgatagtgtccctgacctgaaatctcttgatcttgatagtgtctaaaaacatcagaaggcacaatggtataaagacataatgaagatgcacttgaaaggtgactccaatcaaggggccattctgcaagatcaagataccagcttgttgttgattgcaatgcttcatcagtagatattgacaatgagattactataatccacaatttcatacgtgacaagttcaagctaaaggaccctctactagaatcctgtgttcactatccgattgattatgcccgtgttgtctggaagattggaaatgacatggacttaacacttgatttgaaagttatttaccttctgcagacatgatcacaatggcagaaacgacaactggtggggagcctctttctgaagataatttagtaaatactattgaagcatccgacagagctcttaaccttgatgccgacaaagaagatgatacttgaatttttgaagggcagaatgggatacgttgcacgaaaccttgccgccattgttggcagtgctgttgcctcgaaaccgagtcgtgctgccgtgttggtggtttgggagcactggccaaaatgcccgcttgtaatgtgctgcactgctgcttctcggtgcaaaaaagacaaatctgtctggattctctactgcgtcagtgcagtctcgtattggttatctagaacaaactgaagtattatttgaaagcacacctccatctttaagatttcagtctagtagacttatagctgcaaagtcaacactagcaacaaggatcgattgtataaggctatcttcagcagtttactcattctcatctcttattttaacctacactctataaacagtgcattttacagtacaaaacagtgttttacatgttcatatgcacgatctgctggctatagcctaagagatgatccaactagaacggttgtgcagaacttgttagaagaaattagtaagaagattgaaaactggcaacaactaccacctgcaaggcttccaaagccaattccaattccagactttatgcctaaaaagaaacgaggggttgttggctccggaaaatgaaggaaagataatttatttgaaactttctcatgtccaaattgattaaaactattgtacttcatgtaaaagattgctatataatgcccattcacatgtctcatttgcattttgcaatttgttatattactcgagttccctggttgcattacctgtttggctgtttgtcttagttgcattttgcaacttactttgttatatcactctgagtgacccttcaatttcctcttacctttttgtatttgggaactcaattgtgaagatatgcacagaccaacacgatgaagcttgtgaatcggatgaagtttagcatgccagaggagagcacattgggtgatggcttagggaaaggttacggcttgcttgggcaggctggaagcgggaagctacgtgtgtcagctggtcaaagcaaactttctactaaaattgctaaaatgtcttctgattctaggggcgaagctacttggttagcggtggatgcacatacatcccttcaaatccaaaattcagttataataatcaaaatttcaccatataagcatctctcatatcctattcttatgcacccacaagagagttgcaccccctttatatccataactataacaaaaaagcaaacacgtcaacagtgtgatggactgatggtagtgttagagtggacgtactaaccagttcaatcaaagagcctttaaacttttcggttgaactggttagtgtgtccactctaataagttatcaaagtcagagggctcgagttcgaatcatgacagagactttatttgtgcctccacccatttatttctatgtttgcacctttctctttggctgcacatgattagggtgttgaagtgtataagtggatttgttaccttctcctatctgattaagcttttgggttgaagatgttagtgtgtccaatctaacatggtatgaaagctacaggtcttaagttcgaattctgatagaggctttatttgtgcctccattcatttatttccacgtttgtgcgtccctttctctctagttgtgtttgcgcctttctttctagatggacgtgagtgacagtgttaaagtatataaatgaattgattatcttcttccatcagtttaaaattttggattcaactgttagtgtatactaacatgtaggtcttctggctatctattagtattcaaatcttagttgcataaaagaaatgccccttgctgtgtaactatctacagcttttgggggtcttttctcgaccctgtatccctgtagttggagttaaaccttggggagtcgaaattgtttacctggcagcatatatgccattgcaccggataccattcccaatagacactgctttattatgcatgctgctgccctgaacttatacattcttcaagaaaaagcttatttgtctgcacttgtaatcttaacagtcccttttttac

SEQ ID NO: 44427 - DNA, 2510 bp, Zea Mays
attaaccgtacacgcggacgggcgcggggcgccgtaggcccctagctgcggtgatccgccgctctcgcagcaccgtcgcgctcgcctccgcccgcccgctcgtcgagtggacgcgcgctgcaccgcgactccagtcatggctagtgttaccgattctttcgtggcggatcttgatgagctattggagtataggacagagaagactatcctggagatgaaaacgcagagacagaaaacttggaagatgatgctaatgatagtgtccctgacctgaaatctcttgatcttgatagtgtctaaaaacatcagaaggcacaatggtataaagacataatgaagttatttaccttctgcagacatgatcacaatggcagaaacgacaactggtggggagcctctttctgaagataatttagtaaatactattgaagcatccgacagagctcttaaccttgatgccgacaaagaagatgatacttgaatttttgaagggcagaatgggatacgttgcacgaaaccttgccgccattgttggcagtgctgttgcctcgaaaccgagtcgtgctgccgtgttggtggtttgggagcactggccaaaatgcccgcttgtaatgtgctgcactgctgcttctcggtgcaaaaaagacaaatctgtctggattctctactgcgtcagtgcagtctcgtattggttatctagaacaaactgaagtattatttgaaagcacacctccatctttaagatttcagtctagtagacttatagctgcaaagtcaacactagcaacaaggatcgattgtataaggctatcttcagcagtttactcattctcatctcttattttaacctacactctataaacagtgcattttacagtacaaaacagtgttttacatgttcatatgcacgatctgctggctatagcctaagagatgatccaactagaacggttgtgcagaacttgttagaagaaattagtaagaagattgaaaactggcaacaactaccacctgcaaggcttccaaagccaattccaattccagactttatgcctaaaaagaaacgaggggttgttggctccggaaaatgaaggaaagataatttatttgaaactttctcatgtccaaattgattaaaactattgtacttcatgtaaaagattgctatataatgcccattcacatgtctcatttgcattttgcaatttgttatattactcgagttccctggttgcattacctgtttggctgtttgtcttagttgcattttgcaacttactttgttatatcactctgagtgacccttcaatttcctcttacctttttgtatttgggaactcaattgtgaagatatgcacagaccaacacgatgaagcttgtgaatcggatgaagtttagcatgccagaggagagcacattgggtgatggcttagggaaaggttacggcttgcttgggcaggctggaagcgggaagctacgtgtgtcagctggtcaaagcaaactttctactaaaattgctaaaatgggcgaagctacttggttagcggtggatgcacatacatcccttcaaatccaaaattcagttataataatcaaaatttcaccatataagcatctctcatatcctattcttatgcacccacaagagagttgcaccccctttatatccataactataacaaaaaagcaaacacgtcaacagtgtgatggactgatggtagtgttagagtggacgtactaaccagttcaatcaaagagcctttaaacttttcggttgaactggttagtgtgtccactctaataagttatcaaagtcagagggctcgagttcgaatcatgacagagactttatttgtgcctccacccatttatttctatgtttgcacctttctctttggctgcacatgattagggtgttgaagtgtataagtggatttgttaccttctcctatctgattaagcttttgggttgaagatgttagtgtgtccaatctaacatggtatgaaagctacaggtcttaagttcgaattctgatagaggctttatttgtgcctccattcatttatttccacgtttgtgcgtccctttctctctagttgtgtttgcgcctttctttctagatggacgtgagtgacagtgttaaagtatataaatgaattgattatcttcttccatcagtttaaaattttggattcaactgttagtgtatactaacatgtaggtcttctggctatctattagtattcaaatcttagttgcataaaagaaatgccccttgctgtgtaactatctacagcttttgggggtcttttctcgaccctgtatccctgtagttggagttaaaccttggggagtcgaaattgtttacctggcagcatatatgccattgcaccggataccattcccaatagacactgctttattatgcatgctgctgccctgaacttatacattcttcaagaaaaagcttatttgtctgcacttgtaatcttaacagtcccttttttac

SEQ ID NO: 44428 - DNA, 1997 bp, Zea Mays
attaaccgtacacgcggacgggcgcggggcgccgtaggcccctagctgcggtgatccgccgctctcgcagcaccgtcgcgctcgcctccgcccgcccgctcgtcgagtggacgcgcgctgcaccgcgactccagtcatggctagtgttaccgattctttcgtggcggatcttgatgagctattggagtataggacagagaagactatcctggagatgaaaacgcagagacagaaaacttggaagatgatgctaatgatagtgtccctgacctgaaatctcttgatcttgatagtgtctaaaaacatcagaaggcacaatggtataaagacataatgaagttatttaccttctgcagacatgatcacaatggcagaaacgacaactggtggggagcctctttctgaagataatttagtaaatactattgaagcatccgacagagctcttaaccttgatgccgacaaagaagatgatacttgaatttttgaagggcagaatgggatacgttgcacgaaaccttgccgccattgttggcagtgctgttgcctcgaaaccgagtcgtgctgccgtgttggtggtttgggagcactggccaaaatgcccgcttgtaatgtgctgcactgctgcttctcggtgcaaaaaagacaaatctgtctggattctctactgcgtcagtgcagtctcgtattggttatctagaacaaactgaaatatgcacagaccaacacgatgaagcttgtgaatcggatgaagtttagcatgccagaggagagcacattgggtgatggcttagggaaaggttacggcttgcttgggcaggctggaagcgggaagctacgtgtgtcagctggtcaaagcaaactttctactaaaattgctaaaatgtaagcgatttatacgtgagtgacggtgttgaaatatataagtgaattgagtattttcttccgtcagtttaaatttttgggtttaactggttagtgcatactaacatgtaggtcttctgattctaggggcgaagctacttggttagcggtggatgcacatacatcccttcaaatccaaaattcagttataataatcaaaatttcaccatataagcatctctcatatcctattcttatgcacccacaagagagttgcaccccctttatatccataactataacaaaaaagcaaacacgtcaacagtgtgatggactgatggtagtgttagagtggacgtactaaccagttcaatcaaagagcctttaaacttttcggttgaactggttagtgtgtccactctaataagttatcaaagtcagagggctcgagttcgaatcatgacagagactttatttgtgcctccacccatttatttctatgtttgcacctttctctttggctgcacatgattagggtgttgaagtgtataagtggatttgttaccttctcctatctgattaagcttttgggttgaagatgttagtgtgtccaatctaacatggtatgaaagctacaggtcttaagttcgaattctgatagaggctttatttgtgcctccattcatttatttccacgtttgtgcgtccctttctctctagttgtgtttgcgcctttctttctagatggacgtgagtgacagtgttaaagtatataaatgaattgattatcttcttccatcagtttaaaattttggattcaactgttagtgtatactaacatgtaggtcttctggctatctattagtattcaaatcttagttgcataaaagaaatgccccttgctgtgtaactatctacagcttttgggggtcttttctcgaccctgtatccctgtagttggagttaaaccttggggagtcgaaattgtttacctggcagcatatatgccattgcaccggataccattcccaatagacactgctttattatgcatgctgctgccctgaacttatacattcttcaagaaaaagcttatttgtctgcacttgtaatcttaacagtcccttttttac

SEQ ID NO: 44429 - DNA, 2771 bp, Zea Mays
ctcgctctctctttttttattaaccgtacacgcggacgggcgcggggcgccgtaggcccctagctgcggtgatccgccgctctcgcagcaccgtcgcgctcgcctccgcccgcccgctcgtcgagtggacgcgcgctgcaccgcgactccagtcatggctagtgttaccgattctttcgtggcggatcttgatgagctattggagtataggacagagaagactatcctggagatgaaaacgcagagacagaaaacttggaagatgatgctaatgatagtgtccctgacctgaaatctcttgatcttgatagtgtctaaaaacatcagaaggcacaatggtataaagacataatgaagatgcacttgaaaggtgactccaatcaaggggccattctgcaagatcaagataccagcttgttgttgattgcaatgcttcatcagtagatattgacaatgagattactataatccacaatttcatacgtgacaagttcaagctaaaggaccctctactagaatcctgtgttcactatccgattgattatgcccgtgttgtctggaagattggaaatgacatggacttaacacttgatttgaaagttatttaccttctgcagacatgatcacaatggcagaaacgacaactggtggggagcctctttctgaagataatttagtaaatactattgaagcatccgacagagctcttaaccttgatgccgacaaagaagatgatacttgaatttttgaagggcagaatgggatacgttgcacgaaaccttgccgccattgttggcagtgctgttgcctcgaaaccgagtcgtgctgccgtgttggtggtttgggagcactggccaaaatgcccgcttgtaatgtgctgcactgctgcttctcggtgcaaaaaagacaaatctgtctggattctctactgcgtcagtgcagtctcgtattggttatctagaacaaactgaagtattatttgaaagcacacctccatctttaagatttcagtctagtagacttatagctgcaaagtcaacactagcaacaaggatcgattgtataaggctatcttcagcagtttactcattctcatctcttattttaacctacactctataaacagtgcattttacagtacaaaacagtgttttacatgttcatatgcacgatctgctggctatagcctaagagatgatccaactagaacggttgtgcagaacttgttagaagaaattagtaagaagattgaaaactggcaacaactaccacctgcaaggcttccaaagccaattccaattccagactttatgcctaaaaagaaacgaggggttgttggctccggaaaatgaaggaaagataatttatttgaaactttctcatgtccaaattgattaaaactattgtacttcatgtaaaagattgctatataatgcccattcacatgtctcatttgcattttgcaatttgttatattactcgagttccctggttgcattacctgtttggctgtttgtcttagttgcattttgcaacttactttgttatatcactctgagtgacccttcaatttcctcttacctttttgtatttgggaactcaattgtgaagatatgcacagaccaacacgatgaagcttgtgaatcggatgaagtttagcatgccagaggagagcacattgggtgatggcttagggaaaggttacggcttgcttgggcaggctggaagcgggaagctacgtgtgtcagctggtcaaagcaaactttctactaaaattgctaaaatgggcgaagctacttggttagcggtggatgcacatacatcccttcaaatccaaaattcagttataataatcaaaatttcaccatataagcatctctcatatcctattcttatgcacccacaagagagttgcaccccctttatatccataactataacaaaaaagcaaacacgtcaacagtgtgatggactgatggtagtgttagagtggacgtactaaccagttcaatcaaagagcctttaaacttttcggttgaactggttagtgtgtccactctaataagttatcaaagtcagagggctcgagttcgaatcatgacagagactttatttgtgcctccacccatttatttctatgtttgcacctttctctttggctgcacatgattagggtgttgaagtgtataagtggatttgttaccttctcctatctgattaagcttttgggttgaagatgttagtgtgtccaatctaacatggtatgaaagctacaggtcttaagttcgaattctgatagaggctttatttgtgcctccattcatttatttccacgtttgtgcgtccctttctctctagttgtgtttgcgcctttctttctagatggacgtgagtgacagtgttaaagtatataaatgaattgattatcttcttccatcagtttaaaattttggattcaactgttagtgtatactaacatgtaggtcttctggctatctattagtattcaaatcttagttgcataaaagaaatgccccttgctgtgtaactatctacagcttttgggggtcttttctcgaccctgtatccctgtagttggagttaaaccttggggagtcgaaattgtttacctggcagcatatatgccattgcaccggataccattcccaatagacactgctttattatgcatgctgctgccctgaacttatacattcttcaagaaaaagcttatttgtctgcacttgtaatcttaacagtcccttttttac

SEQ ID NO: 44430 - DNA, 793 bp, Zea Mays
agaactcaatatgtcagacagaaaggaacctatcctttacaagagattagataaggaagaagtatgcataatgattgaagaaacatctgaatatagaccttactaaaactcaaacccagttaggatcacgcctctagctaatttgaacttaaatacaacaaaatttatccatgacaaatagttatggagcaaaaaagtcatgatcctaaacaagtcaacaatatatatgtatatatcaagatacaagatagaaattaggctagacaataagaaaatatcagttaacaaatttcctatgtgatttaagaacgtaatcttccacgaatagctaagtttgaattcaaaaatgcaaatttgttatttactgatgcctttttgaacgccaaagcggttttgttctgaaaaaaaaatcagcaaatcgtttttgtctcttccatcctgtaaagtagaatggtaggttttaaaaatatatatatatattgggaaaaggaaacagagctttcgacaattagcactccaataaatatttcatctggacatcactatgcagttcagagactactcttagcaagctgaccacaaaatgttcattgcctaacagggcgtcttctttctaaatgcagttttggatccaggtgctgaagacacgccggacaagaccagcaaacaccaaaaggcaaacataggatactcaaggaacagacagaaccatgtgcatcttaccctgcccccaggacatcttagcttacctgtatcactgatctttctaatagccatgttcatggcatcagcc

SEQ ID NO: 44431 - DNA, 206 bp, Zea Mays
ggcgaagagaagacttcagtggcttctggtacggagttttggatccaggtgctgaagacacgccggacaagaccagcaaacaccaaaaggcaaacataggatactcaaggaacagacagaaccatgtgcatcttaccctgcccccaggacatcttagcttacctgtatcactgatctttctaatagccatgttcatggcatcagcc

SEQ ID NO: 44432 - DNA, 536 bp, Zea Mays
gtttagctttcactggactctcgtcttcctgctcctgcatttgttaaatttgcattcagaacgatgtgctgcaagaagaatactaggataaactaaaactgaacaactgcgtgtaaactaaaactgaacaactgtgtggttccctgttttcttttttagataatgctccacgaaccttccatcgtaaacaaacaactagatgtctacatgcctttcaaaatgcacaatgtagctaacaagaatatataagttgttttagtactctggtctaactcgaattaagcagaacaatgttaatctagacacacaaaaaattgttttggcacataaagctggtaattcttggctggctggaggcatttgggggcggggaggacccagatcgaggtcaccggaatgatggacaccaataccaggagagacaaaagactgatgacaacaaaatccatgtgctggcctgctatgttacagcaggctcaaggaccactgtagtagtcctagccatatttgctaatcctgccaatctggcagggaag

SEQ ID NO: 44433 - DNA, 1500 bp, Zea Mays
aggaaattcccgtttcgaatactgttttttcggatcgtcttcgaattgttcaagaaccgattagaaatgccagtattacacatctatctttattggcaaccctccaagaccatactttcttgatgttgatactggaagcgacttgacgtggatccagtgtgatgcaccatgtacaaactgcgcaaagccagcaaaagaaaagattgtccctcctagagacttgttgtgccaagaattgcaaggcaaccagaactactgcgaaacctgcaagcagtgtgactatgaaattgaatacgcagaccaaagctcctctatgggtgtccttgcaagggatgatatgcatatgatcgcaaccaatggtggaagggaaaaattagattttgtctttgggtgtgcatatgatcagcaaggccagcttttatcttcaccagctaagactgatgggatccttggacttagcagtgcggcgataagctttcccagtcagctggctagtcacgggattattgccaacgtttttggccattgtatcactagagagcaaggtggtggaggatatatgtttctgggagatgattatgtacctagatggggagtaacatggacttctattcgaagtggtccagataacttatatcacacacaagcccaccatgtaaaatatggggatcagcaactccggaggcctgaacaggcaggaagcactgttcaagtaatttttgacagtggaagctcctatacgtacctcccaaatgaaatatatgaaaaccttgttgcagcaatcaaatatgcgtctccgggctttgtccaagacacttcagatcggacattacctttatgctggaaagctgatttccctgtgaggtatctggaagatgtcaagcagttcttcgagcccttgaaccttcacttcgggaagaaatggcttttcatgtctaaaacattcactatttctcctgaggattacttgattattagtgataaaggaaatgtctgtcttgggcttctcaacggaacggagattaatcatgggtcaactatcatagtaggagatgtttctctgcgcggcaagttggttgtgtacgacaatcagcggaagcagattggatgggcagattcagactgcaccaaacctcaatcacaaaagggctttcctttcttcctctgacgaagcatcactctctacataatacatgtgtaaagcgtaaatagtgaacgccattgtattgtagaatacattattaagtggagactgcctttgtgtatgggtatatcgttccattggaactgtcagaaatcctccactgtgttgtacccgtctgtaatgtgtatactatgttgtttacttgtatgatgtatgtacactatctcctctacatggagttgtcccctacacatggattttttgtagattagttacattatgaacattttcgacagaagttgggtactttacacatttgatcatccattcaatactgggtgtgtgtgtgttttatc

SEQ ID NO: 44434 - DNA, 1579 bp, Zea Mays
tacactccccctagtttcttttcccccggttttttccgtcctctcctcactcgtgtccgatggcggccacggcgaggaccaattccacggcgttgctcccgatcaagggcaatgtcttccccgatggccagtattacacatctatctttattggcaaccctccaagaccatactttcttgatgttgatactggaagcgacttgacgtggatccagtgtgatgcaccatgtacaaactgcgcaaagggaccacatcctctatataagccagcaaaagaaaagattgtccctcctagagacttgttgtgccaagaattgcaaggcaaccagaactactgcgaaacctgcaagcagtgtgactatgaaattgaatacgcagaccaaagctcctctatgggtgtccttgcaagggatgatatgcatatgatcgcaaccaatggtggaagggaaaaattagattttgtctttgggtgtgcatatgatcagcaaggccagcttttatcttcaccagctaagactgatgggatccttggacttagcagtgcggcgataagctttcccagtcagctggctagtcacgggattattgccaacgtttttggccattgtatcactagagagcaaggtggtggaggatatatgtttctgggagatgattatgtacctagatggggagtaacatggacttctattcgaagtggtccagataacttatatcacacacaagcccaccatgtaaaatatggggatcagcaactccggaggcctgaacaggcaggaagcactgttcaagtaatttttgacagtggaagctcctatacgtacctcccaaatgaaatatatgaaaaccttgttgcagcaatcaaatatgcgtctccgggctttgtccaagacacttcagatcggacattacctttatgctggaaagctgatttccctgtgaggtatctggaagatgtcaagcagttcttcgagcccttgaaccttcacttcgggaagaaatggcttttcatgtctaaaacattcactatttctcctgaggattacttgattattagtgataaaggaaatgtctgtcttgggcttctcaacggaacggagattaatcatgggtcaactatcatagtaggagatgtttctctgcgcggcaagttggttgtgtacgacaatcagcggaagcagattggatgggcagattcagactgcaccaaacctcaatcacaaaagggctttcctttcttcctctgacgaagcatcactctctacataatacatgtgtaaagcgtaaatagtgaacgccattgtattgtagaatacattattaagtggagactgcctttgtgtatgggtatatcgttccattggaactgtcagaaatcctccactgtgttgtacccgtctgtaatgtgtatactatgttgtttacttgtatgatgtatgtacactatctcctctacatggagttgtcccctacacatggattttttgtagattagttacattatgaacattttcgacagaagttgggtactttacacatttgatcatccattcaatactgggtgtgtgtgtgttttatc

SEQ ID NO: 44435 - DNA, 213 bp, Zea Mays
gggatggccttgtttgtttgaagaagcgcggcacgcatgttactcttgacttgggggcgcattgtatatatagtacactgtacacgctcctacgggttgtaggtctaaggtcagatcatactgcttgtcatgtgaaggtttacaggtgactggcggcaatatatcttttatccaagcccgcaccgcatggtcggtgtggcgagaagagaccgc

SEQ ID NO: 44436 - DNA, 875 bp, Zea Mays
ctttctctctgttcgcccttagttctgcttgtgataaatgggatcctttcactgctattgggaaattacttgtttttcaagcaagaaatggagctctccctcgttgggttgcagaatgctgggaagacgtcgctggtcaatgccgttgctacaggtggctacagtgaggacatgattccaacggtaggcttcaatatgcggaaagtcaccaagggaaatgtcacgattaagctttgggatcttggtgggcagcggagattccgcactatgtgggagcgctattgccgtggagtttctgctattctgtatgttgtggacgctgctgaccgagatagtgtcccaatcgcgaaaagtgagttgcatgatctgctgacgaaacagtctttggctgggattcccttgcttgtccttggcaacaaaattgacaagtcagaagcgctttcgaagcaggccttggttgatcaacttggactggaattgataaaggaccgggaggtttgttgctacatgatctcgtgtaaggattctgtgaacatagacgtcgtcatcgactggcttatcaagcactctagaacagcgaagtaggctttctgtgtgtttgtatcgcttgatgcacggtgttttatcttttgtgaatctgcgcttcccagaagcctggttccttggtccccatgttaaaagcggccaccttgtaatttatggtttctttggtgtcacagacgaactgcatggtatctagactagaaacatgtattccctttgtaaatcctttgaacctttgattattcttactgtgaatgccgtccagtgtttttattctgcacataacaaaccagacctatgctcatgctaaaatttcttcacagagaaaaaag

SEQ ID NO: 44437 - DNA, 1453 bp, Zea Mays
cgcagttagatccacgctagtaacagttaccgcccgcacgcaatccttgtttttcaagcaagaaatggagctctccctcgttgggttgcagaatgctgggaagacgtcgctggtcaatgccgttgctacaggtggctacagtgaggacatgattccaacggcttcaatatgcggaaagtcaccaagggaaatgtcacgattaagctttgggatcttggtgggcagcggagattccgcactatgtgggagcgctattgccgtggagtttctgctattctgtaattcctgctcttctaagatattaaatactgtagatttcatattcattgtaacatacaactcataacctccaaattggagcaatttatggttggtattcatttcttaaagataatcaaatccttggagatcaaaccagcattccatgtagcaaggagatattaaagtctagatacctgcctaacattatattcattttcataccctgattaagcatattttcttcccttacgagcaatgtagatatatttattctgcattctgtttattcctatatgcagatctagaaggatcatataattgtaagttggaaactaacacatgcagagagagagcaggatggcgccactgttgtgcgaggctttattatcaaacatataacaataaaggaactcaattacatttacagagaatatcatataatgcatatatcccttttctttattctcttgaatcataaaaacataaaccctatgtttgttcctgtgtttatcatgttatcttgtgtttgtatgaccgttgttaccgagatatttttcagttatccagccttactggctatccttgatggatcatggtttgttaattttgtgattaattgcaggtatgttgtggacgctgctgaccgagatagtgtcccaatcgcgaaaagtgagttgcatgatctgctgacgaaacagtctttggctgggattcccttgcttgtccttggcaacaaaattgacaagtcagaagcgctttcgaagcaggccttggttgatcaacttggactggaattgataaaggaccgggaggtttgttgctacatgatctcgtgtaaggattctgtgaacatagacgtcgtcatcgactggcttatcaagcactctagaacagcgaagtaggctttctgtgtgtttgtatcgcttgatgcacggtgttttatcttttgtgaatctgcgcttcccagaagcctggttccttggtccccatgttaaaagcggccaccttgtaatttatggtttctttggtgtcacagacgaactgcatggtatctagactagaaacatgtattccctttgtaaatcctttgaacctttgattattcttactgtgaatgccgtccagtgtttttattctgcacataacaaaccagacctatgctcatgctaaaatttcttcacagagaaaaaag

SEQ ID NO: 44438 - DNA, 1518 bp, Zea Mays
cgattcctttgcggcgaggttacgctgcttgattgcggagtcaagtgggccgcgtgctccgcgcagttagatccacgctagtaacagttaccgcccgcacgcaatccttgtttttcaagcaagaaatggagctctccctcgttgggttgcagaatgctgggaagacgtcgctggtcaatgccgttgctacaggtggctacagtgaggacatgattccaacggtaggcttcaatatgcggaaagtcaccaagggaaatgtcacgattaagctttgggatcttggtgggcagcggagattccgcactatgtgggagcgctattgccgtggagtttctgctattctgtaattcctgctcttctaagatattaaatactgtagatttcatattcattgtaacatacaactcataacctccaaattggagcaatttatggttggtattcatttcttaaagataatcaaatccttggagatcaaaccagcattccatgtagcaaggagatattaaagtctagatacctgcctaacattatattcattttcataccctgattaagcatattttcttcccttacgagcaatgtagatatatttattctgcattctgtttattcctatatgcagatctagaaggatcatataattgtaagttggaaactaacacatgcagagagagagcaggatggcgccactgttgtgcgaggctttattatcaaacatataacaataaaggaactcaattacatttacagagaatatcatataatgcatatatcccttttctttattctcttgaatcataaaaacataaaccctatgtttgttcctgtgtttatcatgttatcttgtgtttgtatgaccgttgttaccgagatatttttcagttatccagccttactggctatccttgatggatcatggtttgttaattttgtgattaattgcaggtatgttgtggacgctgctgaccgagatagtgtcccaatcgcgaaaagtgagttgcatgatctgctgacgaaacagtctttggctgggattcccttgcttgtccttggcaacaaaattgacaagtcagaagcgctttcgaagcaggccttggttgatcaacttggactggaattgataaaggaccgggaggtttgttgctacatgatctcgtgtaaggattctgtgaacatagacgtcgtcatcgactggcttatcaagcactctagaacagcgaagtaggctttctgtgtgtttgtatcgcttgatgcacggtgttttatcttttgtgaatctgcgcttcccagaagcctggttccttggtccccatgttaaaagcggccaccttgtaatttatggtttctttggtgtcacagacgaactgcatggtatctagactagaaacatgtattccctttgtaaatcctttgaacctttgattattcttactgtgaatgccgtccagtgtttttattctgcacataacaaaccagacctatgctcatgctaaaatttcttcacagagaaaaaag

SEQ ID NO: 44439 - DNA, 942 bp, Zea Mays
gtgagttctctcggtattgggctagactgcgattcctttgcggcgaggttacgctgcttgattgcggagtcaagtgggccgcgtgctccgcgcagttagatccacgctagtaacagttaccgcccgcacgcaatccttgtttttcaagcaagaaatggagctctccctcgttgggttgcagaatgctgggaagacgtcgctggtcaatgccgttgctacaggtggctacagtgaggacatgattccaacggtaggcttcaatatgcggaaagtcaccaagggaaatgtcacgattaagctttgggatcttggtgggcagcggagattccgcactatgtgggagcgctattgccgtggagtttctgctattctgtatgttgtggacgctgctgaccgagatagtgtcccaatcgcgaaaagtgagttgcatgatctgctgacgaaacagtctttggctgggattcccttgcttgtccttggcaacaaaattgacaagtcagaagcgctttcgaagcaggccttggttgatcaacttggactggaattgataaaggaccgggaggtttgttgctacatgatctcgtgtaaggattctgtgaacatagacgtcgtcatcgactggcttatcaagcactctagaacagcgaagtaggctttctgtgtgtttgtatcgcttgatgcacggtgttttatcttttgtgaatctgcgcttcccagaagcctggttccttggtccccatgttaaaagcggccaccttgtaatttatggtttctttggtgtcacagacgaactgcatggtatctagactagaaacatgtattccctttgtaaatcctttgaacctttgattattcttactgtgaatgccgtccagtgtttttattctgcacataacaaaccagacctatgctcatgctaaaatttcttcacagagaaaaaag

SEQ ID NO: 44440 - DNA, 1491 bp, Zea Mays
ctccaatccattcatttggccccgcccctttcctttgtttcgctcaacagcttcgcggtgtctcggtcggagcaggacccttgtttttcaagcaagaaatggagctctccctcgttgggttgcagaatgctgggaagacgtcgctggtcaatgccgttgctacaggtggctacagtgaggacatgattccaacggtaggcttcaatatgcggaaagtcaccaagggaaatgtcacgattaagctttgggatcttggtgggcagcggagattccgcactatgtgggagcgctattgccgtggagtttctgctattctgtaattcctgctcttctaagatattaaatactgtagatttcatattcattgtaacatacaactcataacctccaaattggagcaatttatggttggtattcatttcttaaagataatcaaatccttggagatcaaaccagcattccatgtagcaaggagatattaaagtctagatacctgcctaacattatattcattttcataccctgattaagcatattttcttcccttacgagcaatgtagatatatttattctgcattctgtttattcctatatgcagatctagaaggatcatataattgtaagttggaaactaacacatgcagagagagagcaggatggcgccactgttgtgcgaggctttattatcaaacatataacaataaaggaactcaattacatttacagagaatatcatataatgcatatatcccttttctttattctcttgaatcataaaaacataaaccctatgtttgttcctgtgtttatcatgttatcttgtgtttgtatgaccgttgttaccgagatatttttcagttatccagccttactggctatccttgatggatcatggtttgttaattttgtgattaattgcaggtatgttgtggacgctgctgaccgagatagtgtcccaatcgcgaaaagtgagttgcatgatctgctgacgaaacagtctttggctgggattcccttgcttgtccttggcaacaaaattgacaagtcagaagcgctttcgaagcaggccttggttgatcaacttggactggaattgataaaggaccgggaggtttgttgctacatgatctcgtgtaaggattctgtgaacatagacgtcgtcatcgactggcttatcaagcactctagaacagcgaagtaggctttctgtgtgtttgtatcgcttgatgcacggtgttttatcttttgtgaatctgcgcttcccagaagcctggttccttggtccccatgttaaaagcggccaccttgtaatttatggtttctttggtgtcacagacgaactgcatggtatctagactagaaacatgtattccctttgtaaatcctttgaacctttgattattcttactgtgaatgccgtccagtgtttttattctgcacataacaaaccagacctatgctcatgctaaaatttcttcacagagaaaaaag

SEQ ID NO: 44441 - DNA, 936 bp, Zea Mays
ctccctccctccctccctccctctcatatcctctgccgacgccccttccgctccaatccattcatttggccccgcccctttcctttgtttcgctcaacagcttcgcggtgtctcggtcggagcaggacccttgtttttcaagcaagaaatggagctctccctcgttgggttgcagaatgctgggaagacgtcgctggtcaatgccgttgctacaggtggctacagtgaggacatgattccaacggtaggcttcaatatgcggaaagtcaccaagggaaatgtcacgattaagctttgggatcttggtgggcagcggagattccgcactatgtgggagcgctattgccgtggagtttctgctattctgtatgttgtggacgctgctgaccgagatagtgtcccaatcgcgaaaagtgagttgcatgatctgctgacgaaacagtctttggctgggattcccttgcttgtccttggcaacaaaattgacaagtcagaagcgctttcgaagcaggccttggttgatcaacttggactggaattgataaaggaccgggaggtttgttgctacatgatctcgtgtaaggattctgtgaacatagacgtcgtcatcgactggcttatcaagcactctagaacagcgaagtaggctttctgtgtgtttgtatcgcttgatgcacggtgttttatcttttgtgaatctgcgcttcccagaagcctggttccttggtccccatgttaaaagcggccaccttgtaatttatggtttctttggtgtcacagacgaactgcatggtatctagactagaaacatgtattccctttgtaaatcctttgaacctttgattattcttactgtgaatgccgtccagtgtttttattctgcacataacaaaccagacctatgctcatgctaaaatttcttcacagagaaaaaag

SEQ ID NO: 44442 - DNA, 1442 bp, Zea Mays
aaacggtgaaaggacactgatacaccctaacttgtttttcaagcaagaaatggagctctccctcgttgggttgcagaatgctgggaagacgtcgctggtcaatgccgttgctacaggtggctacagtgaggacatgattccaacggtaggcttcaatatgcggaaagtcaccaagggaaatgtcacgattaagctttgggatcttggtgggcagcggagattccgcactatgtgggagcgctattgccgtggagtttctgctattctgtaattcctgctcttctaagatattaaatactgtagatttcatattcattgtaacatacaactcataacctccaaattggagcaatttatggttggtattcatttcttaaagataatcaaatccttggagatcaaaccagcattccatgtagcaaggagatattaaagtctagatacctgcctaacattatattcattttcataccctgattaagcatattttcttcccttacgagcaatgtagatatatttattctgcattctgtttattcctatatgcagatctagaaggatcatataattgtaagttggaaactaacacatgcagagagagagcaggatggcgccactgttgtgcgaggctttattatcaaacatataacaataaaggaactcaattacatttacagagaatatcatataatgcatatatcccttttctttattctcttgaatcataaaaacataaaccctatgtttgttcctgtgtttatcatgttatcttgtgtttgtatgaccgttgttaccgagatatttttcagttatccagccttactggctatccttgatggatcatggtttgttaattttgtgattaattgcaggtatgttgtggacgctgctgaccgagatagtgtcccaatcgcgaaaagtgagttgcatgatctgctgacgaaacagtctttggctgggattcccttgcttgtccttggcaacaaaattgacaagtcagaagcgctttcgaagcaggccttggttgatcaacttggactggaattgataaaggaccgggaggtttgttgctacatgatctcgtgtaaggattctgtgaacatagacgtcgtcatcgactggcttatcaagcactctagaacagcgaagtaggctttctgtgtgtttgtatcgcttgatgcacggtgttttatcttttgtgaatctgcgcttcccagaagcctggttccttggtccccatgttaaaagcggccaccttgtaatttatggtttctttggtgtcacagacgaactgcatggtatctagactagaaacatgtattccctttgtaaatcctttgaacctttgattattcttactgtgaatgccgtccagtgtttttattctgcacataacaaaccagacctatgctcatgctaaaatttcttcacagagaaaaaag

SEQ ID NO: 44443 - DNA, 847 bp, Zea Mays
cggcgacggtaaacggtgaaaggacactgatacaccctaacttgtttttcaagcaagaaatggagctctccctcgttgggttgcagaatgctgggaagacgtcgctggtcaatgccgttgctacaggtggctacagtgaggacatgattccaacggtaggcttcaatatgcggaaagtcaccaagggaaatgtcacgattaagctttgggatcttggtgggcagcggagattccgcactatgtgggagcgctattgccgtggagtttctgctattctgtatgttgtggacgctgctgaccgagatagtgtcccaatcgcgaaaagtgagttgcatgatctgctgacgaaacagtctttggctgggattcccttgcttgtccttggcaacaaaattgacaagtcagaagcgctttcgaagcaggccttggttgatcaacttggactggaattgataaaggaccgggaggtttgttgctacatgatctcgtgtaaggattctgtgaacatagacgtcgtcatcgactggcttatcaagcactctagaacagcgaagtaggctttctgtgtgtttgtatcgcttgatgcacggtgttttatcttttgtgaatctgcgcttcccagaagcctggttccttggtccccatgttaaaagcggccaccttgtaatttatggtttctttggtgtcacagacgaactgcatggtatctagactagaaacatgtattccctttgtaaatcctttgaacctttgattattcttactgtgaatgccgtccagtgtttttattctgcacataacaaaccagacctatgctcatgctaaaatttcttcacagagaaaaaag

SEQ ID NO: 44444 - DNA, 1279 bp, Zea Mays
ggcacacgagaaaacaaaaggggagagaagacgtccaccgagctacgttcccaccgctgctggatcgatacagccgagtccaaaagaaaaaaaaaaaaccaccgcaagaatccatccaatccagataacgtcacaaacgactgattttgtgtccatgttgcctccacgcgacggatcgcatcgcctctggtttcgccacgccacggtcccgccagccgccccgaggccagtctaaagccagccgcgcagccgcccacgacacctctcgtctccctagtcctgttgtgccggacccctgcgccgcacccgcacggcaacagcatcgacctaggcccggtcccgtgtcgcttcgtagttcgtccccttccccgcgcccccagcagcagcggattcccctcgagagatccggcccttggcgcggtcgccggagagagcggcatggggctctgggactcgctcctcaactggctccggagcttgtttttcaagcaagaaatggagctctccctcgttgggttgcagaatgctgggaagacgtcgctggtcaatgccgttgctacaggtggctacagtgaggacatgattccaacggcttcaatatgcggaaagtcaccaagggaaatgtcacgattaagctttgggatcttggtgggcagcggagattccgcactatgtgggagcgctattgccgtggagtttctgctattctgtatgttgtggacgctgctgaccgagatagtgtcccaatcgcgaaaagtgagttgcatgatctgctgacgaaacagtctttggctgggattcccttgcttgtccttggcaacaaaattgacaagtcagaagcgctttcgaagcaggccttggttgatcaacttggactggaattgataaaggaccgggaggtttgttgctacatgatctcgtgtaaggattctgtgaacatagacgtcgtcatcgactggcttatcaagcactctagaacagcgaagtaggctttctgtgtgtttgtatcgcttgatgcacggtgttttatcttttgtgaatctgcgcttcccagaagcctggttccttggtccccatgttaaaagcggccaccttgtaatttatggtttctttggtgtcacagacgaactgcatggtatctagactagaaacatgtattccctttgtaaatcctttgaacctttgattattcttactgtgaatgccgtccagtgtttttattctgcacataacaaaccagacctatgctcatgctaaaatttcttcacagagaaaaaag

SEQ ID NO: 44445 - DNA, 2092 bp, Zea Mays
ggagtttgtgttcccgacctccagcctcctggaaccaggatagggacagagacggagccacggtcgcacagagcagtcttagctccggccacggccaccgggagtagctctggccatgaggacctcaacggctacctgtgctatcctccctccgcctacctgctcctcccgtagtttaccgctccgcagcttcatcggtctccggtggtccgccccccgtttccaggttagggagcgagctggtgcgtccgtagcggttgtcaatggcaagccgggatgcagcttcagactcggagtacctactttaaatgtttgtcaatctcgccaaaggtctgttgtcattagaaatgaacatgctcaaaatgctgaccttccacgaaaatattcaaaaagagagaagaaaccatttcctatcccagtgctggagttaaggcgccgagcaaaggagaggatgaaggcagcacaagggaaaccgaaacaaccaatgcctccaccaaaaaacggaatgttagtgcgtagacttataccagttgcatacaaagtgtacaatgcaagaattttgctgatcaacaacttgaagaggcttatgaaagtagtaccagtaaaaggctgcaagtaattcctttttcccattctttatctatattgttcattacaaactaatgaaactatgctattgttgtattttgatcagaaggacgtcattttcaataaaccatggtattgcagcgagatacatgttggatctgttggacatcctttccgaacatgccgaggaatgtcatcagatcaacgtagaggagaacatgactggggaagtactctagtggaggcagttttcttacccgtcgaagcctatcatctagaggaccgtctagggaatcgcattcctcatgatcagaggtttactgtaccccgcattcccgctctcgtggaactttgcatccaagctggagttgacctccccgagtaccccacaaagcgtcgaagaaagcctatcattaaaatcggaagaaaagagtttgttgatgcaaatgaagacgacctaccagaaccagagcctgacagatttaggcagccacttcttgaggaactacgttatgatgagattattgctccatctagcccagaggagacggtggctcttgccgaggagacacttgaagcgtgggaggccgttcgggacggagccttgaagcttatgaagggctatgcagtgagggtttgtggatactgccctgaggtgcatgttgggccaactggccacaaagcacggaactgtggagcttttaagcaccagcagaggaatggacaacatggatggcaagcagcggtgctcgatgacctgatacctcctaggtacgtgtggcacatgccggaatccggggaagaactgcagagggagctaaagaccttctacggtcaggcaccagcagttgttgagatgtgcattcagggtggcgcaaaagttccggagaagtataaagccactatgagactagacataggaatcccctctagtttgaaggaggctgaaatggtcgtctgatcctcccaatgatctgggcagatttgatcaacctgtaattgagttttttcctttgtgttgaaaagatgatgtcgtcaccaagctccatcgtggcttgacataggttgaatctgttagccaatgtgtatatatcagaactcagatgagatgattctcgttcggttttctttcagtccgcaacgatatgtttgtgtatttctttagaaacaaatgtgctatactgtgctgcacctacctcttgatcacaggcagtataattcatgccttgcaaaatagcataaggtaagctgaggctgatttgatactttctgtaggacaatatcatctaaacatataccccaaggccaattttgttccctgcaacttttggtactatctgggcatctacaaaggagtcagaaatctatttattgtacactatatcaggcacaaaaacaaaaaccattagcagtcttgaatagatccagctgaaacagatgaccccaacaaactgaaatgttaaattttatcagaagcataaggagtagtttacatttgcctacc

SEQ ID NO: 44446 - DNA, 2017 bp, Zea Mays
ggagtttgtgttcccgacctccagcctcctggaaccaggatagggacagagacggagccacggtcgcacagagcagtcttagctccggccacggccaccgggagtagctctggccatgaggacctcaacggctacctgtgctatcctccctccgcctacctgctcctcccgtagtttaccgctccgcagcttcatcggtctccggtggtccgccccccgtttccagttgctcagctgcggtgcctgtttaccgcaggttagggagcgagctggtgcgtccgtagcggttgtcaatggcaagccgggatgcagcttcagactcggagtacctactttaaatgtttgtcaatctcgccaaaggtctgttgtcattagaaatgaacatgctcaaaatgctgaccttccacgaaaatattcaaaaagagagaagaaaccatttcctatcccagtgctggagttaaggcgccgagcaaaggagaggatgaaggcagcacaagggaaaccgaaacaaccaatgcctccaccaaaaaacggaatgttagtgcgtagacttataccagttgcatacaaagtgtacaatgcaagaattttgctgatcaacaacttgaagaggcttatgaaagtagtaccagtaaaaggctgcaagtattgcagcgagatacatgttggatctgttggacatcctttccgaacatgccgaggaatgtcatcagatcaacgtagaggagaacatgactggggaagtactctagtggaggcagttttcttacccgtcgaagcctatcatctagaggaccgtctagggaatcgcattcctcatgatcagaggtttactgtaccccgcattcccgctctcgtggaactttgcatccaagctggagttgacctccccgagtaccccacaaagcgtcgaagaaagcctatcattaaaatcggaagaaaagagtttgttgatgcaaatgaagacgacctaccagaaccagagcctgacagatttaggcagccacttcttgaggaactacgttatgatgagattattgctccatctagcccagaggagacggtggctcttgccgaggagacacttgaagcgtgggaggccgttcgggacggagccttgaagcttatgaagggctatgcagtgagggtttgtggatactgccctgaggtgcatgttgggccaactggccacaaagcacggaactgtggagcttttaagcaccagcagaggaatggacaacatggatggcaagcagcggtgctcgatgacctgatacctcctaggtacgtgtggcacatgccggaatccggggaagaactgcagagggagctaaagaccttctacggtcaggcaccagcagttgttgagatgtgcattcagggtggcgcaaaagttccggagaagtataaagccactatgagactagacataggaatcccctctagtttgaaggaggctgaaatggtcgtctgatcctcccaatgatctgggcagatttgatcaacctgtaattgagttttttcctttgtgttgaaaagatgatgtcgtcaccaagctccatcgtggcttgacataggttgaatctgttagccaatgtgtatatatcagaactcagatgagatgattctcgttcggttttctttcagtccgcaacgatatgtttgtgtatttctttagaaacaaatgtgctatactgtgctgcacctacctcttgatcacaggcagtataattcatgccttgcaaaatagcataaggtaagctgaggctgatttgatactttctgtaggacaatatcatctaaacatataccccaaggccaattttgttccctgcaacttttggtactatctgggcatctacaaaggagtcagaaatctatttattgtacactatatcaggcacaaaaacaaaaaccattagcagtcttgaatagatccagctgaaacagatgaccccaacaaactgaaatgttaaattttatcagaagcataaggagtagtttacatttgcctacc

SEQ ID NO: 44447 - DNA, 1919 bp, Zea Mays
ggagtttgtgttcccgacctccagcctcctggaaccaggatagggacagagacggagccacggtcgcacagagcagtcttagctccggccacggccaccgggagtagctctggccatgaggacctcaacggctacctgtgctatcctccctccgcctacctgctcctcccgtagtttaccgctccgcagcttcatcggtctccggtggtccgccccccgtttccagagtacctactttaaatgtttgtcaatctcgccaaaggtctgttgtcattagaaatgaacatgctcaaaatgctgaccttccacgaaaatattcaaaaagagagaagaaaccatttcctatcccagtgctggagttaaggcgccgagcaaaggagaggatgaaggcagcacaagggaaaccgaaacaaccaatgcctccaccaaaaaacggaatgttagtgcgtagacttataccagttgcatacaaagtgtacaatgcaagaattttgctgatcaacaacttgaagaggcttatgaaagtagtaccagtaaaaggctgcaagtattgcagcgagatacatgttggatctgttggacatcctttccgaacatgccgaggaatgtcatcagatcaacgtagaggagaacatgactggggaagtactctagtggaggcagttttcttacccgtcgaagcctatcatctagaggaccgtctagggaatcgcattcctcatgatcagaggtttactgtaccccgcattcccgctctcgtggaactttgcatccaagctggagttgacctccccgagtaccccacaaagcgtcgaagaaagcctatcattaaaatcggaagaaaagagtttgttgatgcaaatgaagacgacctaccagaaccagagcctgacagatttaggcagccacttcttgaggaactacgttatgatgagattattgctccatctagcccagaggagacggtggctcttgccgaggagacacttgaagcgtgggaggccgttcgggacggagccttgaagcttatgaagggctatgcagtgagggtttgtggatactgccctgaggtgcatgttgggccaactggccacaaagcacggaactgtggagcttttaagcaccagcagaggaatggacaacatggatggcaagcagcggtgctcgatgacctgatacctcctaggtacgtgtggcacatgccggaatccggggaagaactgcagagggagctaaagaccttctacggtcaggcaccagcagttgttgagatgtgcattcagggtggcgcaaaagttccggagaagtataaagccactatgagactagacataggaatcccctctagtttgaaggaggctgaaatggtcgtctgatcctcccaatgatctgggcagatttgatcaacctgtaattgagttttttcctttgtgttgaaaagatgatgtcgtcaccaagctccatcgtggcttgacataggttgaatctgttagccaatgtgtatatatcagaactcagatgagatgattctcgttcggttttctttcagtccgcaacgatatgtttgtgtatttctttagaaacaaatgtgctatactgtgctgcacctacctcttgatcacaggcagtataattcatgccttgcaaaatagcataaggtaagctgaggctgatttgatactttctgtaggacaatatcatctaaacatataccccaaggccaattttgttccctgcaacttttggtactatctgggcatctacaaaggagtcagaaatctatttattgtacactatatcaggcacaaaaacaaaaaccattagcagtcttgaatagatccagctgaaacagatgaccccaacaaactgaaatgttaaattttatcagaagcataaggagtagtttacatttgcctacc

SEQ ID NO: 44448 - DNA, 1135 bp, Zea Mays
aaatattaaagaagtacaagaatacctttctaaagaatttcttaaagcctgagacagtgcagctgctacctctttcgagttgcctggggctacctataaaccatttgaagcaactataaagcaaaataagaagcagtagaaagatgcaatacataagcaccggaaccttgtgtattttaagatatcacaataaaaataaatttcaaccagaaccatcgcaatggaagctggttggcagggtgtttgcagtgcacctagcgtcgtgtggctgtgtctgcatcggtgtgagcatgggaatgcatatctgcggtggccagacgttgggggcggcgcgggggagcaggtgttgtggaaagggtagcaagggcaccggctcgaaggggtggtcagggggcagggtgaagtaggtgcgtacggtgcctcgacgaggagtatggtgcgacagtcgaggttgtggaagttgtatggctgggggggaggaatctccaccgctggctgtggatgagcctacgaccggagcgcggtcgccggcgacgcggggttgctggcatgtggatgagtggatctggcgcgagaggtaccccgggtggcgcctggagtctgctgtgtaggcatacgttcccaacatctcgttctaggataccaagttccactcaggcatcacatcgaagaactacctcacccgacctaggttgccggagatagagtggcagatctgagacgttccacatacgcaccgtcctccttctcccgtagctcgtcctccatggcggcgtccacgtcgatgggcgcgtcggacgcgaagatcccgttcggtctatggggggaggcggttaggtcggaggcggttagggaggtggagcggaggcagaggggagatggtgagggcgccgagcatggagatggaggaagggagtgggtgtgggaggggagaggggcaggacggcggtgcgggggtggaaggggcgctgggggtgggggcactcctggatgaggatggcgggcgtcatagggcctgcgtggcatgcggctggatcgctggagcttgctcgcggatggtgcggatgggtgatttgggcaaaaggctgggttacgggaacgagggcaggcggacgcgcccatgcgtagaggagac

SEQ ID NO: 44449 - DNA, 2648 bp, Zea Mays
cacagtatgaagcttctgctgtacctctttctcaaactcgaggagaaaacgacatcttttattgacctgaaatagaatagttagaaaagtaaggaaaaatggtaggcctcctctagatacgaccatatgtatttaaacaacctggtggaggataggggcatactgcaaattttttatgtcttccccaggaaagaagattggaacagtaaatgtctctggcaaattggcaatatatggccaccaaaatgaatcagatttggccctttcttgaagcaacctcaagcccagcttcatagcccatagttcatctgtgaaaatgattgaacttattccttgtttgaatttacaaatagaaagaaatccccttatatatccaaaagaggggttgtggtaaaaatggcacatttcagcatccgtaaactcaacaacattgtagcatcagttacacacagattatcgaggaatacaataataagaaaaccttaacacaatcttgttcaaatcaatatactatctgttgggggcatactctgccaaaggtcctcataaagcttttacttcggtgtgaacaaatgtgtttcaggtatacagataacggcgaacgaagctagccttcagctgaagctgcccagaatagccgaagaaatgcggagagaagcttcgtctagcacatatggacggcaaggaagaaagtcgaagctgcaagcttctgcacgaacaagctttcgggtgagaagtgacgaagcaaatgaggtctgagacttacgcaataaggaagaaaaagaaaggacaacaatacccttatatcattgtaaatcatgtgtgtaaactttgagggcatgcttgtaattttatacaaacttgtacttctcccctataaataggtaaacagtgccctgcataaattcaccttttgaagggcccaagcttaatcttgcttagccttcgaagtactttcgagctatcttgtgtcaagaagccgaaggtatgtttgtaaattcttgtaatatgatagaggataaaatggattatgctaagacgtatgagatgagttccacatttcattactcattattatctcaattgatgttatttcattcacatatttttaaggacattcgtcctcgaattaacacttcgaagaaggattacttgaggacgaaggtccaggcttcttaacttgtgttgccttgttttttatgtcatgtaccaatcgaaaacaagtattcaacactatctctgaaaaatatatgggtaaagaagcatcaaactaagaaatgcctgtaattccattctgatcaatgaaaatactccctccatcacaaaatattagctgttttagcattttaatagattcatacaatacttaatgtatgtgtcttatatatatgtctagattcattgacatccatttgaatatagacataaaattcaaggtctacaacgattaatattttgggacggagggagtatgacgtttatcctcaaccactttcgaagtacaaaaactgagttgattcaatggaaaagagtacacactgcagatttaaactacacctactcatatacttactagggagctaattctaacaattttgggttcattccaacaatttaaacatatccacaagccccgcaacattgttataagcatgaggattcagttagtgatttcacattttgttcggggactactcctccgaaggtcctcaaaacacttacccagtaacagttttttattttgtttcaaaagcagaactaatgccgaaggtggccttcaatcggagttatcaatatacacattccagaaagaggaagcttcgaacaaataaccttgtgctcatgaacgacgaagcaagaaagtaccatagggcaccttcggagtttagtctacaagtcgaaagagggaaaggacagcttcgcccttggcatgtaaaataggctaaatgtataggcctaaggtcacaattgtaatttcaccaaagttgtaccccacgactataaaatataaatagaggaacaatgctatgtataagggacctttttcgagccttgagcactagatcgctcaaccttcgaagataccttcaggctctagcttgtgtaaagccgaggaacacttgtaatcggaatgaaataaatgcaaatgtatacatctagatgagtgatatattttgctcttcatgatttacacaatgttttcattacctatattgcaatatcttattaccttctccctttaatagtcgtagaagagttagttaaaaggagatgcttctaatttaataacttgtgttgtcttattttttatatcttttagagatcaaaaacgagtaaccaacacagttgatggcttccaacaccaaacaagcccataaaaacaattcagggcaaaccctggatgacataatctgatattcaaaattgacactcttatattacaacaacattatcatatactataacagaaaaactgttcactgctcccaagtgagaaattcaatcgtgaccaagtgtataaattagcatgaaagctcaatttcagtcacttcaaaatcattatagaggctcaaagcattagcaaccactaatcagaaaggacattacccgggacttgttgggcgagctgcacaagcacgtcgtccgcg

SEQ ID NO: 44450 - DNA, 1844 bp, Zea Mays
tttacccggctggacgccaaccaactggtttcccgtccttggtcgtcgccattatatagccgccctcctcccgggccgatctcttcgtctcaatcccacgccacatcctcccctccttcctccttgggttcccagcccgtgcgcccgcctgtcgcagtcgcaccgcagccgccggccatggcctgcctcaccgacctcgtcaacctcaacctctcggacaccacagagaagatcatcgccgagtacatatggatcggtggatctggcatggatctcaggagcaaagccagggtaagataacagattcccagcactgggaggaccccccgggatactggtggttgtgactcgtcgtcacctatcacttatccctgagctcatccgctgatctgttatttggcttatacatacatcagagctctgctcaccactatcactgcaattatttttgtttctctgttctacttcgtagtaaaatcatactgatctggttggttctggtgcagaccctcccgggcccggtgaccgatcccagcaagctgcccaagtggaactacgacggctccagcaccggccaggcccccggcgaggacagcgaggtcatcctgtacccgcaggccatcttcaaggacccattcaggaggggcaacaacatccttgtcatgtgcgattgctacaccccagctggcgagccaattcccaccaacaagaggtacagcgccgccaagatcttcagcagccttgaggtcgctgccgaggagccctggtatggtatcgagcaggagtacaccctccttcagaaggacaccaactggcccctcgggtggcctattggcggcttccctggccctcagggtccttactactgtggaatcggcgcggagaaatcgttcgggcgtgacatagtcgacgcccactacaaggcctgcctgtacgcaggcatcaacatcagtggcatcaacggggaggtcatgccggggcagtgggagttccaggtcggaccgtccgtcggcatctcttcgggcgatcaggtgtgggttgctcgctacattcttgagaggatcaccgagatcgccggcgtggtggtgacgttcgacccgaagccgatcccgggcgactggaacggcgcgggcgcccacaccaactacagcaccgagtccatgaggaaggagggcgggtacgaggtgatcaaggcggccatcgagaagctgaagctgcggcacaaggagcacatcgcggcctacggcgagggcaacgagcgccggctcaccggcaggcacgagaccgccgacatcaacaccttcagctggggagtcgccaaccgtggcgcgtcggtgcgcgtgggccgcgagacggagcagaacggcaagggctacttcgaggaccgccggccggcgtccaacatggacccctacgtggtcacctccatgatcgccgagaccaccatcgtctggaagccctgaggcaccccgtggccgtgtcgtgtcggtttgctccgcgtacggcgctggccgttgcatcgcagggcccagcggttgcgcaactattttcccttccccgttctgtttgcttgtactactactctaccgctagtcctgcatagcattttagctagaacacaacaacagccaaaaaaaagtattgttgcttgcttcgacgcttgccaccacttccattccatgccgtccgtccgcttccttcctgtgtaatcctcctccaataatagacgtgccatgttgcatcctctattcctctgcattgtataaaagtggtgtaattcttttgctacgcctccaatgtctgtggcttttagctgctgatgcgatgtcagattctgtcacgga

SEQ ID NO: 44451 - DNA, 1576 bp, Zea Mays
cttttctatcttacttagagcagcttgtgttcgctgtttttaatggtgaggcctggggttatcttggtagtcggaaattcttacaggaattagatgaaggcgctgcttctgtgaatggaattagtagcttaaagattgaccaggtactggagattggttctgttggcaaggctatacttgaggaatatccatcattttatgtgcatgctgaagggaatccatcagcttcaaaggaaatattagatgcactgcaaagtgccagcaagtctcttggttctgataatgttaaagtaaaacaagcagcttcatcaaatcctggtgttccaccatcttcattaatgtcattcataaggaagaacatgtcaacttctggagttgtgttggaggattttgattcccacttctccaatagattttatcatagctatctggataactctgtaaacatcaattcctcgtcaatagctgcagccgccgctttggttgcgaggtcgatgtatattcttgctagtgatgactcagttgttgaccttataacactaaacactataaaagtgaacgtttcattggtcgaagaacttattggatgcctgcttacttgcaatcctggtctttcgtgcggccttgtgaaaagattcatttctccaagcaatccctgcccaagtcattatgttggtgtttttctggatgacccatctggcacgcagcttccttcatatgcagatgacacgtctcggtttgtatggaactttttggcagacagaactaattcagcaggcaataaaagctcatgtactggaaagtgtggtgatgaaggtgaagtatgtgtaggggcagaggtggagggtggaggtagatgtgttgtatctacaaccaggtatgttcctgcttattcaactcgggtgaagtttgaggacaatgcatggcacgttcttccagcgaactcgtcagatccaatgggtgctgcagatcccgtgtggactgaaagcttctggaacactattggcctcagggtctacgccgtgcaagatccagcttacgattggcttattcttcttgccgggctcggaatcactgctgcatcttattgcgctgtacactttggcagagcatacatttcaaaggtggcgaagcttgactgaagcgtcagtgagctgccccactgataatgggtatctagagctggaaatagaactaattaggctggcaattcgtagaacattagcagcgcatgagacagggtgattaagctgcgagaaagccgcaataaattatgagaaccaagcacacccgaagcaagtcctccatcattatgcggacgtccaggtcgatgtaatattaatgaaattgtgaccgtgttacgttttgtgttgaactggtactggtaggtaggttatgacacgcctctagctctagttggtggatgtttccggtaacgtgtttttctgtttgtggatcctgcctactcagttttggttgcgtataagcctgcccctcatgaatcctatgagtttgtgaacaccaactattatactggtgacttgcattcgcatgatgattggatcttgtatcgtgt

SEQ ID NO: 44452 - DNA, 2205 bp, Zea Mays
gtttatatgtgcgtgtgaaatgtgaggtgttgaagtttgcccttttgccttggtactaaccgaaggaaggtatccaatgatccagaacttcaccagaaggtggcaggtgtattggttgagtcaaatggtgtcaacaatgacttacaagagctgtctcctgatagaaaatttccacaagatgattttgcaccctactcaaatcacagccatgattggaatcctgctggatcaggtatcatgtggaacaaatataattttcctgtatttctactttcagaagagagtacaaacactcttcaaaagaaaaaaatgagaagactggcaatggatataaagcaaatgttgcagaattcgaccttgttatgcagacaaccaaagctcaaacacatgattcagcatcctgcctcaaagaacaatcatgcttgcccttaggtggacacagggcagtgtatggacttcattaccgccacttaataacggatctacagagcatccgaaacctttaatattggctattgcgtctcaagactctgcatcattttttcgggaccgtagtcttggttcagattctcccatatctggattgattgctttgctcactgctgttgatgctctttctcacattcatggtctaagcaagcttaagaaacagcttgtgttcgctgtttttaatggtgaggcctggggttatcttggtagtcggaaattcttacaggaattagatgaaggcgctgcttctgtgaatggaattagtagcttaaagattgaccaggtactggagattggttctgttggcaaggctatacttgaggaatatccatcattttatgtgcatgctgaagggaatccatcagcttcaaaggaaatattagatgcactgcaaagtgccagcaagtctcttggttctgataatgttaaagtaaaacaagcagcttcatcaaatcctggtgttccaccatcttcattaatgtcattcataaggaagaacatgtcaacttctggagttgtgttggaggattttgattcccacttctccaatagattttatcatagctatctggataactctgtaaacatcaattcctcgtcaatagctgcagccgccgctttggttgcgaggtcgatgtatattcttgctagtgatgactcagttgttgaccttataacactaaacactataaaagtgaacgtttcattggtcgaagaacttattggatgcctgcttacttgcaatcctggtctttcgtgcggccttgtgaaaagattcatttctccaagcaatccctgcccaagtcattatgttggtgtttttctggatgacccatctggcacgcagcttccttcatatgcagatgacacgtctcggtttgtatggaactttttggcagacagaactaattcagcaggcaataaaagctcatgtactggaaagtgtggtgatgaaggtgaagtatgtgtaggggcagaggtggagggtggaggtagatgtgttgtatctacaaccaggtatgttcctgcttattcaactcgggtgaagtttgaggacaatgcatggcacgttcttccagcgaactcgtcagatccaatgggtgctgcagatcccgtgtggactgaaagcttctggaacactattggcctcagggtctacgccgtgcaagatccagcttacgattggcttattcttcttgccgggctcggaatcactgctgcatcttattgcgctgtacactttggcagagcatacatttcaaaggtggcgaagcttgactgaagcgtcagtgagctgccccactgataatgggtatctagagctggaaatagaactaattaggctggcaattcgtagaacattagcagcgcatgagacagggtgattaagctgcgagaaagccgcaataaattatgagaaccaagcacacccgaagcaagtcctccatcattatgcggacgtccaggtcgatgtaatattaatgaaattgtgaccgtgttacgttttgtgttgaactggtactggtaggtaggttatgacacgcctctagctctagttggtggatgtttccggtaacgtgtttttctgtttgtggatcctgcctactcagttttggttgcgtataagcctgcccctcatgaatcctatgagtttgtgaacaccaactattatactggtgacttgcattcgcatgatgattggatcttgtatcgtgt

SEQ ID NO: 44453 - DNA, 2210 bp, Zea Mays
tgagtttatatgtgcgtgtgaaatgtgaggtgttgaagtttgcccttttgccttggtactaaccgaaggaaggtatccaatgatccagaacttcaccagaaggtggcaggtgtattggttgagtcaaatggtgtcaacaatgacttacaagagctgtctcctgatagaaaatttccacaagatgattttgcaccctactcaaatcacagccatgattggaatcctgctggatcaggtatcatgtggaacaaatataattttcctgtatttctactttcagaagagagtacaaacactcttcaaaagatttcagaaaaaaatgagaagactggcaatggatataaagcaaatgttgcagaattcgaccttgttatgcagacaaccaaagctcaaacacatgattcagcatcctgcctcaaagaacaatcatgcttgcccttaggtggacacagtgtatggacttcattaccgccacttaataacggatctacagagcatccgaaacctttaatattggctattgcgtctcaagactctgcatcattttttcgggaccgtagtcttggttcagattctcccatatctggattgattgctttgctcactgctgttgatgctctttctcacattcatggtctaagcaagcttaagaaacagcttgtgttcgctgtttttaatggtgaggcctggggttatcttggtagtcggaaattcttacaggaattagatgaaggcgctgcttctgtgaatggaattagtagcttaaagattgaccaggtactggagattggttctgttggcaaggctatacttgaggaatatccatcattttatgtgcatgctgaagggaatccatcagcttcaaaggaaatattagatgcactgcaaagtgccagcaagtctcttggttctgataatgttaaagtaaaacaagcagcttcatcaaatcctggtgttccaccatcttcattaatgtcattcataaggaagaacatgtcaacttctggagttgtgttggaggattttgattcccacttctccaatagattttatcatagctatctggataactctgtaaacatcaattcctcgtcaatagctgcagccgccgctttggttgcgaggtcgatgtatattcttgctagtgatgactcagttgttgaccttataacactaaacactataaaagtgaacgtttcattggtcgaagaacttattggatgcctgcttacttgcaatcctggtctttcgtgcggccttgtgaaaagattcatttctccaagcaatccctgcccaagtcattatgttggtgtttttctggatgacccatctggcacgcagcttccttcatatgcagatgacacgtctcggtttgtatggaactttttggcagacagaactaattcagcaggcaataaaagctcatgtactggaaagtgtggtgatgaaggtgaagtatgtgtaggggcagaggtggagggtggaggtagatgtgttgtatctacaaccaggtatgttcctgcttattcaactcgggtgaagtttgaggacaatgcatggcacgttcttccagcgaactcgtcagatccaatgggtgctgcagatcccgtgtggactgaaagcttctggaacactattggcctcagggtctacgccgtgcaagatccagcttacgattggcttattcttcttgccgggctcggaatcactgctgcatcttattgcgctgtacactttggcagagcatacatttcaaaggtggcgaagcttgactgaagcgtcagtgagctgccccactgataatgggtatctagagctggaaatagaactaattaggctggcaattcgtagaacattagcagcgcatgagacagggtgattaagctgcgagaaagccgcaataaattatgagaaccaagcacacccgaagcaagtcctccatcattatgcggacgtccaggtcgatgtaatattaatgaaattgtgaccgtgttacgttttgtgttgaactggtactggtaggtaggttatgacacgcctctagctctagttggtggatgtttccggtaacgtgtttttctgtttgtggatcctgcctactcagttttggttgcgtataagcctgcccctcatgaatcctatgagtttgtgaacaccaactattatactggtgacttgcattcgcatgatgattggatcttgtatcgtgt

SEQ ID NO: 44454 - DNA, 3107 bp, Zea Mays
cgaaaacgaacagcccctcgctttagattgccgcaagttcccccattcctgtagatcgccggcccctcgctcggctcggccatgtcggccggctccacggcgtccctcctcgcggccgtcatctgccttgccctcgccgtgcttgctcccgtcgttcctggagatggtgccacattggaatcagttccagaccttgtgaaggcaatgtacctaaacgttgaaagcttcccttgtgtgaggctgttgaatctttctggtgaaattggctgttctaatcctggaagtgagaaggtcattgcaccaattgtaagacttagaaaaggcagtgatcaattggttcaaccatctactattctcctttccttagatcagatgtcagatttctttctgagggtatccaatgatccagaacttcaccagaaggtggcaggtgtattggttgagtcaaatggtgtcaacaatgacttacaagagctgtctcctgatagaaaatttccacaagatgattttgcaccctactcaaatcacagccatgattggaatcctgctggatcaggtatcatgtggaacaaatataattttcctgtatttctactttcagaagagagtacaaacactcttcaaaagatttcagaaaaaaatgagaagactggcaatggatataaagcaaatgttgcagaattcgaccttgttatgcagacaaccaaagctcaaacacatgattcagcatcctgcctcaaagaacaatcatgcttgcccttaggtggacacagtgtatggacttcattaccgccacttaataacggatctacagagcatccgaaacctttaatattggctattgcgtctcaagactctgcatcattttttcgggaccgtagtcttggttcagattctcccatatctggattgattgctttgctcactgctgttgatgctctttctcacattcatggtctaagcaagcttaagaaacaggtatgatatgactactgaaattttgtttgttagtcgcttccataatattatgctggatattcttttctatcttacttagagcaggtatgcagcagatcatatccaccattttatctttacctcttttatacttgttgtaaggttcaagctactggtatctttgttaatgttctcattatcttataccctagcttacacatggagtggtacatttaatatggttcttcatatcactctcactgaatttacgtgtgattggtttctgaagaaacatcttcctgacattttcccttaattcttatacagcttgtgttcgctgtttttaatggtgaggcctggggttatcttggtagtcggaaattcttacaggaattagatgaaggcgctgcttctgtgaatggaattagtagcttaaagattgaccaggtgagtgccagaaaaattaatacaggcagagacagcctcagactacagttaatcattttttatttttcaaacatatataaatcctttttttcgtcacttttttgggtattgtgtcatgatatttgctttctgcagagtttgtctgccaattctaatgaattctcttttcgaaattttactgacagctttgaatcacaagcgatatacatatctgtttgaataccattcccatcctcacttgttatttgagttctctttggacatatttaggtactggagattggttctgttggcaaggctatacttgaggaatatccatcattttatgtgcatgctgaagggaatccatcagcttcaaaggaaatattagatgcactgcaaagtgccagcaagtctcttggttctgataatgttaaagtaaaacaagcagcttcatcaaatcctggtgttccaccatcttcattaatgtcattcataaggaagaacatgtcaacttctggagttgtgttggaggattttgattcccacttctccaatagattttatcatagctatctggataactctgtaaacatcaattcctcgtcaatagctgcagccgccgctttggttgcgaggtcgatgtatattcttgctagtgatgactcagttgttgaccttataacactaaacactataaaagtgaacgtttcattggtcgaagaacttattggatgcctgcttacttgcaatcctggtctttcgtgcggccttgtgaaaagattcatttctccaagcaatccctgcccaagtcattatgttggtgtttttctggatgacccatctggcacgcagcttccttcatatgcagatgacacgtctcggtttgtatggaactttttggcagacagaactaattcagcaggcaataaaagctcatgtactggaaagtgtggtgatgaaggtgaagtatgtgtaggggcagaggtggagggtggaggtagatgtgttgtatctacaaccaggtatgttcctgcttattcaactcgggtgaagtttgaggacaatgcatggcacgttcttccagcgaactcgtcagatccaatgggtgctgcagatcccgtgtggactgaaagcttctggaacactattggcctcagggtctacgccgtgcaagatccagcttacgattggcttattcttcttgccgggctcggaatcactgctgcatcttattgcgctgtacactttggcagagcatacatttcaaaggtggcgaagcttgactgaagcgtcagtgagctgccccactgataatgggtatctagagctggaaatagaactaattaggctggcaattcgtagaacattagcagcgcatgagacagggtgattaagctgcgagaaagccgcaataaattatgagaaccaagcacacccgaagcaagtcctccatcattatgcggacgtccaggtcgatgtaatattaatgaaattgtgaccgtgttacgttttgtgttgaactggtactggtaggtaggttatgacacgcctctagctctagttggtggatgtttccggtaacgtgtttttctgtttgtggatcctgcctactcagttttggttgcgtataagcctgcccctcatgaatcctatgagtttgtgaacaccaactattatactggtgacttgcattcgcatgatgattggatcttgtatcgtgt

SEQ ID NO: 44455 - DNA, 2529 bp, Zea Mays
cgaaaacgaacagcccctcgctttagattgccgcaagttcccccattcctgtagatcgccggcccctcgctcggctcggccatgtcggccggctccacggcgtccctcctcgcggccgtcatctgccttgccctcgccgtgcttgctcccgtcgttcctggagatggtgccacattggaatcagttccagaccttgtgaaggcaatgtacctaaacgttgaaagcttcccttgtgtgaggctgttgaatctttctggtgaaattggctgttctaatcctggaagtgagaaggtcattgcaccaattgtaagacttagaaaaggcagtgatcaattggttcaaccatctactattctcctttccttagatcagatgtcagatttctttctgagggtatccaatgatccagaacttcaccagaaggtggcaggtgtattggttgagtcaaatggtgtcaacaatgacttacaagagctgtctcctgatagaaaatttccacaagatgattttgcaccctactcaaatcacagccatgattggaatcctgctgtatcatgtggaacaaatataattttcctgtatttctactttcagaagagagtacaaacactcttcaaaagatttcagaaaaaaatgagaagactggcaatggatataaagcaaatgttgcagaattcgaccttgttatgcagacaaccaaagctcaaacacatgattcagcatcctgcctcaaagaacaatcatgcttgcccttaggtggacacagggcagtgtatggacttcattaccgccacttaataacggatctacagagcatccgaaacctttaatattggctattgcgtctcaagactctgcatcattttttcgggaccgtagtcttggttcagattctcccatatctggattgattgctttgctcactgctgttgatgctctttctcacattcatggtctaagcaagcttaagaaacagcttgtgttcgctgtttttaatggtgaggcctggggttatcttggtagtcggaaattcttacaggaattagatgaaggcgctgcttctgtgaatggaattagtagcttaaagattgaccaggtactggagattggttctgttggcaaggctatacttgaggaatatccatcattttatgtgcatgctgaagggaatccatcagcttcaaaggaaatattagatgcactgcaaagtgccagcaagtctcttggttctgataatgttaaagtaaaacaagcagcttcatcaaatcctggtgttccaccatcttcattaatgtcattcataaggaagaacatgtcaacttctggagttgtgttggaggattttgattcccacttctccaatagattttatcatagctatctggataactctgtaaacatcaattcctcgtcaatagctgcagccgccgctttggttgcgaggtcgatgtatattcttgctagtgatgactcagttgttgaccttataacactaaacactataaaagtgaacgtttcattggtcgaagaacttattggatgcctgcttacttgcaatcctggtctttcgtgcggccttgtgaaaagattcatttctccaagcaatccctgcccaagtcattatgttggtgtttttctggatgacccatctggcacgcagcttccttcatatgcagatgacacgtctcggtttgtatggaactttttggcagacagaactaattcagcaggcaataaaagctcatgtactggaaagtgtggtgatgaaggtgaagtatgtgtaggggcagaggtggagggtggaggtagatgtgttgtatctacaaccaggtatgttcctgcttattcaactcgggtgaagtttgaggacaatgcatggcacgttcttccagcgaactcgtcagatccaatgggtgctgcagatcccgtgtggactgaaagcttctggaacactattggcctcagggtctacgccgtgcaagatccagcttacgattggcttattcttcttgccgggctcggaatcactgctgcatcttattgcgctgtacactttggcagagcatacatttcaaaggtggcgaagcttgactgaagcgtcagtgagctgccccactgataatgggtatctagagctggaaatagaactaattaggctggcaattcgtagaacattagcagcgcatgagacagggtgattaagctgcgagaaagccgcaataaattatgagaaccaagcacacccgaagcaagtcctccatcattatgcggacgtccaggtcgatgtaatattaatgaaattgtgaccgtgttacgttttgtgttgaactggtactggtaggtaggttatgacacgcctctagctctagttggtggatgtttccggtaacgtgtttttctgtttgtggatcctgcctactcagttttggttgcgtataagcctgcccctcatgaatcctatgagtttgtgaacaccaactattatactggtgacttgcattcgcatgatgattggatcttgtatcgtgt

SEQ ID NO: 44456 - DNA, 2837 bp, Zea Mays
cgaaaacgaacagcccctcgctttagattgccgcaagttcccccattcctgtagatcgccggcccctcgctcggctcggccatgtcggccggctccacggcgtccctcctcgcggccgtcatctgccttgccctcgccgtgcttgctcccgtcgttcctggagatggtgccacattggaatcagttccagaccttgtgaaggcaatgtacctaaacgttgaaagcttcccttgtgtgaggctgttgaatctttctggtgaaattggctgttctaatcctggaagtgagaaggtcattgcaccaattgtaagacttagaaaaggcagtgatcaattggttcaaccatctactattctcctttccttagatcagatgtcagatttctttctgagggtatccaatgatccagaacttcaccagaaggtggcaggtgtattggttgagtcaaatggtgtcaacaatgacttacaagagctgtctcctgatagaaaatttccacaagatgattttgcaccctactcaaatcacagccatgattggaatcctgctggatcaggtatcatgtggaacaaatataattttcctgtatttctactttcagaagagagtacaaacactcttcaaaagatttcagaaaaaaatgagaagactggcaatggatataaagcaaatgttgcagaattcgaccttgttatgcagacaaccaaagctcaaacacatgattcagcatcctgcctcaaagaacaatcatgcttgcccttaggtggacacagtgtatggacttcattaccgccacttaataacggatctacagagcatccgaaacctttaatattggctattgcgtctcaagactctgcatcattttttcgggaccgtagtcttggttcagattctcccatatctggattgattgctttgctcactgctgttgatgctctttctcacattcatggtctaagcaagcttaagaaacaggtatgatatgactactgaaattttgtttgttagtcgcttccataatattatgctggatattcttttctatcttacttagagcaggtatgcagcagatcatatccaccattttatctttacctcttttatacttgttgtaaggttcaagctactggtatctttgttaatgttctcattatcttataccctagcttacacatggagtggtacatttaatatggttcttcatatcactctcactgaatttacgtgtgattggtttctgaagaaacatcttcctgacattttcccttaattcttatacagcttgtgttcgctgtttttaatggtgaggcctggggttatcttggtagtcggaaattcttacaggaattagatgaaggcgctgcttctgtgaatggaattagtagcttaaagattgaccaggtactggagattggttctgttggcaaggctatacttgaggaatatccatcattttatgtgcatgctgaagggaatccatcagcttcaaaggaaatattagatgcactgcaaagtgccagcaagtctcttggttctgataatgttaaagtaaaacaagcagcttcatcaaatcctggtgttccaccatcttcattaatgtcattcataaggaagaacatgtcaacttctggagttgtgttggaggattttgattcccacttctccaatagattttatcatagctatctggataactctgtaaacatcaattcctcgtcaatagctgcagccgccgctttggttgcgaggtcgatgtatattcttgctagtgatgactcagttgttgaccttataacactaaacactataaaagtgaacgtttcattggtcgaagaacttattggatgcctgcttacttgcaatcctggtctttcgtgcggccttgtgaaaagattcatttctccaagcaatccctgcccaagtcattatgttggtgtttttctggatgacccatctggcacgcagcttccttcatatgcagatgacacgtctcggtttgtatggaactttttggcagacagaactaattcagcaggcaataaaagctcatgtactggaaagtgtggtgatgaaggtgaagtatgtgtaggggcagaggtggagggtggaggtagatgtgttgtatctacaaccaggtatgttcctgcttattcaactcgggtgaagtttgaggacaatgcatggcacgttcttccagcgaactcgtcagatccaatgggtgctgcagatcccgtgtggactgaaagcttctggaacactattggcctcagggtctacgccgtgcaagatccagcttacgattggcttattcttcttgccgggctcggaatcactgctgcatcttattgcgctgtacactttggcagagcatacatttcaaaggtggcgaagcttgactgaagcgtcagtgagctgccccactgataatgggtatctagagctggaaatagaactaattaggctggcaattcgtagaacattagcagcgcatgagacagggtgattaagctgcgagaaagccgcaataaattatgagaaccaagcacacccgaagcaagtcctccatcattatgcggacgtccaggtcgatgtaatattaatgaaattgtgaccgtgttacgttttgtgttgaactggtactggtaggtaggttatgacacgcctctagctctagttggtggatgtttccggtaacgtgtttttctgtttgtggatcctgcctactcagttttggttgcgtataagcctgcccctcatgaatcctatgagtttgtgaacaccaactattatactggtgacttgcattcgcatgatgattggatcttgtatcgtgt

SEQ ID NO: 44457 - DNA, 2304 bp, Zea Mays
cgaaaacgaacagcccctcgctttagattgccgcaagttcccccattcctgtagatcgccggcccctcgctcggctcggccatgtcggccggctccacggcgtccctcctcgcggccgtcatctgccttgccctcgccgtgcttgctcccgtcgttcctgggtatccaatgatccagaacttcaccagaaggtggcaggtgtattggttgagtcaaatggtgtcaacaatgacttacaagagctgtctcctgatagaaaatttccacaagatgattttgcaccctactcaaatcacagccatgattggaatcctgctggatcaggtatcatgtggaacaaatataattttcctgtatttctactttcagaagagagtacaaacactcttcaaaagatttcagaaaaaaatgagaagactggcaatggatataaagcaaatgttgcagaattcgaccttgttatgcagacaaccaaagctcaaacacatgattcagcatcctgcctcaaagaacaatcatgcttgcccttaggtggacacagggcagtgtatggacttcattaccgccacttaataacggatctacagagcatccgaaacctttaatattggctattgcgtctcaagactctgcatcattttttcgggaccgtagtcttggttcagattctcccatatctggattgattgctttgctcactgctgttgatgctctttctcacattcatggtctaagcaagcttaagaaacagcttgtgttcgctgtttttaatggtgaggcctggggttatcttggtagtcggaaattcttacaggaattagatgaaggcgctgcttctgtgaatggaattagtagcttaaagattgaccaggtactggagattggttctgttggcaaggctatacttgaggaatatccatcattttatgtgcatgctgaagggaatccatcagcttcaaaggaaatattagatgcactgcaaagtgccagcaagtctcttggttctgataatgttaaagtaaaacaagcagcttcatcaaatcctggtgttccaccatcttcattaatgtcattcataaggaagaacatgtcaacttctggagttgtgttggaggattttgattcccacttctccaatagattttatcatagctatctggataactctgtaaacatcaattcctcgtcaatagctgcagccgccgctttggttgcgaggtcgatgtatattcttgctagtgatgactcagttgttgaccttataacactaaacactataaaagtgaacgtttcattggtcgaagaacttattggatgcctgcttacttgcaatcctggtctttcgtgcggccttgtgaaaagattcatttctccaagcaatccctgcccaagtcattatgttggtgtttttctggatgacccatctggcacgcagcttccttcatatgcagatgacacgtctcggtttgtatggaactttttggcagacagaactaattcagcaggcaataaaagctcatgtactggaaagtgtggtgatgaaggtgaagtatgtgtaggggcagaggtggagggtggaggtagatgtgttgtatctacaaccaggtatgttcctgcttattcaactcgggtgaagtttgaggacaatgcatggcacgttcttccagcgaactcgtcagatccaatgggtgctgcagatcccgtgtggactgaaagcttctggaacactattggcctcagggtctacgccgtgcaagatccagcttacgattggcttattcttcttgccgggctcggaatcactgctgcatcttattgcgctgtacactttggcagagcatacatttcaaaggtggcgaagcttgactgaagcgtcagtgagctgccccactgataatgggtatctagagctggaaatagaactaattaggctggcaattcgtagaacattagcagcgcatgagacagggtgattaagctgcgagaaagccgcaataaattatgagaaccaagcacacccgaagcaagtcctccatcattatgcggacgtccaggtcgatgtaatattaatgaaattgtgaccgtgttacgttttgtgttgaactggtactggtaggtaggttatgacacgcctctagctctagttggtggatgtttccggtaacgtgtttttctgtttgtggatcctgcctactcagttttggttgcgtataagcctgcccctcatgaatcctatgagtttgtgaacaccaactattatactggtgacttgcattcgcatgatgattggatcttgtatcgtgt

SEQ ID NO: 44458 - DNA, 2459 bp, Zea Mays
cgaaaacgaacagcccctcgctttagattgccgcaagttcccccattcctgtagatcgccggcccctcgctcggctcggccatgtcggccggctccacggcgtccctcctcgcggccgtcatctgccttgccctcgccgtgcttgctcccgtcgttcctggagatggtgccacattggaatcagttccagaccttgtgaaggcaatgtacctaaacgttgaaagcttcccttgtgtgaggctgttgaatctttctggtgaaattggctgttctaatcctggaagtgagaaggtcattgcaccaattgtaagacttagaaaaggcagtgatcaattggttcaaccatctactattctcctttccttagatcagatgtcagatttctttctgagggtatccaatgatccagaacttcaccagaaggtggcaggtgtattggttgagtcaaatggtgtcaacaatgacttacaagagctgtctcctgatagaaaatttccacaagatgattttgcaccctactcaaatcacagccatgattggaatcctgctggatcaggtatcatgtggaacaaatataattttcctgtatttctactttcagaagagagtacaaacactcttcaaaagatttcagaaaaaaatgagaagactggcaatggatataaagcaaatgttgcagaattcgaccttgttatgcagacaaccaaagctcaaacacatgattcagcatcctgcctcaaagaacaatcatgcttgcccttaggtggacacagtgtatggacttcattaccgccacttaataacggatctacagagcatccgaaacctttaatattggctattgcgtctcaagactctgcatcattttttcgggaccgtagtcttggttcagattctcccatatctggattgattgctttgctcactgctgttgatgctctttctcacattcatggtctaagcaagcttaagaaacagcttgtgttcgctgtttttaatggtgaggcctggggttatcttggtagtcggaaattcttacaggaattagatgaaggcgctgcttctgtgaatggaattagtagcttaaagattgaccagaatccatcagcttcaaaggaaatattagatgcactgcaaagtgccagcaagtctcttggttctgataatgttaaagtaaaacaagcagcttcatcaaatcctggtgttccaccatcttcattaatgtcattcataaggaagaacatgtcaacttctggagttgtgttggaggattttgattcccacttctccaatagattttatcatagctatctggataactctgtaaacatcaattcctcgtcaatagctgcagccgccgctttggttgcgaggtcgatgtatattcttgctagtgatgactcagttgttgaccttataacactaaacactataaaagtgaacgtttcattggtcgaagaacttattggatgcctgcttacttgcaatcctggtctttcgtgcggccttgtgaaaagattcatttctccaagcaatccctgcccaagtcattatgttggtgtttttctggatgacccatctggcacgcagcttccttcatatgcagatgacacgtctcggtttgtatggaactttttggcagacagaactaattcagcaggcaataaaagctcatgtactggaaagtgtggtgatgaaggtgaagtatgtgtaggggcagaggtggagggtggaggtagatgtgttgtatctacaaccaggtatgttcctgcttattcaactcgggtgaagtttgaggacaatgcatggcacgttcttccagcgaactcgtcagatccaatgggtgctgcagatcccgtgtggactgaaagcttctggaacactattggcctcagggtctacgccgtgcaagatccagcttacgattggcttattcttcttgccgggctcggaatcactgctgcatcttattgcgctgtacactttggcagagcatacatttcaaaggtggcgaagcttgactgaagcgtcagtgagctgccccactgataatgggtatctagagctggaaatagaactaattaggctggcaattcgtagaacattagcagcgcatgagacagggtgattaagctgcgagaaagccgcaataaattatgagaaccaagcacacccgaagcaagtcctccatcattatgcggacgtccaggtcgatgtaatattaatgaaattgtgaccgtgttacgttttgtgttgaactggtactggtaggtaggttatgacacgcctctagctctagttggtggatgtttccggtaacgtgtttttctgtttgtggatcctgcctactcagttttggttgcgtataagcctgcccctcatgaatcctatgagtttgtgaacaccaactattatactggtgacttgcattcgcatgatgattggatcttgtatcgtgt

SEQ ID NO: 44459 - DNA, 2776 bp, Zea Mays
cgaaaacgaacagcccctcgctttagattgccgcaagttcccccattcctgtagatcgccggcccctcgctcggctcggccatgtcggccggctccacggcgtccctcctcgcggccgtcatctgccttgccctcgccgtgcttgctcccgtcgttcctggagatggtgccacattggaatcagttccagaccttgtgaaggcaatgtacctaaacgttgaaagcttcccttgtgtgaggctgttgaatctttctggtgaaattggctgttctaatcctggaagtgagaaggtcattgcaccaattgtaagacttagaaaaggcagtgatcaattggttcaaccatctactattctcctttccttagatcagatggtatccaatgatccagaacttcaccagaaggtggcaggtgtattggttgagtcaaatggtgtcaacaatgacttacaagagctgtctcctgatagaaaatttccacaagatgattttgcaccctactcaaatcacagccatgattggaatcctgctgtatcatgtggaacaaatataattttcctgtatttctactttcagaagagagtacaaacactcttcaaaagatttcagaaaaaaatgagaagactggcaatggatataaagcaaatgttgcagaattcgaccttgttatgcagacaaccaaagctcaaacacatgattcagcatcctgcctcaaagaacaatcatgcttgcccttaggtggacacagtgtatggacttcattaccgccacttaataacggatctacagagcatccgaaacctttaatattggctattgcgtctcaagactctgcatcattttttcgggaccgtagtcttggttcagattctcccatatctggattgattgctttgctcactgctgttgatgctctttctcacattcatggtctaagcaagcttaagaaacagcttgtgttcgctgtttttaatggtgaggcctggggttatcttggtagtcggaaattcttacaggaattagatgaaggcgctgcttctgtgaatggaattagtagcttaaagattgaccaggtgagtgccagaaaaattaatacaggcagagacagcctcagactacagttaatcattttttatttttcaaacatatataaatcctttttttcgtcacttttttgggtattgtgtcatgatatttgctttctgcagagtttgtctgccaattctaatgaattctcttttcgaaattttactgacagctttgaatcacaagcgatatacatatctgtttgaataccattcccatcctcacttgttatttgagttctctttggacatatttaggtactggagattggttctgttggcaaggctatacttgaggaatatccatcattttatgtgcatgctgaagggaatccatcagcttcaaaggaaatattagatgcactgcaaagtgccagcaagtctcttggttctgataatgttaaagtaaaacaagcagcttcatcaaatcctggtgttccaccatcttcattaatgtcattcataaggaagaacatgtcaacttctggagttgtgttggaggattttgattcccacttctccaatagattttatcatagctatctggataactctgtaaacatcaattcctcgtcaatagctgcagccgccgctttggttgcgaggtcgatgtatattcttgctagtgatgactcagttgttgaccttataacactaaacactataaaagtgaacgtttcattggtcgaagaacttattggatgcctgcttacttgcaatcctggtctttcgtgcggccttgtgaaaagattcatttctccaagcaatccctgcccaagtcattatgttggtgtttttctggatgacccatctggcacgcagcttccttcatatgcagatgacacgtctcggtttgtatggaactttttggcagacagaactaattcagcaggcaataaaagctcatgtactggaaagtgtggtgatgaaggtgaagtatgtgtaggggcagaggtggagggtggaggtagatgtgttgtatctacaaccaggtatgttcctgcttattcaactcgggtgaagtttgaggacaatgcatggcacgttcttccagcgaactcgtcagatccaatgggtgctgcagatcccgtgtggactgaaagcttctggaacactattggcctcagggtctacgccgtgcaagatccagcttacgattggcttattcttcttgccgggctcggaatcactgctgcatcttattgcgctgtacactttggcagagcatacatttcaaaggtggcgaagcttgactgaagcgtcagtgagctgccccactgataatgggtatctagagctggaaatagaactaattaggctggcaattcgtagaacattagcagcgcatgagacagggtgattaagctgcgagaaagccgcaataaattatgagaaccaagcacacccgaagcaagtcctccatcattatgcggacgtccaggtcgatgtaatattaatgaaattgtgaccgtgttacgttttgtgttgaactggtactggtaggtaggttatgacacgcctctagctctagttggtggatgtttccggtaacgtgtttttctgtttgtggatcctgcctactcagttttggttgcgtataagcctgcccctcatgaatcctatgagtttgtgaacaccaactattatactggtgacttgcattcgcatgatgattggatcttgtatcgtgt

SEQ ID NO: 44460 - DNA, 2299 bp, Zea Mays
cgaaaacgaacagcccctcgctttagattgccgcaagttcccccattcctgtagatcgccggcccctcgctcggctcggccatgtcggccggctccacggcgtccctcctcgcggccgtcatctgccttgccctcgccgtgcttgctcccgtcgttcctgggtatccaatgatccagaacttcaccagaaggtggcaggtgtattggttgagtcaaatggtgtcaacaatgacttacaagagctgtctcctgatagaaaatttccacaagatgattttgcaccctactcaaatcacagccatgattggaatcctgctggatcaggtatcatgtggaacaaatataattttcctgtatttctactttcagaagagagtacaaacactcttcaaaagatttcagaaaaaaatgagaagactggcaatggatataaagcaaatgttgcagaattcgaccttgttatgcagacaaccaaagctcaaacacatgattcagcatcctgcctcaaagaacaatcatgcttgcccttaggtggacacagtgtatggacttcattaccgccacttaataacggatctacagagcatccgaaacctttaatattggctattgcgtctcaagactctgcatcattttttcgggaccgtagtcttggttcagattctcccatatctggattgattgctttgctcactgctgttgatgctctttctcacattcatggtctaagcaagcttaagaaacagcttgtgttcgctgtttttaatggtgaggcctggggttatcttggtagtcggaaattcttacaggaattagatgaaggcgctgcttctgtgaatggaattagtagcttaaagattgaccaggtactggagattggttctgttggcaaggctatacttgaggaatatccatcattttatgtgcatgctgaagggaatccatcagcttcaaaggaaatattagatgcactgcaaagtgccagcaagtctcttggttctgataatgttaaagtaaaacaagcagcttcatcaaatcctggtgttccaccatcttcattaatgtcattcataaggaagaacatgtcaacttctggagttgtgttggaggattttgattcccacttctccaatagattttatcatagctatctggataactctgtaaacatcaattcctcgtcaatagctgcagccgccgctttggttgcgaggtcgatgtatattcttgctagtgatgactcagttgttgaccttataacactaaacactataaaagtgaacgtttcattggtcgaagaacttattggatgcctgcttacttgcaatcctggtctttcgtgcggccttgtgaaaagattcatttctccaagcaatccctgcccaagtcattatgttggtgtttttctggatgacccatctggcacgcagcttccttcatatgcagatgacacgtctcggtttgtatggaactttttggcagacagaactaattcagcaggcaataaaagctcatgtactggaaagtgtggtgatgaaggtgaagtatgtgtaggggcagaggtggagggtggaggtagatgtgttgtatctacaaccaggtatgttcctgcttattcaactcgggtgaagtttgaggacaatgcatggcacgttcttccagcgaactcgtcagatccaatgggtgctgcagatcccgtgtggactgaaagcttctggaacactattggcctcagggtctacgccgtgcaagatccagcttacgattggcttattcttcttgccgggctcggaatcactgctgcatcttattgcgctgtacactttggcagagcatacatttcaaaggtggcgaagcttgactgaagcgtcagtgagctgccccactgataatgggtatctagagctggaaatagaactaattaggctggcaattcgtagaacattagcagcgcatgagacagggtgattaagctgcgagaaagccgcaataaattatgagaaccaagcacacccgaagcaagtcctccatcattatgcggacgtccaggtcgatgtaatattaatgaaattgtgaccgtgttacgttttgtgttgaactggtactggtaggtaggttatgacacgcctctagctctagttggtggatgtttccggtaacgtgtttttctgtttgtggatcctgcctactcagttttggttgcgtataagcctgcccctcatgaatcctatgagtttgtgaacaccaactattatactggtgacttgcattcgcatgatgattggatcttgtatcgtgt

SEQ ID NO: 44461 - DNA, 2297 bp, Zea Mays
cgaaaacgaacagcccctcgctttagattgccgcaagttcccccattcctgtagatcgccggcccctcgctcggctcggccatgtcggccggctccacggcgtccctcctcgcggccgtcatctgccttgccctcgccgtgcttgctcccgtcgttcctgggtatccaatgatccagaacttcaccagaaggtggcaggtgtattggttgagtcaaatggtgtcaacaatgacttacaagagctgtctcctgatagaaaatttccacaagatgattttgcaccctactcaaatcacagccatgattggaatcctgctgtatcatgtggaacaaatataattttcctgtatttctactttcagaagagagtacaaacactcttcaaaagatttcagaaaaaaatgagaagactggcaatggatataaagcaaatgttgcagaattcgaccttgttatgcagacaaccaaagctcaaacacatgattcagcatcctgcctcaaagaacaatcatgcttgcccttaggtggacacagggcagtgtatggacttcattaccgccacttaataacggatctacagagcatccgaaacctttaatattggctattgcgtctcaagactctgcatcattttttcgggaccgtagtcttggttcagattctcccatatctggattgattgctttgctcactgctgttgatgctctttctcacattcatggtctaagcaagcttaagaaacagcttgtgttcgctgtttttaatggtgaggcctggggttatcttggtagtcggaaattcttacaggaattagatgaaggcgctgcttctgtgaatggaattagtagcttaaagattgaccaggtactggagattggttctgttggcaaggctatacttgaggaatatccatcattttatgtgcatgctgaagggaatccatcagcttcaaaggaaatattagatgcactgcaaagtgccagcaagtctcttggttctgataatgttaaagtaaaacaagcagcttcatcaaatcctggtgttccaccatcttcattaatgtcattcataaggaagaacatgtcaacttctggagttgtgttggaggattttgattcccacttctccaatagattttatcatagctatctggataactctgtaaacatcaattcctcgtcaatagctgcagccgccgctttggttgcgaggtcgatgtatattcttgctagtgatgactcagttgttgaccttataacactaaacactataaaagtgaacgtttcattggtcgaagaacttattggatgcctgcttacttgcaatcctggtctttcgtgcggccttgtgaaaagattcatttctccaagcaatccctgcccaagtcattatgttggtgtttttctggatgacccatctggcacgcagcttccttcatatgcagatgacacgtctcggtttgtatggaactttttggcagacagaactaattcagcaggcaataaaagctcatgtactggaaagtgtggtgatgaaggtgaagtatgtgtaggggcagaggtggagggtggaggtagatgtgttgtatctacaaccaggtatgttcctgcttattcaactcgggtgaagtttgaggacaatgcatggcacgttcttccagcgaactcgtcagatccaatgggtgctgcagatcccgtgtggactgaaagcttctggaacactattggcctcagggtctacgccgtgcaagatccagcttacgattggcttattcttcttgccgggctcggaatcactgctgcatcttattgcgctgtacactttggcagagcatacatttcaaaggtggcgaagcttgactgaagcgtcagtgagctgccccactgataatgggtatctagagctggaaatagaactaattaggctggcaattcgtagaacattagcagcgcatgagacagggtgattaagctgcgagaaagccgcaataaattatgagaaccaagcacacccgaagcaagtcctccatcattatgcggacgtccaggtcgatgtaatattaatgaaattgtgaccgtgttacgttttgtgttgaactggtactggtaggtaggttatgacacgcctctagctctagttggtggatgtttccggtaacgtgtttttctgtttgtggatcctgcctactcagttttggttgcgtataagcctgcccctcatgaatcctatgagtttgtgaacaccaactattatactggtgacttgcattcgcatgatgattggatcttgtatcgtgt

SEQ ID NO: 44462 - DNA, 3112 bp, Zea Mays
cgaaaacgaacagcccctcgctttagattgccgcaagttcccccattcctgtagatcgccggcccctcgctcggctcggccatgtcggccggctccacggcgtccctcctcgcggccgtcatctgccttgccctcgccgtgcttgctcccgtcgttcctggagatggtgccacattggaatcagttccagaccttgtgaaggcaatgtacctaaacgttgaaagcttcccttgtgtgaggctgttgaatctttctggtgaaattggctgttctaatcctggaagtgagaaggtcattgcaccaattgtaagacttagaaaaggcagtgatcaattggttcaaccatctactattctcctttccttagatcagatgtcagatttctttctgagggtatccaatgatccagaacttcaccagaaggtggcaggtgtattggttgagtcaaatggtgtcaacaatgacttacaagagctgtctcctgatagaaaatttccacaagatgattttgcaccctactcaaatcacagccatgattggaatcctgctggatcaggtatcatgtggaacaaatataattttcctgtatttctactttcagaagagagtacaaacactcttcaaaagatttcagaaaaaaatgagaagactggcaatggatataaagcaaatgttgcagaattcgaccttgttatgcagacaaccaaagctcaaacacatgattcagcatcctgcctcaaagaacaatcatgcttgcccttaggtggacacagggcagtgtatggacttcattaccgccacttaataacggatctacagagcatccgaaacctttaatattggctattgcgtctcaagactctgcatcattttttcgggaccgtagtcttggttcagattctcccatatctggattgattgctttgctcactgctgttgatgctctttctcacattcatggtctaagcaagcttaagaaacaggtatgatatgactactgaaattttgtttgttagtcgcttccataatattatgctggatattcttttctatcttacttagagcaggtatgcagcagatcatatccaccattttatctttacctcttttatacttgttgtaaggttcaagctactggtatctttgttaatgttctcattatcttataccctagcttacacatggagtggtacatttaatatggttcttcatatcactctcactgaatttacgtgtgattggtttctgaagaaacatcttcctgacattttcccttaattcttatacagcttgtgttcgctgtttttaatggtgaggcctggggttatcttggtagtcggaaattcttacaggaattagatgaaggcgctgcttctgtgaatggaattagtagcttaaagattgaccaggtgagtgccagaaaaattaatacaggcagagacagcctcagactacagttaatcattttttatttttcaaacatatataaatcctttttttcgtcacttttttgggtattgtgtcatgatatttgctttctgcagagtttgtctgccaattctaatgaattctcttttcgaaattttactgacagctttgaatcacaagcgatatacatatctgtttgaataccattcccatcctcacttgttatttgagttctctttggacatatttaggtactggagattggttctgttggcaaggctatacttgaggaatatccatcattttatgtgcatgctgaagggaatccatcagcttcaaaggaaatattagatgcactgcaaagtgccagcaagtctcttggttctgataatgttaaagtaaaacaagcagcttcatcaaatcctggtgttccaccatcttcattaatgtcattcataaggaagaacatgtcaacttctggagttgtgttggaggattttgattcccacttctccaatagattttatcatagctatctggataactctgtaaacatcaattcctcgtcaatagctgcagccgccgctttggttgcgaggtcgatgtatattcttgctagtgatgactcagttgttgaccttataacactaaacactataaaagtgaacgtttcattggtcgaagaacttattggatgcctgcttacttgcaatcctggtctttcgtgcggccttgtgaaaagattcatttctccaagcaatccctgcccaagtcattatgttggtgtttttctggatgacccatctggcacgcagcttccttcatatgcagatgacacgtctcggtttgtatggaactttttggcagacagaactaattcagcaggcaataaaagctcatgtactggaaagtgtggtgatgaaggtgaagtatgtgtaggggcagaggtggagggtggaggtagatgtgttgtatctacaaccaggtatgttcctgcttattcaactcgggtgaagtttgaggacaatgcatggcacgttcttccagcgaactcgtcagatccaatgggtgctgcagatcccgtgtggactgaaagcttctggaacactattggcctcagggtctacgccgtgcaagatccagcttacgattggcttattcttcttgccgggctcggaatcactgctgcatcttattgcgctgtacactttggcagagcatacatttcaaaggtggcgaagcttgactgaagcgtcagtgagctgccccactgataatgggtatctagagctggaaatagaactaattaggctggcaattcgtagaacattagcagcgcatgagacagggtgattaagctgcgagaaagccgcaataaattatgagaaccaagcacacccgaagcaagtcctccatcattatgcggacgtccaggtcgatgtaatattaatgaaattgtgaccgtgttacgttttgtgttgaactggtactggtaggtaggttatgacacgcctctagctctagttggtggatgtttccggtaacgtgtttttctgtttgtggatcctgcctactcagttttggttgcgtataagcctgcccctcatgaatcctatgagtttgtgaacaccaactattatactggtgacttgcattcgcatgatgattggatcttgtatcgtgt

SEQ ID NO: 44463 - DNA, 2813 bp, Zea Mays
cagtcgacgaaaacgaacagcccctcgctttagattgccgcaagttcccccattcctgtagatcgccggcccctcgctcggctcggccatgtcggccggctccacggcgtccctcctcgcggccgtcatctgccttgccctcgccgtgcttgctcccgtcgttcctggagatggtgccacattggaatcagttccagaccttgtgaaggcaatgtacctaaacgttgaaagcttcccttgtgtgaggctgttgaatctttctggtgaaattggctgttctaatcctggaagtgagaaggtcattgcaccaattgtaagacttagaaaaggcagtgatcaattggttcaaccatctactattctcctttccttagatcagatgtcagatttctttctgagggtatccaatgatccagaacttcaccagaaggtggcaggtgtattggttgagtcaaatggtgtcaacaatgacttacaagagctgtctcctgatagaaaatttccacaagatgattttgcaccctactcaaatcacagccatgattggaatcctgctggatcaggtatcatgtggaacaaatataattttcctgtatttctactttcagaagagagtacaaacactcttcaaaagatttcagaaaaaaatgagaagactggcaatggatataaagcaaatgttgcagaattcgaccttgttatgcagacaaccaaagctcaaacacatgattcagcatcctgcctcaaagaacaatcatgcttgcccttaggtggacacagggcagtgtatggacttcattaccgccacttaataacggatctacagagcatccgaaacctttaatattggctattgcgtctcaagactctgcatcattttttcgggaccgtagtcttggttcagattctcccatatctggattgattgctttgctcactgctgttgatgctctttctcacattcatggtctaagcaagcttaagaaacagcttgtgttcgctgtttttaatggtgaggcctggggttatcttggtagtcggaaattcttacaggaattagatgaaggcgctgcttctgtgaatggaattagtagcttaaagattgaccaggtgagtgccagaaaaattaatacaggcagagacagcctcagactacagttaatcattttttatttttcaaacatatataaatcctttttttcgtcacttttttgggtattgtgtcatgatatttgctttctgcagagtttgtctgccaattctaatgaattctcttttcgaaattttactgacagctttgaatcacaagcgatatacatatctgtttgaataccattcccatcctcacttgttatttgagttctctttggacatatttaggtactggagattggttctgttggcaaggctatacttgaggaatatccatcattttatgtgcatgctgaagggaatccatcagcttcaaaggaaatattagatgcactgcaaagtgccagcaagtctcttggttctgataatgttaaagtaaaacaagcagcttcatcaaatcctggtgttccaccatcttcattaatgtcattcataaggaagaacatgtcaacttctggagttgtgttggaggattttgattcccacttctccaatagattttatcatagctatctggataactctgtaaacatcaattcctcgtcaatagctgcagccgccgctttggttgcgaggtcgatgtatattcttgctagtgatgactcagttgttgaccttataacactaaacactataaaagtgaacgtttcattggtcgaagaacttattggatgcctgcttacttgcaatcctggtctttcgtgcggccttgtgaaaagattcatttctccaagcaatccctgcccaagtcattatgttggtgtttttctggatgacccatctggcacgcagcttccttcatatgcagatgacacgtctcggtttgtatggaactttttggcagacagaactaattcagcaggcaataaaagctcatgtactggaaagtgtggtgatgaaggtgaagtatgtgtaggggcagaggtggagggtggaggtagatgtgttgtatctacaaccaggtatgttcctgcttattcaactcgggtgaagtttgaggacaatgcatggcacgttcttccagcgaactcgtcagatccaatgggtgctgcagatcccgtgtggactgaaagcttctggaacactattggcctcagggtctacgccgtgcaagatccagcttacgattggcttattcttcttgccgggctcggaatcactgctgcatcttattgcgctgtacactttggcagagcatacatttcaaaggtggcgaagcttgactgaagcgtcagtgagctgccccactgataatgggtatctagagctggaaatagaactaattaggctggcaattcgtagaacattagcagcgcatgagacagggtgattaagctgcgagaaagccgcaataaattatgagaaccaagcacacccgaagcaagtcctccatcattatgcggacgtccaggtcgatgtaatattaatgaaattgtgaccgtgttacgttttgtgttgaactggtactggtaggtaggttatgacacgcctctagctctagttggtggatgtttccggtaacgtgtttttctgtttgtggatcctgcctactcagttttggttgcgtataagcctgcccctcatgaatcctatgagtttgtgaacaccaactattatactggtgacttgcattcgcatgatgattggatcttgtatcgtgt

SEQ ID NO: 44464 - DNA, 2852 bp, Zea Mays
tcccagtcgacgaaaacgaacagcccctcgctttagattgccgcaagttcccccattcctgtagatcgccggcccctcgctcggctcggccatgtcggccggctccacggcgtccctcctcgcggccgtcatctgccttgccctcgccgtgcttgctcccgtcgttcctggagatggtgccacattggaatcagttccagaccttgtgaaggcaatgtacctaaacgttgaaagcttcccttgtgtgaggctgttgaatctttctggtgaaattggctgttctaatcctggaagtgagaaggtcattgcaccaattgtaagacttagaaaaggcagtgatcaattggttcaaccatctactattctcctttccttagatcagatgtcagatttctttctgagggtatccaatgatccagaacttcaccagaaggtggcaggtgtattggttgagtcaaatggtgtcaacaatgacttacaagagctgtctcctgatagaaaatttccacaagatgattttgcaccctactcaaatcacagccatgattggaatcctgctggatcaggtatcatgtggaacaaatataattttcctgtatttctactttcagaagagagtacaaacactcttcaaaagatttcagaaaaaaatgagaagactggcaatggatataaagcaaatgttgcagaattcgaccttgttatgcagacaaccaaagctcaaacacatgattcagcatcctgcctcaaagaacaatcatgcttgcccttaggtggacacagggcagtgtatggacttcattaccgccacttaataacggatctacagagcatccgaaacctttaatattggctattgcgtctcaagactctgcatcattttttcgggaccgtagtcttggttcagattctcccatatctggattgattgctttgctcactgctgttgatgctctttctcacattcatggtctaagcaagcttaagaaacaggtatgatatgactactgaaattttgtttgttagtcgcttccataatattatgctggatattcttttctatcttacttagagcaggtatgcagcagatcatatccaccattttatctttacctcttttatacttgttgtaaggttcaagctactggtatctttgttaatgttctcattatcttataccctagcttacacatggagtggtacatttaatatggttcttcatatcactctcactgaatttacgtgtgattggtttctgaagaaacatcttcctgacattttcccttaattcttatacagcttgtgttcgctgtttttaatggtgaggcctggggttatcttggtagtcggaaattcttacaggaattagatgaaggcgctgcttctgtgaatggaattagtagcttaaagattgaccaggtactggagattggttctgttggcaaggctatacttgaggaatatccatcattttatgtgcatgctgaagggaatccatcagcttcaaaggaaatattagatgcactgcaaagtgccagcaagtctcttggttctgataatgttaaagtaaaacaagcagcttcatcaaatcctggtgttccaccatcttcattaatgtcattcataaggaagaacatgtcaacttctggagttgtgttggaggattttgattcccacttctccaatagattttatcatagctatctggataactctgtaaacatcaattcctcgtcaatagctgcagccgccgctttggttgcgaggtcgatgtatattcttgctagtgatgactcagttgttgaccttataacactaaacactataaaagtgaacgtttcattggtcgaagaacttattggatgcctgcttacttgcaatcctggtctttcgtgcggccttgtgaaaagattcatttctccaagcaatccctgcccaagtcattatgttggtgtttttctggatgacccatctggcacgcagcttccttcatatgcagatgacacgtctcggtttgtatggaactttttggcagacagaactaattcagcaggcaataaaagctcatgtactggaaagtgtggtgatgaaggtgaagtatgtgtaggggcagaggtggagggtggaggtagatgtgttgtatctacaaccaggtatgttcctgcttattcaactcgggtgaagtttgaggacaatgcatggcacgttcttccagcgaactcgtcagatccaatgggtgctgcagatcccgtgtggactgaaagcttctggaacactattggcctcagggtctacgccgtgcaagatccagcttacgattggcttattcttcttgccgggctcggaatcactgctgcatcttattgcgctgtacactttggcagagcatacatttcaaaggtggcgaagcttgactgaagcgtcagtgagctgccccactgataatgggtatctagagctggaaatagaactaattaggctggcaattcgtagaacattagcagcgcatgagacagggtgattaagctgcgagaaagccgcaataaattatgagaaccaagcacacccgaagcaagtcctccatcattatgcggacgtccaggtcgatgtaatattaatgaaattgtgaccgtgttacgttttgtgttgaactggtactggtaggtaggttatgacacgcctctagctctagttggtggatgtttccggtaacgtgtttttctgtttgtggatcctgcctactcagttttggttgcgtataagcctgcccctcatgaatcctatgagtttgtgaacaccaactattatactggtgacttgcattcgcatgatgattggatcttgtatcgtgt

SEQ ID NO: 44465 - DNA, 2550 bp, Zea Mays
ctcgtcccagtcgacgaaaacgaacagcccctcgctttagattgccgcaagttcccccattcctgtagatcgccggcccctcgctcggctcggccatgtcggccggctccacggcgtccctcctcgcggccgtcatctgccttgccctcgccgtgcttgctcccgtcgttcctggagatggtgccacattggaatcagttccagaccttgtgaaggcaatgtacctaaacgttgaaagcttcccttgtgtgaggctgttgaatctttctggtgaaattggctgttctaatcctggaagtgagaaggtcattgcaccaattgtaagacttagaaaaggcagtgatcaattggttcaaccatctactattctcctttccttagatcagatgtcagatttctttctgagggtatccaatgatccagaacttcaccagaaggtggcaggtgtattggttgagtcaaatggtgtcaacaatgacttacaagagctgtctcctgatagaaaatttccacaagatgattttgcaccctactcaaatcacagccatgattggaatcctgctggatcaggtatcatgtggaacaaatataattttcctgtatttctactttcagaagagagtacaaacactcttcaaaagatttcagaaaaaaatgagaagactggcaatggatataaagcaaatgttgcagaattcgaccttgttatgcagacaaccaaagctcaaacacatgattcagcatcctgcctcaaagaacaatcatgcttgcccttaggtggacacagggcagtgtatggacttcattaccgccacttaataacggatctacagagcatccgaaacctttaatattggctattgcgtctcaagactctgcatcattttttcgggaccgtagtcttggttcagattctcccatatctggattgattgctttgctcactgctgttgatgctctttctcacattcatggtctaagcaagcttaagaaacagcttgtgttcgctgtttttaatggtgaggcctggggttatcttggtagtcggaaattcttacaggaattagatgaaggcgctgcttctgtgaatggaattagtagcttaaagattgaccaggtactggagattggttctgttggcaaggctatacttgaggaatatccatcattttatgtgcatgctgaagggaatccatcagcttcaaaggaaatattagatgcactgcaaagtgccagcaagtctcttggttctgataatgttaaagtaaaacaagcagcttcatcaaatcctggtgttccaccatcttcattaatgtcattcataaggaagaacatgtcaacttctggagttgtgttggaggattttgattcccacttctccaatagattttatcatagctatctggataactctgtaaacatcaattcctcgtcaatagctgcagccgccgctttggttgcgaggtcgatgtatattcttgctagtgatgactcagttgttgaccttataacactaaacactataaaagtgaacgtttcattggtcgaagaacttattggatgcctgcttacttgcaatcctggtctttcgtgcggccttgtgaaaagattcatttctccaagcaatccctgcccaagtcattatgttggtgtttttctggatgacccatctggcacgcagcttccttcatatgcagatgacacgtctcggtttgtatggaactttttggcagacagaactaattcagcaggcaataaaagctcatgtactggaaagtgtggtgatgaaggtgaagtatgtgtaggggcagaggtggagggtggaggtagatgtgttgtatctacaaccaggtatgttcctgcttattcaactcgggtgaagtttgaggacaatgcatggcacgttcttccagcgaactcgtcagatccaatgggtgctgcagatcccgtgtggactgaaagcttctggaacactattggcctcagggtctacgccgtgcaagatccagcttacgattggcttattcttcttgccgggctcggaatcactgctgcatcttattgcgctgtacactttggcagagcatacatttcaaaggtggcgaagcttgactgaagcgtcagtgagctgccccactgataatgggtatctagagctggaaatagaactaattaggctggcaattcgtagaacattagcagcgcatgagacagggtgattaagctgcgagaaagccgcaataaattatgagaaccaagcacacccgaagcaagtcctccatcattatgcggacgtccaggtcgatgtaatattaatgaaattgtgaccgtgttacgttttgtgttgaactggtactggtaggtaggttatgacacgcctctagctctagttggtggatgtttccggtaacgtgtttttctgtttgtggatcctgcctactcagttttggttgcgtataagcctgcccctcatgaatcctatgagtttgtgaacaccaactattatactggtgacttgcattcgcatgatgattggatcttgtatcgtgt

SEQ ID NO: 44466 - DNA, 3126 bp, Zea Mays
cgaccttctcgtcccagtcgacgaaaacgaacagcccctcgctttagattgccgcaagttcccccattcctgtagatcgccggcccctcgctcggctcggccatgtcggccggctccacggcgtccctcctcgcggccgtcatctgccttgccctcgccgtgcttgctcccgtcgttcctggagatggtgccacattggaatcagttccagaccttgtgaaggcaatgtacctaaacgttgaaagcttcccttgtgtgaggctgttgaatctttctggtgaaattggctgttctaatcctggaagtgagaaggtcattgcaccaattgtaagacttagaaaaggcagtgatcaattggttcaaccatctactattctcctttccttagatcagatgtcagatttctttctgagggtatccaatgatccagaacttcaccagaaggtggcaggtgtattggttgagtcaaatggtgtcaacaatgacttacaagagctgtctcctgatagaaaatttccacaagatgattttgcaccctactcaaatcacagccatgattggaatcctgctgtatcatgtggaacaaatataattttcctgtatttctactttcagaagagagtacaaacactcttcaaaagatttcagaaaaaaatgagaagactggcaatggatataaagcaaatgttgcagaattcgaccttgttatgcagacaaccaaagctcaaacacatgattcagcatcctgcctcaaagaacaatcatgcttgcccttaggtggacacagggcagtgtatggacttcattaccgccacttaataacggatctacagagcatccgaaacctttaatattggctattgcgtctcaagactctgcatcattttttcgggaccgtagtcttggttcagattctcccatatctggattgattgctttgctcactgctgttgatgctctttctcacattcatggtctaagcaagcttaagaaacaggtatgatatgactactgaaattttgtttgttagtcgcttccataatattatgctggatattcttttctatcttacttagagcaggtatgcagcagatcatatccaccattttatctttacctcttttatacttgttgtaaggttcaagctactggtatctttgttaatgttctcattatcttataccctagcttacacatggagtggtacatttaatatggttcttcatatcactctcactgaatttacgtgtgattggtttctgaagaaacatcttcctgacattttcccttaattcttatacagcttgtgttcgctgtttttaatggtgaggcctggggttatcttggtagtcggaaattcttacaggaattagatgaaggcgctgcttctgtgaatggaattagtagcttaaagattgaccaggtgagtgccagaaaaattaatacaggcagagacagcctcagactacagttaatcattttttatttttcaaacatatataaatcctttttttcgtcacttttttgggtattgtgtcatgatatttgctttctgcagagtttgtctgccaattctaatgaattctcttttcgaaattttactgacagctttgaatcacaagcgatatacatatctgtttgaataccattcccatcctcacttgttatttgagttctctttggacatatttaggtactggagattggttctgttggcaaggctatacttgaggaatatccatcattttatgtgcatgctgaagggaatccatcagcttcaaaggaaatattagatgcactgcaaagtgccagcaagtctcttggttctgataatgttaaagtaaaacaagcagcttcatcaaatcctggtgttccaccatcttcattaatgtcattcataaggaagaacatgtcaacttctggagttgtgttggaggattttgattcccacttctccaatagattttatcatagctatctggataactctgtaaacatcaattcctcgtcaatagctgcagccgccgctttggttgcgaggtcgatgtatattcttgctagtgatgactcagttgttgaccttataacactaaacactataaaagtgaacgtttcattggtcgaagaacttattggatgcctgcttacttgcaatcctggtctttcgtgcggccttgtgaaaagattcatttctccaagcaatccctgcccaagtcattatgttggtgtttttctggatgacccatctggcacgcagcttccttcatatgcagatgacacgtctcggtttgtatggaactttttggcagacagaactaattcagcaggcaataaaagctcatgtactggaaagtgtggtgatgaaggtgaagtatgtgtaggggcagaggtggagggtggaggtagatgtgttgtatctacaaccaggtatgttcctgcttattcaactcgggtgaagtttgaggacaatgcatggcacgttcttccagcgaactcgtcagatccaatgggtgctgcagatcccgtgtggactgaaagcttctggaacactattggcctcagggtctacgccgtgcaagatccagcttacgattggcttattcttcttgccgggctcggaatcactgctgcatcttattgcgctgtacactttggcagagcatacatttcaaaggtggcgaagcttgactgaagcgtcagtgagctgccccactgataatgggtatctagagctggaaatagaactaattaggctggcaattcgtagaacattagcagcgcatgagacagggtgattaagctgcgagaaagccgcaataaattatgagaaccaagcacacccgaagcaagtcctccatcattatgcggacgtccaggtcgatgtaatattaatgaaattgtgaccgtgttacgttttgtgttgaactggtactggtaggtaggttatgacacgcctctagctctagttggtggatgtttccggtaacgtgtttttctgtttgtggatcctgcctactcagttttggttgcgtataagcctgcccctcatgaatcctatgagtttgtgaacaccaactattatactggtgacttgcattcgcatgatgattggatcttgtatcgtgt

SEQ ID NO: 44467 - DNA, 2551 bp, Zea Mays
cctttccgaccttctcgtcccagtcgacgaaaacgaacagcccctcgctttagattgccgcaagttcccccattcctgtagatcgccggcccctcgctcggctcggccatgtcggccggctccacggcgtccctcctcgcggccgtcatctgccttgccctcgccgtgcttgctcccgtcgttcctggagatggtgccacattggaatcagttccagaccttgtgaaggcaatgtacctaaacgttgaaagcttcccttgtgtgaggctgttgaatctttctggtgaaattggctgttctaatcctggaagtgagaaggtcattgcaccaattgtaagacttagaaaaggcagtgatcaattggttcaaccatctactattctcctttccttagatcagatgtcagatttctttctgagggtatccaatgatccagaacttcaccagaaggtggcaggtgtattggttgagtcaaatggtgtcaacaatgacttacaagagctgtctcctgatagaaaatttccacaagatgattttgcaccctactcaaatcacagccatgattggaatcctgctggatcaggtatcatgtggaacaaatataattttcctgtatttctactttcagaagagagtacaaacactcttcaaaagaaaaaaatgagaagactggcaatggatataaagcaaatgttgcagaattcgaccttgttatgcagacaaccaaagctcaaacacatgattcagcatcctgcctcaaagaacaatcatgcttgcccttaggtggacacagtgtatggacttcattaccgccacttaataacggatctacagagcatccgaaacctttaatattggctattgcgtctcaagactctgcatcattttttcgggaccgtagtcttggttcagattctcccatatctggattgattgctttgctcactgctgttgatgctctttctcacattcatggtctaagcaagcttaagaaacagcttgtgttcgctgtttttaatggtgaggcctggggttatcttggtagtcggaaattcttacaggaattagatgaaggcgctgcttctgtgaatggaattagtagcttaaagattgaccaggtactggagattggttctgttggcaaggctatacttgaggaatatccatcattttatgtgcatgctgaagggaatccatcagcttcaaaggaaatattagatgcactgcaaagtgccagcaagtctcttggttctgataatgttaaagtaaaacaagcagcttcatcaaatcctggtgttccaccatcttcattaatgtcattcataaggaagaacatgtcaacttctggagttgtgttggaggattttgattcccacttctccaatagattttatcatagctatctggataactctgtaaacatcaattcctcgtcaatagctgcagccgccgctttggttgcgaggtcgatgtatattcttgctagtgatgactcagttgttgaccttataacactaaacactataaaagtgaacgtttcattggtcgaagaacttattggatgcctgcttacttgcaatcctggtctttcgtgcggccttgtgaaaagattcatttctccaagcaatccctgcccaagtcattatgttggtgtttttctggatgacccatctggcacgcagcttccttcatatgcagatgacacgtctcggtttgtatggaactttttggcagacagaactaattcagcaggcaataaaagctcatgtactggaaagtgtggtgatgaaggtgaagtatgtgtaggggcagaggtggagggtggaggtagatgtgttgtatctacaaccaggtatgttcctgcttattcaactcgggtgaagtttgaggacaatgcatggcacgttcttccagcgaactcgtcagatccaatgggtgctgcagatcccgtgtggactgaaagcttctggaacactattggcctcagggtctacgccgtgcaagatccagcttacgattggcttattcttcttgccgggctcggaatcactgctgcatcttattgcgctgtacactttggcagagcatacatttcaaaggtggcgaagcttgactgaagcgtcagtgagctgccccactgataatgggtatctagagctggaaatagaactaattaggctggcaattcgtagaacattagcagcgcatgagacagggtgattaagctgcgagaaagccgcaataaattatgagaaccaagcacacccgaagcaagtcctccatcattatgcggacgtccaggtcgatgtaatattaatgaaattgtgaccgtgttacgttttgtgttgaactggtactggtaggtaggttatgacacgcctctagctctagttggtggatgtttccggtaacgtgtttttctgtttgtggatcctgcctactcagttttggttgcgtataagcctgcccctcatgaatcctatgagtttgtgaacaccaactattatactggtgacttgcattcgcatgatgattggatcttgtatcgtgt

SEQ ID NO: 44468 - DNA, 2852 bp, Zea Mays
cccaaggcccatgactgtgctactcctttccgaccttctcgtcccagtcgacgaaaacgaacagcccctcgctttagattgccgcaagttcccccattcctgtagatcgccggcccctcgctcggctcggccatgtcggccggctccacggcgtccctcctcgcggccgtcatctgccttgccctcgccgtgcttgctcccgtcgttcctggagatggtgccacattggaatcagttccagaccttgtgaaggcaatgtacctaaacgttgaaagcttcccttgtgtgaggctgttgaatctttctggtgaaattggctgttctaatcctggaagtgagaaggtcattgcaccaattgtaagacttagaaaaggcagtgatcaattggttcaaccatctactattctcctttccttagatcagatgtcagatttctttctgagggtatccaatgatccagaacttcaccagaaggtggcaggtgtattggttgagtcaaatggtgtcaacaatgacttacaagagctgtctcctgatagaaaatttccacaagatgattttgcaccctactcaaatcacagccatgattggaatcctgctggatcaggtatcatgtggaacaaatataattttcctgtatttctactttcagaagagagtacaaacactcttcaaaagatttcagaaaaaaatgagaagactggcaatggatataaagcaaatgttgcagaattcgaccttgttatgcagacaaccaaagctcaaacacatgattcagcatcctgcctcaaagaacaatcatgcttgcccttaggtggacacagtgtatggacttcattaccgccacttaataacggatctacagagcatccgaaacctttaatattggctattgcgtctcaagactctgcatcattttttcgggaccgtagtcttggttcagattctcccatatctggattgattgctttgctcactgctgttgatgctctttctcacattcatggtctaagcaagcttaagaaacagcttgtgttcgctgtttttaatggtgaggcctggggttatcttggtagtcggaaattcttacaggaattagatgaaggcgctgcttctgtgaatggaattagtagcttaaagattgaccaggtgagtgccagaaaaattaatacaggcagagacagcctcagactacagttaatcattttttatttttcaaacatatataaatcctttttttcgtcacttttttgggtattgtgtcatgatatttgctttctgcagagtttgtctgccaattctaatgaattctcttttcgaaattttactgacagctttgaatcacaagcgatatacatatctgtttgaataccattcccatcctcacttgttatttgagttctctttggacatatttaggtactggagattggttctgttggcaaggctatacttgaggaatatccatcattttatgtgcatgctgaagggaatccatcagcttcaaaggaaatattagatgcactgcaaagtgccagcaagtctcttggttctgataatgttaaagtaaaacaagcagcttcatcaaatcctggtgttccaccatcttcattaatgtcattcataaggaagaacatgtcaacttctggagttgtgttggaggattttgattcccacttctccaatagattttatcatagctatctggataactctgtaaacatcaattcctcgtcaatagctgcagccgccgctttggttgcgaggtcgatgtatattcttgctagtgatgactcagttgttgaccttataacactaaacactataaaagtgaacgtttcattggtcgaagaacttattggatgcctgcttacttgcaatcctggtctttcgtgcggccttgtgaaaagattcatttctccaagcaatccctgcccaagtcattatgttggtgtttttctggatgacccatctggcacgcagcttccttcatatgcagatgacacgtctcggtttgtatggaactttttggcagacagaactaattcagcaggcaataaaagctcatgtactggaaagtgtggtgatgaaggtgaagtatgtgtaggggcagaggtggagggtggaggtagatgtgttgtatctacaaccaggtatgttcctgcttattcaactcgggtgaagtttgaggacaatgcatggcacgttcttccagcgaactcgtcagatccaatgggtgctgcagatcccgtgtggactgaaagcttctggaacactattggcctcagggtctacgccgtgcaagatccagcttacgattggcttattcttcttgccgggctcggaatcactgctgcatcttattgcgctgtacactttggcagagcatacatttcaaaggtggcgaagcttgactgaagcgtcagtgagctgccccactgataatgggtatctagagctggaaatagaactaattaggctggcaattcgtagaacattagcagcgcatgagacagggtgattaagctgcgagaaagccgcaataaattatgagaaccaagcacacccgaagcaagtcctccatcattatgcggacgtccaggtcgatgtaatattaatgaaattgtgaccgtgttacgttttgtgttgaactggtactggtaggtaggttatgacacgcctctagctctagttggtggatgtttccggtaacgtgtttttctgtttgtggatcctgcctactcagttttggttgcgtataagcctgcccctcatgaatcctatgagtttgtgaacaccaactattatactggtgacttgcattcgcatgatgattggatcttgtatcgtgt

SEQ ID NO: 44469 - DNA, 997 bp, Zea Mays
aaccagcccacttggcccattctccgcgcgcgttgggttttcacttgcggctgggttctctctcggtgacaggtggggccgtcgttagcaagtcacatctgcgcgactccatgctgccctgatcacgcactgacgggtggacccacattgtcatcgtgctcctcgtgtaacaaacgccgggtatgtagcgggccgtgccggaatcaagtggtggagcttccccctatcctcgcaaccgccggcaccagcttgggcccaccggcttctcttccctgggtatatatccagagtcggacacctccttctccccttgttcgccaggattccctcgcgggcgtcgaaagaaagaggaagggtgagagggggttggagggggttgcgctcgtgctcggagaccgggctggtggagctgtggggcctctggtgctctacgcacagatcggagtcgtggctgtgggcaagacacgatcgaaatcgctcactgtcgcttgacatcgcctcggttccaccccacgctgtggacccgctccatcacaacaaatccacggaggagcaagtgattgaggaccccggtacccagcaagtgggaactactgaacaggagctcattgaaggagaagaacaggtggttcaggaggaaacctacaacgaggagtacgagcttatctaggtggcgtctcccagtcagcttgatggcatcaaggaataatacttagttcactttattgttcttatttatttttgtaagacttccgctatgtaataatgatatttgtgacatttatctctatacactttgtcatcatatgtgatgttcttctttggcgcatatatgagacgcacccggctttatcccttaatccgggtgtgacaggcagcctagggtttgcctgatgaggaggatgaacacaagaacacacaaggatttagaatggttcgggtcgtcacactgtaatactctactccattgtggttgtattgcttgagtgtgaggaag

SEQ ID NO: 44470 - DNA, 422 bp, Zea Mays
aatctggtttgatatctacttacatttagtaactgttaataaaacttgaccaacttattaaaagcaatgctcagctttaacccttatttattgatcagccttacactccacgtgaactcccacctttggtgtgttcatgcacattattacccacaacttgttgagttatgatcttttgtgatcgcacccttgcgatatataaaccccccacaggagaagaacaggtggttcaggaggaaacctacaacgaggagtacgagcttatctaggtggcgtctcccagtcagcttgatggcatcaaggaataatacttagttcactttattgttcttatttatttttgtaagacttccgctatgtaataatgatatttgtgacatttatctctatacactttgtcatcatatgtgatgttcttcttt

SEQ ID NO: 44471 - DNA, 948 bp, Zea Mays
cattgtcatcgtgctcctcgtgtaacaaacgccgggtatgtagcgggccgtgccggaatcaagtggtggagcttccccctatcctcgcaaccgccggcaccagcttgggcccaccggcttctcttccctgggtatatatccagagtcggacacctccttctccccttgttcgccaggattccctcgcgggcgtcgaaagaaagaggaagggtgagagggggttggagggggttgcgctcgtgctcggagaccgggctggtggagctgtggggcctctggtgctctacgcacagatcggagtcgtggctgtgggcaagacacgatcgaaatcgctcactgtcgcttgacatcgcctcggttccaccccacgctgtggacccgctccatcacaacaaatccacggaggagcaagtgattgaggaccccggtacccagcaagtgggaactactgaacaggagctcattgaaggcaagttatgcccttaagcacctttatttacccaataatgttctctataatcattttggcatgcataggcttaatttcaataggacccaataggtcaccctagtttggtcatctttacaccttgtttacccctaaacttttgggtagtctttgctattgctatatgtggttttgggtgttgagatagctattacacatggtcattctttattattattgttttattctgttcataataagactattatgttaattggaacatggagcttaacttgagaaacatgtgccaccacaagggtagaatgggacgccctttgtcgactaattaggaaagctagtggaggtctaccttacccgaaaggggtaagggcagtaggggagttgtcggtgtagggaggttcttgggttgattttgctatgatggcggtcagacaggggattcctgcattgtgctccctagaaactatagcgagttttct

SEQ ID NO: 44472 - DNA, 4084 bp, Zea Mays
cgaccccccgcaggccggcgctgcagtgccccgctcacgcatcgccgtctcgttgctgcaccatcaaggcctggccaacatcttctgccactgccgctccctcgcgctcgcggcatgggcctcccgcgaggtcatctccgtcccttctccgccgccacggccgcccgccttcaccggcctccctccggttccatttcttacgaggtcaaggacaagaaacaatggcagcaggagctggagcagcacatctcccgcgggcagctggcccttgcccgccaggtgttcgacagaatccccgccccggacgcgcgcgcttacaacgcgctcatccgcgcctactcctggctcggccccttccacgccgctatcgacctttaccgctctatgctccgcttccgcgtggcccccaacaagtacacctttcccttcgtcctcaaggcatgctcagcgctcgtggacctccgtgccggccgcaccatccacgcccacgccgccgccgcgggcctccataccgacctgtttgtctccaccgccctgatcgacctctacatcaggaccatggtggcctcaggccgaatgcctccacgcttgtttccctccttccgcttcttgcccaacatggggcactcttccaaggaacaagcatccatgcctactgccttcgtgcctgtctcgaacaaaacgaggaacaggtgcttattggaactgcactgctggatatgtatgccaagtgcaagcaattggtttatgcttgcagggtgtttcatggcatgcctgtcaggaatgatgtcacttggagtgcgcttattggaggctttgtgctgtgcgacagaatgacagaagcttttaatctgttcaaggacatgctggtagaaggactgtgctttctctctgcaacctctgttgcaagcgcccttagggtctgtgccagcctggctgatcttcatatgggtacacagctgcatgctttgattgctaaatctggaatccatgctgatctcactgcaagcaactcgcttctttcaatgtatgcgaaggctggcttgataaacgaagcaacaatgttctttgatgagattgctgtcaaggacacaatctcttatggtgcacttttgtcagggtgtgtgcagaatggcaaggcagaggaagcatttcttgtctttaagaagatgcaagcctgcaacatggagccggatatcgcgacgatggtgtctctgatcccagcttgttctcatctggctgctttgcagcatgggaagtgcagtcatggctctgtcataatccgtgggcttgcattagaaacctcgatatgtaattctttgatcgatatgtacgcaaaatgtggaaagattgatctgtccaggcaggtttttgacaagatgccagctcgagatgttgtatcatggaatacaatgattgcaggatatggaattcatggactggggaaggaagctactacattgttccttggtatgaagaatcaaggttttgcaccggatgatgtcacattcatctgtctaatagctgcgtgtagtcattctgggcttgtgactgaagggaagcactggtttgatacgatgacacacaagtatggtatacttccaaggatggagcactatatatgcatggttgatcttttggcaagaggtggtttgcttgatgaggcctatcagtttatccagagcatgccactgaaagctgatgttcgtgtatggggagccctgcttggagcttgtcggattcataagaacattgatttaggaaagcaagtgtcaaggataatccagaaactgggacctgaggggactggcaactttgttctgttgtccaacatatttagtgctgctggaagatttgatgaggcagcagaagttcgaataatacagaaggtcaagggctttaagaagagtcctggctacagttggatcgagataaatggctccttacatgcatttgttggtggagaccaatctcatccatgttcacgtgacatatatcatgaacttgataatatcatggtagacattaagaaactaggctaccaggccgacactagttttgttttgcaagatctggaggaagaggaaaaggaaaaggcacttctttatcatagtgaaaagctagcgatagcttttggtgtcctcagtcttaatgaggataagaccatctttgttacgaagaatctccgtgtatgtggagactgccatactgccatcaaatacatgaccttagttaggaacaggactatcattgttagagataccaatagatttcatcacttcaagaatgggcaatgcagttgtggaaatttctggttgtctatactgttactcatgacgatccatgttgcattcattgcctcatggcatgaatctgagaatttagacaaggtgtcaagaaacaaaattgcaaaacttcagggtaaatctcagatagtgcaagatgaacttgcaaggctaggagaacagatggtacaaagtgctgaaggaacaagagctgttgctctggagctatgtcgagaatttgaagataaatttcttgctcatattacttctggtaaggggtccggttggaaaatagttgcaagttttgaaggcaagtttcctgataggattaaacaacttccattggacaggcattttgatttgaataacatgaagaggattgtgttggaagcggatggctatcaaccttatttgatatctccagagaagggtttacgatccttaaaaaaaggagttcttgaaaaggccaaggagccatcacgactctgtgttgaagaggtacaccgagttttgttagacatagtaaatgctgctgcaaatgctacaccaggactaggaagataccctccattcaagcgggaggtcattgcaattgcatctaatgcattagatgctttcaaaattgacgcgaaaaagatggtggttgcacttgttgatatggagcgagcttttgttcctccacaacacttcatccgattagtacagaggagaatggaaagacagcgccgtgaggatgagttgaaaaataacagagcatctaagaaagggcaagatgcagaacagttcaagatgaaccgggcttcaagcccccaaacagtatctgatgaaggtggtggtaacctgaaatcaatgaaggataaatccaatcagcaagataaggatacaaaggagggaccaaatttgcaggttactttgaagagaagtgcaaaaaataatgaatggagcaaaaggtggtttgttctaaatgagaagagtgggaagcttggatacactaagaagcaagaggagagacatttccgaggcgtcattgtcctggaggaatgtaacctcgtagagatagaggaggaggagatctcaaagagttctaaggattcgaagaaggcaaatggacaagataaaggcccaagtcttgtttttaagattactaatagggttgcctacaaaagtgtcttaaaaactcacagtgccgttatattgaaggctgagtatggctgacaaaatagaatggatcaagaagataaaaggtgttattcaaagcagagggggctctgttaagggtccaactgaggatagtttatgagacaaagccgttcagatggatcccttgatacaatgacccggaggcctgctgatcctgaagaagaacttcgatggatgtctcaagaagttcgtggttatgttgaagctgttttgaacagttttgccgcaaatgttccaaaggctcttgtactttgccaagtggagaaatcaaaagaagatatgctaaaccaattatacagctcaataagtgcacaaagcaatgcaaagatcgaagaactactccaagaagaccacaatgctaaacgtaggcgggaaaaatatgaaaaacaatcatccctcttatcaaagctcactcgctagctcagcattcatgacaatagagcagcttcatatgcgaacgatagttctggagctgagagtagcccacggtctcctggccactctggtgaggactggaagtccgccttcaactcggcagcaaatgtctctgttaacgggtccagttcacagcatgagacaaggtcaagaagtgctgatag

SEQ ID NO: 44473 - DNA, 2267 bp, Zea Mays
ttctcttctccccaatctgattcactaccccctccgtcgtcgccgccgccgccgcaacagcagccatgtccccgtcgctcctcctgcttcactcctctgcgactccttgtagggggcttctgcctccgccatccagctgcttcgccactttctcgcgcgcctcctcccccctgcggccgcgacaccgcatccgcctcgtgtgcgccgccgagcagcccaacggtgccgcctctcctggctctggctctggaggcgacgccacggcaaacccaaccaacaacggactgcccaagaacaggagggttattctcctcgaatacgtcaaaaatgtccagccagagtttatggagctcttcataaaaagagctccagcacaggttgtcgaggccatgcgccaaacagtgactaatatgatgggcactttaccaccacaatttttcgctgtaactgtctcaacggtattgagtacctcctattcctatggctgttttcccaatggaaaatttacattttgcatgacatttgtgtcttttgattgttgctttgttacgattatcttttatcaaaacaggtcgctgaaaatctggctcagcttatgtacagtgtcctaatgactggatacatgtttaggaatgcacagtaccgtctggaactgcaacagagtttggagcagattgctcttcctgaaccaaaagaagaaaaggtagttgtttgtccaactttgtctccatatacttgtaataggtatatgtgatcagtaaaatgctaaaatgcagggtataaagtccctaaacttactagttgtacaaccaaagtccatgcctctctaatgactatgtcatgtctacatggcattgctaacatggccagctgaccccacatgtcattttccaggtttaccagtccatgtatttatgtgtcttgcactccctactcagctgtcctagctccaagaatcacacctcccacccatgttctttggattttggtgtttggctattttggaagccttcgtatgtcttgatttttgaacatgtggcatggcttttcattgttttatttattatgaagtaataaatctgcagatggacctccagtgggctctatataatatattcgtagttggtatcatacatagagtttagtaatatgcatgttatgtgcttttaggattacgctcctggaactcagaaaaaggtaaccggggaagttatccgttggaacaaggccactggacctgagaaaattgatgctgtaaaatatatagaattacttgaagcagaaatcgatgagctgagccgtcaagttgctaggaaaacatcacaaggaagtaatgagctgttggaatatctgaagagtctagagcctcagaatttgaaggaactcacgagtactgctggcgaggatgtcgtctttgccatgaatgcgttcataaagcgcctgttggcggtctctgactcagagcagatgaagacagcagtctcggaaacaagtgcaagtcagctggccaacttgctgttctggctgatgatcgttgggtacagcatgcgcaacattgaggtgcggttggacatggagcgagtgctgggtgctcccccaaaggtcgccgagctaccaccaccaccatctggaggagagaacatataatacgcagttagaagaatagagccaacaaaccaacctggaattgtagatgtagccatgtaagaatgggctctgaaagatgttgattgaatcaacgattggctggtggcattccattgccttgctttgtactaatatacagcagcactagtaccataggtgattgacttgtcatggctgagtgaggaggcaaagatgcatatccttgaattgatactcttgtgtgcaaagaaatggcaatgcaaattggggaggaagctgttgtttgagctgaaattccagttccagtccgcccagacagacacgcagcagttccgagctcccctccgtcaagtggctgatccgcaaccacctgttggtgcataggctaaggttgagttgtctgtcttgttgattctacttgtcttccttctactccatgttggttaccaggagcgagggagggaaggaaggggaatcgataggattagggtgctgtttggttcacgtatttgtaatgtgataaataactgataatgttaaattatgtttgtttaaatctaactgtaactagatgttaaggattatggtgctatttggttcaaatatttggagtgtgatggtaacattaaatcatgtttgtt

SEQ ID NO: 44474 - DNA, 1650 bp, Zea Mays
ctgcagtatacggtcctcattggtgtcgcgttcctcttctcttctccccaatctgattcactaccccctccgtcgtcgccgccgccgccgcaacagcagccatgtccccgtcgctcctcctgcttcactcctctgcgactccttgtagggggcttctgcctccgccatccagctgcttcgccactttctcgcgcgcctcctcccccctgcggccgcgacaccgcatccgcctcgtgtgcgccgccgagcagcccaacggtgccgcctctcctggctctggctctggaggcgacgccacggcaaacccaaccaacaacggactgcccaagaacaggagggttattctcctcgaatacgtcaaaaatgtccagccagagtttatggagctcttcataaaaagagctccagcacaggttgtcgaggccatgcgccaaacagtgactaatatgatgggcactttaccaccacaatttttcgctggaatgcacagtaccgtctggaactgcaacagagtttggagcagattgctcttcctgaaccaaaagaagaaaaggattacgctcctggaactcagaaaaaggtaaccggggaagttatccgttggaacaaggccactggacctgagaaaattgatgctgtaaaatatatagaattacttgaagcagaaatcgatgagctgagccgtcaagttgctaggaaaacatcacaaggaagtaatgagctgttggaatatctgaagagtctagagcctcagaatttgaaggaactcacgagtactgctggcgaggatgtcgtctttgccatgaatgcgttcataaagcgcctgttggcggtctctgactcagagcagatgaagacagcagtctcggaaacaagtgcaagtcagctggccaacttgctgttctggctgatgatcgttgggtacagcatgcgcaacattgaggtgcggttggacatggagcgagtgctgggtgctcccccaaaggtcgccgagctaccaccaccaccatctggaggagagaacatataatacgcagttagaagaatagagccaacaaaccaacctggaattgtagatgtagccatgtaagaatgggctctgaaagatgttgattgaatcaacgattggctggtggcattccattgccttgctttgtactaatatacagcagcactagtaccataggtgattgacttgtcatggctgagtgaggaggcaaagatgcatatccttgaattgatactcttgtgtgcaaagaaatggcaatgcaaattggggaggaagctgttgtttgagctgaaattccagttccagtccgcccagacagacacgcagcagttccgagctcccctccgtcaagtggctgatccgcaaccacctgttggtgcataggctaaggttgagttgtctgtcttgttgattctacttgtcttccttctactccatgttggttaccaggagcgagggagggaaggaaggggaatcgataggattagggtgctgtttggttcacgtatttgtaatgtgataaataactgataatgttaaattatgtttgtttaaatctaactgtaactagatgttaaggattatggtgctatttggttcaaatatttggagtgtgatggtaacattaaatcatgtttgtt

SEQ ID NO: 44475 - DNA, 1750 bp, Zea Mays
gtttgagtcttccaaaagtacccatgtatattgtccgtcgatccataagatgagcggttcagaggctttgctttgctgctcaagtgctgcagtatacggtcctcattggtgtcgcgttcctcttctcttctccccaatctgattcactaccccctccgtcgtcgccgccgccgccgcaacagcagccatgtccccgtcgctcctcctgcttcactcctctgcgactccttgtagggggcttctgcctccgccatccagctgcttcgccactttctcgcgcgcctcctcccccctgcggccgcgacaccgcatccgcctcgtgtgcgccgccgagcagcccaacggtgccgcctctcctggctctggctctggaggcgacgccacggcaaacccaaccaacaacggactgcccaagaacaggagggttattctcctcgaatacgtcaaaaatgtccagccagagtttatggagctcttcataaaaagagctccagcacaggttgtcgaggccatgcgccaaacagtgactaatatgatgggcactttaccaccacaatttttcgctgtaactgtctcaacggaatgcacagtaccgtctggaactgcaacagagtttggagcagattgctcttcctgaaccaaaagaagaaaaggattacgctcctggaactcagaaaaaggtaaccggggaagttatccgttggaacaaggccactggacctgagaaaattgatgctgtaaaatatatagaattacttgaagcagaaatcgatgagctgagccgtcaagttgctaggaaaacatcacaaggaagtaatgagctgttggaatatctgaagagtctagagcctcagaatttgaaggaactcacgagtactgctggcgaggatgtcgtctttgccatgaatgcgttcataaagcgcctgttggcggtctctgactcagagcagatgaagacagcagtctcggaaacaagtgcaagtcagctggccaacttgctgttctggctgatgatcgttgggtacagcatgcgcaacattgaggtgcggttggacatggagcgagtgctgggtgctcccccaaaggtcgccgagctaccaccaccaccatctggaggagagaacatataatacgcagttagaagaatagagccaacaaaccaacctggaattgtagatgtagccatgtaagaatgggctctgaaagatgttgattgaatcaacgattggctggtggcattccattgccttgctttgtactaatatacagcagcactagtaccataggtgattgacttgtcatggctgagtgaggaggcaaagatgcatatccttgaattgatactcttgtgtgcaaagaaatggcaatgcaaattggggaggaagctgttgtttgagctgaaattccagttccagtccgcccagacagacacgcagcagttccgagctcccctccgtcaagtggctgatccgcaaccacctgttggtgcataggctaaggttgagttgtctgtcttgttgattctacttgtcttccttctactccatgttggttaccaggagcgagggagggaaggaaggggaatcgataggattagggtgctgtttggttcacgtatttgtaatgtgataaataactgataatgttaaattatgtttgtttaaatctaactgtaactagatgttaaggattatggtgctatttggttcaaatatttggagtgtgatggtaacattaaatcatgtttgtt

SEQ ID NO: 44476 - DNA, 4044 bp, Zea Mays
atcctcgtctcaccagtcagcacaggcacggtgtgctttgaccgctaccctcgatcccccgatagcagcagcagcagcagatcctcggcggcgacatggacacccccacggcgaaggcggcatggaacgccaactacggcgtcgtcggcagtggggaccgtcgtcttgccttctcccgccaactctcctccaacgccaccacgccgcgcctcgctcggtacaagcgattggaggttctggctgcctttacaaatgctctgtttctattgttcctgtctttctccttggctgttgaagcattacatgcatttatgcaagatgaatcggagcacaagcattatctgattgtttctgctgtcaccaatcttttggttaatttacttggtgtttggttcttccggaactacgctcgtgttaacataggaatgcagaggatatgaattaccactcggtctgtttgcatgtgttggcagattcaatacggaggcttgatactagcttcttggtttctttcattggggattgagaatgctgaggttctgtgcctgggaatcgtctcagtggcagtgtttatgcttgttttgccgttatttaaagctactggtaatatcctactgcaaatcgcacctagcaatgtgccaccttcagcctttacaaagtgctcgagacagattgctgcttgtgaagatgtctccgaagtatggcaaggtcgattctgggagcttgttcctggtcaggcagttggatctctctccattagggtgaagagcggcgctgacgaccgggcagtccttgaatacacgcatggtttatatcaggatttgggcatacaggatctgacggtccaaactgatgagtttgtagggcctgttagttagacggtaggggttctatcccagcttcacgaaagtgttgttttcagtttttttttcctaccaagtagtttctttcgcaaccgtgtctatctaaacactgtttttttattaagttcatctcacaacaaaaagttttttcacagctattttctccgagaagacaaacggttataaaaataggttcatcgaaaaagctatttttggagtcaaagctaacaaagatcggttcactaccaaagaggacttattagttattgtttctgagctccacatacatgaacatttttagtcacgaacttattagttattgtttctgagctccacatacatgacactgacacgctgctcactgcatacgacatgttagaatagatcagtgttgtgctgacattgtgtgatgaatcaaaataccaattggatgatgctagtttataaaacacaagacacatacacatacatggtgggtatgtacacgaagagaaagaaggtaacaggcaaatctatgttccatgaacaaacaaatggaaggaaggggaaggaactgctgcaagaaaacaaacgcaaggatcatgccctgcctttggcctggtggaaggcgctggagaagttggggatcctgtccaggtggcggagcgcgcgctccgccgtctgccgcgtgcggacgtcgccgttgcggtaggcctccaccagaacggacgccacggtctggtcggccgccacctccagcgcgatgtcctcgacgcgcaggatgcgctccacggcccacaccgcccgccgctgcagcgcctccgtccggttctccaccagtacctccaccacggggcgcagcccctccgcctccccgatcaccagcaccccctccgtcgcgttggccacgccgtcccccagcagcgtcgacagcgccgctagcgccgcctccaccacgcggggatccgcatgctctaggcacgccaccagccgctccaccgccttgcacccgccctccgcaaggcagaacgtctcccgcagcgagcagaagccgccgtgcacgcggcacgtccccattgccccggggggcgggggcgaccgtccctgcccgaagcacccgcacacgaggctgctcccacgacgaggcgccggcacgtccgtcaacctcgaggactgcagcgacaggttctccagcgccatggccgagtagagcagcacagcctcctgcccgctgctcatcatctgctgcaggagctccacgaagagcggcgccagccccacctcccgcgccagctccacgtacgtctcctcctgctgcagcagcgccagcgcgcacgtcaccctgtacagcaccttcaccgccccctccgtgaagggcgccacgtgccggttgccacggatcgtgccccgccggagctccaccagcttcgtggccagcgcccggaacgcgcccagctcctgcagctgccgcgtcaggttccagtccctctcggggaggtcgcccagcagagcgacggccgccgcctgctcctccgtgacgccgctccggtcctcggtgactgtggccaccccgagcaggctgctcaggttgccggtgctgcccccgaggccgagggcgtccgcgagctccgcgcccatgtacggcgacacgttgcgcagcagcttgagggactccacgcggatctcccggtgcgcggcctccacgaactggatgaggctgatggtggccccggagctccggatggcggagaccacgtcgggcaccgtggccggggaggcggtgaggcccacaaggacgttgaggagcttgcactcgatggcgggcccggtgttgctgatgaggtggagcaggctgtgcaccatctcctccgacagcagcgtctccccgctgtggtccagcgggatggaccggaagctggcgcccgacgccaccaggttggccaggatggcggccgacacctccttgagcctcatgggcaggtggccggcgcccagggagaagaggtccttgaccagcggcggcaggatgcccgcctggagcaggatcctggcgctggactcgttcgacgatatctccctcagggccttgagcgtggcctcccgcgccggaaggctgccctcggtcttcatgatggtgaccagcagggccccgacctgctccgccacaaggaccttcacgtcgttggccagcgcaagctcaccgaggaattcagccatggcgagctggacttggggtggaccttggatgagtttggtaagcagaggctgaagcctgccgttctctgccatctgcttgacgtttgtttcgtacttctccaggttcttgagcgtgttctctgctttctccacagccacaccgtgctctgatttgctactggccatcccaaccagcaggagaatggccccgtagattgcgccgatcctttcgcatgtagggtcgaacttggagagctcgtacaatagcgacactgcaagctccctctcttggaaattctcattggacaggaacttgatgatggtgcgtatggtgtcacctttagcaagctcttcctagcaaggaaggagtatatatattatatattcaggagtagtggattcaggaagcaaggaagaggtgaggtgaggtgacggatcggaccttgttttcatcgtcttcctcgacgatgacaccaaggacttggagggccttgagccgaacccttctactgctgctcttaagcaggtcagctatggtgggtatgacgccttgcctgcgcacgagggtcttcttcatgcgggagacgtagaggagggcgcgcagggtgtcgtcgtcgtcgtcttgagcctgagcctcctgtgtggcggtgagggaagccatggccttgtcgagctccttgtcctcgttcctcgccctccactcttggatgacgttgcgcagggcgatgctgggggtgatgtcggtgctgcgcagctccgcctgcgtgagcgggcacgtcggcttccttccgctgtccctgcactccctgaaccacttgaggatggcctcccgctcgaaggtctgcccggtctcgatggtgacagggtcgtgcatcacctgcttggtgagagggcacatgaaggcctcgaacgccggctcctggttggattgctcgtccagctcgctgtcgccgccgcagaaaccttccatcttgttccactccgatccaattccgatggtgagggc

SEQ ID NO: 44477 - DNA, 4474 bp, Zea Mays
atcctcgtctcaccagtcagcacaggcacggtgtgctttgaccgctaccctcgatcccccgatagcagcagcagcagcagatcctcggcggcgacatggacacccccacggcgaaggcggcatggaacgccaactacggcgtcgtcggcagtggggaccgtcgtcttgccttctcccgccaactctcctccatctccatgcccgccccccttccccttcccccagtctacgaggggcccaagcccagcaggaagctactccgcctcgccacggccagccgccccatgcgccgcctcgccctcctcctcgccctcaacgttgcctactctgccaccgagttcgccatcggcctcttcaccggacgcgtaggcttagtttcagatgctttccatctcacctttggatgcggcttgttaactttctcattgtttgctatggctgcatcccgaaccaagcctgataacctctacacctatgggtacaagcgattggaggttctggctgcctttacaaatgctgtaagcttccaaaaccttccatcttatggatacgtgtgcatacatttgtacagagttctcccagattaataatgtacaagcccatctttcaagtttatgttaaacatttgtttgatgatagagctgaaattcatccatggtttacatctttgcttggttatcacgtgtaatgtccctactccctacaacttgccggaaaaaaacaccctgtttgtattacacttttaaccctttctgtccttttgctttgtgctaacattttgaccaccaccctatggttctttatgtagacagctgtttctattgttcctgtctttctccttggctgttgaagcattacatgcatttatgcaagatgaatcggagcacaagcattatctgattgtttctgctgtcaccaatcttttggttaatttacttggtgtttggttcttccggaactacgctcgtgttaacatagtttacaggaatgcagaggatatgaattaccactcggtctgtttgcatgtgttggcagattcaatacggagtgcaggcttgatactagcttcttggtttctttcattggggattgagaatgctgaggttctgtgcctgggaatcgtctcagtggcagtgtttatgcttgttttgccgttatttaaagctactggtaatatcctactgcaaatcgcacctagcaatgtgccaccttcagcctttacaaagtgctcgagacagattgctgcttgtgaagatgtctccgaagtatggcaaggtcgattctgggagcttgttcctggtcaggcagttggatctctctccattagggtgaagagcggcgctgacgaccgggcagtccttgaatacacgcatggtttatatcaggatttgggcatacaggatctgacggtccaaactgatgagtttgtagggcctgttagttagacgctattttctccgagaagacaaacggttataaaaataggttcatcgaaaaagctatttttggagtcaaagctaacaaagatcggttcactaccaaagaggacttattagttattgtttctgagctccacatacatgaacatttttagtcacgaacttattagttattgtttctgagctccacatacatgacactgacacgctgctcactgcatacgacatgttagaatagatcagtgttgtgctgacattgtgtgatgaatcaaaataccaattggatgatgctagtttataaaacacaagacacatacacatacatggtgggtatgtacacgaagagaaagaaggtaacaggcaaatctatgttccatgaacaaacaaatggaaggaaggggaaggaactgctgcaagaaaacaaacgcaaggatcatgccctgcctttggcctggtggaaggcgctggagaagttggggatcctgtccaggtggcggagcgcgcgctccgccgtctgccgcgtgcggacgtcgccgttgcggtaggcctccaccagaacggacgccacggtctggtcggccgccacctccagcgcgatgtcctcgacgcgcaggatgcgctccacggcccacaccgcccgccgctgcagcgcctccgtccggttctccaccagtacctccaccacggggcgcagcccctccgcctccccgatcaccagcaccccctccgtcgcgttggccacgccgtcccccagcagcgtcgacagcgccgctagcgccgcctccaccacgcggggatccgcatgctctaggcacgccaccagccgctccaccgccttgcacccgccctccgcaaggcagaacgtctcccgcagcgagcagaagccgccgtgcacgcggcacgtccccattgccccggggggcgggggcgaccgtccctgcccgaagcacccgcacacgaggctgctcccacgacgaggcgccggcacgtccgtcaacctcgaggactgcagcgacaggttctccagcgccatggccgagtagagcagcacagcctcctgcccgctgctcatcatctgctgcaggagctccacgaagagcggcgccagccccacctcccgcgccagctccacgtacgtctcctcctgctgcagcagcgccagcgcgcacgtcaccctgtacagcaccttcaccgccccctccgtgaagggcgccacgtgccggttgccacggatcgtgccccgccggagctccaccagcttcgtggccagcgcccggaacgcgcccagctcctgcagctgccgcgtcaggttccagtccctctcggggaggtcgcccagcagagcgacggccgccgcctgctcctccgtgacgccgctccggtcctcggtgactgtggccaccccgagcaggctgctcaggttgccggtgctgcccccgaggccgagggcgtccgcgagctccgcgcccatgtacggcgacacgttgcgcagcagcttgagggactccacgcggatctcccggtgcgcggcctccacgaactggatgaggctgatggtggccccggagctccggatggcggagaccacgtcgggcaccgtggccggggaggcggtgaggcccacaaggacgttgaggagcttgcactcgatggcgggcccggtgttgctgatgaggtggagcaggctgtgcaccatctcctccgacagcagcgtctccccgctgtggtccagcgggatggaccggaagctggcgcccgacgccaccaggttggccaggatggcggccgacacctccttgagcctcatgggcaggtggccggcgcccagggagaagaggtccttgaccagcggcggcaggatgcccgcctggagcaggatcctggcgctggactcgttcgacgatatctccctcagggccttgagcgtggcctcccgcgccggaaggctgccctcggtcttcatgatggtgaccagcagggccccgacctgctccgccacaaggaccttcacgtcgttggccagcgcaagctcaccgaggaattcagccatggcgagctggacttggggtggaccttggatgagtttggtaagcagaggctgaagcctgccgttctctgccatctgcttgacgtttgtttcgtacttctccaggttcttgagcgtgttctctgctttctccacagccacaccgtgctctgatttgctactggccatcccaaccagcaggagaatggccccgtagattgcgccgatcctttcgcatgtagggtcgaacttggagagctcgtacaatagcgacactgcaagctccctctcttggaaattctcattggacaggaacttgatgatggtgcgtatggtgtcacctttagcaagctcttcctagcaaggaaggagtatatatattatatattcaggagtagtggattcaggaagcaaggaagaggtgaggtgaggtgacggatcggaccttgttttcatcgtcttcctcgacgatgacaccaaggacttggagggccttgagccgaacccttctactgctgctcttaagcaggtcagctatggtgggtatgacgccttgcctgcgcacgagggtcttcttcatgcgggagacgtagaggagggcgcgcagggtgtcgtcgtcgtcgtcttgagcctgagcctcctgtgtggcggtgagggaagccatggccttgtcgagctccttgtcctcgttcctcgccctccactcttggatgacgttgcgcagggcgatgctgggggtgatgtcggtgctgcgcagctccgcctgcgtgagcgggcacgtcggcttccttccgctgtccctgcactccctgaaccacttgaggatggcctcccgctcgaaggtctgcccggtctcgatggtgacagggtcgtgcatcacctgcttggtgagagggcacatgaaggcctcgaacgccggctcctggttggattgctcgtccagctcgctgtcgccgccgcagaaaccttccatcttgttccactccgatccaattccgatggtgagggc

SEQ ID NO: 44478 - DNA, 3815 bp, Zea Mays
atcctcgtctcaccagtcagcacaggcacggtgtgctttgaccgctaccctcgatcccccgatagcagcagcagcagcagatcctcggcggcgacatggacacccccacggcgaaggcggcatggaacgccaactacggcgtcgtcggcagtggggaccgtcgtcttgccttctcccgccaactctcctccaacgccaccacgccgcgcctcgctcggtacaagcgattggaggttctggctgcctttacaaatgctctgtttctattgttcctgtctttctccttggctgttgaagcattacatgcatttatgcaagatgaatcggagcacaagcattatctgattgtttctgctgtcaccaatcttttggttaatttacttggtgtttggttcttccggaactacgctcgtgttaacataggaatgcagaggatatgaattaccactcggtctgtttgcatgtgttggcagattcaatacggagtgcaggcttgatactagcttcttggtttctttcattggggattgagaatgctgaggttctgtgcctgggaatcgtctcagtggcagtgtttatgcttgttttgccgttatttaaagctactggtaatatcctactgcaaatcgcacctagcaatgtgccaccttcagcctttacaaagtgctcgagacagattgctgcttgtgaagatgtctccgaagtatggcaaggtcgattctgggagcttgttcctggtcaggcagttggatctctctccattagggtgaagagcggcgctgacgaccgggcagtccttgaatacacgcatggtttatatcaggatttgggcatacaggatctgacggtccaaactgatgagtttgtagggcctgttagttagacgctattttctccgagaagacaaacggttataaaaataggttcatcgaaaaagctatttttggagtcaaagctaacaaagatcggttcactaccaaagaggacttattagttattgtttctgagctccacatacatgaacatttttagtcacgaacttattagttattgtttctgagctccacatacatgacactgacacgctgctcactgcatacgacatgttagaatagatcagtgttgtgctgacattgtgtgatgaatcaaaataccaattggatgatgctagtttataaaacacaagacacatacacatacatggtgggtatgtacacgaagagaaagaaggtaacaggcaaatctatgttccatgaacaaacaaatggaaggaaggggaaggaactgctgcaagaaaacaaacgcaaggatcatgccctgcctttggcctggtggaaggcgctggagaagttggggatcctgtccaggtggcggagcgcgcgctccgccgtctgccgcgtgcggacgtcgccgttgcggtaggcctccaccagaacggacgccacggtctggtcggccgccacctccagcgcgatgtcctcgacgcgcaggatgcgctccacggcccacaccgcccgccgctgcagcgcctccgtccggttctccaccagtacctccaccacggggcgcagcccctccgcctccccgatcaccagcaccccctccgtcgcgttggccacgccgtcccccagcagcgtcgacagcgccgctagcgccgcctccaccacgcggggatccgcatgctctaggcacgccaccagccgctccaccgccttgcacccgccctccgcaaggcagaacgtctcccgcagcgagcagaagccgccgtgcacgcggcacgtccccattgccccggggggcgggggcgaccgtccctgcccgaagcacccgcacacgaggctgctcccacgacgaggcgccggcacgtccgtcaacctcgaggactgcagcgacaggttctccagcgccatggccgagtagagcagcacagcctcctgcccgctgctcatcatctgctgcaggagctccacgaagagcggcgccagccccacctcccgcgccagctccacgtacgtctcctcctgctgcagcagcgccagcgcgcacgtcaccctgtacagcaccttcaccgccccctccgtgaagggcgccacgtgccggttgccacggatcgtgccccgccggagctccaccagcttcgtggccagcgcccggaacgcgcccagctcctgcagctgccgcgtcaggttccagtccctctcggggaggtcgcccagcagagcgacggccgccgcctgctcctccgtgacgccgctccggtcctcggtgactgtggccaccccgagcaggctgctcaggttgccggtgctgcccccgaggccgagggcgtccgcgagctccgcgcccatgtacggcgacacgttgcgcagcagcttgagggactccacgcggatctcccggtgcgcggcctccacgaactggatgaggctgatggtggccccggagctccggatggcggagaccacgtcgggcaccgtggccggggaggcggtgaggcccacaaggacgttgaggagcttgcactcgatggcgggcccggtgttgctgatgaggtggagcaggctgtgcaccatctcctccgacagcagcgtctccccgctgtggtccagcgggatggaccggaagctggcgcccgacgccaccaggttggccaggatggcggccgacacctccttgagcctcatgggcaggtggccggcgcccagggagaagaggtccttgaccagcggcggcaggatgcccgcctggagcaggatcctggcgctggactcgttcgacgatatctccctcagggccttgagcgtggcctcccgcgccggaaggctgccctcggtcttcatgatggtgaccagcagggccccgacctgctccgccacaaggaccttcacgtcgttggccagcgcaagctcaccgaggaattcagccatggcgagctggacttggggtggaccttggatgagtttgccacaccgtgctctgatttgctactggccatcccaaccagcaggagaatggccccgtagattgcgccgatcctttcgcatgtagggtcgaacttggagagctcgtacaatagcgacactgcaagctccctctcttggaaattctcattggacaggaacttgatgatggtgcgtatggtgtcacctttagcaagctcttcctagcaaggaaggagtatatatattatatattcaggagtagtggattcaggaagcaaggaagaggtgaggtgaggtgacggatcggaccttgttttcatcgtcttcctcgacgatgacaccaaggacttggagggccttgagccgaacccttctactgctgctcttaagcaggtcagctatggtgggtatgacgccttgcctgcgcacgagggtcttcttcatgcgggagacgtagaggagggcgcgcagggtgtcgtcgtcgtcgtcttgagcctgagcctcctgtgtggcggtgagggaagccatggccttgtcgagctccttgtcctcgttcctcgccctccactcttggatgacgttgcgcagggcgatgctgggggtgatgtcggtgctgcgcagctccgcctgcgtgagcgggcacgtcggcttccttccgctgtccctgcactccctgaaccacttgaggatggcctcccgctcgaaggtctgcccggtctcgatggtgacagggtcgtgcatcacctgcttggtgagagggcacatgaaggcctcgaacgccggctcctggttggattgctcgtccagctcgctgtcgccgccgcagaaaccttccatcttgttccactccgatccaattccgatggtgagggc

SEQ ID NO: 44479 - DNA, 4488 bp, Zea Mays
caagatccaacggccacaatcctcatcctcgtctcaccagtcagcacaggcacggtgtgctttgaccgctaccctcgatcccccgatagcagcagcagcagcagatcctcggcggcgacatggacacccccacggcgaaggcggcatggaacgccaactacggcgtcgtcggcagtggggaccgtcgtcttgccttctcccgccaactctcctccatctccatgcccgccccccttccccttcccccagtctacgaggggcccaagcccagcaggaagctactccgcctcgccacggccagccgccccatgcgccgcctcgccctcctcctcgccctcaacgttgcctactctgccaccgagttcgccatcggcctcttcaccggacgcgtaggcttagtttcagatgctttccatctcacctttggatgcggcttgttaactttctcattgtttgctatggctgcatcccgaaccaagcctgataacctctacacctatgggccagtctcctcattccctcccgcctttcaggctctatttctgttcgtctgtgcactaattcacactcacttattgttgtctgctttctttcaggtacaagcgattggaggttctggctgcctttacaaatgctgtaagcttccaaaaccttccatcttatggatacgtgtgcatacatttgtacagagttctcccagattaataatgtacaagcccatctttcaagtttatgttaaacatttgtttgatgatagagctgaaattcatccatggtttacatctttgcttggttatcacgtgtaatgtccctactccctacaacttgccggaaaaaaacaccctgtttgtattacacttttaaccctttctgtccttttgctttgtgctaacattttgaccaccaccctatggttctttatgtagacagctgtttctattgttcctgtctttctccttggctgttgaagcattacatgcatttatgcaagatgaatcggagcacaagcattatctgattgtttctgctgtcaccaatcttttggttaatttacttggtgtttggttcttccggaactacgctcgtgttaacataggaatgcagaggatatgaattaccactcggtctgtttgcatgtgttggcagattcaatacggagtgcaggcttgatactagcttcttggtttctttcattggggattgagaatgctgaggttctgtgcctgggaatcgtctcagtggcagtgtttatgcttgttttgccgttatttaaagctactggtaatatcctactgcaaatcgcacctagcaatgtgccaccttcagcctttacaaagtgctcgagacagattgctgcttgtgaagatgtctccgaagtatggcaaggtcgattctgggagcttgttcctggtcaggcagttggatctctctccattagggtgaagagcggcgctgacgaccgggcagtccttgaatacacgcatggtttatatcaggatttgggcatacaggatctgacggtccaaactgatgagtttgtagggcctgttagttagacgctattttctccgagaagacaaacggttataaaaataggttcatcgaaaaagctatttttggagtcaaagctaacaaagatcggttcactaccaaagaggacttattagttattgtttctgagctccacatacatgaacatttttagtcacgaacttattagttattgtttctgagctccacatacatgacactgacacgctgctcactgcatacgacatgttagaatagatcagtgttgtgctgacattgtgtgatgaatcaaaataccaattggatgatgctagtttataaaacacaagacacatacacatacatggtgggtatgtacacgaagagaaagaaggtaacaggcaaatctatgttccatgaacaaacaaatggaaggaaggggaaggaactgctgcaagaaaacaaacgcaaggatcatgccctgcctttggcctggtggaaggcgctggagaagttggggatcctgtccaggtggcggagcgcgcgctccgccgtctgccgcgtgcggacgtcgccgttgcggtaggcctccaccagaacggacgccacggtctggtcggccgccacctccagcgcgatgtcctcgacgcgcaggatgcgctccacggcccacaccgcccgccgctgcagcgcctccgtccggttctccaccagtacctccaccacggggcgcagcccctccgcctccccgatcaccagcaccccctccgtcgcgttggccacgccgtcccccagcagcgtcgacagcgccgctagcgccgcctccaccacgcggggatccgcatgctctaggcacgccaccagccgctccaccgccttgcacccgccctccgcaaggcagaacgtctcccgcagcgagcagaagccgccgtgcacgcggcacgtccccattgccccggggggcgggggcgaccgtccctgcccgaagcacccgcacacgaggctgctcccacgacgaggcgccggcacgtccgtcaacctcgaggactgcagcgacaggttctccagcgccatggccgagtagagcagcacagcctcctgcccgctgctcatcatctgctgcaggagctccacgaagagcggcgccagccccacctcccgcgccagctccacgtacgtctcctcctgctgcagcagcgccagcgcgcacgtcaccctgtacagcaccttcaccgccccctccgtgaagggcgccacgtgccggttgccacggatcgtgccccgccggagctccaccagcttcgtggccagcgcccggaacgcgcccagctcctgcagctgccgcgtcaggttccagtccctctcggggaggtcgcccagcagagcgacggccgccgcctgctcctccgtgacgccgctccggtcctcggtgactgtggccaccccgagcaggctgctcaggttgccggtgctgcccccgaggccgagggcgtccgcgagctccgcgcccatgtacggcgacacgttgcgcagcagcttgagggactccacgcggatctcccggtgcgcggcctccacgaactggatgaggctgatggtggccccggagctccggatggcggagaccacgtcgggcaccgtggccggggaggcggtgaggcccacaaggacgttgaggagcttgcactcgatggcgggcccggtgttgctgatgaggtggagcaggctgtgcaccatctcctccgacagcagcgtctccccgctgtggtccagcgggatggaccggaagctggcgcccgacgccaccaggttggccaggatggcggccgacacctccttgagcctcatgggcaggtggccggcgcccagggagaagaggtccttgaccagcggcggcaggatgcccgcctggagcaggatcctggcgctggactcgttcgacgatatctccctcagggccttgagcgtggcctcccgcgccggaaggctgccctcggtcttcatgatggtgaccagcagggccccgacctgctccgccacaaggaccttcacgtcgttggccagcgcaagctcaccgaggaattcagccatggcgagctggacttggggtggaccttggatgagtttgccacaccgtgctctgatttgctactggccatcccaaccagcaggagaatggccccgtagattgcgccgatcctttcgcatgtagggtcgaacttggagagctcgtacaatagcgacactgcaagctccctctcttggaaattctcattggacaggaacttgatgatggtgcgtatggtgtcacctttagcaagctcttcctagcaaggaaggagtatatatattatatattcaggagtagtggattcaggaagcaaggaagaggtgaggtgaggtgacggatcggaccttgttttcatcgtcttcctcgacgatgacaccaaggacttggagggccttgagccgaacccttctactgctgctcttaagcaggtcagctatggtgggtatgacgccttgcctgcgcacgagggtcttcttcatgcgggagacgtagaggagggcgcgcagggtgtcgtcgtcgtcgtcttgagcctgagcctcctgtgtggcggtgagggaagccatggccttgtcgagctccttgtcctcgttcctcgccctccactcttggatgacgttgcgcagggcgatgctgggggtgatgtcggtgctgcgcagctccgcctgcgtgagcgggcacgtcggcttccttccgctgtccctgcactccctgaaccacttgaggatggcctcccgctcgaaggtctgcccggtctcgatggtgacagggtcgtgcatcacctgcttggtgagagggcacatgaaggcctcgaacgccggctcctggttggattgctcgtccagctcgctgtcgccgccgcagaaaccttccatcttgttccactccgatccaattccgatggtgagggc

SEQ ID NO: 44480 - DNA, 704 bp, Zea Mays
tggaaatgatccaggtgagcaggttggtgctgcaggttcagagaaggctggtggaaacgatgtggatggacaggatgtcgttgttggtgtttcggggaagactggcgcagatagtgcagagaagcagcagggtattgtgggtaccgagaagacaggtgagcacagcatagagatggttgattcactgatagaggagaagatggatgacgacaatggcgagaatgaggttaggcttgcggcttcacagtgatgattgattggagatggacaagagaagtagtagttcattcaatgacggattgaagggatgcgacgtggaatgggcttgctttggagattgacgattgacatgttgtgcgagccttgatattggcgatatattttgttttctgtcgtgttttcactttgtttttcttactacaacttgcagcttcttatgatgatgatgcaaaagtcgcagacatggaggaaataactgagatgatgaatatgttgttgtaatcattgtcccagatgggtggtgtgctgatgtcgtgctgtttatgtgttgcttatttctatccagctgtggtggatatgtatctgaatctgaatgtatcgtctgtttatgtcatttgcttggattgtaaaatggggtagcatgtttatatcttactactctcatcacatgataagtgaatattggactgtcttgttaaatagcg

SEQ ID NO: 44481 - DNA, 737 bp, Zea Mays
gcagcaggttgctgcgggttcagagaagaccgatgcgcacaatgcagagaagcagcagggtgctgcaggttcagagaaggctggtggaaacgatgtggatggacaggatgtcgttgttggtgtttcggggaagactggcgcagatagtgcagagaagcagcagggtattgtgggtaccgagaagacaggtgagcacagcatagagatggttgattcactgatagaggagaagatggatgacgacaatggcgagaatgaggttaggcttgcggcttcacagtgatgattgattggagatggacaagagaagtagtagttcattcaatgacggattgaagggatgcgacgtggaatgggcttgctttggagattgacgattgacatgttgtgcgagccttgatattggcgatatattttgttttctgtcgtgttttcactttgtttttcttactacaacttgcagcttcttatgatgatgatgcaaaagtcgcagacatggaggaaataactgagatgatgaatatgttgttgtaatcattgtcccagatgggtggtgtgctgatgtcgtgctgtttatgtgttgcttatttctatccagctgtggtggatatgtatctgaatctgaatgtatcgtctgtttatgtcatttgcttggattgtaaaatggggtagcatgtttatatcttactactctcatcacatgataagtgaatattggactgtcttgttaaatagcg

SEQ ID NO: 44482 - DNA, 2758 bp, Zea Mays
atggcgcgcatcatgacaacaaggcggtcggacagcatcgccgacatgatgcccgaagctctgcgccagagccggtactacatgaagagctgcttccagcggtacgtctcccggggcagcaggctcatgaagcagcagcatctcctggaggagctccacgccggtagctcggacagcttcctcgggcacgtcatttcctgcacgcacgaggccgtggtgctccctccctacgtggccttggccgtgcggaggaaccctggcgtctgggagtacatcaccgtccactccggcgacctcaccgtccagcagatcacgccctccgactacctgaggcgcaaggaaagcctatacgacgaccactgggcgcaggacgacaactccctggaggtgaacttgagcctctgcctctccacgccccgcctcacgctgccttcctccatcggcaacggcatgcacttgctgtccagattcctgtcctccagcctcggcggcgtgaacaagatcaagccactgctggactacctgctggcgctcaggtaccagaacactaagctactcatcagcgacaccctcctcgacacggtgggcaagcttcaggccgcgctgctcctcgcccaggccttcgtctccgagcagcacccggacacgccgttccagcagatggcgcacaggttccacgagtggggactggagaaaggatggggcgacaccgccggggcgtgcggccagacgctgggcttcctctccgagatgctccaggcgccggaccctgtcagcgtggacaggttcttcagcagggtgccgtcggtgttcgacgtcgtcatcttctccgtccatggctacttcgggcagcacaaggtcctggggatgcccgacaccggcggccaggtcgtgtacatcctggaccaagttagagcgcttgaggaggagcttcttcaaagaatcaaagggcagggcctcactttcaagcccaacatccttgtggtcacaaggctcataccagaagcaaagggcaccacctgcaacgtggagctggaacctattgacaagacaaggcactccagcatcctccgtgtgccattcaagacccaagatggccaggatctgccccactgggtctcccgcttcgacatctacccttacctagagagatacgcccaggattcttgtaccaagatccttcatatattggggcgcaaaccagacctggtcatcggcaattacactgatggcaatttagtagcttacctggtgtcaaggaagctaggagttacccaggggacgattgcgcatgctctcgagaagacaaagtatgaggattccgatgtcaagtggagggaaatggaccacaggtatcatttctcatgccagtttactgctgatatgatcgcgatgaacaccagcgacttcatcatcgctagcacctaccaagaaatagcaggaagcaaagacaaacctggccagtatgagagccactatgcgttcacaatgccagggctctgccgcttcgctacaggcatcagcgtcttcgaccccaagttcaatatcgctgcgcctggcgcagatcaatctgtttatttccccttcacactaaagcacaagcgcctcatgggcttgcacccacagatcgaggagctagtctacggcaaagaggaaaatgatgagcacatagggtacttgcaagacaggagcaagccggtcatattttcaatggcaaggcttgacaaggtcaagaacatcactgggctggttgaatggtatggccagaacaagaggctcagggaccttgctaaccttgtagtcgtgggagggctcctggaccccaagcactccaaggacagggaggagattgaggagataaacgagatgcacagtttgatcaacaagtaccagctcaaggggcagatccgctggataaaagcccagacagaccgtgtgcgcaacggggaactttaccgttgcgtagcagataccaggggagcctttgttcagcctgcgctctatgaagcgttcggactaactgtcattgaggcaatgaactgtgggctgccaacctttgcaacaaatcagggaggccccgcagaaatcatcgtcaatgaggtctccggtttccatatcaatccacttgatggcaaagaggcaagcaacaagattgccaacttcttccagaaatgcaacgaagatccaatgtactggaacagaatgtccactgctggactgcaacgcatctacgaatgctacacctggcagatctatgcaaccaaagttctgaacatggggtccatgtatggcttctggaggactctggataaacaagagaagcaggacaaacagcattacctaaacatgttctacaaccttcattataggaagctggcaaatacggtgccaaaagtgggcgaacagcctgagcaagctacggcagcggcattgcctgataggtcggcaacaaggccaaaagaaagagggacacagataaggattcaaagaactgtgagcaacttacttggaccagtgcttccagcctcccatctctcggatgctgcctgaattgaggggctatcctgaccaaaaccagatgtgtgcccgagtgataatctgtttcctccttttttttcctcataactgtcattgactgcgaaagatgtaaatggaaaataagtaaataaatgtgttaaaaacagtaaataaaataaaatagtagatgtccatgatgattgtgaaagcaataggtactggccagagttgcaagctgccc

SEQ ID NO: 44483 - DNA, 3108 bp, Zea Mays
atcataacgaaagttatttattagtccaaagtgtcactgaatcaggcatcaaccagaccacacaagacgacacggcactgttgagcagagactagagtgagagagtagcagccggtgcagggctggcttggcagattgggatcccctcccctccctcctcccacccccttgccttgagctgggggttcgttcaggaagctgatctgagagctcgcgaccgcaaccacaaccaacccaaaaagctgcagcagatccatccttctcacccgaaacaatcgatcccctcttatagacttcgcctgcctccaacccttaatcttcagctatggattcagccgccgcgcgacccgacgaggaggaggcgcgccgccgccggagcaccgactgcatctacttcctcgcctccccgttgacctgcaaaaagggaagtgaatgcgagtaccgtcatagcgatgctgcgaggatgaatcccagggactgctggtattggttccatggcaactgcgcaaatcctaaatgctcctttaggcacccgacaacatggccggagcaccaacgactccacgtccagctcaacagtctgtaccccatcaagcttcagcttctgttccagctcagccccagggatctgttcctgccactgccaagcagggtgttccatgctattactttcagaagggcatgtgcacgaaaggggacaggtgtgcctttctgcatgcgccccggtctgctggaaaccctgctccacagcctccggccaaggtcttcaccacccctgccttgcagcctaatctccatccaccgttgaacaactcgtggacaaaacccaacttgagtgctcctgcagtagccgtagttgacaagccaaaggccagcacttatcatgatggtaaaccgcttcatcacaaggaaaatctgacgagtaggaccgaaaacccatcaagagtagtttatcagaatcacagtagttcttatgcacagcccggtgcaccaaagcgttaccagcctcagccttcagcccgagatggcttaaccgacaatggtatggaggctggcgaatttgcgagagaaccatccgccggttcttgtgtaactgccggttttaatggtgctggagggatgacgaggcaaacacatggtggctatgaaccagaaaggtcatacagaaattcagcagagaggtcttcgtcagagaaaaggattccccagagagagcatatcccctctgtggctgccggcagttcggatctgcgccataggctactgaagcaaagaaagtccaataataattcaaggtcggctgaagccctgggcaggcatgatacacatcttgaggatgagcgcaatgaccaacatcgtccgcgaggtgaacagcaggatggcctctcacggtctcgactgcatgatagaataagactacctggggagacagcgtttgacagtcttgggtcacggtcagaggagtgggatagagggtctagagccagattgtcgccaccaaaatcctcagatcttcgagggaggcttcatgaaaggctaaagggtagattgggtgaggagataccgggtagcagtgcaaaaggtttggcagtgaaggcaagtagcagtgaggatactgaatcactgaactttgctggtccaaagagccttgcagagttgaaggcaaagaaaggtgtcggcaggtcaggagaagatgccgtcgtcaagggcttaggttcttctcgtatgacttcagaaatagtttggagcagggaggctgcttcgtttgaaggtccaaagcccctaagtgccatactgaagagaaaaagagagccagcttctgaaatccccgctgcccagcctggcatcacacaggaagcagataactacgccgcaggagctgaagaagaaatccaaaccctagcaaatgacacggttggggagaacatggaggggattggagaagaagaggaggaagaggaagctttccatcctgaagatgatgtggcgtacgacgataacgccaatgaagctgcagtggcccaagagctggatgagtatgaagacgcagatgcggcagcacaagactatgacgatgaagctgcagctgcccaagaggtggaggagcatcaagacggagaggcagcagcagaagactacgactatgaggaggcagacgtcaacgccgaggaagagaatgagtaccaggactaccaagacgaggacgacgacgatttggaggatggggacgacgattttgcacgaaaagtgagcgtgatgatctcctgatagcgacagaaagcggttcattccccacaaagtgtttatctcctttggcgcgaggtactttttagttcactgcgcaaaagacagagactaatataggtgggagaagagagatagaagaatggacattgttgagaaaatgagctcctccatccatcggagagctcgcttgttgacctgtctgtctgtactgtactactcacgcaaatgtgatgcggcttctctatagactcctgcatgtatttttagttgacatgagaacagtactgtatccgtatttgctgctgcttctttttttttttgaagaaaacatattgctgcctggtagaagatacatctacagttcattctacacgaacccttgcctccagatgtacagtacagtctgtttattcgatgtctatttgtttgtgaacagcacataactagctagtttacacaataatagaacacagtagaagtgaatactgcgctacattaacagcaagcactgctctcttgtttctgacatccatcatctctaggcttgctgactgcaatataaaacatcgcccagcacgctcttcacctagctaaaaacccttgcaaaatatctaccagactcgtcttgctccacaaccaaccaactagcccagaccacaaccctgcaatagtaatttccttctcaggtccgtccaaatccccgatctgatgttaccacgcaatgcaaaaccagtagatgtcacacctcccttgctagtctttgcacttaatgccatcccctctcactgaggttaccaccaacccacattgaaaaggtctacaaagatacaaatattaggtcacgggaacaaaaaaaaaaaa

SEQ ID NO: 44484 - DNA, 6127 bp, Zea Mays
ttccctcctcgcccgcttcctcccgcttgcccgccgccgcatcgagaccgcccaggcacaggatgggcaatacctccggccatgtgatccaagctatgagcaagtattggattctctagccatggttgctagacacacacctctacctcttttggaagctcttcttcggtggagagaaagtgaatccccgaaaggtgctcacgacgcgtcaacataccaaaagaagcttgctgttgagtgcatattctcttctgcctgcattcggtttgctgagtgttgtccacaagagggaataacagaaaaactttggattggcttagaaagtttcgtatttgattggctaattaatgcagacagggttgtgagccaagtagagtatccgtcattggttgatttacgaggtctactcttagatcttgttgcacagcttttaggagctttatcacgcataagattcagttctgtgactgaaaggtttttcatagagcttaatgtgcggcgtattgattcacttgctcttagaagtgagacactcagcataatcaacgggatgcgctaccttaaattgggggtgaagacagagggtgggctgaatgcttctgtatcctttattgcaaaagcaaatcctctaaatcgtcctcccaacaaaagaaagagtgaattgcaacatgctttgtgtaacatgctctcaagtatacttgccccacttgcggagggtggaaaaaaccattggcctccacttggtgtcgaacctgcactgtcactttggtatgatgctgttgcacgaataagagtccagctcatgtattggatggataagcagagcaaacatgttgctgttggctttccacttgtcacccttctactttgtcttggtgatgccaatgcattcaactctagtttttcccagcatatggaaatcctgtataagtatctcaaggataagaaccatcgatcaatggctttggattgtcttcatcggctagtaaaattctatttgaatatttatgccgattaccaacctcgaaatcatgtttgggactatttagacagtgtaacctctcaattactgactgttctgaagaaaggcttgctgacccaagatgtgcagcatgataaacttgttgagttctgtgtgaccttagctcagagcaatctggattttgcaatgaatcatatgatactggaattattgaaaccagatagtttgagtgaagcaaaggttgttggtcttagggctttgctcgagatagttgtttctccatcaaatcaacaaattggcttggatgttttgcaagtatttggtattgggcactatattcctaaggtgaagtcagcaattgagtcaatactaaggtcttgcaacaaggcatatagcctggcacttctcacatcatcaaagactacaatagataatgtaaccaaggataaatctcagggatcactcttcaggtctgtgcttaaatgtatcccatacttgatagaagaggcgggccgtaatgataaaatgactgagattatacctcagcatggcataagtattgaccctggtgttcgtgaagaagcagtgcaagtgttgaacaggatcgtacgttgcctaccaaatcgtaggtttgctgtgttgaaaggaatggccaatttcatcctaaaacttcctgatgaatttcctctcttaattcaaacatcacttggacgcctggtggagctaatgcgtttgtggagagtatgcctatctgaggaggccttggcaaaagacatgcaaagtggtaggcgtttgagtataggaggggatgcactacagaggtctccttttcataggtccagggatgtatctgaatttcgcgcctcagaaatggatgcagttggccttgtctttctcagttctgctgatgttcaaataaggctcactgccctggagttactgcgatgtgttcgagcactgcaaaataatctcagggattactcagcaaatgaatggggtgacaataagctgaaacttgaaccagagccaatatttatcatagatatcatagaggagaatggggaagacattgttcaaagctgttattgggatccgggacgaccttatgatctaagacgtgaaatggaccctattcctttggatgtgactcttcaatccattttggagagtgtagataaaaacagatgggcgcgctacctcagtgaaattgtgaaatatgcagctgaactttgcccgagttctgtgcaggatgcaaggcatgaactctggtcttttctggaacgtctgcacgcacaatttactataattgggcatcttattaactttactgcaaaactccacagattagaggttattagaaggcttgaacagattactcctgccgatctcggtgggaaggctcagcaaccacaagattctgaaactaaacttgaccaatggttgatatatgccatgtttgcatgctcttgtccacctgatattagagaagaattttccatcaaatcagcaagagaagtcttccatatgatttttccatcattgcgtcatggttcagaagcatatgcacttgctgctacatctgcccttggtcactcacatttagaagtatgtgaaatcatgtttggagatctggcattatttgttgaggaggtgtcatcagaaactgaaggaaaacctaaatggaagcagaatcctaggtcccgccgtgaggatctgcgcactcatgttgctaatatacaccgaattctagctgagaaggtttggcctgggatgcttagtcggaaacctgtcctctgccagcattttttgaagttcattgaagaaacataccgccaaattactatttccttggctgatagctttcaagacttgcagcctctgcgatacgcattagcatctgttctgagatacctagctccagaatttgttgatgcgaaagctgagcgatttgacaacagaatacgtaagaagctttttgatcttctccttacttggagtgaggattctggtagttcatggggacaggaaagcagcagcgactatcgtcgtgaaattgaacgatataaaagtaatcaacatacgaggtcaagggaatcatttgacaaacttgcatttgacagggaaatggctgaacagctagaagctattaattgggcttccatgaatgctattgcttcattgctttatgggccttgttttgatgataatgcgagaaagatgtctggccgggtgatatcatggattaatagtttattcatggaaccatctgcaagagcaccttttgggcattcaccagttgatccacgaacaccatcatattcaaagcatactgatggacgttttggtgggagggacaaacagaaaactagccacttgcgactcctcttagcaaaaactgcgctgaagaatattttgcagacaaatctggacttgtttcctgcttgcatagatcagggaagtgaatgcgagtaccgtcatagcgatgctgcgaggatgaatcccagggactgctggtattggttccatggcaactgcgcaaatcctaaatgctcctttaggcacccgccattagacaacatggccggagcaccaacgactccacgtccagctcaacagtctgtaccccatcaagcttcagcttctgttccagctcagccccagggatctgttcctgccactgccaagcagggtgttccatgctattactttcagaagggcatgtgcacgaaaggggacaggtgtgcctttctgcatgcgccccggtctgctggaaaccctgctccacagcctccggccaaggtcttcaccacccctgccttgcagcctaatctccatccaccgttgaacaactcgtggacaaaacccaacttgagtgctcctgcagtagccgtagttgacaagccaaaggccagcacttatcatgatggtaaaccgcttcatcacaaggaaaatctgacgagtaggaccgaaaacccatcaagagtagtttatcagaatcacagtagttcttatgcacagcccggtgcaccaaagcgttaccagcctcagccttcagcccgagatggcttaaccgacaatggtatggaggctggcgaatttgcgagagaaccatccgccggttcttgtgtaactgccggttttaatggtgctggagggatgacgaggcaaacacatggtggctatgaaccagaaaggtcatacagaaattcagcagagaggtcttcgtcagagaaaaggattccccagagagagcatatcccctctgtggctgccggcagttcggatctgcgccataggctactgaagcaaagaaagtccaataataattcaaggtcggctgaagccctgggcaggcatgatacacatcttgaggatgagcgcaatgaccaacatcgtccgcgaggtgaacagcaggatggcctctcacggtctcgactgcatgatagaataagactacctggggagacagcgtttgacagtcttgggtcacggtcagaggagtgggatagagggtctagagccagattgtcgccaccaaaatcctcagatcttcgagggaggcttcatgaaaggctaaagggtagattgggtgaggagataccgggtagcagtgcaaaaggtttggcagtgaaggcaagtagcagtgaggatactgaatcactgaactttgctggtccaaagagccttgcagagttgaaggcaaagaaaggtgtcggcaggtcaggagaagatgccgtcgtcaagggcttaggttcttctcgtatgacttcagaaatagtttggagcagggaggctgcttcgtttgaaggtccaaagcccctaagtgccatactgaagagaaaaagagagccagcttctgaaatccccgctgcccagcctggcatcacacaggaagcagataactacgccgcaggagctgaagaagaaatccaaaccctagcaaatgacacggttggggagaacatggaggggattggagaagaagaggaggaagaggaagctttccatcctgaagatgatgtggcgtacgacgataacgccaatgaagctgcagtggcccaagagctggatgagtatgaagacgcagatgcggcagcacaagactatgacgatgaagctgcagctgcccaagaggtggaggagcatcaagacggagaggcagcagcagaagactacgactatgaggaggcagacgtcaacgccgaggaagagaatgagtaccaggactaccaagacgaggacgacgacgatttggaggatggggacgacgattttgcacgaaaagtgagcgtgatgatctcctgatagcgacagaaagcggttcattccccacaaagtgtttatctcctttggcgcgaggtactttttagttcactgcgcaaaagacagagactaatataggtgggagaagagagatagaagaatggacattgttgagaaaatgagctcctccatccatcggagagctcgcttgttgacctgtctgtctgtactgtactactcacgcaaatgtgatgcggcttctctatagactcctgcatgtatttttagttgacatgagaacagtactgtatccgtatttgctgctgcttctttttttttttgaagaaaacatattgctgcctggtagaagatacatctacagttcattctacacgaacccttgcctccagatgtacagtacagtctgtttattcgatgtctatttgtttgtgaacagcacataactagctagtttacacaataatagaacacagtagaagtgaatactgcgctacattaacagcaagcactgctctcttgtttctgacatccatcatctctaggcttgctgactgcaatataaaacatcgcccagcacgctcttcacctagctaaaaacccttgcaaaatatctaccagactcgtcttgctccacaaccaaccaactagcccagaccacaaccctgcaatagtaatttccttctcaggtccgtccaaatccccgatctgatgttaccacgcaatgcaaaaccagtagatgtcacacctcccttgctagtctttgcacttaatgccatcccctctcactgaggttaccaccaacccacattgaaaaggtctacaaagatacaaatattaggtcacgggaacaaaaaaaaaaaa

SEQ ID NO: 44485 - DNA, 6956 bp, Zea Mays
aagtttcagggggtttctcgacctgcgtgaggtcttctcaatgcaatatcaggggctgtcttatccccagcagggttgtgagccaagtagagtatccgtcattggttgatttacgaggtctactcttagatcttgttgcacagcttttaggagctttatcacgcataagattcagttctgtgactgaaaggtttttcatagagcttaatgtgcggcgtattgattcacttgctcttagaagtgagacactcagcataatcaacgggatgcgctaccttaaattgggggtgaagacagagggtgggctgaatgcttctgtatcctttattgcaaaagcaaatcctctaaatcgtcctcccaacaaaagaaagagtgaattgcaacatgctttgtgtaacatgctctcaagtatacttgccccacttgcggagggtggaaaaaaccattggcctccacttggtgtcgaacctgcactgtcactttggtatgatgctgttgcacgaataagagtccagctcatgtattggatggataagcagagcaaacatgttgctgttggctttccacttgtcacccttctactttgtcttggtgatgccaatgcattcaactctagtttttcccagcatatggaaatcctgtataagtatctcaaggataagaaccatcgatcaatggctttggattgtcttcatcggctagtaaaattctatttgaatatttatgccgattaccaacctcgaaatcatgtttgggactatttagacagtgtaacctctcaattactgactgttctgaagaaaggcttgctgacccaagatgtgcagcatgataaacttgttgagttctgtgtgaccttagctcagagcaatctggattttgcaatgaatcatatgatactggaattattgaaaccagatagtttgagtgaagcaaaggttgttggtcttagggctttgctcgagatagttgtttctccatcaaatcaacaaattggcttggatgttttgcaagtatttggtattgggcactatattcctaaggtgaagtcagcaattgagtcaatactaaggtcttgcaacaaggcatatagcctggcacttctcacatcatcaaagactacaatagataatgtaaccaaggataaatctcagggatcactcttcaggtctgtgcttaaatgtatcccatacttgatagaagaggcgggccgtaatgataaaatgactgagattatacctcagcatggcataagtattgaccctggtgttcgtgaagaagcagtgcaagtgttgaacaggatcgtacgttgcctaccaaatcgtaggtttgctgtgttgaaaggaatggccaatttcatcctaaaacttcctgatgaatttcctctcttaattcaaacatcacttggacgcctggtggagctaatgcgtttgtggagagtatgcctatctgaggaggccttggcaaaagacatgcaaagtggtaggcgtttgagtataggaggggatgcactacagaggtctccttttcataggtccagggatgtatctgaatttcgcgcctcagaaatggatgcagttggccttgtctttctcagttctgctgatgttcaaataaggctcactgccctggagttactgcgatgtgttcgagcactgcaaaataatctcagggattactcagcaaatgaatggggtgacaataagctgaaacttgaaccagagccaatatttatcatagatatcatagaggagaatggggaagacattgttcaaagctgttattgggatccgggacgaccttatgatctaagacgtgaaatggaccctattcctttggatgtgactcttcaatccattttggagagtgtagataaaaacagatgggcgcgctacctcagtgaaattgtgaaatatgcagctgaactttgcccgagttctgtgcaggatgcaagattagaggttattagaaggcttgaacagattactcctgccgatctcggtgggaaggctcagcaaccacaagattctgaaactaaacttgaccaatggttgatatatgccatgtttgcatgctcttgtccacctgatattagagaagaattttccatcaaatcagcaagagaagtcttccatatgatttttccatcattgcgtcatggttcagaagcatatgcacttgctgctacatctgcccttggtcactcacatttagaagtatgtgaaatcatgtttggagatctggcattatttgttgaggaggtgtcatcagaaactgaaggaaaacctaaatggaagcagaatcctaggtcccgccgtgaggatctgcgcactcatgttgctaatatacaccgaattctagctgagaaggtttggcctgggatgcttagtcggaaacctgtcctctgccagcattttttgaagttcattgaagaaacataccgccaaattactatttccttggctgatagctttcaagacttgcagcctctgcgatacgcattagcatctgttctgagatacctagctccagaatttgttgatgcgaaagctgagcgatttgacaacagaatacgtaagaagctttttgatcttctccttacttggagtgaggattctggtagttcatggggacaggaaagcagcagcgactatcgtcgtgaaattgaacgatataaaagtaatcaacatacgaggtcaagggaatcatttgacaaacttgcatttgacagggaaatggctgaacagctagaagctattaattgggcttccatgaatgctattgcttcattgctttatgggccttgttttgatgataatgcgagaaagatgtctggccgggtgatatcatggattaatagtttattcatggaaccatctgcaagagcaccttttgggcattcaccagttgatccacgaacaccatcatattcaaagcatactgatggacgttttggtgggagggacaaacagaaaactagccacttgcgactcctcttagcaaaaactgcgctgaagaatattttgcagacaaatctggacttgtttcctgcttgcatagatcagtgctactctccagaccctcaaatagcagatggctatttcagtgttctggctgaagtctacatgcgccaggagattccaaaatgtgaaatccagagacttgtgagcttgatcctctacaaggtggttgatcagacaaaactaatccgtgacagtgccctccagatgttggagactctctctcttcgcgaatgggctgaagacgatactgatggtgttgggcattaccgggcttctgtcgttggcaacctccccgattcctaccaacaattccagtataagttgtcttcaaagcttgccaaggaccatcctgagctcagtgagcatctgtgcgaggaaataatgcaacgtcagcttgatgcagtggacattattgcacaacatcaggtccttacatgcatggctccttggatagaaaatctcaactttgtgagactgaaggaatctggctggagcgagaggttactgaaaagtctttattatgtgacatggaaacatggtgatcagtttcctgatgagattgagaaactttggagcactgtggcaagcaatactcgcaatatcatcccagttttgaacttcttgatcaccagagggattgaggactgcgatgccaatccatcggcagagatcactggtgcatttgcaacttatttttctgttgcaaagcgtgttagtctatatcttgctcggatctgcccacagcagaccatcgatcacttggtcttcgagctatctcagagaatgctcgaggacgacgaagaaccagtcaggcttgggaaggttgatgtctctgcaaatgttgtattggagttttctcaagggcctactgcctctcaggttgcaacagttgtggatagccagcctcacatgtccccccttcttgttcgtggttcacttgatggtgcagttagaaatgtcagtggaaacctgagctggcggacatctgcagttaccggccgaagtgtatctggcccattgagtccgttggctcatgaggtaagcattccaaacccaacggcaggccgatcaggacagctacttccagcgttaattactatgtcggggccattgagtggtgttcgaagctctgctggtaatctgaggagccgccatgtttccagagatagtggtgactactactttgataccccaaactcaacagatgatattttgcatcaagggggcagtggaattcacgggatcaatgccaatgagctccagtcagcactacaagggcaccaacacttgctttcacgtgctgacatagctttgattcttctggctgaaattgcttatgaaaatgatgaagactttcgtgaaaatttacctctgttgttccacgtcacatgtgtttcgatggatagctcagaagacattgtgctcgagcattgccaagatttgctcgtgaatctcctctactcgttggctggacgtcatcttgaactgtatgagatcgaaagtagtgaaagagagaataagcatcatgtggtgagcttgatcaaatacatccagtctaagaggggcagcttgatgtgggagaacgaggaccctacccttttccggatcgaacttcccagcgcttcactcttatcagcacttgtgcaaagcatggttagtgctattttcttccagggggaccttcgtgagacttggggttctgaagctcttaagtgggccatggagtgcacatctcgtcacctggcttgccggtcgcaccagatataccgtgccttgcgtcccagtgttaaaagtgatagctgcgtattgcttctgagatgcatccatagatgcttggggaatcctgttccagccgttctgggctttgcaatggagatactgctgactttacaggtcatggttgaaaacatggagcctgagaaggttatactttacccgcagctcttttggggctgcgttgcactgatgcataccgactttgtgcacatctactgccaggtgcttgagttgttttgtagagtaatcgatcgcttgacattccgtgaccggacaacagaaaacgtgttgctctcaagcatgccacgtgatgagtttgacatcaatgggtatgcaagtgacctccacaggctggagtctagaactacttcagagagattgctatctgtgactgggaccgggaaggtgcctgcttttgaaggggtgcagccgctggtgctgaaggggctcatgtccacagttagccatggatctgcaatcgagttgctatctaggatcacgatacctacgtgcgactctatatttgggagccccgatacaaggttactgatgcacatcacaggccttcttccatggctcggattgcagctcacgagggaagcaccaccttcccttgggtcagcttcgccactgcaagagcagaaccagaaagcttactatgtgtcatccaatatttcggcatggtgccgtgccaagtctctggacgatttggccgaagtgttcagagcgtattccttcggggaaatcatgtcgttggaagatctgtttgcacgagcttcaccaccaatctgtgcggagtggttccctaggcactcatctttggcctttgggcacctgctgaggctcctggagagaggccctctggattaccagcgggtggttcttctgatgcttaaatcgctgctgcagcaaacccctgtggatccgtcacagataccccaggtgtacaacttcgtgtcgcagctggtggagagcacattatgctcggaggcgctgaatgtgctggaggcgctgctgcggagctgcggcggcggcgggcaaggcgaggaggctgggtttggtgataacggcgggcatgggagcggggagaaggtcctccagagcatgctgcttcctcagtcgtctttcaaggcaaggagtgggccgctgcagtacgctgcggggtcggggttggggtccttgatggggcaaggcggcggtggcagcagcagcgccgcagatagcgggttggtggcacgggatgtagcgctgcagaacacccggctgctgcttgggcgagttcttgatacctgcgcgcttgggcgcaagagggatcacaagcggctggtgccatttgtggcgaacgtcgggtagaccttgccaacatatagcagcacaattttgagtgggcagggcagcagccgccagcagagcgcacgcagagtgcgtgcgtgcgtttgtgaccgggtcagtgtcgtgcaaaggtggccacgcacatagacgtagctgcagttcttgaaactatttatttatttgtttatttattttattgttttgttttgatgagtgaggccgtgtgtgatgtatgtatgcatgtaattcgaaaccaactatggccgtggatggcatttgtattgtggaaaggagagtagaaattgatgatgaaacacaacaaacaggtttggaggcgtccttgtgtggtgtgtggatatgatcagccagtcacagtgtggggatgagagtgaaagttgctttcttgagtttcttccgtcgtgtgtccgggcaccaaggttgtcttcagtggaccgtataaagcaagagatttgcacttagatgatactatttgtatagtaaagtttaaaatagggaatgagataggatacatggtgaggatagccaaagatgataggtgattcaaagtctcctacatagcatcctgactgtgactttgaatcatgacacaacatagcacaagattagttggttaaggctgtctccagtagatcctcgattttatcccctattctattttctattttaaacttcattatatctatagttttatgtcccatattttacactacctactggagacagtctaaagactgtttgtttgagctagaacttttctaaaaaggtgctactgggattttgatcttgagtagttaatgatagctt

SEQ ID NO: 44486 - DNA, 7171 bp, Zea Mays
atatgcactggtacaacgactccctagtgttcgggatgatttgggacgacgaccccgacccacgatttgggacgacggcctcaaatcacgaaacacgacaccaatcccatttgctgtgactatggttccacgctaaatcacagatctaagttttggtctcggtcatggtcgttctcacataggcataggctacaatgctgctatgtacggatgggacaaagtttcagggggtttctcgacctgcgtgaggtcttctcaatgcaatatcaggggctgtcttatccccagcagggttgtgagccaagtagagtatccgtcattggttgatttacgaggtctactcttagatcttgttgcacagcttttaggagctttatcacgcataagattcagttctgtgactgaaaggtttttcatagagcttaatgtgcggcgtattgattcacttgctcttagaagtgagacactcagcataatcaacgggatgcgctaccttaaattgggggtgaagacagagggtgggctgaatgcttctgtatcctttattgcaaaagcaaatcctctaaatcgtcctcccaacaaaagaaagagtgaattgcaacatgctttgtgtaacatgctctcaagtatacttgccccacttgcggagggtggaaaaaaccattggcctccacttggtgtcgaacctgcactgtcactttggtatgatgctgttgcacgaataagagtccagctcatgtattggatggataagcagagcaaacatgttgctgttggctttccacttgtcacccttctactttgtcttggtgatgccaatgcattcaactctagtttttcccagcatatggaaatcctgtataagtatctcaaggataagaaccatcgatcaatggctttggattgtcttcatcggctagtaaaattctatttgaatatttatgccgattaccaacctcgaaatcatgtttgggactatttagacagtgtaacctctcaattactgactgttctgaagaaaggcttgctgacccaagatgtgcagcatgataaacttgttgagttctgtgtgaccttagctcagagcaatctggattttgcaatgaatcatatgatactggaattattgaaaccagatagtttgagtgaagcaaaggttgttggtcttagggctttgctcgagatagttgtttctccatcaaatcaacaaattggcttggatgttttgcaagtatttggtattgggcactatattcctaaggtgaagtcagcaattgagtcaatactaaggtcttgcaacaaggcatatagcctggcacttctcacatcatcaaagactacaatagataatgtaaccaaggataaatctcagggatcactcttcaggtctgtgcttaaatgtatcccatacttgatagaagaggcgggccgtaatgataaaatgactgagattatacctcagcatggcataagtattgaccctggtgttcgtgaagaagcagtgcaagtgttgaacaggatcgtacgttgcctaccaaatcgtaggtttgctgtgttgaaaggaatggccaatttcatcctaaaacttcctgatgaatttcctctcttaattcaaacatcacttggacgcctggtggagctaatgcgtttgtggagagtatgcctatctgaggaggccttggcaaaagacatgcaaagtggtaggcgtttgagtataggaggggatgcactacagaggtctccttttcataggtccagggatgtatctgaatttcgcgcctcagaaatggatgcagttggccttgtctttctcagttctgctgatgttcaaataaggctcactgccctggagttactgcgatgtgttcgagcactgcaaaataatctcagggattactcagcaaatgaatggggtgacaataagctgaaacttgaaccagagccaatatttatcatagatatcatagaggagaatggggaagacattgttcaaagctgttattgggatccgggacgaccttatgatctaagacgtgaaatggaccctattcctttggatgtgactcttcaatccattttggagagtgtagataaaaacagatgggcgcgctacctcagtgaaattgtgaaatatgcagctgaactttgcccgagttctgtgcaggatgcaagattagaggttattagaaggcttgaacagattactcctgccgatctcggtgggaaggctcagcaaccacaagattctgaaactaaacttgaccaatggttgatatatgccatgtttgcatgctcttgtccacctgatattagagaagaattttccatcaaatcagcaagagaagtcttccatatgatttttccatcattgcgtcatggttcagaagcatatgcacttgctgctacatctgcccttggtcactcacatttagaagtatgtgaaatcatgtttggagatctggcattatttgttgaggaggtgtcatcagaaactgaaggaaaacctaaatggaagaatcctaggtcccgccgtgaggatctgcgcactcatgttgctaatatacaccgaattctagctgagaaggtttggcctgggatgcttagtcggaaacctgtcctctgccagcattttttgaagttcattgaagaaacataccgccaaattactatttccttggctgatagctttcaagacttgcagcctctgcgatacgcattagcatctgttctgagatacctagctccagaatttgttgatgcgaaagctgagcgatttgacaacagaatacgtaagaagctttttgatcttctccttacttggagtgaggattctggtagttcatggggacaggaaagcagcagcgactatcgtcgtgaaattgaacgatataaaagtaatcaacatacgaggtcaagggaatcatttgacaaacttgcatttgacagggaaatggctgaacagctagaagctattaattgggcttccatgaatgctattgcttcattgctttatgggccttgttttgatgataatgcgagaaagatgtctggccgggtgatatcatggattaatagtttattcatggaaccatctgcaagagcaccttttgggcattcaccagttgatccacgaacaccatcatattcaaagcatactgatggacgttttggtgggagggacaaacagaaaactagccacttgcgactcctcttagcaaaaactgcgctgaagaatattttgcagacaaatctggacttgtttcctgcttgcatagatcagtgctactctccagaccctcaaatagcagatggctatttcagtgttctggctgaagtctacatgcgccaggagattccaaaatgtgaaatccagagacttgtgagcttgatcctctacaaggtggttgatcagacaaaactaatccgtgacagtgccctccagatgttggagactctctctcttcgcgaatgggctgaagacgatactgatggtgttgggcattaccgggcttctgtcgttggcaacctccccgattcctaccaacaattccagtataagttgtcttcaaagcttgccaaggaccatcctgagctcagtgagcatctgtgcgaggaaataatgcaacgtcagcttgatgcagtggacattattgcacaacatcaggtccttacatgcatggctccttggatagaaaatctcaactttgtgagactgaaggaatctggctggagcgagaggttactgaaaagtctttattatgtgacatggaaacatggtgatcagtttcctgatgagattgagaaactttggagcactgtggcaagcaatactcgcaatatcatcccagttttgaacttcttgatcaccagagggattgaggactgcgatgccaatccatcggcagagatcactggtgcatttgcaacttatttttctgttgcaaagcgtgttagtctatatcttgctcggatctgcccacagcagaccatcgatcacttggtcttcgagctatctcagagaatgctcgaggacgacgaagaaccagtcaggcttgggaaggttgatgtctctgcaaatgttgtattggagttttctcaagggcctactgcctctcaggttgcaacagttgtggatagccagcctcacatgtccccccttcttgttcgtggttcacttgatggtgcagttagaaatgtcagtggaaacctgagctggcggacatctgcagttaccggccgaagtgtatctggcccattgagtccgttggctcatgaggtaagcattccaaacccaacggcaggccgatcaggacagctacttccagcgttaattactatgtcggggccattgagtggtgttcgaagctctgctggtaatctgaggagccgccatgtttccagagatagtggtgactactactttgataccccaaactcaacagatgatattttgcatcaagggggcagtggaattcacgggatcaatgccaatgagctccagtcagcactacaagggcaccaacacttgctttcacgtgctgacatagctttgattcttctggctgaaattgcttatgaaaatgatgaagactttcgtgaaaatttacctctgttgttccacgtcacatgtgtttcgatggatagctcagaagacattgtgctcgagcattgccaagatttgctcgtgaatctcctctactcgttggctggacgtcatcttgaactgtatgagatcgaaagtagtgaaagagagaataagcatcatgtggtgagcttgatcaaatacatccagtctaagaggggcagcttgatgtgggagaacgaggaccctacccttttccggatcgaacttcccagcgcttcactcttatcagcacttgtgcaaagcatggttagtgctattttcttccagggggaccttcgtgagacttggggttctgaagctcttaagtgggccatggagtgcacatctcgtcacctggcttgccggtcgcaccagatataccgtgccttgcgtcccagtgttaaaagtgatagctgcgtattgcttctgagatgcatccatagatgcttggggaatcctgttccagccgttctgggctttgcaatggagatactgctgactttacaggtcatggttgaaaacatggagcctgagaaggttatactttacccgcagctcttttggggctgcgttgcactgatgcataccgactttgtgcacatctactgccaggtgcttgagttgttttgtagagtaatcgatcgcttgacattccgtgaccggacaacagaaaacgtgttgctctcaagcatgccacgtgatgagtttgacatcaatgggtatgcaagtgacctccacaggctggagtctagaactacttcagagagattgctatctgtgactgggaccgggaaggtgcctgcttttgaaggggtgcagccgctggtgctgaaggggctcatgtccacagttagccatggatctgcaatcgagttgctatctaggatcacgatacctacgtgcgactctatatttgggagccccgatacaaggttactgatgcacatcacaggccttcttccatggctcggattgcagctcacgagggaagcaccaccttcccttgggtcagcttcgccactgcaagagcagaaccagaaagcttactatgtgtcatccaatatttcggcatggtgccgtgccaagtctctggacgatttggccgaagtgttcagagcgtattccttcggggaaatcatgtcgttggaagatctgtttgcacgagcttcaccaccaatctgtgcggagtggttccctaggcactcatctttggcctttgggcacctgctgaggctcctggagagaggccctctggattaccagcgggtggttcttctgatgcttaaatcgctgctgcagcaaacccctgtggatccgtcacagataccccaggtgtacaacttcgtgtcgcagctggtggagagcacattatgctcggaggcgctgaatgtgctggaggcgctgctgcggagctgcggcggcggcgggcaaggcgaggaggctgggtttggtgataacggcgggcatgggagcggggagaaggtcctccagagcatgctgcttcctcagtcgtctttcaaggcaaggagtgggccgctgcagtacgctgcggggtcggggttggggtccttgatggggcaaggcggcggtggcagcagcagcgccgcagatagcgggttggtggcacgggatgtagcgctgcagaacacccggctgctgcttgggcgagttcttgatacctgcgcgcttgggcgcaagagggatcacaagcggctggtgccatttgtggcgaacgtcgggtagaccttgccaacatatagcagcacaattttgagtgggcagggcagcagccgccagcagagcgcacgcagagtgcgtgcgtgcgtttgtgaccgggtcagtgtcgtgcaaaggtggccacgcacatagacgtagctgcagttcttgaaactatttatttatttgtttatttattttattgttttgttttgatgagtgaggccgtgtgtgatgtatgtatgcatgtaattcgaaaccaactatggccgtggatggcatttgtattgtggaaaggagagtagaaattgatgatgaaacacaacaaacaggtttggaggcgtccttgtgtggtgtgtggatatgatcagccagtcacagtgtggggatgagagtgaaagttgctttcttgagtttcttccgtcgtgtgtccgggcaccaaggttgtcttcagtggaccgtataaagcaagagatttgcacttagatgatactatttgtatagtaaagtttaaaatagggaatgagataggatacatggtgaggatagccaaagatgataggtgattcaaagtctcctacatagcatcctgactgtgactttgaatcatgacacaacatagcacaagattagttggttaaggctgtctccagtagatcctcgattttatcccctattctattttctattttaaacttcattatatctatagttttatgtcccatattttacactacctactggagacagtctaaagactgtttgtttgagctagaacttttctaaaaaggtgctactgggattttgatcttgagtagttaatgatagctt

SEQ ID NO: 44487 - DNA, 7221 bp, Zea Mays
ccctcctcgcccgcttcctcccgcttgcccgccgccgcatcgagaccgcccaggcacaggatgggcaatacctccggccatgtgatccaagctatgagcaagtattggattctctagccatggttgctagacacacacctctacctcttttggaagctcttcttcggtggagagaaagtgaatccccgaaaggtgctcacgacgcgtcaacataccaaaagaagcttgctgttgagtgcatattctcttctgcctgcattcggtttgctgagtgttgtccacaagagggaataacagaaaaactttggattggcttagaaagtttcgtatttgattggctaattaatgcagacagggttgtgagccaagtagagtatccgtcattggttgatttacgaggtctactcttagatcttgttgcacagcttttaggagctttatcacgcataagattcagttctgtgactgaaaggtttttcatagagcttaatgtgcggcgtattgattcacttgctcttagaagtgagacactcagcataatcaacgggatgcgctaccttaaattgggggtgaagacagagggtgggctgaatgcttctgtatcctttattgcaaaagcaaatcctctaaatcgtcctcccaacaaaagaaagagtgaattgcaacatgctttgtgtaacatgctctcaagtatacttgccccacttgcggagggtggaaaaaaccattggcctccacttggtgtcgaacctgcactgtcactttggtatgatgctgttgcacgaataagagtccagctcatgtattggatggataagcagagcaaacatgttgctgttggctttccacttgtcacccttctactttgtcttggtgatgccaatgcattcaactctagtttttcccagcatatggaaatcctgtataagtatctcaaggataagaaccatcgatcaatggctttggattgtcttcatcggctagtaaaattctatttgaatatttatgccgattaccaacctcgaaatcatgtttgggactatttagacagtgtaacctctcaattactgactgttctgaagaaaggcttgctgacccaagatgtgcagcatgataaacttgttgagttctgtgtgaccttagctcagagcaatctggattttgcaatgaatcatatgatactggaattattgaaaccagatagtttgagtgaagcaaaggttgttggtcttagggctttgctcgagatagttgtttctccatcaaatcaacaaattggcttggatgttttgcaagtatttggtattgggcactatattcctaaggtgaagtcagcaattgagtcaatactaaggtcttgcaacaaggcatatagcctggcacttctcacatcatcaaagactacaataggataaatctcagggatcactcttcaggtctgtgcttaaatgtatcccatacttgatagaagaggcgggccgtaatgataaaatgactgagattatacctcagcatggcataagtattgaccctggtgttcgtgaagaagcagtgcaagtgttgaacaggatcgtacgttgcctaccaaatcgtaggtttgctgtgttgaaaggaatggccaatttcatcctaaaacttcctgatgaatttcctctcttaattcaaacatcacttggacgcctggtggagctaatgcgtttgtggagagtatgcctatctgaggaggccttggcaaaagacatgcaaagtggtaggcgtttgagtataggaggggatgcactacagaggtctccttttcataggtccagggatgtatctgaatttcgcgcctcagaaatggatgcagttggccttgtctttctcagttctgctgatgttcaaataaggctcactgccctggagttactgcgatgtgttcgagcactgcaaaataatctcagggattactcagcaaatgaatggggtgacaataagctgaaacttgaaccagagccaatatttatcatagatatcatagaggagaatggggaagacattgttcaaagctgttattgggatccgggacgaccttatgatctaagacgtgaaatggaccctattcctttggatgtgactcttcaatccattttggagagtgtagataaaaacagatgggcgcgctacctcagtgaaattgtgaaatatgcagctgaactttgcccgagttctgtgcaggatgcaagattagaggttattagaaggcttgaacagattactcctgccgatctcggtgggaaggctcagcaaccacaagattctgaaactaaacttgaccaatggttgatatatgccatgtttgcatgctcttgtccacctgatattagagaagaattttccatcaaatcagcaagagaagtcttccatatgatttttccatcattgcgtcatggttcagaagcatatgcacttgctgctacatctgcccttggtcactcacatttagaagtatgtgaaatcatgtttggagatctggcattatttgttgaggaggtgtcatcagaaactgaaggaaaacctaaatggaagaatcctaggtcccgccgtgaggatctgcgcactcatgttgctaatatacaccgaattctagctgagaaggtttggcctgggatgcttagtcggaaacctgtcctctgccagcattttttgaagttcattgaagaaacataccgccaaattactatttccttggctgatagctttcaagacttgcagcctctgcgatacgcattagcatctgttctgagatacctagctccagaatttgttgatgcgaaagctgagcgatttgacaacagaatacgtaagaagctttttgatcttctccttacttggagtgaggattctggtagttcatggggacaggaaagcagcagcgactatcgtcgtgaaattgaacgatataaaagtaatcaacatacgaggtcaagggaatcatttgacaaacttgcatttgacagggaaatggctgaacagctagaagctattaattgggcttccatgaatgctattgcttcattgctttatgggccttgttttgatgataatgcgagaaagatgtctggccgggtgatatcatggattaatagtttattcatggaaccatctgcaagagcaccttttgggcattcaccagttgatccacgaacaccatcatattcaaagcatactgatggacgttttggtgggagggacaaacagaaaactagccacttgcgactcctcttagcaaaaactgcgctgaagaatattttgcagacaaatctggacttgtttcctgcttgcatagatcagtgctactctccagaccctcaaatagcagatggctatttcagtgttctggctgaagtctacatgcgccaggagattccaaaatgtgaaatccagagacttgtgagcttgatcctctacaaggtggttgatcagacaaaactaatccgtgacagtgccctccagatgttggagactctctctcttcgcgaatgggctgaagacgatactgatggtgttgggcattaccgggcttctgtcgttggcaacctccccgattcctaccaacaattccagtataagttgtcttcaaagcttgccaaggaccatcctgagctcagtgagcatctgtgcgaggaaataatgcaacgtcagcttgatgcagtggacattattgcacaacatcaggtccttacatgcatggctccttggatagaaaatctcaactttgtgagactgaaggaatctggctggagcgagaggttactgaaaagtctttattatgtgacatggaaacatggtgatcagtttcctgatgagattgagaaactttggagcactgtggcaagcaatactcgcaatatcatcccagttttgaacttcttgatcaccagagggattgaggactgcgatgccaatccatcggcagagatcactggtgcatttgcaacttatttttctgttgcaaagcgtgttagtctatatcttgctcggatctgcccacagcagaccatcgatcacttggtcttcgagctatctcagagaatgctcgaggacgacgaagaaccagtcaggcttgggaaggttgatgtctctgcaaatgttgtattggagttttctcaagggcctactgcctctcaggttgcaacagttgtggatagccagcctcacatgtccccccttcttgttcgtggttcacttgatggtgcagttagaaatgtcagtggaaacctgagctggcggacatctgcagttaccggccgaagtgtatctggcccattgagtccgttggctcatgaggtaagcattccaaacccaacggcaggccgatcaggacagctacttccagcgttaattactatgtcggggccattgagtggtgttcgaagctctgctggtaatctgaggagccgccatgtttccagagatagtggtgactactactttgataccccaaactcaacagatgatattttgcatcaagggggcagtggaattcacgggatcaatgccaatgagctccagtcagcactacaagggcaccaacacttgctttcacgtgctgacatagctttgattcttctggctgaaattgcttatgaaaatgatgaagactttcgtgaaaatttacctctgttgttccacgtcacatgtgtttcgatggatagctcagaagacattgtgctcgagcattgccaagatttgctcgtgaatctcctctactcgttggctggacgtcatcttgaactgtatgagatcgaaagtagtgaaagagagaataagcatcatgtggtgagcttgatcaaatacatccagtctaagaggggcagcttgatgtgggagaacgaggaccctacccttttccggatcgaacttcccagcgcttcactcttatcagcacttgtgcaaagcatggttagtgctattttcttccagggggaccttcgtgagacttggggttctgaagctcttaagtgggccatggagtgcacatctcgtcacctggcttgccggtcgcaccagatataccgtgccttgcgtcccagtgttaaaagtgatagctgcgtattgcttctgagatgcatccatagatgcttggggaatcctgttccagccgttctgggctttgcaatggagatactgctgactttacaggtcatggttgaaaacatggagcctgagaaggttatactttacccgcagctcttttggggctgcgttgcactgatgcataccgactttgtgcacatctactgccaggtgcttgagttgttttgtagagtaatcgatcgcttgacattccgtgaccggacaacagaaaacgtgttgctctcaagcatgccacgtgatgagtttgacatcaatgggtatgcaagtgacctccacaggctggagtctagaactacttcagagagattgctatctgtgactgggaccgggaaggtgcctgcttttgaaggggtgcagccgctggtgctgaaggggctcatgtccacagttagccatggatctgcaatcgagttgctatctaggatcacgatacctacgtgcgactctatatttgggagccccgatacaaggttactgatgcacatcacaggccttcttccatggctcggattgcagctcacgagggaagcaccaccttcccttgggtcagcttcgccactgcaagagcagaaccagaaagcttactatgtgtcatccaatatttcggcatggtgccgtgccaagtctctggacgatttggccgaagtgttcagagcgtattccttcggggaaatcatgtcgttggaagatctgtttgcacgagcttcaccaccaatctgtgcggagtggttccctaggcactcatctttggcctttgggcacctgctgaggctcctggagagaggccctctggattaccagcgggtggttcttctgatgcttaaatcgctgctgcagcaaacccctgtggatccgtcacagataccccaggtgtacaacttcgtgtcgcagctggtggagagcacattatgctcggaggcgctgaatgtgctggaggcgctgctgcggagctgcggcggcggcgggcaaggcgaggaggctgggtttggtgataacggcgggcatgggagcggggagaaggtcctccagagcatgctgcttcctcagtcgtctttcaaggcaaggagtgggccgctgcagtacgctgcggggtcggggttggggtccttgatggggcaaggcggcggtggcagcagcagcgccgcagatagcgggttggtggcacgggatgtagcgctgcagaacacccggctgctgcttgggcgagttcttgatacctgcgcgcttgggcgcaagagggatcacaagcggctggtgccatttgtggcgaacgtcgggtagaccttgccaacatatagcagcacaattttgagtgggcagggcagcagccgccagcagagcgcacgcagagtgcgtgcgtgcgtttgtgaccgggtcagtgtcgtgcaaaggtggccacgcacatagacgtagctgcagttcttgaaactatttatttatttgtttatttattttattgttttgttttgatgagtgaggccgtgtgtgatgtatgtatgcatgtaattcgaaaccaactatggccgtggatggcatttgtattgtggaaaggagagtagaaattgatgatgaaacacaacaaacaggtttggaggcgtccttgtgtggtgtgtggatatgatcagccagtcacagtgtggggatgagagtgaaagttgctttcttgagtttcttccgtcgtgtgtccgggcaccaaggttgtcttcagtggaccgtataaagcaagagatttgcacttagatgatactatttgtatagtaaagtttaaaatagggaatgagataggatacatggtgaggatagccaaagatgataggtgattcaaagtctcctacatagcatcctgactgtgactttgaatcatgacacaacatagcacaagattagttggttaaggctgtctccagtagatcctcgattttatcccctattctattttctattttaaacttcattatatctatagttttatgtcccatattttacactacctactggagacagtctaaagactgtttgtttgagctagaacttttctaaaaaggtgctactgggattttgatcttgagtagttaatgatagctt

SEQ ID NO: 44488 - DNA, 7280 bp, Zea Mays
ccgacatgggcgctggcggcgccgccaagcagatcgtcgattccctcctcgcccgcttcctcccgcttgcccgccgccgcatcgagaccgcccaggcacaggatgggcaatacctccggccatgtgatccaagctatgagcaagtattggattctctagccatggttgctagacacacacctctacctcttttggaagctcttcttcggtggagagaaagtgaatccccgaaaggtgctcacgacgcgtcaacataccaaaagaagcttgctgttgagtgcatattctcttctgcctgcattcggtttgctgagtgttgtccacaagagggaataacagaaaaactttggattggcttagaaagtttcgtatttgattggctaattaatgcagacagggttgtgagccaagtagagtatccgtcattggttgatttacgaggtctactcttagatcttgttgcacagcttttaggagctttatcacgcataagattcagttctgtgactgaaaggtttttcatagagcttaatgtgcggcgtattgattcacttgctcttagaagtgagacactcagcataatcaacgggatgcgctaccttaaattgggggtgaagacagagggtgggctgaatgcttctgtatcctttattgcaaaagcaaatcctctaaatcgtcctcccaacaaaagaaagagtgaattgcaacatgctttgtgtaacatgctctcaagtatacttgccccacttgcggagggtggaaaaaaccattggcctccacttggtgtcgaacctgcactgtcactttggtatgatgctgttgcacgaataagagtccagctcatgtattggatggataagcagagcaaacatgttgctgttggctttccacttgtcacccttctactttgtcttggtgatgccaatgcattcaactctagtttttcccagcatatggaaatcctgtataagtatctcaaggataagaaccatcgatcaatggctttggattgtcttcatcggctagtaaaattctatttgaatatttatgccgattaccaacctcgaaatcatgtttgggactatttagacagtgtaacctctcaattactgactgttctgaagaaaggcttgctgacccaagatgtgcagcatgataaacttgttgagttctgtgtgaccttagctcagagcaatctggattttgcaatgaatcatatgatactggaattattgaaaccagatagtttgagtgaagcaaaggttgttggtcttagggctttgctcgagatagttgtttctccatcaaatcaacaaattggcttggatgttttgcaagtatttggtattgggcactatattcctaaggtgaagtcagcaattgagtcaatactaaggtcttgcaacaaggcatatagcctggcacttctcacatcatcaaagactacaatagataatgtaaccaaggataaatctcagggatcactcttcaggtctgtgcttaaatgtatcccatacttgatagaagaggcgggccgtaatgataaaatgactgagattatacctcagcatggcataagtattgaccctggtgttcgtgaagaagcagtgcaagtgttgaacaggatcgtacgttgcctaccaaatcgtaggtttgctgtgttgaaaggaatggccaatttcatcctaaaacttcctgatgaatttcctctcttaattcaaacatcacttggacgcctggtggagctaatgcgtttgtggagagtatgcctatctgaggaggccttggcaaaagacatgcaaagtggtaggcgtttgagtataggaggggatgcactacagaggtctccttttcataggtccagggatgtatctgaatttcgcgcctcagaaatggatgcagttggccttgtctttctcagttctgctgatgttcaaataaggctcactgccctggagttactgcgatgtgttcgagcactgcaaaataatctcagggattactcagcaaatgaatggggtgacaataagctgaaacttgaaccagagccaatatttatcatagatatcatagaggagaatggggaagacattgttcaaagctgttattgggatccgggacgaccttatgatctaagacgtgaaatggaccctattcctttggatgtgactcttcaatccattttggagagtgtagataaaaacagatgggcgcgctacctcagtgaaattgtgaaatatgcagctgaactttgcccgagttctgtgcaggatgcaagcagattagaggttattagaaggcttgaacagattactcctgccgatctcggtgggaaggctcagcaaccacaagattctgaaactaaacttgaccaatggttgatatatgccatgtttgcatgctcttgtccacctgatattagagaagaattttccatcaaatcagcaagagaagtcttccatatgatttttccatcattgcgtcatggttcagaagcatatgcacttgctgctacatctgcccttggtcactcacatttagaagtatgtgaaatcatgtttggagatctggcattatttgttgaggaggtgtcatcagaaactgaaggaaaacctaaatggaagaatcctaggtcccgccgtgaggatctgcgcactcatgttgctaatatacaccgaattctagctgagaaggtttggcctgggatgcttagtcggaaacctgtcctctgccagcattttttgaagttcattgaagaaacataccgccaaattactatttccttggctgatagctttcaagacttgcagcctctgcgatacgcattagcatctgttctgagatacctagctccagaatttgttgatgcgaaagctgagcgatttgacaacagaatacgtaagaagctttttgatcttctccttacttggagtgaggattctggtagttcatggggacaggaaagcagcagcgactatcgtcgtgaaattgaacgatataaaagtaatcaacatacgaggtcaagggaatcatttgacaaacttgcatttgacagggaaatggctgaacagctagaagctattaattgggcttccatgaatgctattgcttcattgctttatgggccttgttttgatgataatgcgagaaagatgtctggccgggtgatatcatggattaatagtttattcatggaaccatctgcaagagcaccttttgggcattcaccagttgatccacgaacaccatcatattcaaagcatactgatggacgttttggtgggagggacaaacagaaaactagccacttgcgactcctcttagcaaaaactgcgctgaagaatattttgcagacaaatctggacttgtttcctgcttgcatagatcagtgctactctccagaccctcaaatagcagatggctatttcagtgttctggctgaagtctacatgcgccaggagattccaaaatgtgaaatccagagacttgtgagcttgatcctctacaaggtggttgatcagacaaaactaatccgtgacagtgccctccagatgttggagactctctctcttcgcgaatgggctgaagacgatactgatggtgttgggcattaccgggcttctgtcgttggcaacctccccgattcctaccaacaattccagtataagttgtcttcaaagcttgccaaggaccatcctgagctcagtgagcatctgtgcgaggaaataatgcaacgtcagcttgatgcagtggacattattgcacaacatcaggtccttacatgcatggctccttggatagaaaatctcaactttgtgagactgaaggaatctggctggagcgagaggttactgaaaagtctttattatgtgacatggaaacatggtgatcagtttcctgatgagattgagaaactttggagcactgtggcaagcaatactcgcaatatcatcccagttttgaacttcttgatcaccagagggattgaggactgcgatgccaatccatcggcagagatcactggtgcatttgcaacttatttttctgttgcaaagcgtgttagtctatatcttgctcggatctgcccacagcagaccatcgatcacttggtcttcgagctatctcagagaatgctcgaggacgacgaagaaccagtcaggcttgggaaggttgatgtctctgcaaatgttgtattggagttttctcaagggcctactgcctctcaggttgcaacagttgtggatagccagcctcacatgtccccccttcttgttcgtggttcacttgatggtgcagttagaaatgtcagtggaaacctgagctggcggacatctgcagttaccggccgaagtgtatctggcccattgagtccgttggctcatgaggtaagcattccaaacccaacggcaggccgatcaggacagctacttccagcgttaattactatgtcggggccattgagtggtgttcgaagctctgctggtaatctgaggagccgccatgtttccagagatagtggtgactactactttgataccccaaactcaacagatgatattttgcatcaagggggcagtggaattcacgggatcaatgccaatgagctccagtcagcactacaagggcaccaacacttgctttcacgtgctgacatagctttgattcttctggctgaaattgcttatgaaaatgatgaagactttcgtgaaaatttacctctgttgttccacgtcacatgtgtttcgatggatagctcagaagacattgtgctcgagcattgccaagatttgctcgtgaatctcctctactcgttggctggacgtcatcttgaactgtatgagatcgaaagtagtgaaagagagaataagcatcatgtggtgagcttgatcaaatacatccagtctaagaggggcagcttgatgtgggagaacgaggaccctacccttttccggatcgaacttcccagcgcttcactcttatcagcacttgtgcaaagcatggttagtgctattttcttccagggggaccttcgtgagacttggggttctgaagctcttaagtgggccatggagtgcacatctcgtcacctggcttgccggtcgcaccagatataccgtgccttgcgtcccagtgttaaaagtgatagctgcgtattgcttctgagatgcatccatagatgcttggggaatcctgttccagccgttctgggctttgcaatggagatactgctgactttacaggtcatggttgaaaacatggagcctgagaaggttatactttacccgcagctcttttggggctgcgttgcactgatgcataccgactttgtgcacatctactgccaggtgcttgagttgttttgtagagtaatcgatcgcttgacattccgtgaccggacaacagaaaacgtgttgctctcaagcatgccacgtgatgagtttgacatcaatgggtatgcaagtgacctccacaggctggagtctagaactacttcagagagattgctatctgtgactgggaccgggaaggtgcctgcttttgaaggggtgcagccgctggtgctgaaggggctcatgtccacagttagccatggatctgcaatcgagttgctatctaggatcacgatacctacgtgcgactctatatttgggagccccgatacaaggttactgatgcacatcacaggccttcttccatggctcggattgcagctcacgagggaagcaccaccttcccttgggtcagcttcgccactgcaagagcagaaccagaaagcttactatgtgtcatccaatatttcggcatggtgccgtgccaagtctctggacgatttggccgaagtgttcagagcgtattccttcggggaaatcatgtcgttggaagatctgtttgcacgagcttcaccaccaatctgtgcggagtggttccctaggcactcatctttggcctttgggcacctgctgaggctcctggagagaggccctctggattaccagcgggtggttcttctgatgcttaaatcgctgctgcagcaaacccctgtggatccgtcacagataccccaggtgtacaacttcgtgtcgcagctggtggagagcacattatgctcggaggcgctgaatgtgctggaggcgctgctgcggagctgcggcggcggcgggcaaggcgaggaggctgggtttggtgataacggcgggcatgggagcggggagaaggtcctccagagcatgctgcttcctcagtcgtctttcaaggcaaggagtgggccgctgcagtacgctgcggggtcggggttggggtccttgatggggcaaggcggcggtggcagcagcagcgccgcagatagcgggttggtggcacgggatgtagcgctgcagaacacccggctgctgcttgggcgagttcttgatacctgcgcgcttgggcgcaagagggatcacaagcggctggtgccatttgtggcgaacgtcgggtagaccttgccaacatatagcagcacaattttgagtgggcagggcagcagccgccagcagagcgcacgcagagtgcgtgcgtgcgtttgtgaccgggtcagtgtcgtgcaaaggtggccacgcacatagacgtagctgcagttcttgaaactatttatttatttgtttatttattttattgttttgttttgatgagtgaggccgtgtgtgatgtatgtatgcatgtaattcgaaaccaactatggccgtggatggcatttgtattgtggaaaggagagtagaaattgatgatgaaacacaacaaacaggtttggaggcgtccttgtgtggtgtgtggatatgatcagccagtcacagtgtggggatgagagtgaaagttgctttcttgagtttcttccgtcgtgtgtccgggcaccaaggttgtcttcagtggaccgtataaagcaagagatttgcacttagatgatactatttgtatagtaaagtttaaaatagggaatgagataggatacatggtgaggatagccaaagatgataggtgattcaaagtctcctacatagcatcctgactgtgactttgaatcatgacacaacatagcacaagattagttggttaaggctgtctccagtagatcctcgattttatcccctattctattttctattttaaacttcattatatctatagttttatgtcccatattttacactacctactggagacagtctaaagactgtttgtttgagctagaacttttctaaaaaggtgctactgggattttgatcttgagtagttaatgatagctt

SEQ ID NO: 44489 - DNA, 7344 bp, Zea Mays
cctcgacgtccgacatgggcgctggcggcgccgccaagcagatcgtcgattccctcctcgcccgcttcctcccgcttgcccgccgccgcatcgagaccgcccaggcacaggatgggcaatacctccggccatgtgatccaagctatgagcaagtattggattctctagccatggttgctagacacacacctctacctcttttggaagctcttcttcggtggagagaaagtgaatccccgaaaggtgctcacgacgcgtcaacataccaaaagaagcttgctgttgagtgcatattctcttctgcctgcattcggtttgctgagtgttgtccacaagagggaataacagaaaaactttggattggcttagaaagtttcgtatttgattggctaattaatgcagacagggttgtgagccaagtagagtatccgtcattggttgatttacgaggtctactcttagatcttgttgcacagcttttaggagctttatcacgcataagattcagttctgtgactgaaaggtttttcatagagcttaatgtgcggcgtattgattcacttgctcttagaagtgagacactcagcataatcaacgggatgcgctaccttaaattgggggtgaagacagagggtgggctgaatgcttctgtatcctttattgcaaaagcaaatcctctaaatcgtcctcccaacaaaagaaagagtgaattgcaacatgctttgtgtaacatgctctcaagtatacttgccccacttgcggagggtggaaaaaaccattggcctccacttggtgtcgaacctgcactgtcactttggtatgatgctgttgcacgaataagagtccagctcatgtattggatggataagcagagcaaacatgttgctgttggctttccacttgtcacccttctactttgtcttggtgatgccaatgcattcaactctagtttttcccagcatatggaaatcctgtataagtatctcaaggataagaaccatcgatcaatggctttggattgtcttcatcggctagtaaaattctatttgaatatttatgccgattaccaacctcgaaatcatgtttgggactatttagacagtgtaacctctcaattactgactgttctgaagaaaggcttgctgacccaagatgtgcagcatgataaacttgttgagttctgtgtgaccttagctcagagcaatctggattttgcaatgaatcatatgatactggaattattgaaaccagatagtttgagtgaagcaaaggttgttggtcttagggctttgctcgagatagttgtttctccatcaaatcaacaaattggcttggatgttttgcaagtatttggtattgggcactatattcctaaggtgaagtcagcaattgagtcaatactaaggtcttgcaacaaggcatatagcctggcacttctcacatcatcaaagactacaatagataatgtaaccaaggataaatctcagggatcactcttcaggtctgtgcttaaatgtatcccatacttgatagaagaggcgggccgtaatgataaaatgactgagattatacctcagcatggcataagtattgaccctggtgttcgtgaagaagcagtgcaagtgttgaacaggatcgtacgttgcctaccaaatcgtaggtttgctgtgttgaaaggaatggccaatttcatcctaaaacttcctgatgaatttcctctcttaattcaaacatcacttggacgcctggtggagctaatgcgtttgtggagagtatgcctatctgaggaggccttggcaaaagacatgcaaagtggtaggcgtttgagtataggaggggatgcactacagaggtctccttttcataggtccagggatgtatctgaatttcgcgcctcagaaatggatgcagttggccttgtctttctcagttctgctgatgttcaaataaggctcactgccctggagttactgcgatgtgttcgagcactgcaaaataatctcagggattactcagcaaatgaatggggtgacaataagctgaaacttgaaccagagccaatatttatcatagatatcatagaggagaatggggaagacattgttcaaagctgttattgggatccgggacgaccttatgatctaagacgtgaaatggaccctattcctttggatgtgactcttcaatccattttggagagtgtagataaaaacagatgggcgcgctacctcagtgaaattgtgaaatatgcagctgaactttgcccgagttctgtgcaggatgcaaggcatgaactctggtcttttctggaacgtctgcacgcacaatttagtatgataaatgcaattagaggttattagaaggcttgaacagattactcctgccgatctcggtgggaaggctcagcaaccacaagattctgaaactaaacttgaccaatggttgatatatgccatgtttgcatgctcttgtccacctgatattagagaagaattttccatcaaatcagcaagagaagtcttccatatgatttttccatcattgcgtcatggttcagaagcatatgcacttgctgctacatctgcccttggtcactcacatttagaagtatgtgaaatcatgtttggagatctggcattatttgttgaggaggtgtcatcagaaactgaaggaaaacctaaatggaagaatcctaggtcccgccgtgaggatctgcgcactcatgttgctaatatacaccgaattctagctgagaaggtttggcctgggatgcttagtcggaaacctgtcctctgccagcattttttgaagttcattgaagaaacataccgccaaattactatttccttggctgatagctttcaagacttgcagcctctgcgatacgcattagcatctgttctgagatacctagctccagaatttgttgatgcgaaagctgagcgatttgacaacagaatacgtaagaagctttttgatcttctccttacttggagtgaggattctggtagttcatggggacaggaaagcagcagcgactatcgtcgtgaaattgaacgatataaaagtaatcaacatacgaggtcaagggaatcatttgacaaacttgcatttgacagggaaatggctgaacagctagaagctattaattgggcttccatgaatgctattgcttcattgctttatgggccttgttttgatgataatgcgagaaagatgtctggccgggtgatatcatggattaatagtttattcatggaaccatctgcaagagcaccttttgggcattcaccagttgatccacgaacaccatcatattcaaagcatactgatggacgttttggtgggagggacaaacagaaaactagccacttgcgactcctcttagcaaaaactgcgctgaagaatattttgcagacaaatctggacttgtttcctgcttgcatagatcagtgctactctccagaccctcaaatagcagatggctatttcagtgttctggctgaagtctacatgcgccaggagattccaaaatgtgaaatccagagacttgtgagcttgatcctctacaaggtggttgatcagacaaaactaatccgtgacagtgccctccagatgttggagactctctctcttcgcgaatgggctgaagacgatactgatggtgttgggcattaccgggcttctgtcgttggcaacctccccgattcctaccaacaattccagtataagttgtcttcaaagcttgccaaggaccatcctgagctcagtgagcatctgtgcgaggaaataatgcaacgtcagcttgatgcagtggacattattgcacaacatcaggtccttacatgcatggctccttggatagaaaatctcaactttgtgagactgaaggaatctggctggagcgagaggttactgaaaagtctttattatgtgacatggaaacatggtgatcagtttcctgatgagattgagaaactttggagcactgtggcaagcaatactcgcaatatcatcccagttttgaacttcttgatcaccagagggattgaggactgcgatgccaatccatcggcagagatcactggtgcatttgcaacttatttttctgttgcaaagcgtgttagtctatatcttgctcggatctgcccacagcagaccatcgatcacttggtcttcgagctatctcagagaatgctcgaggacgacgaagaaccagtcaggcttgggaaggttgatgtctctgcaaatgttgtattggagttttctcaagggcctactgcctctcaggttgcaacagttgtggatagccagcctcacatgtccccccttcttgttcgtggttcacttgatggtgcagttagaaatgtcagtggaaacctgagctggcggacatctgcagttaccggccgaagtgtatctggcccattgagtccgttggctcatgaggtaagcattccaaacccaacggcaggccgatcaggacagctacttccagcgttaattactatgtcggggccattgagtggtgttcgaagctctgctggtaatctgaggagccgccatgtttccagagatagtggtgactactactttgataccccaaactcaacagatgatattttgcatcaagggggcagtggaattcacgggatcaatgccaatgagctccagtcagcactacaagggcaccaacacttgctttcacgtgctgacatagctttgattcttctggctgaaattgcttatgaaaatgatgaagactttcgtgaaaatttacctctgttgttccacgtcacatgtgtttcgatggatagctcagaagacattgtgctcgagcattgccaagatttgctcgtgaatctcctctactcgttggctggacgtcatcttgaactgtatgagatcgaaagtagtgaaagagagaataagcatcatgtggtgagcttgatcaaatacatccagtctaagaggggcagcttgatgtgggagaacgaggaccctacccttttccggatcgaacttcccagcgcttcactcttatcagcacttgtgcaaagcatggttagtgctattttcttccagggggaccttcgtgagacttggggttctgaagctcttaagtgggccatggagtgcacatctcgtcacctggcttgccggtcgcaccagatataccgtgccttgcgtcccagtgttaaaagtgatagctgcgtattgcttctgagatgcatccatagatgcttggggaatcctgttccagccgttctgggctttgcaatggagatactgctgactttacaggtcatggttgaaaacatggagcctgagaaggttatactttacccgcagctcttttggggctgcgttgcactgatgcataccgactttgtgcacatctactgccaggtgcttgagttgttttgtagagtaatcgatcgcttgacattccgtgaccggacaacagaaaacgtgttgctctcaagcatgccacgtgatgagtttgacatcaatgggtatgcaagtgacctccacaggctggagtctagaactacttcagagagattgctatctgtgactgggaccgggaaggtgcctgcttttgaaggggtgcagccgctggtgctgaaggggctcatgtccacagttagccatggatctgcaatcgagttgctatctaggatcacgatacctacgtgcgactctatatttgggagccccgatacaaggttactgatgcacatcacaggccttcttccatggctcggattgcagctcacgagggaagcaccaccttcccttgggtcagcttcgccactgcaagagcagaaccagaaagcttactatgtgtcatccaatatttcggcatggtgccgtgccaagtctctggacgatttggccgaagtgttcagagcgtattccttcggggaaatcatgtcgttggaagatctgtttgcacgagcttcaccaccaatctgtgcggagtggttccctaggcactcatctttggcctttgggcacctgctgaggctcctggagagaggccctctggattaccagcgggtggttcttctgatgcttaaatcgctgctgcagcaaacccctgtggatccgtcacagataccccaggtgtacaacttcgtgtcgcagctggtggagagcacattatgctcggaggcgctgaatgtgctggaggcgctgctgcggagctgcggcggcggcgggcaaggcgaggaggctgggtttggtgataacggcgggcatgggagcggggagaaggtcctccagagcatgctgcttcctcagtcgtctttcaaggcaaggagtgggccgctgcagtacgctgcggggtcggggttggggtccttgatggggcaaggcggcggtggcagcagcagcgccgcagatagcgggttggtggcacgggatgtagcgctgcagaacacccggctgctgcttgggcgagttcttgatacctgcgcgcttgggcgcaagagggatcacaagcggctggtgccatttgtggcgaacgtcgggtagaccttgccaacatatagcagcacaattttgagtgggcagggcagcagccgccagcagagcgcacgcagagtgcgtgcgtgcgtttgtgaccgggtcagtgtcgtgcaaaggtggccacgcacatagacgtagctgcagttcttgaaactatttatttatttgtttatttattttattgttttgttttgatgagtgaggccgtgtgtgatgtatgtatgcatgtaattcgaaaccaactatggccgtggatggcatttgtattgtggaaaggagagtagaaattgatgatgaaacacaacaaacaggtttggaggcgtccttgtgtggtgtgtggatatgatcagccagtcacagtgtggggatgagagtgaaagttgctttcttgagtttcttccgtcgtgtgtccgggcaccaaggttgtcttcagtggaccgtataaagcaagagatttgcacttagatgatactatttgtatagtaaagtttaaaatagggaatgagataggatacatggtgaggatagccaaagatgataggtgattcaaagtctcctacatagcatcctgactgtgactttgaatcatgacacaacatagcacaagattagttggttaaggctgtctccagtagatcctcgattttatcccctattctattttctattttaaacttcattatatctatagttttatgtcccatattttacactacctactggagacagtctaaagactgtttgtttgagctagaacttttctaaaaaggtgctactgggattttgatcttgagtagttaatgatagctt

SEQ ID NO: 44490 - DNA, 7067 bp, Zea Mays
cgcggcctcgacgtccgacatgggcgctggcggcgccgccaagcagatcgtcgattccctcctcgcccgcttcctcccgcttgcccgccgccgcatcgagaccgcccaggcacaggatgggcaatacctccggccatgtgatccaagctatgagcaagtattggattctctagccatggttgctagacacacacctctacctcttttggaagctcttcttcggtggagagaaagtgaatccccgaaaggtgctcacgacgcgtcaacataccaaaagaagcttgctgttgagtgcatattctcttctgcctgcattcggtttgctgagtgttgtccacaagagggaataacagaaaaactttggattggcttagaaagtttcgtatttgattggctaattaatgcagacagggttgtgagccaagtagagtatccgtcattggttgatttacgaggtctactcttagatcttgttgcacagcttttaggagctttatcacgcataagattcagttctgtgactgaaaggtttttcatagagcttaatgtgcggcgtattgattcacttgctcttagaagtgagacactcagcataatcaacgggatgcgctaccttaaattgggggtgaagacagagggtgggctgaatgcttctgtatcctttattgcaaaagcaaatcctctaaatcgtcctcccaacaaaagaaagagtgaattgcaacatgctttgtgtaacatgctctcaagtatacttgccccacttgcggagggtggaaaaaaccattggcctccacttggtgtcgaacctgcactgtcactttggttggctttccacttgtcacccttctactttgtcttggtgatgccaatgcattcaactctagtttttcccagcatatggaaatcctgtataagtatctcaaggataagaaccatcgatcaatggctttggattgtcttcatcggctagtaaaattctatttgaatatttatgccgattaccaacctcgaaatcatgtttgggactatttagacagtgtaacctctcaattactgactgttctgaagaaaggcttgctgacccaagatgtgcagcatgataaacttgttgagttctgtgtgaccttagctcagagcaatctggattttgcaatgaatcatatgatactggaattattgaaaccagatagtttgagtgaagcaaaggttgttggtcttagggctttgctcgagatagttgtttctccatcaaatcaacaaattggcttggatgttttgcaagtatttggtattgggcactatattcctaaggtgaagtcagcaattgagtcaatactaaggtcttgcaacaaggcatatagcctggcacttctcacatcatcaaagactacaatagataatgtaaccaaggataaatctcagggatcactcttcaggtctgtgcttaaatgtatcccatacttgatagaagaggcgggccgtaatgataaaatgactgagattatacctcagcatggcataagtattgaccctggtgttcgtgaagaagcagtgcaagtgttgaacaggatcgtacgttgcctaccaaatcgtaggtttgctgtgttgaaaggaatggccaatttcatcctaaaacttcctgatgaatttcctctcttaattcaaacatcacttggacgcctggtggagctaatgcgtttgtggagagtatgcctatctgaggaggccttggcaaaagacatgcaaagtggtaggcgtttgagtataggaggggatgcactacagaggtctccttttcataggtccagggatgtatctgaatttcgcgcctcagaaatggatgcagttggccttgtctttctcagttctgctgatgttcaaataaggctcactgccctggagttactgcgatgtgttcgagcactgcaaaataatctcagggattactcagcaaatgaatggggtgacaataagctgaaacttgaaccagagccaatatttatcatagatatcatagaggagaatggggaagacattgttcaaagctgttattgggatccgggacgaccttatgatctaagacgtgaaatggaccctattcctttggatgtgactcttcaatccattttggagagtgtagataaaaacagatgggcgcgctacctcagtgaaattgtgaaatatgcagctgaactttgcccgagttctgtgcaggatgcaagattagaggttattagaaggcttgaacagattactcctgccgatctcggtgggaaggctcagcaaccacaagattctgaaactaaacttgaccaatggttgatatatgccatgtttgcatgctcttgtccacctgatattagagaagaattttccatcaaatcagcaagagaagtcttccatatgatttttccatcattgcgtcatggttcagaagcatatgcacttgctgctacatctgcccttggtcactcacatttagaagtatgtgaaatcatgtttggagatctggcattatttgttgaggaggtgtcatcagaaactgaaggaaaacctaaatggaagcagaatcctaggtcccgccgtgaggatctgcgcactcatgttgctaatatacaccgaattctagctgagaaggtttggcctgggatgcttagtcggaaacctgtcctctgccagcattttttgaagttcattgaagaaacataccgccaaattactatttccttggctgatagctttcaagacttgcagcctctgcgatacgcattagcatctgttctgagatacctagctccagaatttgttgatgcgaaagctgagcgatttgacaacagaatacggaaatggctgaacagctagaagctattaattgggcttccatgaatgctattgcttcattgctttatgggccttgttttgatgataatgcgagaaagatgtctggccgggtgatatcatggattaatagtttattcatggaaccatctgcaagagcaccttttgggcattcaccagttgatccacgaacaccatcatattcaaagcatactgatggacgttttggtgggagggacaaacagaaaactagccacttgcgactcctcttagcaaaaactgcgctgaagaatattttgcagacaaatctggacttgtttcctgcttgcatagatcagtgctactctccagaccctcaaatagcagatggctatttcagtgttctggctgaagtctacatgcgccaggagattccaaaatgtgaaatccagagacttgtgagcttgatcctctacaaggtggttgatcagacaaaactaatccgtgacagtgccctccagatgttggagactctctctcttcgcgaatgggctgaagacgatactgatggtgttgggcattaccgggcttctgtcgttggcaacctccccgattcctaccaacaattccagtataagttgtcttcaaagcttgccaaggaccatcctgagctcagtgagcatctgtgcgaggaaataatgcaacgtcagcttgatgcagtggacattattgcacaacatcaggtccttacatgcatggctccttggatagaaaatctcaactttgtgagactgaaggaatctggctggagcgagaggttactgaaaagtctttattatgtgacatggaaacatggtgatcagtttcctgatgagattgagaaactttggagcactgtggcaagcaatactcgcaatatcatcccagttttgaacttcttgatcaccagagggattgaggactgcgatgccaatccatcggcagagatcactggtgcatttgcaacttatttttctgttgcaaagcgtgttagtctatatcttgctcggatctgcccacagcagaccatcgatcacttggtcttcgagctatctcagagaatgctcgaggacgacgaagaaccagtcaggcttgggaaggttgatgtctctgcaaatgttgtattggagttttctcaagggcctactgcctctcaggttgcaacagttgtggatagccagcctcacatgtccccccttcttgttcgtggttcacttgatggtgcagttagaaatgtcagtggaaacctgagctggcggacatctgcagttaccggccgaagtgtatctggcccattgagtccgttggctcatgaggtaagcattccaaacccaacggcaggccgatcaggacagctacttccagcgttaattactatgtcggggccattgagtggtgttcgaagctctgctggtaatctgaggagccgccatgtttccagagatagtggtgactactactttgataccccaaactcaacagatgatattttgcatcaagggggcagtggaattcacgggatcaatgccaatgagctccagtcagcactacaagggcaccaacacttgctttcacgtgctgacatagctttgattcttctggctgaaattgcttatgaaaatgatgaagactttcgtgaaaatttacctctgttgttccacgtcacatgtgtttcgatggatagctcagaagacattgtgctcgagcattgccaagatttgctcgtgaatctcctctactcgttggctggacgtcatcttgaactgtatgagatcgaaagtagtgaaagagagaataagcatcatgtggtgagcttgatcaaatacatccagtctaagaggggcagcttgatgtgggagaacgaggaccctacccttttccggatcgaacttcccagcgcttcactcttatcagcacttgtgcaaagcatggttagtgctattttcttccagggggaccttcgtgagacttggggttctgaagctcttaagtgggccatggagtgcacatctcgtcacctggcttgccggtcgcaccagatataccgtgccttgcgtcccagtgttaaaagtgatagctgcgtattgcttctgagatgcatccatagatgcttggggaatcctgttccagccgttctgggctttgcaatggagatactgctgactttacaggtcatggttgaaaacatggagcctgagaaggttatactttacccgcagctcttttggggctgcgttgcactgatgcataccgactttgtgcacatctactgccaggtgcttgagttgttttgtagagtaatcgatcgcttgacattccgtgaccggacaacagaaaacgtgttgctctcaagcatgccacgtgatgagtttgacatcaatgggtatgcaagtgacctccacaggctggagtctagaactacttcagagagattgctatctgtgactgggaccgggaaggtgcctgcttttgaaggggtgcagccgctggtgctgaaggggctcatgtccacagttagccatggatctgcaatcgagttgctatctaggatcacgatacctacgtgcgactctatatttgggagccccgatacaaggttactgatgcacatcacaggccttcttccatggctcggattgcagctcacgagggaagcaccaccttcccttgggtcagcttcgccactgcaagagcagaaccagaaagcttactatgtgtcatccaatatttcggcatggtgccgtgccaagtctctggacgatttggccgaagtgttcagagcgtattccttcggggaaatcatgtcgttggaagatctgtttgcacgagcttcaccaccaatctgtgcggagtggttccctaggcactcatctttggcctttgggcacctgctgaggctcctggagagaggccctctggattaccagcgggtggttcttctgatgcttaaatcgctgctgcagcaaacccctgtggatccgtcacagataccccaggtgtacaacttcgtgtcgcagctggtggagagcacattatgctcggaggcgctgaatgtgctggaggcgctgctgcggagctgcggcggcggcgggcaaggcgaggaggctgggtttggtgataacggcgggcatgggagcggggagaaggtcctccagagcatgctgcttcctcagtcgtctttcaaggcaaggagtgggccgctgcagtacgctgcggggtcggggttggggtccttgatggggcaaggcggcggtggcagcagcagcgccgcagatagcgggttggtggcacgggatgtagcgctgcagaacacccggctgctgcttgggcgagttcttgatacctgcgcgcttgggcgcaagagggatcacaagcggctggtgccatttgtggcgaacgtcgggtagaccttgccaacatatagcagcacaattttgagtgggcagggcagcagccgccagcagagcgcacgcagagtgcgtgcgtgcgtttgtgaccgggtcagtgtcgtgcaaaggtggccacgcacatagacgtagctgcagttcttgaaactatttatttatttgtttatttattttattgttttgttttgatgagtgaggccgtgtgtgatgtatgtatgcatgtaattcgaaaccaactatggccgtggatggcatttgtattgtggaaaggagagtagaaattgatgatgaaacacaacaaacaggtttggaggcgtccttgtgtggtgtgtggatatgatcagccagtcacagtgtggggatgagagtgaaagttgctttcttgagtttcttccgtcgtgtgtccgggcaccaaggttgtcttcagtggaccgtataaagcaagagatttgcacttagatgatactatttgtatagtaaagtttaaaatagggaatgagataggatacatggtgaggatagccaaagatgataggtgattcaaagtctcctacatagcatcctgactgtgactttgaatcatgacacaacatagcacaagattagttggttaaggctgtctccagtagatcctcgattttatcccctattctattttctattttaaacttcattatatctatagttttatgtcccatattttacactacctactggagacagtctaaagactgtttgtttgagctagaacttttctaaaaaggtgctactgggattttgatcttgagtagttaatgatagctt

SEQ ID NO: 44491 - DNA, 7353 bp, Zea Mays
ccccacgccgcccagcgccgcggcctcgacgtccgacatgggcgctggcggcgccgccaagcagatcgtcgattccctcctcgcccgcttcctcccgcttgcccgccgccgcatcgagaccgcccaggcacaggatgggcaatacctccggccatgtgatccaagctatgagcaagtattggattctctagccatggttgctagacacacacctctacctcttttggaagctcttcttcggtggagagaaagtgaatccccgaaaggtgctcacgacgcgtcaacataccaaaagaagcttgctgttgagtgcatattctcttctgcctgcattcggtttgctgagtgttgtccacaagagggaataacagaaaaactttggattggcttagaaagtttcgtatttgattggctaattaatgcagacagggttgtgagccaagtagagtatccgtcattggttgatttacgaggtctactcttagatcttgttgcacagcttttaggagctttatcacgcataagattcagttctgtgactgaaaggtttttcatagagcttaatgtgcggcgtattgattcacttgctcttagaagtgagacactcagcataatcaacgggatgcgctaccttaaattgggggtgaagacagagggtgggctgaatgcttctgtatcctttattgcaaaagcaaatcctctaaatcgtcctcccaacaaaagaaagagtgaattgcaacatgctttgtgtaacatgctctcaagtatacttgccccacttgcggagggtggaaaaaaccattggcctccacttggtgtcgaacctgcactgtcactttggtatgatgctgttgcacgaataagagtccagctcatgtattggatggataagcagagcaaacatgttgctgttggctttccacttgtcacccttctactttgtcttggtgatgccaatgcattcaactctagtttttcccagcatatggaaatcctgtataagtatctcaaggataagaaccatcgatcaatggctttggattgtcttcatcggctagtaaaattctatttgaatatttatgccgattaccaacctcgaaatcatgtttgggactatttagacagtgtaacctctcaattactgactgttctgaagaaaggcttgctgacccaagatgtgcagcatgataaacttgttgagttctgtgtgaccttagctcagagcaatctggattttgcaatgaatcatatgatactggaattattgaaaccagatagtttgagtgaagcaaaggttgttggtcttagggctttgctcgagatagttgtttctccatcaaatcaacaaattggcttggatgttttgcaagtatttggtattgggcactatattcctaaggtgaagtcagcaattgagtcaatactaaggtcttgcaacaaggcatatagcctggcacttctcacatcatcaaagactacaatagataatgtaaccaaggataaatctcagggatcactcttcaggtctgtgcttaaatgtatcccatacttgatagaagaggcgggccgtaatgataaaatgactgagattatacctcagcatggcataagtattgaccctggtgttcgtgaagaagcagtgcaagtgttgaacaggatcgtacgttgcctaccaaatcgtaggtttgctgtgttgaaaggaatggccaatttcatcctaaaacttcctgatgaatttcctctcttaattcaaacatcacttggacgcctggtggagctaatgcgtttgtggagagtatgcctatctgaggaggccttggcaaaagacatgcaaagtggtaggcgtttgagtataggaggggatgcactacagaggtctccttttcataggtccagggatgtatctgaatttcgcgcctcagaaatggatgcagttggccttgtctttctcagttctgctgatgttcaaataaggctcactgccctggagttactgcgatgtgttcgagcactgcaaaataatctcagggattactcagcaaatgaatggggtgacaataagctgaaacttgaaccagagccaatatttatcatagatatcatagaggagaatggggaagacattgttcaaagctgttattgggatccgggacgaccttatgatctaagacgtgaaatggaccctattcctttggatgtgactcttcaatccattttggagagtgtagataaaaacagatgggcgcgctacctcagtgaaattgtgaaatatgcagctgaactttgcccgagttctgtgcaggatgcaaggcatgaactctggtcttttctggaacgtctgcacgcacaatttaattagaggttattagaaggcttgaacagattactcctgccgatctcggtgggaaggctcagcaaccacaagattctgaaactaaacttgaccaatggttgatatatgccatgtttgcatgctcttgtccacctgatattagagaagaattttccatcaaatcagcaagagaagtcttccatatgatttttccatcattgcgtcatggttcagaagcatatgcacttgctgctacatctgcccttggtcactcacatttagaagtatgtgaaatcatgtttggagatctggcattatttgttgaggaggtgtcatcagaaactgaaggaaaacctaaatggaagaatcctaggtcccgccgtgaggatctgcgcactcatgttgctaatatacaccgaattctagctgagaaggtttggcctgggatgcttagtcggaaacctgtcctctgccagcattttttgaagttcattgaagaaacataccgccaaattactatttccttggctgatagctttcaagacttgcagcctctgcgatacgcattagcatctgttctgagatacctagctccagaatttgttgatgcgaaagctgagcgatttgacaacagaatacgtaagaagctttttgatcttctccttacttggagtgaggattctggtagttcatggggacaggaaagcagcagcgactatcgtcgtgaaattgaacgatataaaagtaatcaacatacgaggtcaagggaatcatttgacaaacttgcatttgacagggaaatggctgaacagctagaagctattaattgggcttccatgaatgctattgcttcattgctttatgggccttgttttgatgataatgcgagaaagatgtctggccgggtgatatcatggattaatagtttattcatggaaccatctgcaagagcaccttttgggcattcaccagttgatccacgaacaccatcatattcaaagcatactgatggacgttttggtgggagggacaaacagaaaactagccacttgcgactcctcttagcaaaaactgcgctgaagaatattttgcagacaaatctggacttgtttcctgcttgcatagatcagtgctactctccagaccctcaaatagcagatggctatttcagtgttctggctgaagtctacatgcgccaggagattccaaaatgtgaaatccagagacttgtgagcttgatcctctacaaggtggttgatcagacaaaactaatccgtgacagtgccctccagatgttggagactctctctcttcgcgaatgggctgaagacgatactgatggtgttgggcattaccgggcttctgtcgttggcaacctccccgattcctaccaacaattccagtataagttgtcttcaaagcttgccaaggaccatcctgagctcagtgagcatctgtgcgaggaaataatgcaacgtcagcttgatgcagtggacattattgcacaacatcaggtccttacatgcatggctccttggatagaaaatctcaactttgtgagactgaaggaatctggctggagcgagaggttactgaaaagtctttattatgtgacatggaaacatggtgatcagtttcctgatgagattgagaaactttggagcactgtggcaagcaatactcgcaatatcatcccagttttgaacttcttgatcaccagagggattgaggactgcgatgccaatccatcggcagagatcactggtgcatttgcaacttatttttctgttgcaaagcgtgttagtctatatcttgctcggatctgcccacagcagaccatcgatcacttggtcttcgagctatctcagagaatgctcgaggacgacgaagaaccagtcaggcttgggaaggttgatgtctctgcaaatgttgtattggagttttctcaagggcctactgcctctcaggttgcaacagttgtggatagccagcctcacatgtccccccttcttgttcgtggttcacttgatggtgcagttagaaatgtcagtggaaacctgagctggcggacatctgcagttaccggccgaagtgtatctggcccattgagtccgttggctcatgaggtaagcattccaaacccaacggcaggccgatcaggacagctacttccagcgttaattactatgtcggggccattgagtggtgttcgaagctctgctggtaatctgaggagccgccatgtttccagagatagtggtgactactactttgataccccaaactcaacagatgatattttgcatcaagggggcagtggaattcacgggatcaatgccaatgagctccagtcagcactacaagggcaccaacacttgctttcacgtgctgacatagctttgattcttctggctgaaattgcttatgaaaatgatgaagactttcgtgaaaatttacctctgttgttccacgtcacatgtgtttcgatggatagctcagaagacattgtgctcgagcattgccaagatttgctcgtgaatctcctctactcgttggctggacgtcatcttgaactgtatgagatcgaaagtagtgaaagagagaataagcatcatgtggtgagcttgatcaaatacatccagtctaagaggggcagcttgatgtgggagaacgaggaccctacccttttccggatcgaacttcccagcgcttcactcttatcagcacttgtgcaaagcatggttagtgctattttcttccagggggaccttcgtgagacttggggttctgaagctcttaagtgggccatggagtgcacatctcgtcacctggcttgccggtcgcaccagatataccgtgccttgcgtcccagtgttaaaagtgatagctgcgtattgcttctgagatgcatccatagatgcttggggaatcctgttccagccgttctgggctttgcaatggagatactgctgactttacaggtcatggttgaaaacatggagcctgagaaggttatactttacccgcagctcttttggggctgcgttgcactgatgcataccgactttgtgcacatctactgccaggtgcttgagttgttttgtagagtaatcgatcgcttgacattccgtgaccggacaacagaaaacgtgttgctctcaagcatgccacgtgatgagtttgacatcaatgggtatgcaagtgacctccacaggctggagtctagaactacttcagagagattgctatctgtgactgggaccgggaaggtgcctgcttttgaaggggtgcagccgctggtgctgaaggggctcatgtccacagttagccatggatctgcaatcgagttgctatctaggatcacgatacctacgtgcgactctatatttgggagccccgatacaaggttactgatgcacatcacaggccttcttccatggctcggattgcagctcacgagggaagcaccaccttcccttgggtcagcttcgccactgcaagagcagaaccagaaagcttactatgtgtcatccaatatttcggcatggtgccgtgccaagtctctggacgatttggccgaagtgttcagagcgtattccttcggggaaatcatgtcgttggaagatctgtttgcacgagcttcaccaccaatctgtgcggagtggttccctaggcactcatctttggcctttgggcacctgctgaggctcctggagagaggccctctggattaccagcgggtggttcttctgatgcttaaatcgctgctgcagcaaacccctgtggatccgtcacagataccccaggtgtacaacttcgtgtcgcagctggtggagagcacattatgctcggaggcgctgaatgtgctggaggcgctgctgcggagctgcggcggcggcgggcaaggcgaggaggctgggtttggtgataacggcgggcatgggagcggggagaaggtcctccagagcatgctgcttcctcagtcgtctttcaaggcaaggagtgggccgctgcagtacgctgcggggtcggggttggggtccttgatggggcaaggcggcggtggcagcagcagcgccgcagatagcgggttggtggcacgggatgtagcgctgcagaacacccggctgctgcttgggcgagttcttgatacctgcgcgcttgggcgcaagagggatcacaagcggctggtgccatttgtggcgaacgtcgggtagaccttgccaacatatagcagcacaattttgagtgggcagggcagcagccgccagcagagcgcacgcagagtgcgtgcgtgcgtttgtgaccgggtcagtgtcgtgcaaaggtggccacgcacatagacgtagctgcagttcttgaaactatttatttatttgtttatttattttattgttttgttttgatgagtgaggccgtgtgtgatgtatgtatgcatgtaattcgaaaccaactatggccgtggatggcatttgtattgtggaaaggagagtagaaattgatgatgaaacacaacaaacaggtttggaggcgtccttgtgtggtgtgtggatatgatcagccagtcacagtgtggggatgagagtgaaagttgctttcttgagtttcttccgtcgtgtgtccgggcaccaaggttgtcttcagtggaccgtataaagcaagagatttgcacttagatgatactatttgtatagtaaagtttaaaatagggaatgagataggatacatggtgaggatagccaaagatgataggtgattcaaagtctcctacatagcatcctgactgtgactttgaatcatgacacaacatagcacaagattagttggttaaggctgtctccagtagatcctcgattttatcccctattctattttctattttaaacttcattatatctatagttttatgtcccatattttacactacctactggagacagtctaaagactgtttgtttgagctagaacttttctaaaaaggtgctactgggattttgatcttgagtagttaatgatagctt

SEQ ID NO: 44492 - DNA, 7344 bp, Zea Mays
ctgccccccacgccgcccagcgccgcggcctcgacgtccgacatgggcgctggcggcgccgccaagcagatcgtcgattccctcctcgcccgcttcctcccgcttgcccgccgccgcatcgagaccgcccaggcacaggatgggcaatacctccggccatgtgatccaagctatgagcaagtattggattctctagccatggttgctagacacacacctctacctcttttggaagctcttcttcggtggagagaaagtgaatccccgaaaggtgctcacgacgcgtcaacataccaaaagaagcttgctgttgagtgcatattctcttctgcctgcattcggtttgctgagtgttgtccacaagagggaataacagaaaaactttggattggcttagaaagtttcgtatttgattggctaattaatgcagacagggttgtgagccaagtagagtatccgtcattggttgatttacgaggtctactcttagatcttgttgcacagcttttaggagctttatcacgcataagattcagttctgtgactgaaaggtttttcatagagcttaatgtgcggcgtattgattcacttgctcttagaagtgagacactcagcataatcaacgggatgcgctaccttaaattgggggtgaagacagagggtgggctgaatgcttctgtatcctttattgcaaaagcaaatcctctaaatcgtcctcccaacaaaagaaagagtgaattgcaacatgctttgtgtaacatgctctcaagtatacttgccccacttgcggagggtggaaaaaaccattggcctccacttggtgtcgaacctgcactgtcactttggtatgatgctgttgcacgaataagagtccagctcatgtattggatggataagcagagcaaacatgttgctgttggctttccacttgtcacccttctactttgtcttggtgatgccaatgcattcaactctagtttttcccagcatatggaaatcctgtataagtatctcaaggataagaaccatcgatcaatggctttggattgtcttcatcggctagtaaaattctatttgaatatttatgccgattaccaacctcgaaatcatgtttgggactatttagacagtgtaacctctcaattactgactgttctgaagaaaggcttgctgacccaagatgtgcagcatgataaacttgttgagttctgtgtgaccttagctcagagcaatctggattttgcaatgaatcatatgatactggaattattgaaaccagatagtttgagtgaagcaaaggttgttggtcttagggctttgctcgagatagttgtttctccatcaaatcaacaaattggcttggatgttttgcaagtatttggtattgggcactatattcctaaggtgaagtcagcaattgagtcaatactaaggtcttgcaacaaggcatatagcctggcacttctcacatcatcaaagactacaatagataatgtaaccaaggataaatctcagggatcactcttcaggtctgtgcttaaatgtatcccatacttgatagaagaggcgggccgtaatgataaaatgactgagattatacctcagcatggcataagtattgaccctggtgttcgtgaagaagcagtgcaagtgttgaacaggatcgtacgttgcctaccaaatcgtaggtttgctgtgttgaaaggaatggccaatttcatcctaaaacttcctgatgaatttcctctcttaattcaaacatcacttggacgcctggtggagctaatgcgtttgtggagagtatgcctatctgaggaggccttggcaaaagacatgcaaagtggtaggcgtttgagtataggaggggatgcactacagaggtctccttttcataggtccagggatgtatctgaatttcgcgcctcagaaatggatgcagttggccttgtctttctcagttctgctgatgttcaaataaggctcactgccctggagttactgcgatgtgttcgagcactgcaaaataatctcagggattactcagcaaatgaatggggtgacaataagctgaaacttgaaccagagccaatatttatcatagatatcatagaggagaatggggaagacattgttcaaagctgttattgggatccgggacgaccttatgatctaagacgtgaaatggaccctattcctttggatgtgactcttcaatccattttggagagtgtagataaaaacagatgggcgcgctacctcagtgaaattgtgaaatatgcagctgaactttgcccgagttctgtgcaggatgcaagattagaggttattagaaggcttgaacagattactcctgccgatctcggtgggaaggctcagcaaccacaagattctgaaactaaacttgaccaatggttgatatatgccatgtttgcatgctcttgtccacctgatattagagaagaattttccatcaaatcagcaagagaagtcttccatatgatttttccatcattgcgtcatggttcagaagcatatgcacttgctgctacatctgcccttggtcactcacatttagaagtatgtgaaatcatgtttggagatctggcattatttgttgaggaggtgtcatcagaaactgaaggaaaacctaaatggaagaatatggtactgaatactgatactctgcagaatcctaggtcccgccgtgaggatctgcgcactcatgttgctaatatacaccgaattctagctgagaaggtttggcctgggatgcttagtcggaaacctgtcctctgccagcattttttgaagttcattgaagaaacataccgccaaattactatttccttggctgatagctttcaagacttgcagcctctgcgatacgcattagcatctgttctgagatacctagctccagaatttgttgatgcgaaagctgagcgatttgacaacagaatacgtaagaagctttttgatcttctccttacttggagtgaggattctggtagttcatggggacaggaaagcagcagcgactatcgtcgtgaaattgaacgatataaaagtaatcaacatacgaggtcaagggaatcatttgacaaacttgcatttgacagggaaatggctgaacagctagaagctattaattgggcttccatgaatgctattgcttcattgctttatgggccttgttttgatgataatgcgagaaagatgtctggccgggtgatatcatggattaatagtttattcatggaaccatctgcaagagcaccttttgggcattcaccagttgatccacgaacaccatcatattcaaagcatactgatggacgttttggtgggagggacaaacagaaaactagccacttgcgactcctcttagcaaaaactgcgctgaagaatattttgcagacaaatctggacttgtttcctgcttgcatagatcagtgctactctccagaccctcaaatagcagatggctatttcagtgttctggctgaagtctacatgcgccaggagattccaaaatgtgaaatccagagacttgtgagcttgatcctctacaaggtggttgatcagacaaaactaatccgtgacagtgccctccagatgttggagactctctctcttcgcgaatgggctgaagacgatactgatggtgttgggcattaccgggcttctgtcgttggcaacctccccgattcctaccaacaattccagtataagttgtcttcaaagcttgccaaggaccatcctgagctcagtgagcatctgtgcgaggaaataatgcaacgtcagcttgatgcagtggacattattgcacaacatcaggtccttacatgcatggctccttggatagaaaatctcaactttgtgagactgaaggaatctggctggagcgagaggttactgaaaagtctttattatgtgacatggaaacatggtgatcagtttcctgatgagattgagaaactttggagcactgtggcaagcaatactcgcaatatcatcccagttttgaacttcttgatcaccagagggattgaggactgcgatgccaatccatcggcagagatcactggtgcatttgcaacttatttttctgttgcaaagcgtgttagtctatatcttgctcggatctgcccacagcagaccatcgatcacttggtcttcgagctatctcagagaatgctcgaggacgacgaagaaccagtcaggcttgggaaggttgatgtctctgcaaatgttgtattggagttttctcaagggcctactgcctctcaggttgcaacagttgtggatagccagcctcacatgtccccccttcttgttcgtggttcacttgatggtgcagttagaaatgtcagtggaaacctgagctggcggacatctgcagttaccggccgaagtgtatctggcccattgagtccgttggctcatgaggtaagcattccaaacccaacggcaggccgatcaggacagctacttccagcgttaattactatgtcggggccattgagtggtgttcgaagctctgctggtaatctgaggagccgccatgtttccagagatagtggtgactactactttgataccccaaactcaacagatgatattttgcatcaagggggcagtggaattcacgggatcaatgccaatgagctccagtcagcactacaagggcaccaacacttgctttcacgtgctgacatagctttgattcttctggctgaaattgcttatgaaaatgatgaagactttcgtgaaaatttacctctgttgttccacgtcacatgtgtttcgatggatagctcagaagacattgtgctcgagcattgccaagatttgctcgtgaatctcctctactcgttggctggacgtcatcttgaactgtatgagatcgaaagtagtgaaagagagaataagcatcatgtggtgagcttgatcaaatacatccagtctaagaggggcagcttgatgtgggagaacgaggaccctacccttttccggatcgaacttcccagcgcttcactcttatcagcacttgtgcaaagcatggttagtgctattttcttccagggggaccttcgtgagacttggggttctgaagctcttaagtgggccatggagtgcacatctcgtcacctggcttgccggtcgcaccagatataccgtgccttgcgtcccagtgttaaaagtgatagctgcgtattgcttctgagatgcatccatagatgcttggggaatcctgttccagccgttctgggctttgcaatggagatactgctgactttacaggtcatggttgaaaacatggagcctgagaaggttatactttacccgcagctcttttggggctgcgttgcactgatgcataccgactttgtgcacatctactgccaggtgcttgagttgttttgtagagtaatcgatcgcttgacattccgtgaccggacaacagaaaacgtgttgctctcaagcatgccacgtgatgagtttgacatcaatgggtatgcaagtgacctccacaggctggagtctagaactacttcagagagattgctatctgtgactgggaccgggaaggtgcctgcttttgaaggggtgcagccgctggtgctgaaggggctcatgtccacagttagccatggatctgcaatcgagttgctatctaggatcacgatacctacgtgcgactctatatttgggagccccgatacaaggttactgatgcacatcacaggccttcttccatggctcggattgcagctcacgagggaagcaccaccttcccttgggtcagcttcgccactgcaagagcagaaccagaaagcttactatgtgtcatccaatatttcggcatggtgccgtgccaagtctctggacgatttggccgaagtgttcagagcgtattccttcggggaaatcatgtcgttggaagatctgtttgcacgagcttcaccaccaatctgtgcggagtggttccctaggcactcatctttggcctttgggcacctgctgaggctcctggagagaggccctctggattaccagcgggtggttcttctgatgcttaaatcgctgctgcagcaaacccctgtggatccgtcacagataccccaggtgtacaacttcgtgtcgcagctggtggagagcacattatgctcggaggcgctgaatgtgctggaggcgctgctgcggagctgcggcggcggcgggcaaggcgaggaggctgggtttggtgataacggcgggcatgggagcggggagaaggtcctccagagcatgctgcttcctcagtcgtctttcaaggcaaggagtgggccgctgcagtacgctgcggggtcggggttggggtccttgatggggcaaggcggcggtggcagcagcagcgccgcagatagcgggttggtggcacgggatgtagcgctgcagaacacccggctgctgcttgggcgagttcttgatacctgcgcgcttgggcgcaagagggatcacaagcggctggtgccatttgtggcgaacgtcgggtagaccttgccaacatatagcagcacaattttgagtgggcagggcagcagccgccagcagagcgcacgcagagtgcgtgcgtgcgtttgtgaccgggtcagtgtcgtgcaaaggtggccacgcacatagacgtagctgcagttcttgaaactatttatttatttgtttatttattttattgttttgttttgatgagtgaggccgtgtgtgatgtatgtatgcatgtaattcgaaaccaactatggccgtggatggcatttgtattgtggaaaggagagtagaaattgatgatgaaacacaacaaacaggtttggaggcgtccttgtgtggtgtgtggatatgatcagccagtcacagtgtggggatgagagtgaaagttgctttcttgagtttcttccgtcgtgtgtccgggcaccaaggttgtcttcagtggaccgtataaagcaagagatttgcacttagatgatactatttgtatagtaaagtttaaaatagggaatgagataggatacatggtgaggatagccaaagatgataggtgattcaaagtctcctacatagcatcctgactgtgactttgaatcatgacacaacatagcacaagattagttggttaaggctgtctccagtagatcctcgattttatcccctattctattttctattttaaacttcattatatctatagttttatgtcccatattttacactacctactggagacagtctaaagactgtttgtttgagctagaacttttctaaaaaggtgctactgggattttgatcttgagtagttaatgatagctt

SEQ ID NO: 44493 - DNA, 7160 bp, Zea Mays
ctgccccccacgccgcccagcgccgcggcctcgacgtccgacatgggcgctggcggcgccgccaagcagatcgtcgattccctcctcgcccgcttcctcccgcttgcccgccgccgcatcgagaccgcccaggcacaggatgggcaatacctccggccatgtgatccaagctatgagcaagtattggattctctagccatggttgctagacacacacctctacctcttttggaagctcttcttcggtggagagaaagtgaatccccgaaaggtgctcacgacgcgtcaacataccaaaagaagcttgctgttgagtgcatattctcttctgcctgcattcggtttgctgagtgttgtccacaagagggaataacagaaaaactttggattggcttagaaagtttcgtatttgattggctaattaatgcagacagggttgtgagccaagtagagtatccgtcattggttgatttacgaggtctactcttagatcttgttgcacagcttttaggagctttatcacgcataagattcagttctgtgactgaaaggtttttcatagagcttaatgtgcggcgtattgattcacttgctcttagaagtgagacactcagcataatcaacgggatgcgctaccttaaattgggggtgaagacagagggtgggctgaatgcttctgtatcctttattgcaaaagcaaatcctctaaatcgtcctcccaacaaaagaaagagtgaattgcaacatgctttgtgtaacatgctctcaagtatacttgccccacttgcggagggtggaaaaaaccattggcctccacttggtgtcgaacctgcactgtcactttggtatgatgctgttgcacgaataagagtccagctcatgtattggatggataagcagagcaaacatgttgctgttggctttccacttgtcacccttctactttgtcttggtgatgccaatgcattcaactctagtttttcccagcatatggaaatcctgtataagtatctcaaggataagaaccatcgatcaatggctttggattgtcttcatcggctagtaaaattctatttgaatatttatgccgattaccaacctcgaaatcatgtttgggactatttagacagtgtaacctctcaattactgactgttctgaagaaaggcttgctgacccaagatgtgcagcatgataaacttgttgagttctgtgtgaccttagctcagagcaatctggattttgcaatgaatcatatgatactggaattattgaaaccagatagtttgagtgaagcaaaggttgttggtcttagggctttgctcgagatagttgtttctccatcaaatcaacaaattggcttggatgttttgcaagtatttggtattgggcactatattcctaaggtgaagtcagcaattgagtcaatactaaggtcttgcaacaaggcatatagcctggcacttctcacatcatcaaagactacaatagataatgtaaccaaggataaatctcagggatcactcttcaggtctgtgcttaaatgtatcccatacttgatagaagaggcgggccgtaatgataaaatgactgagattatacctcagcatggcataagtattgaccctggtgttcgtgaagaagcagtgcaagtgttgaacaggatcgtacgttgcctaccaaatcgtaggtttgctgtgttgaaaggaatggccaatttcatcctaaaacttcctgatgaatttcctctcttaattcaaacatcacttggacgcctggtggagctaatgcgtttgtggagagtatgcctatctgaggaggccttggcaaaagacatgcaaagtggtaggcgtttgagtataggaggggatgcactacagaggtctccttttcataggtccagggatgtatctgaatttcgcgcctcagaaatggatgcagttggccttgtctttctcagttctgctgatgttcaaataaggctcactgccctggagttactgcgatgtgttcgagcactgcaaaataatctcagggattactcagcaaatgaatggggtgacaataagctgaaacttgaaccagagccaatatttatcatagatatcatagaggagaatggggaagacattgttcaaagctgttattgggatccgggacgaccttatgatctaagacgtgaaatggaccctattcctttggatgtgactcttcaatccattttggagagtgtagataaaaacagatgggcgcgctacctcagtgaaattgtgaaatatgcagctgaactttgcccgagttctgtgcaggatgcaagattagaggttattagaaggcttgaacagattactcctgccgatctcggtgggaaggctcagcaaccacaagattctgaaactaaacttgaccaatggttgatatatgccatgtttgcatgctcttgtccacctgatattagagaagaattttccatcaaatcagcaagagaagtcttccatatgatttttccatcattgcgtcatggttcagaagcatatgcacttgctgctacatctgcccttggtcactcacatttagaagtatgtgaaatcatgtttggagatctggcattatttgttgaggaggtgtcatcagaaactgaaggaaaacctaaatggaagcagaatcctaggtcccgccgtgaggatctgcgcactcatgttgctaatatacaccgaattctagctgagaaggtttggcctgggatgcttagtcggaaacctgtcctctgccagcattttttgaagttcattgaagaaacataccgccaaattactatttccttggctgatagctttcaagacttgcagcctctgcgatacgcattagcatctgttctgagatacctagctccagaatttgttgatgcgaaagctgagcgatttgacaacagaatacggaaatggctgaacagctagaagctattaattgggcttccatgaatgctattgcttcattgctttatgggccttgttttgatgataatgcgagaaagatgtctggccgggtgatatcatggattaatagtttattcatggaaccatctgcaagagcaccttttgggcattcaccagttgatccacgaacaccatcatattcaaagcatactgatggacgttttggtgggagggacaaacagaaaactagccacttgcgactcctcttagcaaaaactgcgctgaagaatattttgcagacaaatctggacttgtttcctgcttgcatagatcagtgctactctccagaccctcaaatagcagatggctatttcagtgttctggctgaagtctacatgcgccaggagattccaaaatgtgaaatccagagacttgtgagcttgatcctctacaaggtggttgatcagacaaaactaatccgtgacagtgccctccagatgttggagactctctctcttcgcgaatgggctgaagacgatactgatggtgttgggcattaccgggcttctgtcgttggcaacctccccgattcctaccaacaattccagtataagttgtcttcaaagcttgccaaggaccatcctgagctcagtgagcatctgtgcgaggaaataatgcaacgtcagcttgatgcagtggacattattgcacaacatcaggtccttacatgcatggctccttggatagaaaatctcaactttgtgagactgaaggaatctggctggagcgagaggttactgaaaagtctttattatgtgacatggaaacatggtgatcagtttcctgatgagattgagaaactttggagcactgtggcaagcaatactcgcaatatcatcccagttttgaacttcttgatcaccagagggattgaggactgcgatgccaatccatcggcagagatcactggtgcatttgcaacttatttttctgttgcaaagcgtgttagtctatatcttgctcggatctgcccacagcagaccatcgatcacttggtcttcgagctatctcagagaatgctcgaggacgacgaagaaccagtcaggcttgggaaggttgatgtctctgcaaatgttgtattggagttttctcaagggcctactgcctctcaggttgcaacagttgtggatagccagcctcacatgtccccccttcttgttcgtggttcacttgatggtgcagttagaaatgtcagtggaaacctgagctggcggacatctgcagttaccggccgaagtgtatctggcccattgagtccgttggctcatgaggtaagcattccaaacccaacggcaggccgatcaggacagctacttccagcgttaattactatgtcggggccattgagtggtgttcgaagctctgctggtaatctgaggagccgccatgtttccagagatagtggtgactactactttgataccccaaactcaacagatgatattttgcatcaagggggcagtggaattcacgggatcaatgccaatgagctccagtcagcactacaagggcaccaacacttgctttcacgtgctgacatagctttgattcttctggctgaaattgcttatgaaaatgatgaagactttcgtgaaaatttacctctgttgttccacgtcacatgtgtttcgatggatagctcagaagacattgtgctcgagcattgccaagatttgctcgtgaatctcctctactcgttggctggacgtcatcttgaactgtatgagatcgaaagtagtgaaagagagaataagcatcatgtggtgagcttgatcaaatacatccagtctaagaggggcagcttgatgtgggagaacgaggaccctacccttttccggatcgaacttcccagcgcttcactcttatcagcacttgtgcaaagcatggttagtgctattttcttccagggggaccttcgtgagacttggggttctgaagctcttaagtgggccatggagtgcacatctcgtcacctggcttgccggtcgcaccagatataccgtgccttgcgtcccagtgttaaaagtgatagctgcgtattgcttctgagatgcatccatagatgcttggggaatcctgttccagccgttctgggctttgcaatggagatactgctgactttacaggtcatggttgaaaacatggagcctgagaaggttatactttacccgcagctcttttggggctgcgttgcactgatgcataccgactttgtgcacatctactgccaggtgcttgagttgttttgtagagtaatcgatcgcttgacattccgtgaccggacaacagaaaacgtgttgctctcaagcatgccacgtgatgagtttgacatcaatgggtatgcaagtgacctccacaggctggagtctagaactacttcagagagattgctatctgtgactgggaccgggaaggtgcctgcttttgaaggggtgcagccgctggtgctgaaggggctcatgtccacagttagccatggatctgcaatcgagttgctatctaggatcacgatacctacgtgcgactctatatttgggagccccgatacaaggttactgatgcacatcacaggccttcttccatggctcggattgcagctcacgagggaagcaccaccttcccttgggtcagcttcgccactgcaagagcagaaccagaaagcttactatgtgtcatccaatatttcggcatggtgccgtgccaagtctctggacgatttggccgaagtgttcagagcgtattccttcggggaaatcatgtcgttggaagatctgtttgcacgagcttcaccaccaatctgtgcggagtggttccctaggcactcatctttggcctttgggcacctgctgaggctcctggagagaggccctctggattaccagcgggtggttcttctgatgcttaaatcgctgctgcagcaaacccctgtggatccgtcacagataccccaggtgtacaacttcgtgtcgcagctggtggagagcacattatgctcggaggcgctgaatgtgctggaggcgctgctgcggagctgcggcggcggcgggcaaggcgaggaggctgggtttggtgataacggcgggcatgggagcggggagaaggtcctccagagcatgctgcttcctcagtcgtctttcaaggcaaggagtgggccgctgcagtacgctgcggggtcggggttggggtccttgatggggcaaggcggcggtggcagcagcagcgccgcagatagcgggttggtggcacgggatgtagcgctgcagaacacccggctgctgcttgggcgagttcttgatacctgcgcgcttgggcgcaagagggatcacaagcggctggtgccatttgtggcgaacgtcgggtagaccttgccaacatatagcagcacaattttgagtgggcagggcagcagccgccagcagagcgcacgcagagtgcgtgcgtgcgtttgtgaccgggtcagtgtcgtgcaaaggtggccacgcacatagacgtagctgcagttcttgaaactatttatttatttgtttatttattttattgttttgttttgatgagtgaggccgtgtgtgatgtatgtatgcatgtaattcgaaaccaactatggccgtggatggcatttgtattgtggaaaggagagtagaaattgatgatgaaacacaacaaacaggtttggaggcgtccttgtgtggtgtgtggatatgatcagccagtcacagtgtggggatgagagtgaaagttgctttcttgagtttcttccgtcgtgtgtccgggcaccaaggttgtcttcagtggaccgtataaagcaagagatttgcacttagatgatactatttgtatagtaaagtttaaaatagggaatgagataggatacatggtgaggatagccaaagatgataggtgattcaaagtctcctacatagcatcctgactgtgactttgaatcatgacacaacatagcacaagattagttggttaaggctgtctccagtagatcctcgattttatcccctattctattttctattttaaacttcattatatctatagttttatgtcccatattttacactacctactggagacagtctaaagactgtttgtttgagctagaacttttctaaaaaggtgctactgggattttgatcttgagtagttaatgatagctt

SEQ ID NO: 44494 - DNA, 7548 bp, Zea Mays
aaaaaatgaaagggaatacacaaaccactgtgtgaggacctccgccaacctccagtggctcccatctctcctctagtccgtaccatcggtgaaggcagggcagggcgaggcgggggccgcctccgcatcgccgcctggctgggtcggtttccccgcgatatcaagctggctaccccgcgctcctcccaccacctctccgctgccgcggcagcgggggtctcgtaccccccgccgctgccccccacgccgcccagcgccgcggcctcgacgtccgacatgggcgctggcggcgccgccaagcagatcgtcgattccctcctcgcccgcttcctcccgcttgcccgccgccgcatcgagaccgcccaggcacaggatgggcaatacctccggccatgtgatccaagctatgagcaagtattggattctctagccatggttgctagacacacacctctacctcttttggaagctcttcttcggtggagagaaagtgaatccccgaaaggtgctcacgacgcgtcaacataccaaaagaagcttgctgttgagtgcatattctcttctgcctgcattcggtttgctgagtgttgtccacaagagggaataacagaaaaactttggattggcttagaaagtttcgtatttgattggctaattaatgcagacagggttgtgagccaagtagagtatccgtcattggttgatttacgaggtctactcttagatcttgttgcacagcttttaggagctttatcacgcataagattcagttctgtgactgaaaggtttttcatagagcttaatgtgcggcgtattgattcacttgctcttagaagtgagacactcagcataatcaacgggatgcgctaccttaaattgggggtgaagacagagggtgggctgaatgcttctgtatcctttattgcaaaagcaaatcctctaaatcgtcctcccaacaaaagaaagagtgaattgcaacatgctttgtgtaacatgctctcaagtatacttgccccacttgcggagggtggaaaaaaccattggcctccacttggtgtcgaacctgcactgtcactttggtatgatgctgttgcacgaataagagtccagctcatgtattggatggataagcagagcaaacatgttgctgttggctttccacttgtcacccttctactttgtcttggtgatgccaatgcattcaactctagtttttcccagcatatggaaatcctgtataagtatctcaaggataagaaccatcgatcaatggctttggattgtcttcatcggctagtaaaattctatttgaatatttatgccgattaccaacctcgaaatcatgtttgggactatttagacagtgtaacctctcaattactgactgttctgaagaaaggcttgctgacccaagatgtgcagcatgataaacttgttgagttctgtgtgaccttagctcagagcaatctggattttgcaatgaatcatatgatactggaattattgaaaccagatagtttgagtgaagcaaaggttgttggtcttagggctttgctcgagatagttgtttctccatcaaatcaacaaattggcttggatgttttgcaagtatttggtattgggcactatattcctaaggtgaagtcagcaattgagtcaatactaaggtcttgcaacaaggcatatagcctggcacttctcacatcatcaaagactacaatagataatgtaaccaaggataaatctcagggatcactcttcaggtctgtgcttaaatgtatcccatacttgatagaagaggcgggccgtaatgataaaatgactgagattatacctcagcatggcataagtattgaccctggtgttcgtgaagaagcagtgcaagtgttgaacaggatcgtacgttgcctaccaaatcgtaggtttgctgtgttgaaaggaatggccaatttcatcctaaaacttcctgatgaatttcctctcttaattcaaacatcacttggacgcctggtggagctaatgcgtttgtggagagtatgcctatctgaggaggccttggcaaaagacatgcaaagtggtaggcgtttgagtataggaggggatgcactacagaggtctccttttcataggtccagggatgtatctgaatttcgcgcctcagaaatggatgcagttggccttgtctttctcagttctgctgatgttcaaataaggctcactgccctggagttactgcgatgtgttcgagcactgcaaaataatctcagggattactcagcaaatgaatggggtgacaataagctgaaacttgaaccagagccaatatttatcatagatatcatagaggagaatggggaagacattgttcaaagctgttattgggatccgggacgaccttatgatctaagacgtgaaatggaccctattcctttggatgtgactcttcaatccattttggagagtgtagataaaaacagatgggcgcgctacctcagtgaaattgtgaaatatgcagctgaactttgcccgagttctgtgcaggatgcaagattagaggttattagaaggcttgaacagattactcctgccgatctcggtgggaaggctcagcaaccacaagattctgaaactaaacttgaccaatggttgatatatgccatgtttgcatgctcttgtccacctgatattagagaagaattttccatcaaatcagcaagagaagtcttccatatgatttttccatcattgcgtcatggttcagaagcatatgcacttgctgctacatctgcccttggtcactcacatttagaagtatgtgaaatcatgtttggagatctggcattatttgttgaggaggtgtcatcagaaactgaaggaaaacctaaatggaagaatcctaggtcccgccgtgaggatctgcgcactcatgttgctaatatacaccgaattctagctgagaaggtttggcctgggatgcttagtcggaaacctgtcctctgccagcattttttgaagttcattgaagaaacataccgccaaattactatttccttggctgatagctttcaagacttgcagcctctgcgatacgcattagcatctgttctgagatacctagctccagaatttgttgatgcgaaagctgagcgatttgacaacagaatacgtaagaagctttttgatcttctccttacttggagtgaggattctggtagttcatggggacaggaaagcagcagcgactatcgtcgtgaaattgaacgatataaaagtaatcaacatacgaggtcaagggaatcatttgacaaacttgcatttgacagggaaatggctgaacagctagaagctattaattgggcttccatgaatgctattgcttcattgctttatgggccttgttttgatgataatgcgagaaagatgtctggccgggtgatatcatggattaatagtttattcatggaaccatctgcaagagcaccttttgggcattcaccagttgatccacgaacaccatcatattcaaagcatactgatggacgttttggtgggagggacaaacagaaaactagccacttgcgactcctcttagcaaaaactgcgctgaagaatattttgcagacaaatctggacttgtttcctgcttgcatagatcagtgctactctccagaccctcaaatagcagatggctatttcagtgttctggctgaagtctacatgcgccaggagattccaaaatgtgaaatccagagacttgtgagcttgatcctctacaaggtggttgatcagacaaaactaatccgtgacagtgccctccagatgttggagactctctctcttcgcgaatgggctgaagacgatactgatggtgttgggcattaccgggcttctgtcgttggcaacctccccgattcctaccaacaattccagtataagttgtcttcaaagcttgccaaggaccatcctgagctcagtgagcatctgtgcgaggaaataatgcaacgtcagcttgatgcagtggacattattgcacaacatcaggtccttacatgcatggctccttggatagaaaatctcaactttgtgagactgaaggaatctggctggagcgagaggttactgaaaagtctttattatgtgacatggaaacatggtgatcagtttcctgatgagattgagaaactttggagcactgtggcaagcaatactcgcaatatcatcccagttttgaacttcttgatcaccagagggattgaggactgcgatgccaatccatcggcagagatcactggtgcatttgcaacttatttttctgttgcaaagcgtgttagtctatatcttgctcggatctgcccacagcagaccatcgatcacttggtcttcgagctatctcagagaatgctcgaggacgacgaagaaccagtcaggcttgggaaggttgatgtctctgcaaatgttgtattggagttttctcaagggcctactgcctctcaggttgcaacagttgtggatagccagcctcacatgtccccccttcttgttcgtggttcacttgatggtgcagttagaaatgtcagtggaaacctgagctggcggacatctgcagttaccggccgaagtgtatctggcccattgagtccgttggctcatgaggtaagcattccaaacccaacggcaggccgatcaggacagctacttccagcgttaattactatgtcggggccattgagtggtgttcgaagctctgctggtaatctgaggagccgccatgtttccagagatagtggtgactactactttgataccccaaactcaacagatgatattttgcatcaagggggcagtggaattcacgggatcaatgccaatgagctccagtcagcactacaagggcaccaacacttgctttcacgtgctgacatagctttgattcttctggctgaaattgcttatgaaaatgatgaagactttcgtgaaaatttacctctgttgttccacgtcacatgtgtttcgatggatagctcagaagacattgtgctcgagcattgccaagatttgctcgtgaatctcctctactcgttggctggacgtcatcttgaactgtatgagatcgaaagtagtgaaagagagaataagcatcatgtggtgagcttgatcaaatacatccagtctaagaggggcagcttgatgtgggagaacgaggaccctacccttttccggatcgaacttcccagcgcttcactcttatcagcacttgtgcaaagcatggttagtgctattttcttccagggggaccttcgtgagacttggggttctgaagctcttaagtgggccatggagtgcacatctcgtcacctggcttgccggtcgcaccagatataccgtgccttgcgtcccagtgttaaaagtgatagctgcgtattgcttctgagatgcatccatagatgcttggggaatcctgttccagccgttctgggctttgcaatggagatactgctgactttacaggtcatggttgaaaacatggagcctgagaaggttatactttacccgcagctcttttggggctgcgttgcactgatgcataccgactttgtgcacatctactgccaggtgcttgagttgttttgtagagtaatcgatcgcttgacattccgtgaccggacaacagaaaacgtgttgctctcaagcatgccacgtgatgagtttgacatcaatgggtatgcaagtgacctccacaggctggagtctagaactacttcagagagattgctatctgtgactgggaccgggaaggtgcctgcttttgaaggggtgcagccgctggtgctgaaggggctcatgtccacagttagccatggatctgcaatcgagttgctatctaggatcacgatacctacgtgcgactctatatttgggagccccgatacaaggttactgatgcacatcacaggccttcttccatggctcggattgcagctcacgagggaagcaccaccttcccttgggtcagcttcgccactgcaagagcagaaccagaaagcttactatgtgtcatccaatatttcggcatggtgccgtgccaagtctctggacgatttggccgaagtgttcagagcgtattccttcggggaaatcatgtcgttggaagatctgtttgcacgagcttcaccaccaatctgtgcggagtggttccctaggcactcatctttggcctttgggcacctgctgaggctcctggagagaggccctctggattaccagcgggtggttcttctgatgcttaaatcgctgctgcagcaaacccctgtggatccgtcacagataccccaggtgtacaacttcgtgtcgcagctggtggagagcacattatgctcggaggcgctgaatgtgctggaggcgctgctgcggagctgcggcggcggcgggcaaggcgaggaggctgggtttggtgataacggcgggcatgggagcggggagaaggtcctccagagcatgctgcttcctcagtcgtctttcaaggcaaggagtgggccgctgcagtacgctgcggggtcggggttggggtccttgatggggcaaggcggcggtggcagcagcagcgccgcagatagcgggttggtggcacgggatgtagcgctgcagaacacccggctgctgcttgggcgagttcttgatacctgcgcgcttgggcgcaagagggatcacaagcggctggtgccatttgtggcgaacgtcgggtagaccttgccaacatatagcagcacaattttgagtgggcagggcagcagccgccagcagagcgcacgcagagtgcgtgcgtgcgtttgtgaccgggtcagtgtcgtgcaaaggtggccacgcacatagacgtagctgcagttcttgaaactatttatttatttgtttatttattttattgttttgttttgatgagtgaggccgtgtgtgatgtatgtatgcatgtaattcgaaaccaactatggccgtggatggcatttgtattgtggaaaggagagtagaaattgatgatgaaacacaacaaacaggtttggaggcgtccttgtgtggtgtgtggatatgatcagccagtcacagtgtggggatgagagtgaaagttgctttcttgagtttcttccgtcgtgtgtccgggcaccaaggttgtcttcagtggaccgtataaagcaagagatttgcacttagatgatactatttgtatagtaaagtttaaaatagggaatgagataggatacatggtgaggatagccaaagatgataggtgattcaaagtctcctacatagcatcctgactgtgactttgaatcatgacacaacatagcacaagattagttggttaaggctgtctccagtagatcctcgattttatcccctattctattttctattttaaacttcattatatctatagttttatgtcccatattttacactacctactggagacagtctaaagactgtttgtttgagctagaacttttctaaaaaggtgctactgggattttgatcttgagtagttaatgatagctt

SEQ ID NO: 44495 - DNA, 3925 bp, Zea Mays
cctacgcctacacgacggcgctgcggcaagcgccgaccaatccatggcagacgaggcggagtggaacgaggctgaggccgggatcgcggccccgggcgcgggcgtggctcctccagcgcccggaggcggcgaggaaaccaagaggaagagggggaggcccaaaggtagcctcgacacgtataagaggcggaggcggaggcggcgcaccggcgacctggtgtcggcggtgcccgcggctagcctcggggatatgggccactcatgtggctgcattcccgctcccccactccctcccccctgcactgtgtacactgtacgcgacggcggcgtggcaatcacccctcaatccatggaggacgaagcggagggggtcgaggctgagtccgggaatgcgggcgcggcctccgccgccagagacggcgaggaaaccaagcggaagaggggaagtcccgaaggtagcttgaatgagaggaacaaggacaggacgcctaagcccaaggccaaggggaggcggaggcggcgcaccgacgaccagaccttgtcggtgtccgcggtgagcctcggggatctagggctcggggtagcggcggggaccaggtcgatcagagagaggaggccggcgcccaatgcgttcttcgacgtgggcagcgacagcgatactgagcatgatgatgatgatgatgaggagcaaactacgattgatcaggccaatcacgagagtgctaaaacaggtgattctgtaaagaagggaggaagacccaggaaaatggaagcgggccaattgcatactaggacgcagatttccaatggtaaaagcaacggccatacaaatgggaatcctgctgggaagaagaggggaaggggaagacccaagaaactgacagtagaacaagcgattactaggtgccagttctccaatggtgaaacaaacaagagtggtgccgaggcagcaaggagcaaacagtcaaggaatcgtaggatttcacagaatgcaaagaagcggaaaagagatgaagggaaggagtctatgacaaaaaagttgaacaaacggagtaagatgttgactggggaaaatgccctcatgtgccacaagtgcccatattgtcgcaagaactgtaattgcaaggcatgcctaaggatgaggggagttgaagagcctccaaaaaaggagatctctaaagaaaatgaaattcgctatgcttttcatattgtaaccatgctgcttccctggatgagagaactgcgacaagaacagttggaggagaaggaagtagaggctaatatacaaggagtttcaatgaatgagataaaagtggaacaagctgagtttgacctagatgatcgtgtatattgcgataggtgtaaaacatctattgttgattttcatagaagctgcaagcgttgtttctacgatctttgccttaattgctgcaaggagcttcgcaaaggtgagatcccaggaggagaagaggtggaatatgtgccacctgaacctaaaggtaggagttattcttttggcaagattcatctactgaaggatgctgatagaagtaagaactcctcaaatggcgagtcttacaacggcatgcctgctgttgggaactccaataatggtctgttgctctggaaagcaaaaagtaatggtagcataccttgtccaccaaaggaagtaggaggctgtggtagtacacttctggacctcaagtgtttgtttccagagaagatgtttgccgagctagaatatagagctgacaaagttctcaggagtgggacattagctaaagcaatggttagtagaagtgatcggtgcccttgcttcaatcaatcaggcaagataagaactgaaagcaaatcagtaagggaggctgcaagcaggaagggctcaagcgataacttcctatactgtccagttgctattggtattcaagatgatgacatagtgcattttcagatgcattgggcaaagggtgagccagttgttgtttctgatgtccttcagttaacctctggtctgagttgggagccaatggtaatgtggcgggcattgcgggaaagatccaaaggcaaagcagaagatgagcaatttgctgtttgggcgatagactgccttgattggtgtgaggtggaaattaacatacataggttcttttcgggatatacaacaggcagaactcatgctaggactcactggcctcagatgcttaagctaaaagactggcctccttctagttcctttgacaagcgattgccgcggcatggtgccgaatttattagcgcattgccatttcgtgagtatactgatccacgatatggcccgctaaatcttgcagccaagcttcctgctggtgtcttgaagccagatcttggacccaaaagttacattgcttatgggttctacaaagaattgggcaggggcgattctgtgaccaagcttcactgtgacatgtctgatgcagtaaatatcttaacacacacagctgaagtcacttgtcagactgatattggcttaattgaaaaaatccaaaaagacatgagagagcaagatctgcaggaactatatgggggtctaaattcccgctctgagctcaagttgtcaccagctccaactgaatgcagggatgaatctgttgatgaaggattgaagacctcatatagtagagaaggcaattgtgtaaatagagacaattataatggtttggacatcaatgcattaccacctgatgacgatggagatattgcaaaggataaagaatcatctcctggatcagagtggcaaagtgaactaggtcagagttcagatcacaacaatggggtcaacacaactgatgagatgtacaatggagctcattacatttcacacaatcaaaaaagcactggcaggaaagttggcattaaacctcaagaagagaaatctgaaaaggctgattgcagtggcacatgtgcttatctaaaaggaagttctgaagataatccggaaatgcctattgtggagagctcagaggagcagagcaccggtggtgctctatgggatatcttccgcagacaggattctgataaattgcaagattatcttaggaagcattgctctgaattccggcatatttactgcaatccagtcaaaaaggtattccacccaattcatgatcagtccttttacttaactgaggagcataagagaaagctcaaggaagaatatggtattgaaccctggacgtttgaacagaagcttggtgaagctgttttcattcctgctggatgtcctcaccaagtgagaaatttgaagtcctgcatcaaagttgcgcttgattttgtttccccagaaaatgttggtgagtgtgttaagctgacggaggagtttagacgacttccatctttccacaaggctaaagaagacaaactagagatcaagaagatggctgttcatgccctgaacgaagctgtaaacttcctggatcctcgttcctcagaagagttgaaaattggggttggtgagaacatctgtgaggatgaatctgtagatgagaaggagctgccgcctagaagaggagttgaagtgtcaggcgttgatgagaagcctaaatagaaggcgagggaggcatcaagtccaaaagtgaagctgctgatgaggtcgcccattttaggttctcggaatcgtggttaattgatttgtcaaagcccctgttcatgtatggtgatcgctggctgacaccgatggatgaagagaagcaggacacgtgtgtgctgctgatatgtcgtgtcggcgagtgacatgaatatcatccctatccctatggtattattggtcgtttatgtttatgtttgatcatttgtcttattcagttttttttacaaataataaaacaagaggttaaaagtaaatgacgtcatttatttaattttaagacggggcagatgcaaaactgaa

SEQ ID NO: 44496 - DNA, 4230 bp, Zea Mays
cctacgcctacacgacggcgctgcggcaagcgccgaccaatccatggcagacgaggcggagtggaacgaggctgaggccgggatcgcggccccgggcgcgggcgtggctcctccagcgcccggaggcggcgaggaaaccaagaggaagagggggaggcccaaaggtagcctcgacacgtataagaggcggaggcggaggcggcgcaccggcgacctggtgtcggcggtgcccgcggctagcctcggggatatgggccactcatgtggctgcattcccgctcccccactccctcccccctgcactgtgtacactgtacgcgacggcggcgtggcaatcacccctcaatccatggaggacgaagcggagggggtcgaggctgagtccgggaatgcgggcgcggcctccgccgccagagacggcgaggaaaccaagcggaagaggggaagtcccgaaggtagcttgaatgagaggaacaaggacaggacgcctaagcccaaggccaaggggaggcggaggcggcgcaccgacgaccagaccttgtcggtgtccgcggtgagcctcggggatctagggctcggggtagcggcggggaccaggtcgatcagagagaggaggccggcgcccaatgcgttcttcgacgtgggcagcgacagcgatactgagcatgatgatgatgatgatgaggagcaaactacgattgatcaggccaatcacgagagtgctaaaacaggtgattctgtaaagaagggaggaagacccaggaaaatggaagcgggccaattgcatactaggacgcagatttccaatggtaaaagcaacggccatacaaatgggaatcctgctgggaagaagaggggaaggggaagacccaagaaactgacagtagaacaagcgattactaggtgccagttctccaatggtgaaacaaacaagagtggtgccgaggcagcaaggagcaaacagtcaaggaatcgtaggatttcacagaatgcaaagaagcggaaaagagatgaagggaaggagtctatgacaaaaaagttgaacaaacggagtaagatgttgactggggaaaatgccctcatgtgccacaagtgcccatattgtcgcaagaactgtaattgcaaggcatgcctaaggatgaggggagttgaagagcctccaaaaaaggagatctctaaagaaaatgaaattcgctatgcttttcatattgtaaccatgctgcttccctggatgagagaactgcgacaagaacagttggaggagaaggaagtagaggctaatatacaaggagtttcaatgaatgagataaaagtggaacaagctgagtttgacctagatgatcgtgtatattggttgatttctttccctgattacattctgccataaatctaatggttggcatctaatctactcgttccctcaactgcagcgataggtgtaaaacatctattgttgattttcatagaagctgcaagcgttgtttctacgatctttgccttaattgctgcaaggagcttcgcaaaggtgagatcccaggaggagaagaggtggaatatgtgccacctgaacctaaaggtaggagttattcttttggcaagattcatctactgaaggatgctgatagaagtaagaactcctcaaatggcgagtcttacaacggcatgcctgctgttgggaactccaataatggtctgttgctctggaaagcaaaaagtaatggtagcataccttgtccaccaaaggaagtaggaggctgtggtagtacacttctggacctcaagtgtttgtttccagagaagatgtttgccgagctagaatatagagctgacaaagttctcaggagtgggacattagctaaagcaatggttagtagaagtgatcggtgcccttgcttcaatcaatcaggcaagataagaactgaaagcaaatcagtaagggaggctgcaagcaggaagggctcaagcgataacttcctatactgtccagttgctattggtattcaagatgatgacatagtgcattttcagatgcattgggcaaagggtgagccagttgttgtttctgatgtccttcagttaacctctggtctgagttgggagccaatggtaatgtggcgggcattgcgggaaagatccaaaggcaaagcagaagatgagcaatttgctgtttgggcgatagactgccttgattggtgtgagaaattcttaggacggcattgagtagtgaccagcctaagtaaagccgagcctgcgtttgcatccagaagaaaagaacacatattataatagtattgacaaacttcatcgttctatcagtgaagttctcatttcaactggggatgtttatgagtcgccctaaatttagatgtgccttgtttccttcttatgccgcttcatgcacgcatttaatatccttatatgttgcaggtggaaattaacatacataggttcttttcgggatatacaacaggcagaactcatgctaggactcactggcctcagatgcttaagctaaaagactggcctccttctagttcctttgacaagcgattgccgcggcatggtgccgaatttattagcgcattgccatttcgtgagtatactgatccacgatatggcccgctaaatcttgcagccaagcttcctgctggtgtcttgaagccagatcttggacccaaaagttacattgcttatgggttctacaaagaattgggcaggggcgattctgtgaccaagcttcactgtgacatgtctgatgcagtaaatatcttaacacacacagctgaagtcacttgtcagactgatattggcttaattgaaaaaatccaaaaagacatgagagagcaagatctgcaggaactatatgggggtctaaattcccgctctgagctcaagttgtcaccagctccaactgaatgcagggatgaatctgttgatgaaggattgaagacctcatatagtagagaaggcaattgtgtaaatagagacaattataatggtttggacatcaatgcattaccacctgatgacgatggagatattgcaaaggataaagaatcatctcctggatcagagtggcaaagtgaactaggtcagagttcagatcacaacaatggggtcaacacaactgatgagatgtacaatggagctcattacatttcacacaatcaaaaaagcactggcaggaaagttggcattaaacctcaagaagagaaatctgaaaaggctgattgcagtggcacatgtgcttatctaaaaggaagttctgaagataatccggaaatgcctattgtggagagctcagaggagcagagcaccggtggtgctctatgggatatcttccgcagacaggattctgataaattgcaagattatcttaggaagcattgctctgaattccggcatatttactgcaatccagtcaaaaaggtattccacccaattcatgatcagtccttttacttaactgaggagcataagagaaagctcaaggaagaatatggtattgaaccctggacgtttgaacagaagcttggtgaagctgttttcattcctgctggatgtcctcaccaagtgagaaatttgaagtcctgcatcaaagttgcgcttgattttgtttccccagaaaatgttggtgagtgtgttaagctgacggaggagtttagacgacttccatctttccacaaggctaaagaagacaaactagagatcaagaagatggctgttcatgccctgaacgaagctgtaaacttcctggatcctcgttcctcagaagagttgaaaattggggttggtgagaacatctgtgaggatgaatctgtagatgagaaggagctgccgcctagaagaggagttgaagtgtcaggcgttgatgagaagcctaaatagaaggcgagggaggcatcaagtccaaaagtgaagctgctgatgaggtcgcccattttaggttctcggaatcgtggttaattgatttgtcaaagcccctgttcatgtatggtgatcgctggctgacaccgatggatgaagagaagcaggacacgtgtgtgctgctgatatgtcgtgtcggcgagtgacatgaatatcatccctatccctatggtattattggtcgtttatgtttatgtttgatcatttgtcttattcagttttttttacaaataataaaacaagaggttaaaagtaaatgacgtcatttatttaattttaagacggggcagatgcaaaactgaa

SEQ ID NO: 44497 - DNA, 4310 bp, Zea Mays
gcggcatcagcatttcctctcccacatttcgccccgccctacgcctacacgacggcgctgcggcaagcgccgaccaatccatggcagacgaggcggagtggaacgaggctgaggccgggatcgcggccccgggcgcgggcgtggctcctccagcgcccggaggcggcgaggaaaccaagaggaagagggggaggcccaaaggtagcctcgacacgtataagaggcggaggcggaggcggcgcaccggcgacctggtgtcggcggtgcccgcggctagcctcggggatatgggccactcatgtggctgcattcccgctcccccactccctcccccctgcactgtgtacactgtacgcgacggcggcgtggcaatcacccctcaatccatggaggacgaagcggagggggtcgaggctgagtccgggaatgcgggcgcggcctccgccgccagagacggcgaggaaaccaagcggaagaggggaagtcccgaaggtagcttgaatgagaggaacaaggacaggacgcctaagcccaaggccaaggggaggcggaggcggcgcaccgacgaccagaccttgtcggtgtccgcggtgagcctcggggatctagggctcggggtagcggcggggaccaggtcgatcagagagaggaggccggcgcccaatgcgttcttcgacgtgggcagcgacagcgatactgagcatgatgatgatgatgatgaggagcaaactacgattgatcaggccaatcacgagagtgctaaaacaggtgattctgtaaagaagggaggaagacccaggaaaatggaagcgggccaattgcatactaggacgcagatttccaatggtaaaagcaacggccatacaaatgggaatcctgctgggaagaagaggggaaggggaagacccaagaaactgacagtagaacaagcgattactaggtgccagttctccaatggtgaaacaaacaagagtggtgccgaggcagcaaggagcaaacagtcaaggaatcgtaggatttcacagaatgcaaagaagcggaaaagagatgaagggaaggagtctatgacaaaaaagttgaacaaacggagtaagatgttgactggggaaaatgccctcatgtgccaccagtgccagaggaaggacaaaccacgggttgtccggtgtcagtcatgcaaaaaaaagcgattctgtctgccatgcatagaacaatggtatcctaatttgccagaagatgaatttgctgtgaagtgcccatattgtcgcaagaactgtaattgcaaggcatgcctaaggatgaggggagttgaagagcctccaaaaaaggagatctctaaagaaaatgaaattcgctatgcttttcatattgtaaccatgctgcttccctggatgagagaactgcgacaagaacagttggaggagaaggaagtagaggctaatatacaaggagtttcaatgaatgagataaaagtggaacaagctgagtttgacctagatgatcgtgtatattgcgataggtgtaaaacatctattgttgattttcatagaagctgcaagcgttgtttctacgatctttgccttaattgctgcaaggagcttcgcaaaggtgagatcccaggaggagaagaggtggaatatgtgccacctgaacctaaaggtaggagttattcttttggcaagattcatctactgaaggatgctgatagaagtaagaactcctcaaatggcgagtcttacaacggcatgcctgctgttgggaactccaataatggtctgttgctctggaaagcaaaaagtaatggtagcataccttgtccaccaaaggaagtaggaggctgtggtagtacacttctggacctcaagtgtttgtttccagagaagatgtttgccgagctagaatatagagctgacaaagttctcaggagtgggacattagctaaagcaatggttagtagaagtgatcggtgcccttgcttcaatcaatcaggcaagataagaactgaaagcaaatcagtaagggaggctgcaagcaggaagggctcaagcgataacttcctatactgtccagttgctattggtattcaagatgatgacatagtgcattttcagatgcattgggcaaagggtgagccagttgttgtttctgatgtccttcagttaacctctggtctgagttgggagccaatggtaatgtggcgggcattgcgggaaagatccaaaggcaaagcagaagatgagcaatttgctgtttgggcgatagactgccttgattggtgtgagaaattcttaggacggcattgagtagtgaccagcctaagtaaagccgagcctgcgtttgcatccagaagaaaagaacacatattataatagtattgacaaacttcatcgttctatcagtgaagttctcatttcaactggggatgtttatgagtcgccctaaatttagatgtgccttgtttccttcttatgccgcttcatgcacgcatttaatatccttatatgttgcaggtggaaattaacatacataggttcttttcgggatatacaacaggcagaactcatgctaggactcactggcctcagatgcttaagctaaaagactggcctccttctagttcctttgacaagcgattgccgcggcatggtgccgaatttattagcgcattgccatttcgtgagtatactgatccacgatatggcccgctaaatcttgcagccaagcttcctgctggtgtcttgaagccagatcttggacccaaaagttacattgcttatgggttctacaaagaattgggcaggggcgattctgtgaccaagcttcactgtgacatgtctgatgcagtaaatatcttaacacacacagctgaagtcacttgtcagactgatattggcttaattgaaaaaatccaaaaagacatgagagagcaagatctgcaggaactatatgggggtctaaattcccgctctgagctcaagttgtcaccagctccaactgaatgcagggatgaatctgttgatgaaggattgaagacctcatatagtagagaaggcaattgtgtaaatagagacaattataatggtttggacatcaatgcattaccacctgatgacgatggagatattgcaaaggataaagaatcatctcctggatcagagtggcaaagtgaactaggtcagagttcagatcacaacaatggggtcaacacaactgatgagatgtacaatggagctcattacatttcacacaatcaaaaaagcactggcaggaaagttggcattaaacctcaagaagagaaatctgaaaaggctgattgcagtggcacatgtgcttatctaaaaggaagttctgaagataatccggaaatgcctattgtggagagctcagaggagcagagcaccggtggtgctctatgggatatcttccgcagacaggattctgataaattgcaagattatcttaggaagcattgctctgaattccggcatatttactgcaatccagtcaaaaaggtattccacccaattcatgatcagtccttttacttaactgaggagcataagagaaagctcaaggaagaatatggtattgaaccctggacgtttgaacagaagcttggtgaagctgttttcattcctgctggatgtcctcaccaagtgagaaatttgaagtcctgcatcaaagttgcgcttgattttgtttccccagaaaatgttggtgagtgtgttaagctgacggaggagtttagacgacttccatctttccacaaggctaaagaagacaaactagagatcaagaagatggctgttcatgccctgaacgaagctgtaaacttcctggatcctcgttcctcagaagagttgaaaattggggttggtgagaacatctgtgaggatgaatctgtagatgagaaggagctgccgcctagaagaggagttgaagtgtcaggcgttgatgagaagcctaaatagaaggcgagggaggcatcaagtccaaaagtgaagctgctgatgaggtcgcccattttaggttctcggaatcgtggttaattgatttgtcaaagcccctgttcatgtatggtgatcgctggctgacaccgatggatgaagagaagcaggacacgtgtgtgctgctgatatgtcgtgtcggcgagtgacatgaatatcatccctatccctatggtattattggtcgtttatgtttatgtttgatcatttgtcttattcagttttttttacaaataataaaacaagaggttaaaagtaaatgacgtcatttatttaattttaagacggggcagatgcaaaactgaa

SEQ ID NO: 44498 - DNA, 3983 bp, Zea Mays
gcggcatcagcatttcctctcccacatttcgccccgccctacgcctacacgacggcgctgcggcaagcgccgaccaatccatggcagacgaggcggagtggaacgaggctgaggccgggatcgcggccccgggcgcgggcgtggctcctccagcgcccggaggcggcgaggaaaccaagaggaagagggggaggcccaaaggtagcctcgacacgtataagaggcggaggcggaggcggcgcaccggcgacctggtgtcggcggtgcccgcggctagcctcggggatatgggccactcatgtggctgcattcccgctcccccactccctcccccctgcactgtgtacactgtacgcgacggcggcgtggcaatcacccctcaatccatggaggacgaagcggagggggtcgaggctgagtccgggaatgcgggcgcggcctccgccgccagagacggcgaggaaaccaagcggaagaggggaagtcccgaaggtagcttgaatgagaggaacaaggacaggacgcctaagcccaaggccaaggggaggcggaggcggcgcaccgacgaccagaccttgtcggtgtccgcggtgagcctcggggatctagggctcggggtagcggcggggaccaggtcgatcagagagaggaggccggcgcccaatgcgttcttcgacgtgggcagcgacagcgatactgagcatgatgatgatgatgatgaggagcaaactacgattgatcaggccaatcacgagagtgctaaaacaggtgattctgtaaagaagggaggaagacccaggaaaatggaagcgggccaattgcatactaggacgcagatttccaatggtaaaagcaacggccatacaaatgggaatcctgctgggaagaagaggggaaggggaagacccaagaaactgacagtagaacaagcgattactaggtgccagttctccaatggtgaaacaaacaagagtggtgccgaggcagcaaggagcaaacagtcaaggaatcgtaggatttcacagaatgcaaagaagcggaaaagagatgaagggaaggagtctatgacaaaaaagttgaacaaacggagtaagatgttgactggggaaaatgccctcatgtgccaccagtgccagaggaaggacaaaccacgggttgtccggtgtcagtcatgcaaaaaaaagcgattctgtctgccatgcatagaacaatggtatcctaatttgccagaagatgaatttgctgtgaagtgcccatattgtcgcaagaactgtaattgcaaggcatgcctaaggatgaggggagttgaagagcctccaaaaaaggagatctctaaagaaaatgaaattcgctatgcttttcatattgtaaccatgctgcttccctggatgagagaactgcgacaagaacagttggaggagaaggaagtagaggctaatatacaaggagtttcaatgaatgagataaaagtggaacaagctgagtttgacctagatgatcgtgtatattgcgataggtgtaaaacatctattgttgattttcatagaagctgcaagcgttgtttctacgatctttgccttaattgctgcaaggagcttcgcaaaggtgagatcccaggaggagaagaggtggaatatgtgccacctgaacctaaaggtaggagttattcttttggcaagattcatctactgaaggatgctgatagaagtaagaactcctcaaatggcgagtcttacaacggcatgcctgctgttgggaactccaataatggtctgttgctctggaaagcaaaaagtaatggtagcataccttgtccaccaaaggaagtaggaggctgtggtagtacacttctggacctcaagtgtttgtttccagagaagatgtttgccgagctagaatatagagctgacaaagttctcaggagtgggacattagctaaagcaatggttagtagaagtgatcggtgcccttgcttcaatcaatcaggcaagataagaactgaaagcaaatcagtaagggaggctgcaagcaggaagggctcaagcgataacttcctatactgtccagttgctattggtattcaagatgatgacatagtgcattttcagatgcattgggcaaagggtgagccagttgttgtttctgatgtccttcagttaacctctggtctgagttgggagccaatggtggaaattaacatacataggttcttttcgggatatacaacaggcagaactcatgctaggactcactggcctcagatgcttaagctaaaagactggcctccttctagttcctttgacaagcgattgccgcggcatggtgccgaatttattagcgcattgccatttcgtgagtatactgatccacgatatggcccgctaaatcttgcagccaagcttcctgctggtgtcttgaagccagatcttggacccaaaagttacattgcttatgggttctacaaagaattgggcaggggcgattctgtgaccaagcttcactgtgacatgtctgatgcagtaaatatcttaacacacacagctgaagtcacttgtcagactgatattggcttaattgaaaaaatccaaaaagacatgagagagcaagatctgcaggaactatatgggggtctaaattcccgctctgagctcaagttgtcaccagctccaactgaatgcagggatgaatctgttgatgaaggattgaagacctcatatagtagagaaggcaattgtgtaaatagagacaattataatggtttggacatcaatgcattaccacctgatgacgatggagatattgcaaaggataaagaatcatctcctggatcagagtggcaaagtgaactaggtcagagttcagatcacaacaatggggtcaacacaactgatgagatgtacaatggagctcattacatttcacacaatcaaaaaagcactggcaggaaagttggcattaaacctcaagaagagaaatctgaaaaggctgattgcagtggcacatgtgcttatctaaaaggaagttctgaagataatccggaaatgcctattgtggagagctcagaggagcagagcaccggtggtgctctatgggatatcttccgcagacaggattctgataaattgcaagattatcttaggaagcattgctctgaattccggcatatttactgcaatccagtcaaaaaggtattgaaccctggacgtttgaacagaagcttggtgaagctgttttcattcctgctggatgtcctcaccaagtgagaaatttgaagtcctgcatcaaagttgcgcttgattttgtttccccagaaaatgttggtgagtgtgttaagctgacggaggagtttagacgacttccatctttccacaaggctaaagaagacaaactagaggttagcaatgtgcacttgcagtgatctatctggtctatccgatgtgatggatatgttttttttccagatcaagaagatggctgttcatgccctgaacgaagctgtaaacttcctggatcctcgttcctcagaagagttgaaaattggggttggtgagaacatctgtgaggatgaatctgtagatgagaaggagctgccgcctagaagaggagttgaagtgtcaggcgttgatgagaagcctaaatagaaggcgagggaggcatcaagtccaaaagtgaagctgctgatgaggtcgcccattttaggttctcggaatcgtggttaattgatttgtcaaagcccctgttcatgtatggtgatcgctggctgacaccgatggatgaagagaagcaggacacgtgtgtgctgctgatatgtcgtgtcggcgagtgacatgaatatcatccctatccctatggtattattggtcgtttatgtttatgtttgatcatttgtcttattcagttttttttacaaataataaaacaagaggttaaaagtaaatgacgtcatttatttaattttaagacggggcagatgcaaaactgaa

SEQ ID NO: 44499 - DNA, 3989 bp, Zea Mays
gcggcatcagcatttcctctcccacatttcgccccgccctacgcctacacgacggcgctgcggcaagcgccgaccaatccatggcagacgaggcggagtggaacgaggctgaggccgggatcgcggccccgggcgcgggcgtggctcctccagcgcccggaggcggcgaggaaaccaagaggaagagggggaggcccaaaggtagcctcgacacgtataagaggcggaggcggaggcggcgcaccggcgacctggtgtcggcggtgcccgcggctagcctcggggatatgggccactcatgtggctgcattcccgctcccccactccctcccccctgcactgtgtacactgtacgcgacggcggcgtggcaatcacccctcaatccatggaggacgaagcggagggggtcgaggctgagtccgggaatgcgggcgcggcctccgccgccagagacggcgaggaaaccaagcggaagaggggaagtcccgaaggtagcttgaatgagaggaacaaggacaggacgcctaagcccaaggccaaggggaggcggaggcggcgcaccgacgaccagaccttgtcggtgtccgcggtgagcctcggggatctagggctcggggtagcggcggggaccaggtcgatcagagagaggaggccggcgcccaatgcgttcttcgacgtgggcagcgacagcgatactgagcatgatgatgatgatgatgaggagcaaactacgattgatcaggccaatcacgagagtgctaaaacaggtgattctgtaaagaagggaggaagacccaggaaaatggaagcgggccaattgcatactaggacgcagatttccaatggtaaaagcaacggccatacaaatgggaatcctgctgggaagaagaggggaaggggaagacccaagaaactgacagtagaacaagcgattactaggtgccagttctccaatggtgaaacaaacaagagtggtgccgaggcagcaaggagcaaacagtcaaggaatcgtaggatttcacagaatgcaaagaagcggaaaagagatgaagggaaggagtctatgacaaaaaagttgaacaaacggagtaagatgttgactggggaaaatgccctcatgtgccaccagtgccagaggaaggacaaaccacgggttgtccggtgtcagtcatgcaaaaaaaagcgattctgtctgccatgcatagaacaatggtatcctaatttgccagaagatgaatttgctgtgaagtgcccatattgtcgcaagaactgtaattgcaaggcatgcctaaggatgaggggagttgaagagcctccaaaaaaggagatctctaaagaaaatgaaattcgctatgcttttcatattgtaaccatgctgcttccctggatgagagaactgcgacaagaacagttggaggagaaggaagtagaggctaatatacaaggagtttcaatgaatgagataaaagtggaacaagctgagtttgacctagatgatcgtgtatattgcgataggtgtaaaacatctattgttgattttcatagaagctgcaagcgttgtttctacgatctttgccttaattgctgcaaggagcttcgcaaaggtgagatcccaggaggagaagaggtggaatatgtgccacctgaacctaaaggtaggagttattcttttggcaagattcatctactgaaggatgctgatagaagtaagaactcctcaaatggcgagtcttacaacggcatgcctgctgttgggaactccaataatggtctgttgctctggaaagcaaaaagtaatggtagcataccttgtccaccaaaggaagtaggaggctgtggtagtacacttctggacctcaagtgtttgtttccagagaagatgtttgccgagctagaatatagagctgacaaagttctcaggagtgggacattagctaaagcaatggttagtagaagtgatcggtgcccttgcttcaatcaatcaggcaagataagaactgaaagcaaatcagtaagggaggctgcaagcaggaagggctcaagcgataacttcctatactgtccagttgctattggtattcaagatgatgacatagtgcattttcagatgcattgggcaaagggtgagccagttgttgtttctgatgtccttcagttaacctctggtctgagttgggagccaatggtggaaattaacatacataggttcttttcgggatatacaacaggcagaactcatgctaggactcactggcctcagatgcttaagctaaaagactggcctccttctagttcctttgacaagcgattgccgcggcatggtgccgaatttattagcgcattgccatttcgtgagtatactgatccacgatatggcccgctaaatcttgcagccaagcttcctgctggtgtcttgaagccagatcttggacccaaaagttacattgcttatgggttctacaaagaattgggcaggggcgattctgtgaccaagcttcactgtgacatgtctgatgcagtaaatatcttaacacacacagctgaagtcacttgtcagactgatattggcttaattgaaaaaatccaaaaagacatgagagagcaagatctgcaggaactatatgggggtctaaattcccgctctgagctcaagttgtcaccagctccaactgaatgcagggatgaatctgttgatgaaggattgaagacctcatatagtagagaaggcaattgtgtaaatagagacaattataatggtttggacatcaatgcattaccacctgatgacgatggagatattgcaaaggataaagaatcatctcctggatcagagtggcaaagtgaactaggtcagagttcagatcacaacaatggggtcaacacaactgatgagatgtacaatggagctcattacatttcacacaatcaaaaaagcactggcaggaaagttggcattaaacctcaagaagagaaatctgaaaaggctgattgcagtggcacatgtgcttatctaaaaggaagttctgaagataatccggaaatgcctattgtggagagctcagaggagcagagcaccggtggtgctctatgggatatcttccgcagacaggattctgataaattgcaagattatcttaggaagcattgctctgaattccggcatatttactgcaatccagtcaaaaaggtattccacccaattcatgatcagtccttttacttaactgaggagcataagagaaagctcaaggaagaatatggtattgaaccctggacgtttgaacagaagcttggtgaagctgttttcattcctgctggatgtcctcaccaagtgagaaatttgaagtcctgcatcaaagttgcgcttgattttgtttccccagaaaatgttggtgagtgtgttaagctgacggaggagtttagacgacttccatctttccacaaggctaaagaagacaaactagagatcaagaagatggctgttcatgccctgaacgaagctgtaaacttcctggatcctcgttcctcagaagagttgaaaattggggttggtgagaacatctgtgaggatgaatctgtagatgagaaggagctgccgcctagaagaggagttgaagtgtcaggcgttgatgagaagcctaaatagaaggcgagggaggcatcaagtccaaaagtgaagctgctgatgaggtcgcccattttaggttctcggaatcgtggttaattgatttgtcaaagcccctgttcatgtatggtgatcgctggctgacaccgatggatgaagagaagcaggacacgtgtgtgctgctgatatgtcgtgtcggcgagtgacatgaatatcatccctatccctatggtattattggtcgtttatgtttatgtttgatcatttgtcttattcagttttttttacaaataataaaacaagaggttaaaagtaaatgacgtcatttatttaattttaagacggggcagatgcaaaactgaa

SEQ ID NO: 44500 - DNA, 4265 bp, Zea Mays
gcggcatcagcatttcctctcccacatttcgccccgccctacgcctacacgacggcgctgcggcaagcgccgaccaatccatggcagacgaggcggagtggaacgaggctgaggccgggatcgcggccccgggcgcgggcgtggctcctccagcgcccggaggcggcgaggaaaccaagaggaagagggggaggcccaaaggtagcctcgacacgtataagaggcggaggcggaggcggcgcaccggcgacctggtgtcggcggtgcccgcggctagcctcggggatatgggccactcatgtggctgcattcccgctcccccactccctcccccctgcactgtgtacactgtacgcgacggcggcgtggcaatcacccctcaatccatggaggacgaagcggagggggtcgaggctgagtccgggaatgcgggcgcggcctccgccgccagagacggcgaggaaaccaagcggaagaggggaagtcccgaaggtagcttgaatgagaggaacaaggacaggacgcctaagcccaaggccaaggggaggcggaggcggcgcaccgacgaccagaccttgtcggtgtccgcggtgagcctcggggatctagggctcggggtagcggcggggaccaggtcgatcagagagaggaggccggcgcccaatgcgttcttcgacgtgggcagcgacagcgatactgagcatgatgatgatgatgatgaggagcaaactacgattgatcaggccaatcacgagagtgctaaaacaggtgattctgtaaagaagggaggaagacccaggaaaatggaagcgggccaattgcatactaggacgcagatttccaatggtaaaagcaacggccatacaaatgggaatcctgctgggaagaagaggggaaggggaagacccaagaaactgacagtagaacaagcgattactaggtgccagttctccaatggtgaaacaaacaagagtggtgccgaggcagcaaggagcaaacagtcaaggaatcgtaggatttcacagaatgcaaagaagcggaaaagagatgaagggaaggagtctatgacaaaaaagttgaacaaacggagtaagatgttgactggggaaaatgccctcatgtgccaccagtgccagaggaaggacaaaccacgggttgtccggtgtcagtcatgcaaaaaaaagcgattctgtctgccatgcatagaacaatggtatcctaatttgccagaagatgaatttgctgtgaagtgcccatattgtcgcaagaactgtaattgcaaggcatgcctaaggatgaggggagttgaagagcctccaaaaaaggagatctctaaagaaaatgaaattcgctatgcttttcatattgtaaccatgctgcttccctggatgagagaactgcgacaagaacagttggaggagaaggaagtagaggctaatatacaaggagtttcaatgaatgagataaaagtggaacaagctgagtttgacctagatgatcgtgtatattgcgataggtgtaaaacatctattgttgattttcatagaagctgcaagcgttgtttctacgatctttgccttaattgctgcaaggagcttcgcaaaggtgagatcccaggaggagaagaggtggaatatgtgccacctgaacctaaaggtaggagttattcttttggcaagattcatctactgaaggatgctgatagaagtaagaactcctcaaatggcgagtcttacaacggcatgcctgctgttgggaactccaataatggtctgttgctctggaaagcaaaaagtaatggtagcataccttgtccaccaaaggaagtaggaggctgtggtagtacacttctggacctcaagtgtttgtttccagagaagatgtttgccgagctagaatatagagctgacaaagttctcaggagtgggacattagctaaagcaatggttagtagaagtgatcggtgcccttgcttcaatcaatcaggcaagataagaactgaaagcaaatcagtaagggaggctgcaagcaggaagggctcaagcgataacttcctatactgtccagttgctattggtattcaagatgatgacatagtgcattttcagatgcattgggcaaagggtgagccagttgttgtttctgatgtccttcagttaacctctggtctgagttgggagccaatggtaatgtggcgggcattgcgggaaagatccaaaggcaaagcagaagatgagcaatttgctgtttgggcgatagactgccttgattggtgtgaggtggaaattaacatacataggttcttttcgggatatacaacaggcagaactcatgctaggactcactggcctcagatgcttaagctaaaagactggcctccttctagttcctttgacaagcgattgccgcggcatggtgccgaatttattagcgcattgccatttcgtgagtatactgatccacgatatggcccgctaaatcttgcagccaagcttcctgctggtgtcttgaagccagatcttggacccaaaagttacattgcttatgggttctacaaagaattgggcaggggcgattctgtgaccaagcttcactgtgacatgtctgatgcagtatgttgtttttattaatgattatatgcattcttttgttgtccatgtggtttagcactgaacaaaaatatagcagcaaggctcctgccgaacctgctcattttctaatgctctcctagcagatgtatctcattgctatctacctgctcatttttttgacattttgatagttcttatttttcttatcaactactttggtttacccaaaaaaaaaactgcttgggtcttattagtcaaacctgtgtgatgtaaacaggtaaatatcttaacacacacagctgaagtcacttgtcagactgatattggcttaattgaaaaaatccaaaaagacatgagagagcaagatctgcaggaactatatgggggtctaaattcccgctctgagctcaagttgtcaccagctccaactgaatgcagggatgaatctgttgatgaaggattgaagacctcatatagtagagaaggcaattgtgtaaatagagacaattataatggtttggacatcaatgcattaccacctgatgacgatggagatattgcaaaggataaagaatcatctcctggatcagagtggcaaagtgaactaggtcagagttcagatcacaacaatggggtcaacacaactgatgagatgtacaatggagctcattacatttcacacaatcaaaaaagcactggcaggaaagttggcattaaacctcaagaagagaaatctgaaaaggctgattgcagtggcacatgtgcttatctaaaaggaagttctgaagataatccggaaatgcctattgtggagagctcagaggagcagagcaccggtggtgctctatgggatatcttccgcagacaggattctgataaattgcaagattatcttaggaagcattgctctgaattccggcatatttactgcaatccagtcaaaaaggtattgaaccctggacgtttgaacagaagcttggtgaagctgttttcattcctgctggatgtcctcaccaagtgagaaatttgaagtcctgcatcaaagttgcgcttgattttgtttccccagaaaatgttggtgagtgtgttaagctgacggaggagtttagacgacttccatctttccacaaggctaaagaagacaaactagagatcaagaagatggctgttcatgccctgaacgaagctgtaaacttcctggatcctcgttcctcagaagagttgaaaattggggttggtgagaacatctgtgaggatgaatctgtagatgagaaggagctgccgcctagaagaggagttgaagtgtcaggcgttgatgagaagcctaaatagaaggcgagggaggcatcaagtccaaaagtgaagctgctgatgaggtcgcccattttaggttctcggaatcgtggttaattgatttgtcaaagcccctgttcatgtatggtgatcgctggctgacaccgatggatgaagagaagcaggacacgtgtgtgctgctgatatgtcgtgtcggcgagtgacatgaatatcatccctatccctatggtattattggtcgtttatgtttatgtttgatcatttgtcttattcagttttttttacaaataataaaacaagaggttaaaagtaaatgacgtcatttatttaattttaagacggggcagatgcaaaactgaa

SEQ ID NO: 44501 - DNA, 4058 bp, Zea Mays
gcggcatcagcatttcctctcccacatttcgccccgccctacgcctacacgacggcgctgcggcaagcgccgaccaatccatggcagacgaggcggagtggaacgaggctgaggccgggatcgcggccccgggcgcgggcgtggctcctccagcgcccggaggcggcgaggaaaccaagaggaagagggggaggcccaaaggtagcctcgacacgtataagaggcggaggcggaggcggcgcaccggcgacctggtgtcggcggtgcccgcggctagcctcggggatatgggccactcatgtggctgcattcccgctcccccactccctcccccctgcactgtgtacactgtacgcgacggcggcgtggcaatcacccctcaatccatggaggacgaagcggagggggtcgaggctgagtccgggaatgcgggcgcggcctccgccgccagagacggcgaggaaaccaagcggaagaggggaagtcccgaaggtagcttgaatgagaggaacaaggacaggacgcctaagcccaaggccaaggggaggcggaggcggcgcaccgacgaccagaccttgtcggtgtccgcggtgagcctcggggatctagggctcggggtagcggcggggaccaggtcgatcagagagaggaggccggcgcccaatgcgttcttcgacgtgggcagcgacagcgatactgagcatgatgatgatgatgatgaggagcaaactacgattgatcaggccaatcacgagagtgctaaaacaggtgattctgtaaagaagggaggaagacccaggaaaatggaagcgggccaattgcatactaggacgcagatttccaatggtaaaagcaacggccatacaaatgggaatcctgctgggaagaagaggggaaggggaagacccaagaaactgacagtagaacaagcgattactaggtgccagttctccaatggtgaaacaaacaagagtggtgccgaggcagcaaggagcaaacagtcaaggaatcgtaggatttcacagaatgcaaagaagcggaaaagagatgaagggaaggagtctatgacaaaaaagttgaacaaacggagtaagatgttgactggggaaaatgccctcatgtgccaccagtgccagaggaaggacaaaccacgggttgtccggtgtcagtcatgcaaaaaaaagcgattctgtctgccatgcatagaacaatggtatcctaatttgccagaagatgaatttgctgtgaagtgcccatattgtcgcaagaactgtaattgcaaggcatgcctaaggatgaggggagttgaagagcctccaaaaaaggagatctctaaagaaaatgaaattcgctatgcttttcatattgtaaccatgctgcttccctggatgagagaactgcgacaagaacagttggaggagaaggaagtagaggctaatatacaagtggaacaagctgagtttgacctagatgatcgtgtatattgcgataggtgtaaaacatctattgttgattttcatagaagctgcaagcgttgtttctacgatctttgccttaattgctgcaaggagcttcgcaaaggtgagatcccaggaggagaagaggtggaatatgtgccacctgaacctaaaggtaggagttattcttttggcaagattcatctactgaaggatgctgatagaagtaagaactcctcaaatggcgagtcttacaacggcatgcctgctgttgggaactccaataatggtctgttgctctggaaagcaaaaagtaatggtagcataccttgtccaccaaaggaagtaggaggctgtggtagtacacttctggacctcaagtgtttgtttccagagaagatgtttgccgagctagaatatagagctgacaaagttctcaggagtgggacattagctaaagcaatggttagtagaagtgatcggtgcccttgcttcaatcaatcaggcaagataagaactgaaagcaaatcagtaagggaggctgcaagcaggaagggctcaagcgataacttcctatactgtccagttgctattggtattcaagatgatgacatagtgcattttcagatgcattgggcaaagggtgagccagttgttgtttctgatgtccttcagttaacctctggtctgagttgggagccaatggtaatgtggcgggcattgcgggaaagatccaaaggcaaagcagaagatgagcaatttgctgtttgggcgatagactgccttgattggtgtgaggtggaaattaacatacataggttcttttcgggatatacaacaggcagaactcatgctaggactcactggcctcagatgcttaagctaaaagactggcctccttctagttcctttgacaagcgattgccgcggcatggtgccgaatttattagcgcattgccatttcgtgagtatactgatccacgatatggcccgctaaatcttgcagccaagcttcctgctggtgtcttgaagccagatcttggacccaaaagttacattgcttatgggttctacaaagaattgggcaggggcgattctgtgaccaagcttcactgtgacatgtctgatgcagtaaatatcttaacacacacagctgaagtcacttgtcagactgatattggcttaattgaaaaaatccaaaaagacatgagagagcaagatctgcaggaactatatgggggtctaaattcccgctctgagctcaagttgtcaccagctccaactgaatgcagggatgaatctgttgatgaaggattgaagacctcatatagtagagaaggcaattgtgtaaatagagacaattataatggtttggacatcaatgcattaccacctgatgacgatggagatattgcaaaggataaagaatcatctcctggatcagagtggcaaagtgaactaggtcagagttcagatcacaacaatggggtcaacacaactgatgagatgtacaatggagctcattacatttcacacaatcaaaaaagcactggcaggaaagttggcattaaacctcaagaagagaaatctgaaaaggctgattgcagtggcacatgtgcttatctaaaaggaagttctgaagataatccggaaatgcctattgtggagagctcagaggagcagagcaccggtggtgctctatgggatatcttccgcagacaggattctgataaattgcaagattatcttaggaagcattgctctgaattccggcatatttactgcaatccagtcaaaaaggtattccacccaattcatgatcagtccttttacttaactgaggagcataagagaaagctcaaggaagaatatggtattgaaccctggacgtttgaacagaagcttggtgaagctgttttcattcctgctggatgtcctcaccaagtgagaaatttgaagtcctgcatcaaagttgcgcttgattttgtttccccagaaaatgttggtgagtgtgttaagctgacggaggagtttagacgacttccatctttccacaaggctaaagaagacaaactagagatcaagaagatggctgttcatgccctgaacgaagctgtaaacttcctggatcctcgttcctcagaagagttgaaaattggggttggtgagaacatctgtgaggatgaatctgtagatgagaaggagctgccgcctagaagaggagttgaagtgtcaggcgttgatgagaagcctaaatagaaggcgagggaggcatcaagtccaaaagtgaagctgctgatgaggtcgcccattttaggttctcggaatcgtggttaattgatttgtcaaagcccctgttcatgtatggtgatcgctggctgacaccgatggatgaagagaagcaggacacgtgtgtgctgctgatatgtcgtgtcggcgagtgacatgaatatcatccctatccctatggtattattggtcgtttatgtttatgtttgatcatttgtcttattcagttttttttacaaataataaaacaagaggttaaaagtaaatgacgtcatttatttaattttaagacggggcagatgcaaaactgaa

SEQ ID NO: 44502 - DNA, 4512 bp, Zea Mays
cagaaacctcgtccggcggcatcagcatttcctctcccacatttcgccccgccctacgcctacacgacggcgctgcggcaagcgccgaccaatccatggcagacgaggcggagtggaacgaggctgaggccgggatcgcggccccgggcgcgggcgtggctcctccagcgcccggaggcggcgaggaaaccaagaggaagagggggaggcccaaaggtagcctcgacacgtataagaggcggaggcggaggcggcgcaccggcgacctggtgtcggcggtgcccgcggctagcctcggggatatgggccactcatgtggctgcattcccgctcccccactccctcccccctgcactgtgtacactgtacgcgacggcggcgtggcaatcacccctcaatccatggaggacgaagcggagggggtcgaggctgagtccgggaatgcgggcgcggcctccgccgccagagacggcgaggaaaccaagcggaagaggggaagtcccgaaggtagcttgaatgagaggaacaaggacaggacgcctaagcccaaggccaaggggaggcggaggcggcgcaccgacgaccagaccttgtcggtgtccgcggtgagcctcggggatctagggctcggggtagcggcggggaccaggtcgatcagagagaggaggccggcgcccaatgcgttcttcgacgtgggcagcgacagcgatactgagcatgatgatgatgatgatgaggagcaaactacgattgatcaggccaatcacgagagtgctaaaacaggtgattctgtaaagaagggaggaagacccaggaaaatggaagcgggccaattgcatactaggacgcagatttccaatggtaaaagcaacggccatacaaatgggaatcctgctgggaagaagaggggaaggggaagacccaagaaactgacagtagaacaagcgattactaggtgccagttctccaatggtgaaacaaacaagagtggtgccgaggcagcaaggagcaaacagtcaaggaatcgtaggatttcacagaatgcaaagaagcggaaaagagatgaagggaaggagtctatgacaaaaaagttgaacaaacggagtaagatgttgactggggaaaatgccctcatgtgccaccagtgccagaggaaggacaaaccacgggttgtccggtgtcagtcatgcaaaaaaaagcgattctgtctgccatgcatagaacaatggtatcctaatttgccagaagatgaatttgctgtgaagtgcccatattgtcgcaagaactgtaattgcaaggcatgcctaaggatgaggggagttgaagagcctccaaaaaaggagatctctaaagaaaatgaaattcgctatgcttttcatattgtaaccatgctgcttccctggatgagagaactgcgacaagaacagttggaggagaaggaagtagaggctaatatacaaggagtttcaatgaatgagataaaagtggaacaagctgagtttgacctagatgatcgtgtatattggttgatttctttccctgattacattctgccataaatctaatggttggcatctaatctactcgttccctcaactgcagcgataggtgtaaaacatctattgttgattttcatagaagctgcaagcgttgtttctacgatctttgccttaattgctgcaaggagcttcgcaaaggtgagatcccaggaggagaagaggtggaatatgtgccacctgaacctaaaggtaggagttattcttttggcaagattcatctactgaaggatgctgatagaagtaagaactcctcaaatggcgagtcttacaacggcatgcctgctgttgggaactccaataatggtctgttgctctggaaagcaaaaagtaatggtagcataccttgtccaccaaaggaagtaggaggctgtggtagtacacttctggacctcaagtgtttgtttccagagaagatgtttgccgagctagaatatagagctgacaaagttctcaggagtgggacattagctaaagcaatggttagtagaagtgatcggtgcccttgcttcaatcaatcaggcaagataagaactgaaagcaaatcagtaagggaggctgcaagcaggaagggctcaagcgataacttcctatactgtccagttgctattggtattcaagatgatgacatagtgcattttcagatgcattgggcaaagggtgagccagttgttgtttctgatgtccttcagttaacctctggtctgagttgggagccaatggtaatgtggcgggcattgcgggaaagatccaaaggcaaagcagaagatgagcaatttgctgtttgggcgatagactgccttgattggtgtgaggtgcggagctctatttctaatgtctaaaaattcttaggacggcattgagtagtgaccagcctaagtaaagccgagcctgcgtttgcatccagaagaaaagaacacatattataatagtattgacaaacttcatcgttctatcagtgaagttctcatttcaactggggatgtttatgagtcgccctaaatttagatgtgccttgtttccttcttatgccgcttcatgcacgcatttaatatccttatatgttgcaggtggaaattaacatacataggttcttttcgggatatacaacaggcagaactcatgctaggactcactggcctcagatgcttaagctaaaagactggcctccttctagttcctttgacaagcgattgccgcggcatggtgccgaatttattagcgcattgccatttcgtgagtatactgatccacgatatggcccgctaaatcttgcagccaagcttcctgctggtgtcttgaagccagatcttggacccaaaagttacattgcttatgggttctacaaagaattgggcaggggcgattctgtgaccaagcttcactgtgacatgtctgatgcagtatgttgtttttattaatgattatatgcattcttttgttgtccatgtggtttagcactgaacaaaaatatagcagcaaggctcctgccgaacctgctcattttctaatgctctcctagcagatgtatctcattgctatctacctgctcatttttttgacattttgatagttcttatttttcttatcaactactttggtttacccaaaaaaaaaactgcttgggtcttattagtcaaacctgtgtgatgtaaacaggtaaatatcttaacacacacagctgaagtcacttgtcagactgatattggcttaattgaaaaaatccaaaaagacatgagagagcaagatctgcaggaactatatgggggtctaaattcccgctctgagctcaagttgtcaccagctccaactgaatgcagggatgaatctgttgatgaaggattgaagacctcatatagtagagaaggcaattgtgtaaatagagacaattataatggtttggacatcaatgcattaccacctgatgacgatggagatattgcaaaggataaagaatcatctcctggatcagagtggcaaagtgaactaggtcagagttcagatcacaacaatggggtcaacacaactgatgagatgtacaatggagctcattacatttcacacaatcaaaaaagcactggcaggaaagttggcattaaacctcaagaagagaaatctgaaaaggctgattgcagtggcacatgtgcttatctaaaaggaagttctgaagataatccggaaatgcctattgtggagagctcagaggagcagagcaccggtggtgctctatgggatatcttccgcagacaggattctgataaattgcaagattatcttaggaagcattgctctgaattccggcatatttactgcaatccagtcaaaaaggtattccacccaattcatgatcagtccttttacttaactgaggagcataagagaaagctcaaggaagaatatggtattgaaccctggacgtttgaacagaagcttggtgaagctgttttcattcctgctggatgtcctcaccaagtgagaaatttgaagtcctgcatcaaagttgcgcttgattttgtttccccagaaaatctgtgaggatgaatctgtagatgagaaggagctgccgcctagaagaggagttgaagtgtcaggcgttgatgagaagcctaaatagaaggcgagggaggcatcaagtccaaaagtgaagctgctgatgaggtcgcccattttaggttctcggaatcgtggttaattgatttgtcaaagcccctgttcatgtatggtgatcgctggctgacaccgatggatgaagagaagcaggacacgtgtgtgctgctgatatgtcgtgtcggcgagtgacatgaatatcatccctatccctatggtattattggtcgtttatgtttatgtttgatcatttgtcttattcagttttttttacaaataataaaacaagaggttaaaagtaaatgacgtcatttatttaattttaagacggggcagatgcaaaactgaa

SEQ ID NO: 44503 - DNA, 4495 bp, Zea Mays
ccagaaacctcgtccggcggcatcagcatttcctctcccacatttcgccccgccctacgcctacacgacggcgctgcggcaagcgccgaccaatccatggcagacgaggcggagtggaacgaggctgaggccgggatcgcggccccgggcgcgggcgtggctcctccagcgcccggaggcggcgaggaaaccaagaggaagagggggaggcccaaaggtagcctcgacacgtataagaggcggaggcggaggcggcgcaccggcgacctggtgtcggcggtgcccgcggctagcctcggggatatgggccactcatgtggctgcattcccgctcccccactccctcccccctgcactgtgtacactgtacgcgacggcggcgtggcaatcacccctcaatccatggaggacgaagcggagggggtcgaggctgagtccgggaatgcgggcgcggcctccgccgccagagacggcgaggaaaccaagcggaagaggggaagtcccgaaggtagcttgaatgagaggaacaaggacaggacgcctaagcccaaggccaaggggaggcggaggcggcgcaccgacgaccagaccttgtcggtgtccgcggtgagcctcggggatctagggctcggggtagcggcggggaccaggtcgatcagagagaggaggccggcgcccaatgcgttcttcgacgtgggcagcgacagcgatactgagcatgatgatgatgatgatgaggagcaaactacgattgatcaggccaatcacgagagtgctaaaacaggtgattctgtaaagaagggaggaagacccaggaaaatggaagcgggccaattgcatactaggacgcagatttccaatggtaaaagcaacggccatacaaatgggaatcctgctgggaagaagaggggaaggggaagacccaagaaactgacagtagaacaagcgattactaggtgccagttctccaatggtgaaacaaacaagagtggtgccgaggcagcaaggagcaaacagtcaaggaatcgtaggatttcacagaatgcaaagaagcggaaaagagatgaagggaaggagtctatgacaaaaaagttgaacaaacggagtaagatgttgactggggaaaatgccctcatgtgccaccagtgccagaggaaggacaaaccacgggttgtccggtgtcagtcatgcaaaaaaaagcgattctgtctgccatgcatagaacaatggtatcctaatttgccagaagatgaatttgctgtgaagtgcccatattgtcgcaagaactgtaattgcaaggcatgcctaaggatgaggggagttgaagagcctccaaaaaaggagatctctaaagaaaatgaaattcgctatgcttttcatattgtaaccatgctgcttccctggatgagagaactgcgacaagaacagttggaggagaaggaagtagaggctaatatacaaggagtttcaatgaatgagataaaagtggaacaagctgagtttgacctagatgatcgtgtatattgcgataggtgtaaaacatctattgttgattttcatagaagctgcaagcgttgtttctacgatctttgccttaattgctgcaaggagcttcgcaaaggtgagatcccaggaggagaagaggtggaatatgtgccacctgaacctaaaggtaggagttattcttttggcaagattcatctactgaaggatgctgatagaagtaagaactcctcaaatggcgagtcttacaacggcatgcctgctgttgggaactccaataatggtctgttgctctggaaagcaaaaagtaatggtagcataccttgtccaccaaaggaagtaggaggctgtggtagtacacttctggacctcaagtgtttgtttccagagaagatgtttgccgagctagaatatagagctgacaaagttctcaggagtgggacattagctaaagcaatggttagtagaagtgatcggtgcccttgcttcaatcaatcaggcaagataagaactgaaagcaaatcagtaagggaggctgcaagcaggaagggctcaagcgataacttcctatactgtccagttgctattggtattcaagatgatgacatagtgcattttcagatgcattgggcaaagggtgagccagttgttgtttctgatgtccttcagttaacctctggtctgagttgggagccaatggtaatgtggcgggcattgcgggaaagatccaaaggcaaagcagaagatgagcaatttgctgtttgggcgatagactgccttgattggtgtgaggtggaaattaacatacataggttcttttcgggatatacaacaggcagaactcatgctaggactcactggcctcagatgcttaagctaaaagactggcctccttctagttcctttgacaagcgattgccgcggcatggtgccgaatttattagcgcattgccatttcgtgagtatactgatccacgatatggcccgctaaatcttgcagccaagcttcctgctggtgtcttgaagccagatcttggacccaaaagttacattgcttatgggttctacaaagaattgggcaggggcgattctgtgaccaagcttcactgtgacatgtctgatgcagtatgttgtttttattaatgattatatgcattcttttgttgtccatgtggtttagcactgaacaaaaatatagcagcaaggctcctgccgaacctgctcattttctaatgctctcctagcagatgtatctcattgctatctacctgctcatttttttgacattttgatagttcttatttttcttatcaactactttggtttacccaaaaaaaaaactgcttgggtcttattagtcaaacctgtgtgatgtaaacaggtaaatatcttaacacacacagctgaagtcacttgtcagactgatattggcttaattgaaaaaatccaaaaagacatgagagagcaagatctgcaggaactatatgggggtctaaattcccgctctgagctcaagttgtcaccagctccaactgaatgcagggatgaatctgttgatgaaggattgaagacctcatatagtagagaaggcaattgtgtaaatagagacaattataatggtttggacatcaatgcattaccacctgatgacgatggagatattgcaaaggataaagaatcatctcctggatcagagtggcaaagtgaactaggtcagagttcagatcacaacaatggggtcaacacaactgatgagatgtacaatggagctcattacatttcacacaatcaaaaaagcactggcaggaaagttggcattaaacctcaagaagagaaatctgaaaaggctgattgcagtggcacatgtgcttatctaaaaggaagttctgaagataatccggaaatgcctattgtggagagctcagaggagcagagcaccggtggtgctctatgggatatcttccgcagacaggattctgataaattgcaagattatcttaggaagcattgctctgaattccggcatatttactgcaatccagtcaaaaaggtattccacccaattcatgatcagtccttttacttaactgaggagcataagagaaagctcaaggaagaatatggtattgaaccctggacgtttgaacagaagcttggtgaagctgttttcattcctgctggatgtcctcaccaagtgagaaatttgaagtcctgcatcaaagttgcgcttgattttgtttccccagaaaatgttggtgagtgtgttaagctgacggaggagtttagacgacttccatctttccacaaggctaaagaagacaaactagaggttagcaatgtgcacttgcagtgatctatctggtctatccgatgtgatggatatgttttttttccagatcaagaagatggctgttcatgccctgaacgaagctgtaaacttcctggatcctcgttcctcagaagagtaagcgaaagttggcagtcattggcagctggtgacattattggtgactcgttactgtgtgattgatctggcaggttgaaaattggggttggtgagaacatctgtgaggatgaatctgtagatgagaaggagctgccgcctagaagaggagttgaagtgtcaggcgttgatgagaagcctaaatagaaggcgagggaggcatcaagtccaaaagtgaagctgctgatgaggtcgcccattttaggttctcggaatcgtggttaattgatttgtcaaagcccctgttcatgtatggtgatcgctggctgacaccgatggatgaagagaagcaggacacgtgtgtgctgctgatatgtcgtgtcggcgagtgacatgaatatcatccctatccctatggtattattggtcgtttatgtttatgtttgatcatttgtcttattcagttttttttacaaataataaaacaagaggttaaaagtaaatgacgtcatttatttaattttaagacggggcagatgcaaaactgaa

SEQ ID NO: 44504 - DNA, 4098 bp, Zea Mays
ccagaaacctcgtccggcggcatcagcatttcctctcccacatttcgccccgccctacgcctacacgacggcgctgcggcaagcgccgaccaatccatggcagacgaggcggagtggaacgaggctgaggccgggatcgcggccccgggcgcgggcgtggctcctccagcgcccggaggcggcgaggaaaccaagaggaagagggggaggcccaaaggtagcctcgacacgtataagaggcggaggcggaggcggcgcaccggcgacctggtgtcggcggtgcccgcggctagcctcggggatatgggccactcatgtggctgcattcccgctcccccactccctcccccctgcactgtgtacactgtacgcgacggcggcgtggcaatcacccctcaatccatggaggacgaagcggagggggtcgaggctgagtccgggaatgcgggcgcggcctccgccgccagagacggcgaggaaaccaagcggaagaggggaagtcccgaaggtagcttgaatgagaggaacaaggacaggacgcctaagcccaaggccaaggggaggcggaggcggcgcaccgacgaccagaccttgtcggtgtccgcggtgagcctcggggatctagggctcggggtagcggcggggaccaggtcgatcagagagaggaggccggcgcccaatgcgttcttcgacgtgggcagcgacagcgatactgagcatgatgatgatgatgatgaggagcaaactacgattgatcaggccaatcacgagagtgctaaaacaggtgattctgtaaagaagggaggaagacccaggaaaatggaagcgggccaattgcatactaggacgcagatttccaatggtaaaagcaacggccatacaaatgggaatcctgctgggaagaagaggggaaggggaagacccaagaaactgacagtagaacaagcgattactaggtgccagttctccaatggtgaaacaaacaagagtggtgccgaggcagcaaggagcaaacagtcaaggaatcgtaggatttcacagaatgcaaagaagcggaaaagagatgaagggaaggagtctatgacaaaaaagttgaacaaacggagtaagatgttgactggggaaaatgccctcatgtgccaccagtgccagaggaaggacaaaccacgggttgtccggtgtcagtcatgcaaaaaaaagcgattctgtctgccatgcatagaacaatggtatcctaatttgccagaagatgaatttgctgtgaagtgcccatattgtcgcaagaactgtaattgcaaggcatgcctaaggatgaggggagttgaagagcctccaaaaaaggagatctctaaagaaaatgaaattcgctatgcttttcatattgtaaccatgctgcttccctggatgagagaactgcgacaagaacagttggaggagaaggaagtagaggctaatatacaaggagtttcaatgaatgagataaaagtggaacaagctgagtttgacctagatgatcgtgtatattgcgataggtgtaaaacatctattgttgattttcatagaagctgcaagcgttgtttctacgatctttgccttaattgctgcaaggagcttcgcaaaggtgagatcccaggaggagaagaggtggaatatgtgccacctgaacctaaaggtaggagttattcttttggcaagattcatctactgaaggatgctgatagaagtaagaactcctcaaatggcgagtcttacaacggcatgcctgctgttgggaactccaataatggtctgttgctctggaaagcaaaaagtaatggtagcataccttgtccaccaaaggaagtaggaggctgtggtagtacacttctggacctcaagtgtttgtttccagagaagatgtttgccgagctagaatatagagctgacaaagttctcaggagtgggacattagctaaagcaatggttagtagaagtgatcggtgcccttgcttcaatcaatcaggcaagataagaactgaaagcaaatcagtaagggaggctgcaagcaggaagggctcaagcgataacttcctatactgtccagttgctattggtattcaagatgatgacatagtgcattttcagatgcattgggcaaagggtgagccagttgttgtttctgatgtccttcagttaacctctggtctgagttgggagccaatggtaatgtggcgggcattgcgggaaagatccaaaggcaaagcagaagatgagcaatttgctgtttgggcgatagactgccttgattggtgtgaggtggaaattaacatacataggttcttttcgggatatacaacaggcagaactcatgctaggactcactggcctcagatgcttaagctaaaagactggcctccttctagttcctttgacaagcgattgccgcggcatggtgccgaatttattagcgcattgccatttcgtgagtatactgatccacgatatggcccgctaaatcttgcagccaagcttcctgctggtgtcttgaagccagatcttggacccaaaagttacattgcttatgggttctacaaagaattgggcaggggcgattctgtgaccaagcttcactgtgacatgtctgatgcagtaaatatcttaacacacacagctgaagtcacttgtcagactgatattggcttaattgaaaaaatccaaaaagacatgagagagcaagatctgcaggaactatatgggggtctaaattcccgctctgagctcaagttgtcaccagctccaactgaatgcagggatgaatctgttgatgaaggattgaagacctcatatagtagagaaggcaattgtgtaaatagagacaattataatggtttggacatcaatgcattaccacctgatgacgatggagatattgcaaaggataaagaatcatctcctggatcagagtggcaaagtgaactaggtcagagttcagatcacaacaatggggtcaacacaactgatgagatgtacaatggagctcattacatttcacacaatcaaaaaagcactggcaggaaagttggcattaaacctcaagaagagaaatctgaaaaggctgattgcagtggcacatgtgcttatctaaaaggaagttctgaagataatccggaaatgcctattgtggagagctcagaggagcagagcaccggtggtgctctatgggatatcttccgcagacaggattctgataaattgcaagattatcttaggaagcattgctctgaattccggcatatttactgcaatccagtcaaaaaggtattccacccaattcatgatcagtccttttacttaactgaggagcataagagaaagctcaaggaagaatatggtattgaaccctggacgtttgaacagaagcttggtgaagctgttttcattcctgctggatgtcctcaccaagtgagaaatttgaagtcctgcatcaaagttgcgcttgattttgtttccccagaaaatgttggtgagtgtgttaagctgacggaggagtttagacgacttccatctttccacaaggctaaagaagacaaactagagatcaagaagatggctgttcatgccctgaacgaagctgtaaacttcctggatcctcgttcctcagaagagttgaaaattggggttggtgagaacatctgtgaggatgaatctgtagatgagaaggagctgccgcctagaagaggagttgaagtgtcaggcgttgatgagaagcctaaatagaaggcgagggaggcatcaagtccaaaagtgaagctgctgatgaggtcgcccattttaggttctcggaatcgtggttaattgatttgtcaaagcccctgttcatgtatggtgatcgctggctgacaccgatggatgaagagaagcaggacacgtgtgtgctgctgatatgtcgtgtcggcgagtgacatgaatatcatccctatccctatggtattattggtcgtttatgtttatgtttgatcatttgtcttattcagttttttttacaaataataaaacaagaggttaaaagtaaatgacgtcatttatttaattttaagacggggcagatgcaaaactgaa

SEQ ID NO: 44505 - DNA, 352 bp, Zea Mays
gcacagtttctgtaccaccaacaccacccaaagaatcaagcgatatttgcctggcaccaatagacttccttatacgctttggacagagccttgacagaagtttttcatattctcatttggcttgaatactttcttcggagctgaatactgacccaaagctgaaagccgcaagggatgaatatcttccacacctggctgcaacacaatcccagataatacatctcaaagatcaaggtattcagcgataacaccaacgaagactgatccaattgtactcaagtatcaggtgtagcccctgcccctagatagcctggccttgaaacaggagcacataccccattctcaactgcaa

SEQ ID NO: 44506 - DNA, 2571 bp, Zea Mays
gtcctctagtctgtacaatctgtttgctctgccgctgaaagatgtaatcccaacggttttctgtggatactggagccagaaaaaatgccaaaactcagtaatgaccgcttatcggctggaggtcctagagagacaaaagacaagaagaatattgtggaagtttttcctgcaaagaagatggctaaaatcaagggaaactctctttgtttgtctggtcctgatggctcccaagcaaccattgagcttttgaactgcacggtacttgcagtttctgcatcaagtatgccctcgcgtaaatgggccaagaggttcccagtaaaattagaaagcaaggacaatgagatttataatggaagcaaggtgtgctatctttatacagacacttcctgggagaaggaatcatggtgtaaagcactccgtattgcagctactgctgacaaggaaaaattaaattggcatgccaagctgagcgaaaaattcctcaattacatatcatcattaaattctgaatacccatgttttctaaagcctccaatactctctggtgaggatcatgaggttatggacaagacatcaaagactgatgggtcttcaaaagtacgtcttttcctcaagaagttggcgaagaaggcatctacgaaggctgccttagagagcaaaacaagttcaggaatgtcagtgcaaggtgaaaaaaagatacttgataaattgcgcagctatcagggtgcaccatttattgaagcattaataggtccacaagaggacaagcttggtggcaattcatcgcaagatactgtaaaagccactgccccgcctgctgcattgaatcaaattggacagctttcaacttcacctgatgtgaatgcggatgaccgagttgcggatgaaggcacactttgttggaacctcctgtcatcacggttgtttttcgatgctaaaatgagtgatgagataaacaaggccatcaaagcacgcattcagaggactttgtcaaatatgaggacccccacctacgtgggtgaaattacacttacggactttagccttggagaacttccaccttatgtgcatgcgatgagagtccttccgctggatcttaatgaattatgggcctttgaagttgactttgagtattcgggtgggatactgctgcacattgaaacaaggcttgaggttcaggaaccagagttgcaaaaggacatcatgaaaagtaattttggagcagatgctaatggagatgttgattctgatcttcttgagagtattgaacagtatggtaaccaatttaaaggctcgcacaattcagcttcttcaattggggagaatgatgaagcagatgcttcaagtcagtcaaagagcattggatggacttcagcatatatatcaagatggaaaactatcctgcactcaatagccgaccatgtctcacaggttcctctttctctggcaataaggatttcatctgttcgaggtatcttgcggatacaaatgaagccccctccttctgatcaaatttggtatggatttacgtcaatgcctgatctagaatgggatttggaatcttctgttggggataggaaaatcaccaacagtcatatcgctgcacttattggtaacagattcaaggcttcgcttcgagatagcttagtgcttccgaattgtgaaagcatctccatgccgtggatgttggctgaaaaggatgattgggtacctcgcaaggatgctccttttatttggctaaatcatgagcccactgagatgagaatccatgccacagctacagcatcaactcagtccgaggaaggtggcttgaaggatggtgggagtgaggaatcatcgagagtagtggcatccattgacgaggcaaaacaagagcccaaggcagaggcatcattgcacggccagtcttcatctgctccaggcagtgaatctgcccacagcgatgcaaatgatgagctgaggaaaccgctgttgatcacagagaaactccaggaagaagcttcagaaggtatagccatgtctcccatgtccacatctcggagggcggtgataccagcaggggagcagccgcaggtgtcagcatcacccattggagaggacgcgaagcgaaaaagcgggaggcgagctcggatgatggatttcgggaagaggatgggggacaagctggaggagaagaggcggaccatcgaagagaaagggaggcacatcgtggagaagatgcgagagaatgctaggaccaacagcatggagaggaccagtagctagcgaggatgcaaggatcggcatcttgtttcgttgatttgggaagtggtgtataggctgaacttgtatgttttctttgtagagttgtgcaacatttagggttccacgagagctgatctattatgtgggtgtggcggcggcaaatatgcatggatgggatgagcggtgtacttgtgacctcatgttagtatcagcttgtggaatactatgaaaaatgcaggtgccaatgcctttcaccatgctactagttagtttgtctgctacttgttcccaagtttaagaatgtgatcaactgtgacaccttgttta

SEQ ID NO: 44507 - DNA, 2526 bp, Zea Mays
acaatacgctccccgctcgcccaaaaacctcacacctaggccccccacgtcgccggctcccggcgatggcgccgctgcccttcctgctgggtttcctcctcggcgccctggcgctggcggctgtcgaggcggcggcgatccttctgctgctccgccgcctccgccgcagtcaggctgcggcgggggacgcgctaccagccgccgacgagctgcccggggaacgccccttcccctacgagaagcagggttttctgtggatactggagccagaaaaaatgccaaaactcagtaatgaccgcttatcggctggaggtcctagagagacaaaagacaagaagaatattgtggaagtttttcctgcaaagaagatggctaaaatcaagggaaactctctttgtttgtctggtcctgatggctcccaagcaaccattgagcttttgaactgcacggtacttgcagtttctgcatcaagtatgccctcgcgtaaatgggccaagaggttcccagtaaaattagaaagcaaggacaatgagatttataatggaagcaaggtgtgctatctttatacagacacttcctgggagaaggaatcatggtgtaaagcactccgtattgcagctactgctgacaaggaaaaattaaattggcatgccaagctgagcgaaaaattcctcaattacatatcatcattaaattctgaatacccatgttttctaaagcctccaatactctctggtgaggatcatgaggttatggacaagacatcaaagactgatgggtcttcaaaagtacgtcttttcctcaagaagttggcgaagaaggcatctacgaaggctgccttagagagcaaaacaagttcaggaatgtcagtgcaaggtgaaaaaaagatacttgataaattgcgcagctatcagggtgcaccatttattgaagcattaataggtccacaagaggacaagcttggtggcaattcatcgcaagatactgtaaaagccactgccccgcctgctgcattgaatcaaattggacagctttcaacttcacctgatgtgaatgcggatgaccgagttgcggatgaaggcacactttgttggaacctcggactttagccttggagaacttccaccttatgtgcatgcgatgagagtccttccgctggatcttaatgaattatgggcctttgaagttgactttgagtattcgggtgggatactgctgcacattgaaacaaggcttgaggttcaggaaccagagttgcaaaaggacatcatgaaaagtaattttggagcagatgctaatggagatgttgattctgatcttcttgagagtattgaacagtatggtaaccaatttaaaggctcgcacaattcagcttcttcaattggggagaatgatgaagcagatgcttcaagtcagtcaaagagcattggatggacttcagcatatatatcaagatggaaaactatcctgcactcaatagccgaccatgtctcacaggttcctctttctctggcaataaggatttcatctgttcgaggtatcttgcggatacaaatgaagccccctccttctgatcaaatttggtatggatttacgtcaatgcctgatctagaatgggatttggaatcttctgttggggataggaaaatcaccaacagtcatatcgctgcacttattggtaacagattcaaggcttcgcttcgagatagcttagtgcttccgaattgtgaaagcatctccatgccgtggatgttggctgaaaaggatgattgggtacctcgcaaggatgctccttttatttggctaaatcatgagcccactgagatgagaatccatgccacagctacagcatcaactcagtccgaggaaggtggcttgaaggatggtgggagtgaggaatcatcgagagtagtggcatccattgacgaggcaaaacaagagcccaaggcagaggcatcattgcacggccagtcttcatctgctccaggcagtgaatctgcccacagcgatgcaaatgatgagctgaggaaaccgctgttgatcacagagaaactccaggaagaagcttcagaaggtatagccatgtctcccatgtccacatctcggagggcggtgataccagcaggggagcagccgcaggtgtcagcatcacccattggagaggacgcgaagcgaaaaagcgggaggcgagctcggatgatggatttcgggaagaggatgggggacaagctggaggagaagaggcggaccatcgaagagaaagggaggcacatcgtggagaagatgcgagagaatgctaggaccaacagcatggagaggaccagtagctagcgaggatgcaaggatcggcatcttgtttcgttgatttgggaagtggtgtataggctgaacttgtatgttttctttgtagacttgtggaatactatgaaaaatgcaggtgccaatgcctttcaccatgctactagttagtttgtctgctacttgttcccaagtttaagaatgtgatcaactgtgacaccttgttta

SEQ ID NO: 44508 - DNA, 4929 bp, Zea Mays
ggcccggccaccccagcaggcttgggccgtggtctgctactctgctcgccctctcgcctcacttccactctcacccaccaccgcctttctccttcccccgcgccgatcacgccacggcggccacgccatagggctagggtcggagatccgctcgcccggtgatcgattcgcacctcctcctctacccggatttggaggttagagtaatgaaataaaatgctgctcaaaagcaagtttaagttggccacaaccattggcatcgtgctgtcgatgctatcgctgctcgtgcacctttttattgctaattattcagctgggggcattacaaattacagcatgcacatggacgatatccttccatttggactgaggcctcgaccacggaggctgtggggtccattggtcccactcgatcacttgcatccttttgcgaaacctagcaaaccatatgctgctcccagtaagcataatggttttatttatgcaaagatatatggtggctttgagaagatacagtctacaatctgtgaccttgttgccgttgccaggctattaaatgccactctggttattcctgagatacaagcaacaactcgtgcaaaaggcataagtccgaagttcaaaagcttttcatatatatacgatgaagatcatttcatacatgcactttccagtgatgtggttattgtgcatggcttgccaaaggatctcagagaggctaggaaaaagataaaatttcccacactatctcctaggaattctgctactccagaatactacatcgaagaagtattacccagacttgtaaaatcgaaagttcttgggataattgttaatggaggtaattgtcttcagtcaattctccctgcaagcttggaggaatttcagaagcttagatgcagggtagccttccatgctctaaggttgcgccctcaaattcaggctcttgggagccaaatagtaggaagattgcgagcatctggccgtccttatgtggcctatcacccaggactgcttagagatactctagctttttatggttgcgctgaactgttccaggatattcatacagagcttattcagtatagaaggaatcagatgattaaacgaggaacagtaaaggagcagctagcagttgattcagtgtccaggaagatggctggtttgtgtccactcatgccagaagaggttggacttctacttcaagcagtaggttacccaccaactacaataatattcttggccggttctgagacttttggtggacaaagaatgcttattcctctacgagctatgttcgctaacctagtagaccgcacttcattatgtagtcagagggagctgtttgatttagttgggccagaagatcctcgaaccccagatttgccacagcctccacctcccaaaagtgaaaaacaacttattgaagaatggaggagagcagggcctcgtccaaggccgctgcctccacctcctgcaaggccattctatgcacatgagaaggaaggctggtatggttggattggtgagaatgacacagaaccggatgcttcactgatcgagttcaggaggcaagcacaccagttgctctgggatgcacttgattattttgtttctgttgaagctgatgccttcttccccgggtttcacaatgacggtagtggttggccagactactcaagtttggtcatggggcaccggttgtaccaaacaccttccggtataacctacaggccggacagaaagattattgctgcactgtttgaagatgttaatgatcatcggtatcatccacctcggaattggacaattgctgcacgtgagcacctcaacaggagtgcaaatgtggagggcgtagtgtcatcagctatgttatcaagacctgtatcttttctcgcccaccctttgccagagtgctcttgcagcacatcgaagtcacctgctgttgaaccggtgaaagatagcaatggcagattcctatttggaggtgaggaagagtgtgctggttggatggcacgcagccctgcgatggcgtctgccaggaataatgaacctcaaattgaggactatgaggataatttgcctgaagaaggctctagttcagacatgcaggaatctgacagaagtgactcgaataaatcttcggagcaagatgaggagatggatctggatgattagagatatgtggagcatggatgtatggcacacctttcaaccgctaccagctccaggtccaggctactcgaagacaagcatacatacgctcagaatctcctggacaggtgggaatcatcttgcatcgcgcagcgacacatcagcatctggattagtcccaggatcacaattcacaaggtcatccagcgtgggagcttgcctggaccgtactcgatgtgcacctgtatacaggacaacattgcaattgtttgtgagttttattgatcgccgaagagtgtgcttacacggatggagttggttcttctgcatgacctgtgctatggatcagaaaatcgtggagtgaacagaatgcatcgctgttcagtatatcgaacgcaggattccaaagtttggacatttcaatgcttgtaataaccagtggcagatcttaaaaaggaggccatgtctcctccccagttttaaaacacacatctttgtcaagctccgccactgcctataactgttaaatacatctcaataatcaacattggccatgagacttgacaaattgagattcttctgtctgccaggtcatcatgctattcatttcaatctcttctcatcccaagagcatcaagtgtatgttgctgctttgtgtgaggaccgaattgaaaatggtgtgccacttatacaaatctggatgggtatgcttgctgtcttagatgtcaaaagtgagcttctcgttgttcatggcagctgctacaacacaatggcactataggaaaactgaatataggaacacgctactcgtcgaacacaaagttaggatcctcaacaacaaatacaaaggggtgagtgtagtagtgacacatagaagagacatgccgggcgcggcacaacaaaggtggtcaaaagtgattgtatgagcacataagctccgtgaccacgggatacgttacaggtggagacagtcgtcccgcagtcaacagtcaccacctgaactgaacctgatgcggaggcggtggtgcggcggcccccggttttggcattgggcaggcacggacggagacaaatccgcggcacggacggagagacggctgcaccgccccacacccacccttttccgcgcccgcgaagaaaacgaaggcagtggaacccgaagcggaggggccagaaagcgacccgaccgtctctccgctccctccctcccccacaccacccacctgtgatctcccgcgcgggagatccgcccgccccatggcgccgtcgcgcccgctcatgcgggggatccgcccgccgcgcgtcttcccgacccgcggcggccgcgcctcgccgtacgctgtcgccctcacggccctgctcctcgtctccgccgccctcctcgcgctcatcgccttcggcgtcttctcgctccccgtgtcagcgccgaacgccgccgccaccaccacagccggaggggagaccgaatccgccgacacccgccccgcgcgcccccgcgcccgccgggacctgggggaggggctgggagagcgcggcgcgcagtggaccgaggtcatctcgtgggagccaagggcattcgtctaccacaacttcctgtctaaggaagagtgtgaatacctaattggattggccaagcctcacatggtaaaatcaacagttgtcgacagcactactggtaaaagcaaggacagcagggtccggacaagttcgggcatgtttcttcaaagaggaagggacaaggttattcgagtaattgaaaagaggattgcagactataccttcatacctgtagatcatggagagggactccaagtactgcattatgaagtcgggcagaagtatgagcctcactttgattattttcttgatgagtttaacaccaagaatggtggtcagaggatggctactcttctgatgtatctatcagatgttgaagaagggggcgagactattttccctgatgcaaatgtgaacgtcagttctttaccatggtacaatgagctttcagagtgtgccaagagaggcctttctgtcaaaccaaagatgggagatgcacttcttttctggagcatgaaaccagatgccaccctggacccattaagtttgcatgggggttgtcctgtgattagaggaaataaatggtcgtcaaccaagtggatgcatatccacgagtacaaagcttgagccttcaagactcgagagtcgagcgtaccaaagatggatctctatgcatgtgacttggggctgtctactgggttgacacccatgtatgctttacagacccactgaagctgtattctttgctcctttgttggaggggggagaattgcagataataggggccaataagcaggggccttgctcatccctgcagtatttttgggtctgatccttgctgacttggcttttgtcttttcttttctttttcttaccttgccgtaccccagctatagaggaatggtgtagtgtctgggggcatagagtttgagattttgttttgtgccacacctgtgttactagtataagctttggtactaatgaataacgaggcctaagctcacatctactacatgaatggtgtaatattgttgaagatagaaagcatctaatgttcggtggttttcgttatggtttcggttattacgacacaagattattgtgacaaaaagtgtgttttgagagataatagagctcacatctagtacatgaatgttgtattactgtttaatgatgacacgagattatttgataattatgactgaaagtcgcctagag

SEQ ID NO: 44509 - DNA, 4406 bp, Zea Mays
ggcccggccaccccagcaggcttgggccgtggtctgctactctgctcgccctctcgcctcacttccactctcacccaccaccgcctttctccttcccccgcgccgatcacgccacggcggccacgccatagggctagggtcggagatccgctcgcccggtgatcgattcgcacctcctcctctacccgaggcctcgaccacggaggctgtggggtccattggtcccactcgatcacttgcatccttttgcgaaacctagcaaaccatatgctgctcccagtaagcataatggttttatttatgcaaagatatatggtggctttgagaagatacagtctacaatctgtgaccttgttgccgttgccaggctattaaatgccactctggttattcctgagatacaagcaacaactcgtgcaaaaggcataagtccgaagttcaaaagcttttcatatatatacgatgaagatcatttcatacatgcactttccagtgatgtggttattgtgcatggcttgccaaaggatctcagagaggctaggaaaaagataaaatttcccacactatctcctaggaattctgctactccagaatactacatcgaagaagtattacccagacttgtaaaatcgaaagttcttgggataattgttaatggaggtaattgtcttcagtcaattctccctgcaagcttggaggaatttcagaagcttagatgcagggtagccttccatgctctaaggttgcgccctcaaattcaggctcttgggagccaaatagtaggaagattgcgagcatctggccgtccttatgtggcctatcacccaggactgcttagagatactctagctttttatggttgcgctgaactgttccaggatattcatacagagcttattcagtatagaaggaatcagatgattaaacgaggaacagtaaaggagcagctagcagttgattcagtgtccaggaagatggctggtttgtgtccactcatgccagaagaggttggacttctacttcaagcagtaggttacccaccaactacaataatattcttggccggttctgagacttttggtggacaaagaatgcttattcctctacgagctatgttcgctaacctagtagaccgcacttcattatgtagtcagagggagctgtttgatttagttgggccagaagatcctcgaaccccagatttgccacagcctccacctcccaaaagtgaaaaacaacttattgaagaatggaggagagcagggcctcgtccaaggccgctgcctccacctcctgcaaggccattctatgcacatgagaaggaaggctggtatggttggattggtgagaatgacacagaaccggatgcttcactgatcgagttcaggaggcaagcacaccagttgctctgggatgcacttgattattttgtttctgttgaagctgatgccttcttccccgggtttcacaatgacggtagtggttggccagactactcaagtttggtcatggggcaccggttgtaccaaacaccttccggtataacctacaggccggacagaaagattattgctgcactgtttgaagatgttaatgatcatcggtatcatccacctcggaattggacaattgctgcacgtgagcacctcaacaggagtgcaaatgtggagggcgtagtgtcatcagctatgttatcaagacctgtatcttttctcgcccaccctttgccagagtgctcttgcagcacatcgaagtcacctgctgttgaaccggtgaaagatagcaatggcagattcctatttggaggtgaggaagagtgtgctggttggatggcacgcagccctgcgatggcgtctgccaggaataatgaacctcaaattgaggactatgaggataatttgcctgaagaaggctctagttcagacatgcaggaatctgacagaagtgactcgaataaatcttcggagcaagatgaggagatggatctggatgattagagatatgtggagcatggatgtatggcacacctttcaaccgctaccagctccaggtccaggctactcgaagacaagcatacatacgctcagaatctcctggacaggtgggaatcatcttgcatcgcgcagcgacacatcagcatctggattagtcccaggatcacaattcacaaggtcatccagcgtgggagcttgcctggaccgtactcggtatacaacaaggctttaatacgaaactaacactttgttcccttcttcattcacgtgtcattttttgtgggtacagccctaagaaactgtttatgtacaaatgtcttaactgggaatacatcattttttttgggtgagtttgatatctaatggcgactatgagctaatgagattggcttatggtggacagatgtgcacctgtatacaggacaacattgcaattgtttgtgagttttattgatcgccgaagagtgtgcttacacggatggagttggttcttctgcatgacctgtgctatggatcagaaaatcgtgtatatctactttggctacacgaaaagtttgtgtttcacatgagaagtttttgagtgaaaaaccttctctgaattcggctggctgctgtagtcggatcaaactgttgcatcttacttgttcttgttcatacagggagtgaacagaatgcatcgctgttcagtatatcgaacgcaggattccaaagtttggacatttcaatgcttgtaataaccagtggcagatcttaaaaaggaggccatgtctcctccccagttttaaaacacacatctttgtcaagctccgccactgcctataactgttaaatacatctcaataatcaacattggccatgagacttgacaaattgagattcttctgtctgccaggtcatcatgctattcatttcaatctcttctcatcccaagagcatcaagtgtatgttgctgctttgtgtgaggaccgaattgaaaatggtgtgccacttatacaaatctggatgggtatgcttgctgtcttagatgtcaaaagtgagcttctcgttgttcatggcagctgctacaacacaatggcactataggaaaactgaatataggaacacgctactcgtcgaacacaaagttaggatcctcaacaacaaatacaaagggaggggctgggagagcgcggcgcgcagtggaccgaggtcatctcgtgggagccaagggcattcgtctaccacaacttcctgtctaaggaagagtgtgaatacctaattggattggccaagcctcacatggtaaaatcaacagttgtcgacagcactactggtaaaagcaaggacagcagggtccggacaagttcgggcatgtttcttcaaagaggaagggacaaggttattcgagtaattgaaaagaggattgcagactataccttcatacctgtagatcatggagagggactccaagtactgcattatgaagtcgggcagaagtatgagcctcactttgattattttcttgatgagtttaacaccaagaatggtggtcagaggatggctactcttctgatgtatctatcagatgttgaagaagggggcgagactattttccctgatgcaaatgtgaacgtcagttctttaccatggtacaatgagctttcagagtgtgccaagagaggcctttctgtcaaaccaaagatgggagatgcacttcttttctggagcatgaaaccagatgccaccctggacccattaagtttgcatgggggttgtcctgtgattagaggaaataaatggtcgtcaaccaagtggatgcatatccacgagtacaaagcttgagccttcaagactcgagagtcgagcgtaccaaagatggatctctatgcatgtgacttggggctgtctactgggttgacacccatgtatgctttacagacccactgaagctgtattctttgctcctttgttggaggggggagaattgcagataataggggccaataagcaggggccttgctcatccctgcagtatttttgggtctgatccttgctgacttggcttttgtcttttcttttctttttcttaccttgccgtaccccagctatagaggaatggtgtagtgtctgggggcatagagtttgagattttgttttgtgccacacctgtgttactagtataagctttggtactaatgaataacgaggcctaagctcacatctactacatgaatggtgtaatattgttgaagatagaaagcatctaatgttcggtggttttcgttatggtttcggttattacgacacaagattattgtgacaaaaagtgtgttttgagagataatagagctcacatctagtacatgaatgttgtattactgtttaatgatgacacgagattatttgataattatgactgaaagtcgcctagag

SEQ ID NO: 44510 - DNA, 4561 bp, Zea Mays
ggcccggccaccccagcaggcttgggccgtggtctgctactctgctcgccctctcgcctcacttccactctcacccaccaccgcctttctccttcccccgcgccgatcacgccacggcggccacgccatagggctagggtcggagatccgctcgcccggtgatcgattcgcacctcctcctctacccggatttggaggttagagtaatgaaataaaatgctgctcaaaagcaagtttaagttggccacaaccattggcatcgtgctgtcgatgctatcgctgctcgtgcacctttttattgctaattattcagctgggggcattacaaattacagcatgcacatggacgatatccttccatttggactgaggcctcgaccacggaggctgtggggtccattggtcccactcgatcacttgcatccttttgcgaaacctagcaaaccatatgctgctcccagtaagcataatggttttatttatgcaaagatatatggtggctttgagaagatacagtctacagctattaaatgccactctggttattcctgagatacaagcaacaactcgtgcaaaaggcataagtccgaagttcaaaagcttttcatatatatacgatgaagatcatttcatacatgcactttccagtgatgtggttattgtgcatggcttgccaaaggatctcagagaggctaggaaaaagataaaatttcccacactatctcctaggaattctgctactccagaatactacatcgaagaagtattacccagacttgtaaaatcgaaagttcttgggataattgttaatggaggtaattgtcttcagtcaattctccctgcaagcttggaggaatttcagaagcttagatgcagggtagccttccatgctctaaggttgcgccctcaaattcaggctcttgggagccaaatagtaggaagattgcgagcatctggccgtccttatgtggcctatcacccaggactgcttagagatactctagctttttatggttgcgctgaactgttccaggatattcatacagagcttattcagtatagaaggaatcagatgattaaacgaggaacagtaaaggagcagctagcagttgattcagtgtccaggaagatggctggtttgtgtccactcatgccagaagaggttggacttctacttcaagcagtaggttacccaccaactacaataatattcttggccggttctgagacttttggtggacaaagaatgcttattcctctacgagctatgttcgctaacctagtagaccgcacttcattatgtagtcagagggagctgtttgatttagttgggccagaagatcctcgaaccccagatttgccacagcctccacctcccaaaagtgaaaaacaacttattgaagaatggaggagagcagggcctcgtccaaggccgctgcctccacctcctgcaaggccattctatgcacatgagaaggaaggctggtatggttggattggtgagaatgacacagaaccggatgcttcactgatcgagttcaggaggcaagcacaccagttgctctgggatgcacttgattattttgtttctgttgaagctgatgccttcttccccgggtttcacaatgacggtagtggttggccagactactcaagtttggtcatggggcaccggttgtaccaaacaccttccggtataacctacaggccggacagaaagattattgctgcactgtttgaagatgttaatgatcatcggtatcatccacctcggaattggacaattgctgcacgtgagcacctcaacaggagtgcaaatgtggagggcgtagtgtcatcagctatgttatcaagacctgtatcttttctcgcccaccctttgccagagtgctcttgcagcacatcgaagtcacctgctgttgaaccggtgaaagatagcaatggcagattcctatttggaggtgaggaagagtgtgctggttggatggcacgcagccctgcgatggcgtctgccaggaataatgaacctcaaattgaggactatgaggataatttgcctgaagaaggctctagttcagacatgcaggaatctgacagaagtgactcgaataaatcttcggagcaagatgaggagatggatctggatgattagagatatgtggagcatggatgtatggcacacctttcaaccgctaccagctccaggtccaggctactcgaagacaagcatacatacgctcagaatctcctggacaggtgggaatcatcttgcatcgcgcagcgacacatcagcatctggattagtcccaggatcacaattcacaaggtcatccagcgtgggagcttgcctggaccgtactcggtatacaacaaggctttaatacgaaactaacactttgttcccttcttcattcacgtgtcattttttgtgggtacagccctaagaaactgtttatgtacaaatgtcttaactgggaatacatcattttttttgggtgagtttgatatctaatggcgactatgagctaatgagattggcttatggtggacagatgtgcacctgtatacaggacaacattgcaattgtttgtgagttttattgatcgccgaagagtgtgcttacacggatggagttggttcttctgcatgacctgtgctatggatcagaaaatcgtgtatatctactttggctacacgaaaagtttgtgtttcacatgagaagtttttgagtgaaaaaccttctctgaattcggctggctgctgtagtcggatcaaactgttgcatcttacttgttcttgttcatacagggagtgaacagaatgcatcgctgttcagtatatcgaacgcaggattccaaagtttggacatttcaatgcttgtaataaccagtggcagatcttaaaaaggaggccatgtctcctccccagttttaaaacacacatctttgtcaagctccgccactgcctataactgttaaatacatctcaataatcaacattggccatgagacttgacaaattgagattcttctgtctgccaggtcatcatgctattcatttcaatctcttctcatcccaagagcatcaagtgtatgttgctgctttgtgtgaggaccgaattgaaaatggtgtgccacttatacaaatctggatgggtatgcttgctgtcttagatgtcaaaagtgagcttctcgttgttcatggcagctgctacaacacaatggcactataggaaaactgaatataggaacacgctactcgtcgaacacaaagttaggatcctcaacaacaaatacaaagggaggggctgggagagcgcggcgcgcagtggaccgaggtcatctcgtgggagccaagggcattcgtctaccacaacttcctgtctaaggaagagtgtgaatacctaattggattggccaagcctcacatggtaaaatcaacagttgtcgacagcactactggtaaaagcaaggacagcagggtccggacaagttcgggcatgtttcttcaaagaggaagggacaaggttattcgagtaattgaaaagaggattgcagactataccttcatacctgtagatcatggagagggactccaagtactgcattatgaagtcgggcagaagtatgagcctcactttgattattttcttgatgagtttaacaccaagaatggtggtcagaggatggctactcttctgatgtatctatcagatgttgaagaagggggcgagactattttccctgatgcaaatgtgaacgtcagttctttaccatggtacaatgagctttcagagtgtgccaagagaggcctttctgtcaaaccaaagatgggagatgcacttcttttctggagcatgaaaccagatgccaccctggacccattaagtttgcatgggggttgtcctgtgattagaggaaataaatggtcgtcaaccaagtggatgcatatccacgagtacaaagcttgagccttcaagactcgagagtcgagcgtaccaaagatggatctctatgcatgtgacttggggctgtctactgggttgacacccatgtatgctttacagacccactgaagctgtattctttgctcctttgttggaggggggagaattgcagataataggggccaataagcaggggccttgctcatccctgcagtatttttgggtctgatccttgctgacttggcttttgtcttttcttttctttttcttaccttgccgtaccccagctatagaggaatggtgtagtgtctgggggcatagagtttgagattttgttttgtgccacacctgtgttactagtataagctttggtactaatgaataacgaggcctaagctcacatctactacatgaatggtgtaatattgttgaagatagaaagcatctaatgttcggtggttttcgttatggtttcggttattacgacacaagattattgtgacaaaaagtgtgttttgagagataatagagctcacatctagtacatgaatgttgtattactgtttaatgatgacacgagattatttgataattatgactgaaagtcgcctagag

SEQ ID NO: 44511 - DNA, 4289 bp, Zea Mays
ggcccggccaccccagcaggcttgggccgtggtctgctactctgctcgccctctcgcctcacttccactctcacccaccaccgcctttctccttcccccgcgccgatcacgccacggcggccacgccatagggctagggtcggagatccgctcgcccggtgatcgattcgcacctcctcctctacccggatttggaggttagagtaatgaaataaaatgctgctcaaaagcaagtttaagttggccacaaccattggcatcgtgctgtcgatgctatcgctgctcgtgcacctttttattgctaattattcagctgggggcattacaaattacagcatgcacatggacgatatccttccatttggactgaggcctcgaccacggaggctgtggggtccattggtcccactcgatcacttgcatccttttgcgaaacctagcaaaccatatgctgctcccagtaagcataatggttttatttatgcaaagatatatggtggctttgagaagatacagtctacagctattaaatgccactctggttattcctgagatacaagcaacaactcgtgcaaaaggcataagtccgaagttcaaaagcttttcatatatatacgatgaagatcatttcatacatgcactttccagtgatgtggttattgtgcatggcttgccaaaggatctcagagaggctaggaaaaagataaaatttcccacactatctcctaggaattctgctactccagaatactacatcgaagaagtattacccagacttgtaaaatcgaaagttcttgggataattgttaatggaggtaattgtcttcagtcaattctccctgcaagcttggaggaatttcagaagcttagatgcagggtagccttccatgctctaaggttgcgccctcaaattcaggctcttgggagccaaatagtaggaagattgcgagcatctggccgtccttatgtggcctatcacccaggactgcttagagatactctagctttttatggttgcgctgaactgttccaggatattcatacagagcttattcagtatagaaggaatcagatgattaaacgaggaacagtaaaggagcagctagcagttgattcagtgtccaggaagatggctggtttgtgtccactcatgccagaagaggttggacttctacttcaagcagtaggttacccaccaactacaataatattcttggccggttctgagacttttggtggacaaagaatgcttattcctctacgagctatgttcgctaacctagtagaccgcacttcattatgtagtcagagggagctgtttgatttagttgggccagaagatcctcgaaccccagatttgccacagcctccacctcccaaaagtgaaaaacaacttattgaagaatggaggagagcagggcctcgtccaaggccgctgcctccacctcctgcaaggccattctatgcacatgagaaggaaggctggtatggttggattggtgagaatgacacagaaccggatgcttcactgatcgagttcaggaggcaagcacaccagttgctctgggatgcacttgattattttgtttctgttgaagctgatgccttcttccccgggtttcacaatgacggtagtggttggccagactactcaagtttggtcatggggcaccggttgtaccaaacaccttccggtataacctacaggccggacagaaagattattgctgcactgtttgaagatgttaatgatcatcggtatcatccacctcggaattggacaattgctgcacgtgagcacctcaacaggagtgcaaatgtggagggcgtagtgtcatcagctatgttatcaagacctgtatcttttctcgcccaccctttgccagagtgctcttgcagcacatcgaagtcacctgctgttgaaccggtgaaagatagcaatggcagattcctatttggaggtgaggaagagtgtgctggttggatggcacgcagccctgcgatggcgtctgccaggaataatgaacctcaaattgaggactatgaggataatttgcctgaagaaggctctagttcagacatgcaggaatctgacagaagtgactcgaataaatcttcggagcaagatgaggagatggatctggatgattagagatatgtggagcatggatgtatggcacacctttcaaccgctaccagctccaggtccaggctactcgaagacaagcatacatacgctcagaatctcctggacaggtgggaatcatcttgcatcgcgcagcgacacatcagcatctggattagtcccaggatcacaattcacaaggtcatccagcgtgggagcttgcctggaccgtactcgatgtgcacctgtatacaggacaacattgcaattgtttgtgagttttattgatcgccgaagagtgtgcttacacggatggagttggttcttctgcatgacctgtgctatggatcagaaaatcgtgtatatctactttggctacacgaaaagtttgtgtttcacatgagaagtttttgagtgaaaaaccttctctgaattcggctggctgctgtagtcggatcaaactgttgcatcttacttgttcttgttcatacagggagtgaacagaatgcatcgctgttcagtatatcgaacgcaggattccaaagtttggacatttcaatgcttgtaataaccagtggcagatcttaaaaaggaggccatgtctcctccccagttttaaaacacacatctttgtcaagctccgccactgcctataactgttaaatacatctcaataatcaacattggccatgagacttgacaaattgagattcttctgtctgccaggtcatcatgctattcatttcaatctcttctcatcccaagagcatcaagtgtatgttgctgctttgtgtgaggaccgaattgaaaatggtgtgccacttatacaaatctggatgggtatgcttgctgtcttagatgtcaaaagtgagcttctcgttgttcatggcagctgctacaacacaatggcactataggaaaactgaatataggaacacgctactcgtcgaacacaaagttaggatcctcaacaacaaatacaaagtctaaggaagagtgtgaatacctaattggattggccaagcctcacatggtaaaatcaacagttgtcgacagcactactggtaaaagcaaggacagcagggtccggacaagttcgggcatgtttcttcaaagaggaagggacaaggttattcgagtaattgaaaagaggattgcagactataccttcatacctgtagatcatggagagggactccaagtactgcattatgaagtcgggcagaagtatgagcctcactttgattattttcttgatgagtttaacaccaagaatggtggtcagaggatggctactcttctgatgtatctatcagatgttgaagaagggggcgagactattttccctgatgcaaatgtgaacgtcagttctttaccatggtacaatgagctttcagagtgtgccaagagaggcctttctgtcaaaccaaagatgggagatgcacttcttttctggagcatgaaaccagatgccaccctggacccattaagtttgcatgggggttgtcctgtgattagaggaaataaatggtcgtcaaccaagtggatgcatatccacgagtacaaagcttgagccttcaagactcgagagtcgagcgtaccaaagatggatctctatgcatgtgacttggggctgtctactgggttgacacccatgtatgctttacagacccactgaagctgtattctttgctcctttgttggaggggggagaattgcagataataggggccaataagcaggggccttgctcatccctgcagtatttttgggtctgatccttgctgacttggcttttgtcttttcttttctttttcttaccttgccgtaccccagctatagaggaatggtgtagtgtctgggggcatagagtttgagattttgttttgtgccacacctgtgttactagtataagctttggtactaatgaataacgaggcctaagctcacatctactacatgaatggtgtaatattgttgaagatagaaagcatctaatgttcggtggttttcgttatggtttcggttattacgacacaagattattgtgacaaaaagtgtgttttgagagataatagagctcacatctagtacatgaatgttgtattactgtttaatgatgacacgagattatttgataattatgactgaaagtcgcctagag

SEQ ID NO: 44512 - DNA, 2159 bp, Zea Mays
ggcccggccaccccagcaggcttgggccgtggtctgctactctgctcgccctctcgcctcacttccactctcacccaccaccgcctttctccttcccccgcgccgatcacgccacggcggccacgccatagggctagggtcggagatccgctcgcccggtgatcgattcgcacctcctcctctacccggatttggaggttagagtaatgaaataaaatgctgctcaaaagcaagtttaagttggccacaaccattggcatcgtgctgtcgatgctatcgctgctcgtgcacctttttattgctaattattcagctgggggcattacaaattacagcatgcacatggacgatatccttccatttggactgaggcctcgaccacggaggctgtggggtccattggtcccactcgatcacttgcatccttttgcgaaacctagcaaaccatatgctgtccgaagttcaaaagcttttcatatatatacgatgaagatcatttcatacatgcactttccagtgatgtggttattgtgcatggcttgccaaaggatctcagagaggctaggaaaaagataaaatttcccacactatctcctaggaattctgctactccagaatactacatcgaagaagtattacccagacttgtaaaatcgaaagttcttgggataattgttaatggagtcaattctccctgcaagcttggaggaatttcagaagcttagatgcagggtagccttccatgctctaaggttgcgccctcaaattcaggctcttgggagccaaatagtaggaagattgcgagcatctggccgtccttatgtggcctatcacccaggactgcttagagatactctagctttttatggttgcgctgaactgttccagagcttattcagtatagaaggaatcagatgattaaacgaggaacagtaaaggagcagctagcagttgattcagtgtccaggaagatggctggtttgtgtccactcatgccagaagaggttggacttctacttcaagcagtaggttacccaccaactacaataatattcttggccggttctgagacttttggtggacaaagaatgcttattcctctacgagctatgttcgctaacctagtagaccgcacttcattatgtagtcagagggagctgtttgatttagttgggccagaagatcctcgaaccccagatttgccacagcctccacctcccaaaagtgaaaaacaacttattgaagaatggaggagagcagggcctcgtccaaggccgctgcctccacctcctgcaaggccattctatgcacatgagaaggaaggctggtatggttggattggtgagaatgacacagaaccggatgcttcactgatcgagttcaggaggcaagcacaccagttgctctgggatgcacttgattattttgtttctgttgaagctgatgccttcttccccgggtttcacaatgacggtagtggttggccagactactcaagtttggtcatggggcaccggttgtaccaaacaccttccggtataacctacaggccggacagaaagattattgctgcactgtttgaagatgttaatgatcatcggtatcatccacctcggaattggacaattgctgcacgtgagcacctcaacaggagtgcaaatgtggagggcgtagtgtcatcagctatgttatcaagacctgtatcttttctcgcccaccctttgccagagtgctcttgcagcacatcgaagtcacctgctgttgaaccggtgaaagatagcaatggcagattcctatttggaggtgaggaagagtgtgctggttggatggcacgcagccctgcgatggcgtctgccaggaataatgaacctcaaattgaggactatgaggataatttgcctgaagaaggctctagttcagacatgcaggaatctgacagaagtgactcgaataaatcttcggagcaagatgaggagatggatctggatgattagagatatgtggagcatggatgtatggcacacctttcaaccgctaccagctccaggtccaggctactcgaagacaagcatacatacgctcagaatctcctggacagatgtgcacctgtatacaggacaacattgcaattgtttgtgagttttattgatcgccgaaga

SEQ ID NO: 44513 - DNA, 8037 bp, Zea Mays
agcatcttgatggatatgttgcaggacaaggttgctgtttggagaggcaccatcaatgtgtttccacagtcaccaagccacaaggatcacaattgaattgaagccctttttctggagttttggcgccctgctctcagcctccctccaccattcctggaatcatccatgaccttgatgtataggaaagaagccggctacagcaacaaataacaatcctaacacaagatggtgaaggatgcaaaatgaggaatttcctttgtcatatagcatcctttgtttgaagagaggaaccaacttgttttccaaaatagctcctctccatctatgcacataaaacatgttctgattatcatgcttgtgaaaactacaaaaggagaaaagagcaaataaacaaataatcaaaaggcagatgagaaacggattcatgagcagggcacagaggtcctttggaacaatctcccacagggatgacagagtcattgattcctagagcgtgcagcaggttgaagcaagagccaggcgcccagctcagaacatggtgttctacaacttgtttagttgttcaattcattttattaaaaacactcggacggtaggggaaagaccgctcccaccgtcccacggtagtacattaagaagaagctcaatgtaacacctcaaaattttatttttcgaattggttaaattctccagaggttttgaattaataataccctaaaaagaatctccatacctctgaagctacatttcccaaaataaacatgttcctaatacagattaaaataaaatgatctctacataaagtccagtcatccgtttgttgaattatatgtttataagctctctcttagggattttaatatactagagatcatttttctcaaaaatgcctattttttagtgtaggagttgcatgtgtaaaggcatttgcttaaaataggatagtaaattaactaataacattaggtatttgcatctcatgctggtatatttttgtttgctgcatttgtttgaatttgagagcttaaacacagatttaaaatttgaaatcaaaacttgaaattgaaaacagcaaaaaataataaaaaagaaggggaacttacctaaacctgggccgagtcctccatttttggcccaactaactagccagcccaaccatcgcgcgctgacaggtgggccagccctgtcagccgcccacaccccgtgactgtgccgcgctcatccgctcgcataagccgggaataagcgccgacgggcgagacctgggggtcagtctcaccaatcccacgctcgcatctctcagtcaccggcaggcgagacccgcatcgccagctccttaccacatcgcgcctgcacctccttggtctctgttgggtggggccaaggtgccagaagcctcttcctcccgcaaacaccgcgcgcggtaacaaccacaaccaattccatcacgagatcttctacaacaacccaccgaccttggtgccctctgccctatatatggcgcccccggaatatcccgagccaagccgtcaagagagagagagagagagagagagagggcaaatagagagatggggcgccaccgaggccaatccagaccaccggcgtcgccaagaccttaagactgcttgcgagtgtttgcgggagatcgctgaaggaaggagcaacgacagggcgcacgggatgcaactcaaaaaagcagaattgctcgtcagagcgaagacttcccgccgagccgccgttcacgtggtcagggctccccgttgccgtacatggtaaggaacctcccatctaatttgccttgagtcgagcaacgtgtagtacctttcaatttggggtgatggagctctgagggcaggaatcgcccctcatgtcggcgacctcgccgacgggtaggcggcaccgccttgctacaccatcggggaaggggggatggctctcaatcattgatcgtgcgggggatggcccaaatcaaatcatggtgtatcccttcgaaccattaaattggatctgtcgatctcggatcgaacaaccagtgtggcacactggttcataggattaggagatctaatctggatcgtttattcataatcgcgcggcccagagcgaaggataccgcttcggtcgcggtgatttttcaaaagagacctcgcctttctaagaaacaaacccaaaatagtaaattaaaataaatgaaaataagtcaggtttttgcagctgagtccctggaaactaatttgggcataaaaataatatttatatgtccagaaacttgtaaatttcataaatccctcatcttaactctgatttagtctgttccagttgtgttagcttcgtaataaaattacatatgcagtaacaacattatttgtaacatatcatatacttctataattagatatttatttaaacctatgtttagtagattaatcttgctaataattataatctgaccaaaatatgatctctactcaagttataacttagattaaagataagatagttatttctttagattatctatctcacatgatctataaaatcaacataagacctatttttaattacttaatcacataggtcttccgaaaaccatatcttttcaaccataactccgattttagtcattctcgaacctacgatctcgtagcgacgtgtagaatactaatgtatggtttgttcttatgctctggtgtaatgttatcatatccattatttgtttgattgtatgtattgctacgctagaagcgaggtgacgaggaatctgagaccatcttggtgaagtacctagaatcgcaagtaaaaggcaagttgtgcacttgatcactatctttacctaataatgttcatgataatcactgtgacatgtctaggttaacttgatgggacctaataggttaccctagttttattcaccctacaccttgcaaacaaataaatcattgggtagtcttgctattgctctaccaggtgttgggattgatattatatctgaactatgatcatgctttattattattgttggctcaattattgttcatggttaagattattgtggtaattggaacatggagcgacaatctgagaaaacagtgctacacaagggtggaacgggacacccttggctgattaattaggaaagctagtgtgagttaatcctttcccaaaaggggcaagtggggtgtgggaagttgctggtatagggaagttctcgagtcgatcatgctacgatggcttttcagacgagggattcctatatcgcccccttctgcctgaaaccgtaacgggttctctcatgctagtggaactttggaaaggcctcgtagtgagcccttgcctactcaccttggcagtgtttaagggtctgcgcaacccgaggcagataagggatcacggcttgtggataaagatgtgcaacctctgtagagtgtaaaactggtatatcaatcgtgctcacggttaagagcggcttgtggataaaggttactaggccactgcatcttggtggtcttggcctcccaaatctgctttacagaagctgggcactacaagccaggtggttgtggctatatagaaaaccgaccctagcaggtcctggattggtcttgatatccctgttcagccacaagtcaaggctttggttgccatttcagtgatctcccatgtgggaaacggtaatgatactctcttttggattgataggtggttgagcgggaattccatcaaagatttagctccaatggtattctcaaaggtggacaagaagttaacctccactagaactgtggcccaagcccttattaatggtcaatggatcagagatatcaagttacctcactctgattggaatgcaacaataccttctcctttgggactctattagtgaggttgttttatctccagaaactgatcaacatgtttggaggcatgagtcatctgggcagttcacttctaaatcttgctataatgttttattttatggttccatcacctttgagccatggaagcggttatggaaatcttgccccccccccaaaatgcaaaaccttcctatggctggccataagaaataggtgttggacagctgacagattacgcaagtgtggtatgccccacccggttgtttgtcccctttgtgatcaagagcaggagacagttcaacatctcctaactacatgtgtttttacacgtcagttctggcatggcattctagccccttttaacctaggacaccttattcctagtcctgtggaggcctcctttgtggagtggtggggaggagtgatcaatcagatccacaaagacaagaagaagggcttcaacagtgctatcatccttggggcatggtacctttggcttcataggaaccgagtgatcttccatgaggagtccccttccattgcgaaggtgctgagatccttccttgatgagcttgcttgctgggttctagctggagccaagcagctggggagcattggtttggctgactgtgtttctgctttgtagacgtcgggtcctgcgtggcagatctccctgtcctggtgtgttctttagaagtgtgtgtgtgtgtgtgtgtgtttggctgtatgtttgtgttctgtatttttgccctttgtgggtgtttttcttctctctaatatataaagatgtgcagtcctcctgcacattcgagagaaaaaaagtgaagtggaggcggcagcgtatagtctacctccctggcggcacgcagcgcgtgggtggagcagctccgcacgggcgcggcctcggcggcgcacttgctccctctcaagcagcggcggcccaccctcttaggcacaacgacgtgcaggaagaagtagaaatgcggggaaggagagggagaagctgctagtggctgagagagaattgctggtggctgagagggagaagagggagagagagatttgtgctaggtgaggacgtgaagtaaccctaaatttgttaggttgggctgattgtgggtttctttatttttttccctgtttctctgttctattaggctgaaatggtcttaggccttacagttgtgctagcttgtttattacctcgaattagtgatatataaataatatttggtctattatatatatatatatatataaatatatatatatatataattaaggcgtcgcctcgccttacgcctttccgcttaaaaggtaaaaaaggggacgctcgccttaactcgccttaacgccttaataactatactagtcatttgcccgtgcttttgctatagtttttatatattatataaataggtattaagatatttatttaaatataattagtgtttatttttaaacactaaggtacatgtagtctagtggttaaccctaaatttctagaatataggagagcgtgtgttcaaatgctcgctttgcactaatttttatatatatatttttttatttataaacactaaggtatgtgtggtctggtggtgggtgtgcgggcgctggggtccataggtcaatagctaggtcagtagctgagagcgtgctgagcgtggggaccaacagggaacgacaccgaggcgggagacgcgtggggcaggcccagtgtgtcagcgtggggtgaagccatggtagcaccaggtgcccaccttccgttcttaatagtagtagggacttgggactgaaaagattgttgttgttgttgttgtattccatttccttggcatattagactagttcaaaacttcaaatccaaagcttgacatcaatgtttacaagtcgggcgaccaggcgcctaatagcgattagggcgacgattaggtcgactaatcggtcctggtcgacctctagtcgtccgttagtcgtcctatagatttaaggacatatgtatatgtatataactatatattaactatatatgcactgcatttctgcaataatataggcataattagtagcagactagcagtaatttctgcaataatagactgctcaaacagaggtctgcaggtgcaccttcagatgacgagctaccagtggtaatagagggaagggagactgggagataatcagagaagggagagcaggtgctaccttcagatgacgagctcatcttcaattcttgactaggtgacagacgccggagcactggagtactggacgccggaggcagatgctggacggctggagcacttggagcagagacgtcggcaaaaaccagagaggacagaggagagaattagggtttactggcggctgggagggtttctggcggctaggaggatttctggcgggtttgtggcggctgatttactgctggaggggcgggctactatagatgggccaaaaactagagtgaagcccagtaccaaaactgtgacaacaaaaacgaccagcaagcgttcgaccggacgactaatcgcccaggtcgacgattagtcggacgactaggacgacttgaaatcctaatcgcgtcgtccacctaatcgccctcttccaggcgaccagcccgactaatcgcgattaatcgcgattagtcggacgacttgtaaacactgcttggcattgtgtagcggtcatgattcctcatgatgatgatgatgatgatgatgatgataataataacaacaataacaataacaataataataatgatgatgatgatgatgataataataataataataataataataataataccatgcaagtgagcggaaacagaaaagtgtactgatttcagtgatactgctctctgccacaaagatcactcttacacatctggtgactgccatagccttatcaattactccctccattcagatatgatagtctctttttagaatggcacgatggtcaagggaagagtggcttgcttatcacctaattacttcatccatcggtaatatccgttagtctgctgtttttccgccacgggactgttcagtgtcacaggcctttaataccacgaggcaactccgtgaaacagttcgttttttcccgctttcccgtgccaaatccttccttttgtctctgtcctgagaagcgcgtccgcacggcgaaggaaagcgacacaggcgtacatagtggaacccaaggtgcatacgtaaaaaagactatcatatctgaatttctcaaatttgaagaaaagactatcatatctgaatggagggagtaccatagttcatatcagataacttctagtgatcaactacatgttgcctaatataatcaaacatgttaagcagcagattaaataaacacatacttttgtagtgcaaggaatagatcacctcaactttatggaagtgcaagcagtcagtaactggtttgcagaaagcaaagcatataacttacatatgtcatccaagccatttacaactgtaggaggtcatcaatcaaggcagatttgaaaccttcataaattcaagaaacatattcaattttcttggaaaatgtaagaaactgcataagtaaaggaaaaaaattaagcatatcccaagctgcaaaccaacaaaagctgagtaccataaccaatcagtccagcaaagagttgtctttggtcacttagatggtaggggcaatgatacttacagtgtaaaacagtctcaacctcatgcatttagttcattgcaaatggtgcttcactccagaatccctgagtgacaaactgcctaacaactttctgtccaagggcagagtataacacaagtatatatttttgggtttcagcttgttaaccaatgtaagtcacgacatcaagctggtcttctgaagcacctacccatctcttttcagaattaactgcatttgctatgatctctttatgcacgaaacagcatatctggcttagcaaagaagacactccaacagtaaggacccctttttgcaactgtacagttctgggagaatcatctcaattgagcatctatcctagacagataatatattgacacttcatgttttccctaaaccttgaaaagggtcttaagtaaacgtcgagcttcccaagtcattcccggctttgaaaatgctctggacatagaactaatagtgcctttag

SEQ ID NO: 44514 - DNA, 138 bp, Zea Mays
taccgtgtccacattaagaaattgggccggccggctcaatacagcgccactgtgccgttccgtttctttctttcccccttttcttgctgctgcttcttcccctgccctaggtttctcgtgctcctgttcttctcacca

SEQ ID NO: 44515 - DNA, 4767 bp, Zea Mays
cctccgaaaggccttaaccccaaacgaaaccaccctccgcgacaaagccgactactataggctgtcgtagccaacaagcgcgacatcctccgcccccacctcgccgccggcgatggagccgccttcgcctccggcgacccactccgcggccgtccgtgtcctctcccgcactcctccgccgacctccccgaacccctcctccacgggcccggcggccccgtcgcccgcctcccgcgacggggtcgtcgccgtcggcttcgtgggcgccgcggggaccgcccgcctcgcggaccggatcctcgacgcccacgtcttctctcccggtggctcggcggggagcctcgcgggaagggtaaggtaccaccgcgacgccggcaagaggatggtgttccttcacctcacgccgccgccgcccgcgccgctcgaggcggtggcaggatgctgcgatgacggcgaactaccggagatgctcttcatgttctctgtctgccacgtaattatatttctgcaacaaggcttcagatttaacacacaaaccttaaagaagttccgactgctgcaatcttcaaagcatgctctcgctccatttgtcaagccattggtggcagctgcaatgcctgccagaactgttgcctctgacaccccaacaagagcaacccacagggcttcttccgtctcccctccaacacgccgaggaggtcacgctgggcgtcagtcctcggctatctcacttatgtctggaaccagttcaactccttctgtcttgccaggccaatgcattcctgtattgctctttgtctttgaggatgatgcggttgatgtttcaagtgctgcagcaagtcccgatgatataggtgatgcatcttcatcaaatcagggttctacccctgatggactaccaaaacagagcttagcttcaaaaagttctggttcagtaattatgctttcccgggcagcaaacaaatctgagggcagttcaggcaaaaaactgcattcgtcactggagggacagatccgtgtcttgatcaagaagtgcagggtgcttgcaggcatggagcctggacatattggcccaaggggcgtaagtaacatgagtcatcatttacccctgttctcactcgatacctcgagggtagttgcactgttggaacggtatattaataagaaacaggaaccactggacaccattgcaggactatttgaagattctttgtgctccaaatcgccattggatattctttcgctcgaaaacaactaccatccaacaaaccatgatgactttcagttgatcaaggattttatatttcggcagtctgatgcgctgagagggaaagggggatattcaagcaatgcaagtgccgggtctgttgcaggtgttggcatggtggctgctgctgctgcagcagctgcagcatcagctgcatctgggaaaccagttaatgcacctgacctccctacttttgataaatggttgtccataagtacctctattctaactgcactgttgagtggaagaaatgtgctgagatgtcagtctgaaagcaagactcatacaagtcctactgagaagaatggccaacttcctgtaggatctaatgctattgagatcgcattatcgtgcttggaaagtaacaatgggctgaacatgaaattttcttcatcatggtgtcaaagggtgcttccagctgctaaggagatatacctgaaaggtttgcctgccttttaccccacaagaatgcatgaagtgcagctacagaaggcattgcggtcctttggctcaatggttaaaggaccagcagtcagggtattctcaaagaagctagaagatgagtgccgggcaatatgggaatctggaaggcagcaatgtgacgctgttagcctaactggcagaccatgtaagcaccgcaggcatggcgatttcttttcatcagatgcaatggagcaacattctagtggatatgtcttcctccatgcatgttcctgtggccggtcacgccgccttagagatgatccttttgactttcagacagccaacgtgtcttttaattgtttccaaaattgcgatgacctattacctacccttgcgcttccaagaggcagcaatgatggttcattttcagtatcctcttggtgcttggtgcgtcttggaggagcaaggtactacaagccaacaaaaggactccttcaaagtggatttagctccaaggagaggtatcttctaaggtggattgtatctgttcataaggggcaagtgagaaatgacattcgttctaatactattacttcatccgcaagatctggtatgaacccgcagactcccccaatagtcactggtgaagtaaaatctgccataacccaagtcacagcacaaattaaatatgcaaagcttgaaaattctggaaaacaagctgaagttgaaccagtgagcaacttaggcattaattttggtaaaggtctgccaaattttactatgaaaaagcccttttctgaagttgttgctggcaccacatcaaaagataccgagtttcctgctcttcagcagacaaggccaccaaaacctggtggtcgaaaagatgagcagcgtcaaatgaatatagtagaccagactaatggccgaggtcatgtggctgtcagccaagggtctgtagctgaaactgaatcggcaaaagcaagcagaaacaagagtagtgaaaatgctgatgggaagccctttttacagatagggagcaatatagtaccagtgattgctggaaatgagactagagaaactagtcagccagtacaacagtttgttgtgtatattggatttgagcatgagtgtccctatggtcatcgcttcttactgtcagagaaacatatgaaggagatcgagtcttcctgtttgcagtatcaaagacctcatctaaacaaagaagcagaagtcaagcatgcacaaaagttgctccaaaatgcatctggtttaatagcatctgcagtggacataaacagtgcacggaaaaacagtaagccattggaatcatcagggagaaacagccagcagcaatcactgcagctgaggattgatgcagagacctcacagccttctcctcggctttcagatccacagaatgccaaaaggtctcagaaaggaaggaacatcaagatgtaaagtttgctggtgttgtgtctcaacttcagcggattttcattgtgacacctgatttccctgttctgttggcaagctgcccacttgtacagtttgaggggtcatgtttgccatcaaatgtctctgatcatgatcgagaaggatcattcagtattgggtgccgagttatcctcccacctgagagctttcttactatgaggcttccctttgtctatggtgttgagacaaaggagggaagtaaatttcccctcaaatactttgagcgacaaccagaactcacagcatggcttgttgcaggcacagccctgcaaatcgtgtcggtaggggatgtcactgagaaagaaaccgttatgaagtgatagacatgtcatataaagctttactggctttagcatgttctagtcatatatcagtgatttgctatcggtctgttgatggttatattctgtctgaagttttcacttctactcctgaacttgtgctgctaagctgttgacacaactattgcttgctttcactgtgctggaagcattgtgaaatagaagttccgctgatatctgcctgacctggatggtgtatatagatgcaagcagagggggcaggcccacaggcaatcacgccgttcttgtctttgtacatgaaaggtgccaggaggttaagtttagctggttatgtaaaggtccgctttttgaggacctgtccagtggatcaatcccattcctagactggtttgccttgaggcttggagattttgtatacaggtatttccccgcagtctttggagaagaagatggatttgtgaagtgatagcacaaaaaaaaaagtcatcaggcgcttctggtggtagactggagactgggctggagaaatgttggagctggaaggaaacgcacggatggctcctgcttgacaagtgtaaaggcaggcggcaagcagggacgtcgagtcgaggccccggccggctccaagagcttctttctccaatccaatccaatccaatccagaaccctgactgcagtccatggtattgtagcgctaccatttgtccacgtccgatgggtgaagtgaagcatgactgactgactgcatgggtttgaataagaataccggactgatggatggaagtggatgtgaacaaacagctggttggctcagggcaggctccacaccaccaacggccggagcagatggacatggacgtctcacttaggaggagaaggcagatgcggcagaagcaccagcacactgaatgcaatcattcaatactcatctacagctagccaagatgtgagaagagagcaaggaagaattgtcaagcctcccacgtttccccaatcttctctcttcttttcatttccccacttttaatatgtttattttcctcttatttgcaacagctcctttaattatatagcaacattttttttaagatatagtagtatatatattaattttatcatatctctagtccgaataccacgcaaaagtagctagtaagtaggatgtaccaactagctacagcagtgtataataaagaaaaaagtcgttgggcggtcgatggagtaatgcacatcatatacgtacagcttggtacaaaacgaccgcaaattcacaaggcaaag

SEQ ID NO: 44516 - DNA, 4950 bp, Zea Mays
cctccgaaaggccttaaccccaaacgaaaccaccctccgcgacaaagccgactactataggctgtcgtagccaacaagcgcgacatcctccgcccccacctcgccgccggcgatggagccgccttcgcctccggcgacccactccgcggccgtccgtgtcctctcccgcactcctccgccgacctccccgaacccctcctccacgggcccggcggccccgtcgcccgcctcccgcgacggggtcgtcgccgtcggcttcgtgggcgccgcggggaccgcccgcctcgcggaccggatcctcgacgcccacgtcttctctcccggtggctcggcggggagcctcgcgggaagggtaaggtaccaccgcgacgccggcaagaggatggtgttccttcacctcacgccgccgccgcccgcgccgctcgaggcggtggcaggatgctgcgatgacggcgaactaccggagatgctcttcatgttctctgtctgccacgtaattatatttctgcaacaaggcttcagatttaacacacaaaccttaaagaagttccgactgctgcaatcttcaaagcatgctctcgctccatttgtcaagccattggtggcagctgcaatgcctgccagaactgttgcctctgacaccccaacaagagcaacccacagggcttcttccgtctcccctccaacacgccgaggaggtcacgctgggcgtcagtcctcggctatctcacttatgtctggaaccagttcaactccttctgtcttgccaggccaatgcattcctgtattgctctttgtctttgaggatgatgcggttgatgtttcaagtgctgcagcaagtcccgatgatataggtgatgcatcttcatcaaatcagggttctacccctgatggactaccaaaacagagcttagcttcaaaaagttctggttcagtaattatgctttcccgggcagcaaacaaatctgagggcagttcaggcaaaaaactgcattcgtcactggagggacagatccgtgtcttgatcaagaagtgcagggtgcttgcaggcatggagcctggacatattggcccaaggggcgtaagtaacatgagtcatcatttacccctgttctcactcgatacctcgagggtagttgcactgttggaacggtatattaataagaaacaggaaccactggacaccattgcaggactatttgaagattctttgtgctccaaatcgccattggatattctttcgctcgaaaacaactaccatccaacaaaccatgatgactttcagttgatcaaggattttatatttcggcagtctgatgcgctgagagggaaagggggatattcaagcaatgcaagtgccgggtctgttgcaggtgttggcatggtggctgctgctgctgcagcagctgcagcatcagctgcatctgggaaaccagttaatgcacctgacctccctacttttgataaatggttgtccataagtacctctattctaactgcactgttgagtggaagaaatgtgctgagatgtcagtctgaaagcaagactcatacaagtcctactgagaagaatggccaacttcctgtaggatctaatgctattgagatcgcattatcgtgcttggaaagtaacaatgggctgaacatgaaattttcttcatcatggtgtcaaagggtgcttccagctgctaaggagatatacctgaaaggtttgcctgccttttaccccacaagaatgcatgaagtgcagctacagaaggcattgcggtcctttggctcaatggttaaaggaccagcagtcagggtattctcaaagaagctagaagatgagtgccgggcaatatgggaatctggaaggcagcaatgtgacgctgttagcctaactggcagaccatgtaagcaccgcaggcatggcgatttcttttcatcagatgcaatggagcaacattctagtggatatgtcttcctccatgcatgttcctgtggccggtcacgccgccttagagatgatccttttgactttcagacagccaacgtgtcttttaattgtttccaaaattgcgatgacctattacctacccttgcgcttccaagaggcagcaatgatggttcattttcagtatcctcttggtgcttggtgcgtcttggaggagcaaggtactacaagccaacaaaaggactccttcaaagtggatttagctccaaggagaggtatcttctaaggtggattgtatctgttcataaggggcaagtgagaaatgacattcgttctaatactattacttcatccgcaagatctggtatgaacccgcagactcccccaatagtcactggtgaagtaaaatctgccataacccaagtcacagcacaaattaaatatgcaaagcttgaaaattctggaaaacaagctgaagttgaaccagtgagcaacttaggcattaattttggtaaaggtctgccaaattttactatgaaaaagcccttttctgaagttgttgctggcaccacatcaaaagataccgagtttcctgctcttcagcagacaaggccaccaaaacctggtggtcgaaaagatgagcagcgtcaaatgaatatagtagaccagactaatggccgaggtcatgtggctgtcagccaagggtctgtagctgaaactgaatcggcaaaagcaagcagaaacaagagtagtgaaaatgctgatgggaagccctttttacagatagggagcaatatagtaccagtgattgctggaaatgagactagagaaactagtcagccagtacaacagtttgttgtgtatattggatttgagcatgagtgtccctatggtcatcgcttcttactgtcagagaaacatatgaaggagatcgagtcttcctgtttgcagtatcaaagacctcatctaaacaaagaagcagaagtcaagcatgcacaaaagttgctccaaaatgcatctggtttaatagcatctgcagtggacataaacagtgcacggaaaaacagtaagccattggaatcatcagggagaaacagccagcagcaatcactgcagctgaggattgatgcagagacctcacagccttctcctcggctttcagatccacagaatgccaaaaggtgggagcattattttcgaagcgttacaattgatgatggtggagaagcattttcactgatgaacagaaacttgccaatatatatgcgctgtccacattgcaaggtctcagaaaggaaggaacatcaagatgtaaagtttgctggtgttgtgtctcaacttcagcggattttcattgtgacacctgatttccctgttctgttggcaagctgcccacttgtacagtttgaggggtcatgtttgccatcaaatgtctctgatcatgatcgagaaggatcattcagtattgggtgccgagttatcctcccacctgagagctttcttactatgaggcttccctttgtctatggtgttgagacaaaggagggaagtaaatttcccctcaaatactttgagcgacaaccagaactcacagcatggcttgttgcaggcacagccctgcaaatcgtgtcggtaggggatgtcactgagaaagaaaccgttatgaagtgatagacatgtcatataaagctttactggctttagcatgttctagtcatatatcagtgatttgctatcggcattgaataggtctgttgatggttatattctgtctgaagttttcacttctactcctgaacttgtgctgctaagctgttgacacaactattgcttgctttcactgtgctggaagcattgtgaaatagaagttccgctgatatctgcctgacctggatggtgtatatagatgcaagcagagggggcaggcccacaggcaatcacgccgttcttgtctttgtacatgaaaggtgccaggaggttaagtttagctggttatgtaaaggtccgctttttgaggacctgtccagtggatcaatcccattcctagactggtttgccttgaggcttggagattttgtatacaggtatttccccgcagtctttggagaagaagatggatttgtgaagtgatagcacaaaaaaaaaagtcatcaggcgcttctggtggtagactggagactgggctggagaaatgttggagctggaaggaaacgcacggatggctcctgcttgacaagtgtaaaggcaggcggcaagcagggacgtcgagtcgaggccccggccggctccaagagcttctttctccaatccaatccaatccaatccagaaccctgactgcagtccatggtattgtagcgctaccatttgtccacgtccgatgggtgaagtgaagcatgactgactgactgcatgggtttgagtgagttgcttggacaagtggctgtgtgtggtgctgctactgctacctaaccttttgcttggccgatagataagaataccggactgatggatggaagtggatgtgaacaaacagctggttggctcagggcaggctccacaccaccaacggccggagcagatggacatggacgtctcacttaggaggagaaggcagatgcggcagaagcaccagcacactgaatgcaatcattcaatactcatctacagctagccaagatgtgagaagagagcaaggaagaattgtcaagcctcccacgtttccccaatcttctctcttcttttcatttccccacttttaatatgtttattttcctcttatttgcaacagctcctttaattatatagcaacattttttttaagatatagtagtatatatattaattttatcatatctctagtccgaataccacgcaaaagtagctagtaagtaggatgtaccaactagctacagcagtgtataataaagaaaaaagtcgttgggcggtcgatggagtaatgcacatcatatacgtacagcttggtacaaaacgaccgcaaattcacaaggcaaag

SEQ ID NO: 44517 - DNA, 4609 bp, Zea Mays
cctccgaaaggccttaaccccaaacgaaaccaccctccgcgacaaagccgactactataggctgtcgtagccaacaagcgcgacatcctccgcccccacctcgccgccggcgatggagccgccttcgcctccggcgacccactccgcggccgtccgtgtcctctcccgcactcctccgccgacctccccgaacccctcctccacgggcccggcggccccgtcgcccgcctcccgcgacggggtcgtcgccgtcggcttcgtgggcgccgcggggaccgcccgcctcgcggaccggatcctcgacgcccacgtcttctctcccggtggctcggcggggagcctcgcgggaagggtaaggtaccaccgcgacgccggcaagaggatggtgttccttcacctcacgccgccgccgcccgcgccgctcgaggcggtggcaggatgctgcgatgacggcgaactaccggagatgctcttcatgttctctgtctgccacgtaattatatttctgcaacaaggcttcagatttaacacacaaaccttaaagaagttccgactgctgcaatcttcaaagcatgctctcgctccatttgtcaagccattggtggcagctgcaatgcctgccagaactgttgcctctgacaccccaacaagagcaacccacagggcttcttccgtctcccctccaacacgccgaggaggtcacgctgggcgtcagtcctcggctatctcacttatgtctggaaccagttcaactccttctgtcttgccaggccaatgcattcctgtattgctctttgtctttgaggatgatgcggttgatgtttcaagtgctgcagcaagtcccgatgatataggtgatgcatcttcatcaaatcagggttctacccctgatggactaccaaaacagagcttagcttcaaaaagttctggttcagtaattatgctttcccgggcagcaaacaaatctgagggcagttcaggcaaaaaactgcattcgtcactggagggacagatccgtgtcttgatcaagaagtgcagggtgcttgcaggcatggagcctggacatattggcccaaggggcgtaagtaacatgagtcatcatttacccctgttctcactcgatacctcgagggtagttgcactgttggaacggtatattaataagaaacaggaaccactggacaccattgcaggactatttgaagattctttgtgctccaaatcgccattggatattctttcgctcgaaaacaactaccatccaacaaaccatgatgactttcagttgatcaaggattttatatttcggcagtctgatgcgctgagagggaaagggggatattcaagcaatgcaagtgccgggtctgttgcaggtgttggcatggtggctgctgctgctgcagcagctgcagcatcagctgcatctgggaaaccagttaatgcacctgacctccctacttttgataaatggttgtccataagtacctctattctaactgcactgttgagtggaagaaatgtgctgagatgtcagtctgaaagcaagactcatacaagtcctactgagaagaatggccaacttcctgtaggatctaatgctattgagatcgcattatcgtgcttggaaagtaacaatgggctgaacatgaaattttcttcatcatggtgtcaaagggtgcttccagctgctaaggagatatacctgaaaggtttgcctgccttttaccccacaagaatgcatgaagtgcagctacagaaggcattgcggtcctttggctcaatggttaaaggaccagcagtcagggtattctcaaagaagctagaagatgagtgccgggcaatatgggaatctggaaggcagcaatgtgacgctgttagcctaactggcagaccatgtaagcaccgcaggcatggcgatttcttttcatcagatgcaatggagcaacattctagtggatatgtcttcctccatgcatgttcctgtggccggtcacgccgccttagagatgatccttttgactttcagacagccaacgtgtcttttaattgtttccaaaattgcgatgacctattacctacccttgcgcttccaagaggcagcaatgatggttcattttcagtatcctcttggtgcttggtgcgtcttggaggagcaaggtactacaagccaacaaaaggactccttcaaagtggatttagctccaaggagaggtatcttctaaggtggattgtatctgttcataaggggcaagtgagaaatgacattcgttctaatactattacttcatccgcaagatctggtatgaacccgcagactcccccaatagtcactggtgaagtaaaatctgccataacccaagtcacagcacaaattaaatatgcaaagcttgaaaattctggaaaacaagctgaagttgaaccagtgagcaacttaggcattaattttggtaaaggtctgccaaattttactatgaaaaagcccttttctgaagttgttgctggcaccacatcaaaagataccgagtttcctgctcttcagcagacaaggccaccaaaacctggtggtcgaaaagatgagcagcgtcaaatgaatatagtagaccagactaatggccgaggtcatgtggctgtcagccaagggtctgtagctgaaactgaatcggcaaaagcaagcagaaacaagagtagtgaaaatgctgatgggaagccctttttacagatagggagcaatatagtaccagtgattgctggaaatgagactagagaaactagtcagccagtacaacagtttgttgtgtatattggatttgagcatgagtgtccctatggtcatcgcttcttactgtcagagaaacatatgaaggagatcgagtcttcctgtttgcagtatcaaagacctcatctaaacaaagaagcagaagtcaagcatgcacaaaagttgctccaaaatgcatctggtttaatagcatctgcagtggacataaacagtgcacggaaaaacagtaagccattggaatcatcagggagaaacagccagcagcaatcactgcagctgaggattgatgcagagacctcacagccttctcctcggctttcagatccacagaatgccaaaaggtgggagcattattttcgaagcgttacaattgatgatggtggagaagcattttcactgatgaacagaaacttgccaatatatatgcgctgtccacattgcaaggtctcagaaaggaaggaacatcaagatgtaaagtttgctggtgttgtgtctcaacttcagcggattttcattgtgacacctgatttccctgttctgttggcaagctgcccacttgtacagtttgaggggtcatgtttgccatcaaatgtctctgatcatgatcgagaaggatcattcagtattgggtgccgagttatcctcccacctgagagctttcttactatgaggcttccctttgtctatggtgttgagacaaaggagggaagtaaatttcccctcaaatactttgagcgacaaccagaactcacagcatggcttgttgcaggcacagccctgcaaatcgtgtcggtaggggatgtcactgagaaagaaaccgttatgaagtgatagacatgtcatataaagctttactggctttagcatgttctagtcatatatcagtgatttgctatcgtacaggtatttccccgcagtctttggagaagaagatggatttgtgaagtgatagcacaaaaaaaaaagtcatcaggcgcttctggtggtagactggagactgggctggagaaatgttggagctggaaggaaacgcacggatggctcctgcttgacaagtgtaaaggcaggcggcaagcagggacgtcgagtcgaggccccggccggctccaagagcttctttctccaatccaatccaatccaatccagaaccctgactgcagtccatggtattgtagcgctaccatttgtccacgtccgatgggtgaagtgaagcatgactgactgactgcatgggtttgagtgagttgcttggacaagtggctgtgtgtggtgctgctactgctacctaaccttttgcttggccgatagataagaataccggactgatggatggaagtggatgtgaacaaacagctggttggctcagggcaggctccacaccaccaacggccggagcagatggacatggacgtctcacttaggaggagaaggcagatgcggcagaagcaccagcacactgaatgcaatcattcaatactcatctacagctagccaagatgtgagaagagagcaaggaagaattgtcaagcctcccacgtttccccaatcttctctcttcttttcatttccccacttttaatatgtttattttcctcttatttgcaacagctcctttaattatatagcaacattttttttaagatatagtagtatatatattaattttatcatatctctagtccgaataccacgcaaaagtagctagtaagtaggatgtaccaactagctacagcagtgtataataaagaaaaaagtcgttgggcggtcgatggagtaatgcacatcatatacgtacagcttggtacaaaacgaccgcaaattcacaaggcaaag

SEQ ID NO: 44518 - DNA, 2588 bp, Zea Mays
cctccgaaaggccttaaccccaaacgaaaccaccctccgcgacaaagccgactactataggctgtcgtagccaacaagcgcgacatcctccgcccccacctcgccgccggcgatggagccgccttcgcctccggcgacccactccgcggccgtccgtgtcctctcccgcactcctccgccgacctccccgaacccctcctccacgggcccggcggccccgtcgcccgcctcccgcgacggggtcgtcgccgtcggcttcgtgggcgccgcggggaccgcccgcctcgcggaccggatcctcgacgcccacgtcttctctcccggtggctcggcggggagcctcgcgggaagggtaaggtaccaccgcgacgccggcaagaggatggtgttccttcacctcacgccgccgccgcccgcgccgctcgaggcggtggcaggatgctgcgatgacggcgaactaccggagatgctcttcatgttctctgtgacacctgatttccctgttctgttggcaagctgcccacttgtacagtttgaggggtcatgtttgccatcaaatgtctctgatcatgatcgagaaggatcattcagtattgggtgccgagttatcctcccacctgagagctttcttactatgaggcttccctttgtctatggtgttgagacaaaggagggaagtaaatttcccctcaaatactttgagcgacaaccagaactcacagcatggcttgttgcaggcacagccctgcaaatcgtgtcggtaggggatgtcactgagaaagaaaccgttatgaagtgatagacatgtcatataaagctttactggctttagcatgttctagtcatatatcagtgatttgctatcggtgagatgataataacttctcttttctttcctgctttcttcccccacatagtttttcttagttctcctttgttttgaatactcaaggcattgaataggtctgttgatggttatattctgtctgaagttttcacttctactcctgaacttgtgctgctaagctgttgacacaactattgcttgctttcactgtgctggaagcattgtgaaatagaagttccgctgatatctgcctgacctggatggtgtatatagatgcaagcagagggggcaggcccacaggcaatcacgccgttcttgtctttgtacatgaaaggtgccaggaggttaagtttagctggttatgtaaaggtccgctttttgaggacctgtccagtggatcaatcccattcctagactggtttgccttgaggcttggagattttgtagtaagactattagttcaattgagctgtttgtccagttgatgagttgttttattcctaggcttgttgagaaatctggccttggaatatagaacccagaagaaaggatttttctgaatgatgttgtagcaaacggttgcttgagatgcatgatctcctcaaataaacttgactgatctgcctgtatcccttattctttcttgtatataatgtatgcagtacaggtatttccccgcagtctttggagaagaagatggatttgtgaagtgatagcacaaaaaaaaaagtcatcaggcgcttctggtggtagactggagactgggctggagaaatgttggagctggaaggaaacgcacggatggctcctgcttgacaagtgtaaaggcaggcggcaagcagggacgtcgagtcgaggccccggccggctccaagagcttctttctccaatccaatccaatccaatccagaaccctgactgcagtccatggtattgtagcgctaccatttgtccacgtccgatgggtgaagtgaagcatgactgactgactgcatgggtttgagtgagttgcttggacaagtggctgtgtgtggtgctgctactgctacctaaccttttgcttggccgatagataagaataccggactgatggatggaagtggatgtgaacaaacagctggttggctcagggcaggctccacaccaccaacggccggagcagatggacatggacgtctcacttagaaagaggaaagcaggatgggagctgcacgtgatgttccgtgcttgcacgagcaggatggtgtggagcatgtgacgtgtaggctggagcttggcttggcttagaggttactagctagctcactctgaatgatctccattcttcaggaggagaaggcagatgcggcagaagcaccagcacactgaatgcaatcattcaatactcatctacagctagccaagatgtgagaagagagcaaggaagaattgtcaagcctcccacgtttccccaatcttctctcttcttttcatttccccacttttaatatgtttattttcctcttatttgcaacagctcctttaattatatagcaacattttttttaagatatagtagtatatatattaattttatcatatctctagtccgaataccacgcaaaagtagctagtaagtaggatgtaccaactagctacagcagtgtataataaagaaaaaagtcgttgggcggtcgatggagtaatgcacatcatatacgtacagcttggtacaaaacgaccgcaaattcacaaggcaaag

SEQ ID NO: 44519 - DNA, 5011 bp, Zea Mays
cctccgaaaggccttaaccccaaacgaaaccaccctccgcgacaaagccgactactataggctgtcgtagccaacaagcgcgacatcctccgcccccacctcgccgccggcgatggagccgccttcgcctccggcgacccactccgcggccgtccgtgtcctctcccgcactcctccgccgacctccccgaacccctcctccacgggcccggcggccccgtcgcccgcctcccgcgacggggtcgtcgccgtcggcttcgtgggcgccgcggggaccgcccgcctcgcggaccggatcctcgacgcccacgtcttctctcccggtggctcggcggggagcctcgcgggaagggtaaggtaccaccgcgacgccggcaagaggatggtgttccttcacctcacgccgccgccgcccgcgccgctcgaggcggtggcaggatgctgcgatgacggcgaactaccggagatgctcttcatgttctctgtctgccacgtaattatatttctgcaacaaggcttcagatttaacacacaaaccttaaagaagttccgactgctgcaatcttcaaagcatgctctcgctccatttgtcaagccattggtggcagctgcaatgcctgccagaactgttgcctctgacaccccaacaagagcaacccacagggcttcttccgtctcccctccaacacgccgaggaggtcacgctgggcgtcagtcctcggctatctcacttatgtctggaaccagttcaactccttctgtcttgccaggccaatgcattcctgtattgctctttgtctttgaggatgatgcggttgatgtttcaagtgctgcagcaagtcccgatgatataggtgatgcatcttcatcaaatcagggttctacccctgatggactaccaaaacagagcttagcttcaaaaagttctggttcagtaattatgctttcccgggcagcaaacaaatctgagggcagttcaggcaaaaaactgcattcgtcactggagggacagatccgtgtcttgatcaagaagtgcagggtgcttgcaggcatggagcctggacatattggcccaaggggcgtaagtaacatgagtcatcatttacccctgttctcactcgatacctcgagggtagttgcactgttggaacggtatattaataagaaacaggaaccactggacaccattgcaggactatttgaagattctttgtgctccaaatcgccattggatattctttcgctcgaaaacaactaccatccaacaaaccatgatgactttcagttgatcaaggattttatatttcggcagtctgatgcgctgagagggaaagggggatattcaagcaatgcaagtgccgggtctgttgcaggtgttggcatggtggctgctgctgctgcagcagctgcagcatcagctgcatctgggaaaccagttaatgcacctgacctccctacttttgataaatggttgtccataagtacctctattctaactgcactgttgagtggaagaaatgtgctgagatgtcagtctgaaagcaagactcatacaagtcctactgagaagaatggccaacttcctgtaggatctaatgctattgagatcgcattatcgtgcttggaaagtaacaatgggctgaacatgaaattttcttcatcatggtgtcaaagggtgcttccagctgctaaggagatatacctgaaaggtttgcctgccttttaccccacaagaatgcatgaagtgcagctacagaaggcattgcggtcctttggctcaatggttaaaggaccagcagtcagggtattctcaaagaagctagaagatgagtgccgggcaatatgggaatctggaaggcagcaatgtgacgctgttagcctaactggcagaccatgtaagcaccgcaggcatggcgatttcttttcatcagatgcaatggagcaacattctagtggatatgtcttcctccatgcatgttcctgtggccggtcacgccgccttagagatgatccttttgactttcagacagccaacgtgtcttttaattgtttccaaaattgcgatgacctattacctacccttgcgcttccaagaggcagcaatgatggttcattttcagtatcctcttggtgcttggtgcgtcttggaggagcaaggtactacaagccaacaaaaggactccttcaaagtggatttagctccaaggagaggtatcttctaaggtggattgtatctgttcataaggggcaagtgagaaatgacattcgttctaatactattacttcatccgcaagatctggtatgaacccgcagactcccccaatagtcactggtgaagtaaaatctgccataacccaagtcacagcacaaattaaatatgcaaagcttgaaaattctggaaaacaagctgaagttgaaccagtgagcaacttaggcattaattttggtaaaggtctgccaaattttactatgaaaaagcccttttctgaagttgttgctggcaccacatcaaaagataccgagtttcctgctcttcagcagacaaggccaccaaaacctggtggtcgaaaagatgagcagcgtcaaatgaatatagtagaccagactaatggccgaggtcatgtggctgtcagccaagggtctgtagctgaaactgaatcggcaaaagcaagcagaaacaagagtagtgaaaatgctgatgggaagccctttttacagatagggagcaatatagtaccagtgattgctggaaatgagactagagaaactagtcagccagtacaacagtttgttgtgtatattggatttgagcatgagtgtccctatggtcatcgcttcttactgtcagagaaacatatgaaggagatcgagtcttcctgtttgcagtatcaaagacctcatctaaacaaagaagcagaagtcaagcatgcacaaaagttgctccaaaatgcatctggtttaatagcatctgcagtggacataaacagtgcacggaaaaacagtaagccattggaatcatcagggagaaacagccagcagcaatcactgcagctgaggattgatgcagagacctcacagccttctcctcggctttcagatccacagaatgccaaaaggtgggagcattattttcgaagcgttacaattgatgatggtggagaagcattttcactgatgaacagaaacttgccaatatatatgcgctgtccacattgcaaggtctcagaaaggaaggaacatcaagatgtaaagtttgctggtgttgtgtctcaacttcagcggattttcattgtgacacctgatttccctgttctgttggcaagctgcccacttgtacagtttgaggcaagtacgctcacctatattcagcagtgttaaagacataatttcctttactcacacatagagtagttatgggaagacattattttaacctagatgtaatgaagttattgccttttccctttttcttgcatcaggggtcatgtttgccatcaaatgtctctgatcatgatcgagaaggatcattcagtattgggtgccgagttatcctcccacctgagagctttcttactatgaggcttccctttgtctatggtgttgagacaaaggagggaagtaaatttcccctcaaatactttgagcgacaaccagaactcacagcatggcttgttgcaggcacagccctgcaaatcgtgtcggtaggggatgtcactgagaaagaaaccgttatgaagtgatagacatgtcatataaagctttactggctttagcatgttctagtcatatatcagtgatttgctatcgtacaggtatttccccgcagtctttggagaagaagatggatttgtgaagtgatagcacaaaaaaaaaagtcatcaggcgcttctggtggtagactggagactgggctggagaaatgttggagctggaaggaaacgcacggatggctcctgcttgacaagtgtaaaggcaggcggcaagcagggacgtcgagtcgaggccccggccggctccaagagcttctttctccaatccaatccaatccaatccagaaccctgactgcagtccatggtattgtagcgctaccatttgtccacgtccgatgggtgaagtgaagcatgactgactgactgcatgggtttgagtgagttgcttggacaagtggctgtgtgtggtgctgctactgctacctaaccttttgcttggccgatagataagaataccggactgatggatggaagtggatgtgaacaaacagctggttggctcagggcaggctccacaccaccaacggccggagcagatggacatggacgtctcacttaggttagctagcttcttttcctttgtgaccgtgatctgctactgcaggaaaccatgcatgattcacaagcagctagcagcctccagtcatattcctctttattttatttttttatataaaaaaaagaaagaggaaagcaggatgggagctgcacgtgatgttccgtgcttgcacgagcaggatggtgtggagcatgtgacgtgtaggctggagcttggcttggcttagaggttactagctagctcactctgaatgatctccattcttcaggaggagaaggcagatgcggcagaagcaccagcacactgaatgcaatcattcaatactcatctacagctagccaagatgtgagaagagagcaaggaagaattgtcaagcctcccacgtttccccaatcttctctcttcttttcatttccccacttttaatatgtttattttcctcttatttgcaacagctcctttaattatatagcaacattttttttaagatatagtagtatatatattaattttatcatatctctagtccgaataccacgcaaaagtagctagtaagtaggatgtaccaactagctacagcagtgtataataaagaaaaaagtcgttgggcggtcgatggagtaatgcacatcatatacgtacagcttggtacaaaacgaccgcaaattcacaaggcaaag

SEQ ID NO: 44520 - DNA, 5066 bp, Zea Mays
cctccgaaaggccttaaccccaaacgaaaccaccctccgcgacaaagccgactactataggctgtcgtagccaacaagcgcgacatcctccgcccccacctcgccgccggcgatggagccgccttcgcctccggcgacccactccgcggccgtccgtgtcctctcccgcactcctccgccgacctccccgaacccctcctccacgggcccggcggccccgtcgcccgcctcccgcgacggggtcgtcgccgtcggcttcgtgggcgccgcggggaccgcccgcctcgcggaccggatcctcgacgcccacgtcttctctcccggtggctcggcggggagcctcgcgggaagggtaaggtaccaccgcgacgccggcaagaggatggtgttccttcacctcacgccgccgccgcccgcgccgctcgaggcggtggcaggatgctgcgatgacggcgaactaccggagatgctcttcatgttctctgtctgccacgtaattatatttctgcaacaaggcttcagatttaacacacaaaccttaaagaagttccgactgctgcaatcttcaaagcatgctctcgctccatttgtcaagccattggtggcagctgcaatgcctgccagaactgttgcctctgacaccccaacaagagcaacccacagggcttcttccgtctcccctccaacacgccgaggaggtcacgctgggcgtcagtcctcggctatctcacttatgtctggaaccagttcaactccttctgtcttgccaggccaatgcattcctgtattgctctttgtctttgaggatgatgcggttgatgtttcaagtgctgcagcaagtcccgatgatataggtgatgcatcttcatcaaatcagggttctacccctgatggactaccaaaacagagcttagcttcaaaaagttctggttcagtaattatgctttcccgggcagcaaacaaatctgagggcagttcaggcaaaaaactgcattcgtcactggagggacagatccgtgtcttgatcaagaagtgcagggtgcttgcaggcatggagcctggacatattggcccaaggggcgtaagtaacatgagtcatcatttacccctgttctcactcgatacctcgagggtagttgcactgttggaacggtatattaataagaaacaggaaccactggacaccattgcaggactatttgaagattctttgtgctccaaatcgccattggatattctttcgctcgaaaacaactaccatccaacaaaccatgatgactttcagttgatcaaggattttatatttcggcagtctgatgcgctgagagggaaagggggatattcaagcaatgcaagtgccgggtctgttgcaggtgttggcatggtggctgctgctgctgcagcagctgcagcatcagctgcatctgggaaaccagttaatgcacctgacctccctacttttgataaatggttgtccataagtacctctattctaactgcactgttgagtggaagaaatgtgctgagatgtcagtctgaaagcaagactcatacaagtcctactgagaagaatggccaacttcctgtaggatctaatgctattgagatcgcattatcgtgcttggaaagtaacaatgggctgaacatgaaattttcttcatcatggtgtcaaagggtgcttccagctgctaaggagatatacctgaaaggtttgcctgccttttaccccacaagaatgcatgaagtgcagctacagaaggcattgcggtcctttggctcaatggttaaaggaccagcagtcagggtattctcaaagaagctagaagatgagtgccgggcaatatgggaatctggaaggcagcaatgtgacgctgttagcctaactggcagaccatgtaagcaccgcaggcatggcgatttcttttcatcagatgcaatggagcaacattctagtggatatgtcttcctccatgcatgttcctgtggccggtcacgccgccttagagatgatccttttgactttcagacagccaacgtgtcttttaattgtttccaaaattgcgatgacctattacctacccttgcgcttccaagaggcagcaatgatggttcattttcagtatcctcttggtgcttggtgcgtcttggaggagcaaggtactacaagccaacaaaaggactccttcaaagtggatttagctccaaggagaggtatcttctaaggtggattgtatctgttcataaggggcaagtgagaaatgacattcgttctaatactattacttcatccgcaagatctggtatgaacccgcagactcccccaatagtcactggtgaagtaaaatctgccataacccaagtcacagcacaaattaaatatgcaaagcttgaaaattctggaaaacaagctgaagttgaaccagtgagcaacttaggcattaattttggtaaaggtctgccaaattttactatgaaaaagcccttttctgaagttgttgctggcaccacatcaaaagataccgagtttcctgctcttcagcagacaaggccaccaaaacctggtggtcgaaaagatgagcagcgtcaaatgaatatagtagaccagactaatggccgaggtcatgtggctgtcagccaagggtctgtagctgaaactgaatcggcaaaagcaagcagaaacaagagtagtgaaaatgctgatgggaagccctttttacagatagggagcaatatagtaccagtgattgctggaaatgagactagagaaactagtcagccagtacaacagtttgttgtgtatattggatttgagcatgagtgtccctatggtcatcgcttcttactgtcagagaaacatatgaaggagatcgagtcttcctgtttgcagtatcaaagacctcatctaaacaaagaagcagaagtcaagcatgcacaaaagttgctccaaaatgcatctggtttaatagcatctgcagtggacataaacagtgcacggaaaaacagtaagccattggaatcatcagggagaaacagccagcagcaatcactgcagctgaggattgatgcagagacctcacagccttctcctcggctttcagatccacagaatgccaaaagaaaggaaggaacatcaagatgtaaagtttgctggtgttgtgtctcaacttcagcggattttcattgtgacacctgatttccctgttctgttggcaagctgcccacttgtacagtttgaggggtcatgtttgccatcaaatgtctctgatcatgatcgagaaggatcattcagtattgggtgccgagttatcctcccacctgagagctttcttactatgaggcttccctttgtctatggtgttgagacaaaggagggaagtaaatttcccctcaaatactttgagcgacaaccagaactcacagcatggcttgttgcaggcacagccctgcaaatcgtgtcggtaggggatgtcactgagaaagaaaccgttatgaagtgatagacatgtcatataaagctttactggctttagcatgttctagtcatatatcagtgatttgctatcggtctgttgatggttatattctgtctgaagttttcacttctactcctgaacttgtgctgctaagctgttgacacaactattgcttgctttcactgtgctggaagcattgtgaaatagaagttccgctgatatctgcctgacctggatggtgtatatagatgcaagcagagggggcaggcccacaggcaatcacgccgttcttgtctttgtacatgaaaggtgccaggaggttaagtttagctggttatgtaaaggtccgctttttgaggacctgtccagtggatcaatcccattcctagactggtttgccttgaggcttggagattttgtagtaagactattagttcaattgagctgtttgtccagttgatgagttgttttattcctaggcttgttgagaaatctggccttggaatatagaacccagaagaaaggatttttctgaatgatgttgtagcaaacggttgcttgagatgcatgatctcctcaaataaacttgactgatctgcctgtatcccttattctttcttgtatataatgtatgcagtacaggtatttccccgcagtctttggagaagaagatggatttgtgaagtgatagcacaaaaaaaaaagtcatcaggcgcttctggtggtagactggagactgggctggagaaatgttggagctggaaggaaacgcacggatggctcctgcttgacaagtgtaaaggcaggcggcaagcagggacgtcgagtcgaggccccggccggctccaagagcttctttctccaatccaatccaatccaatccagaaccctgactgcagtccatggtattgtagcgctaccatttgtccacgtccgatgggtgaagtgaagcatgactgactgactgcatgggtttgaataagaataccggactgatggatggaagtggatgtgaacaaacagctggttggctcagggcaggctccacaccaccaacggccggagcagatggacatggacgtctcacttaggatggtgtggagcatgtgacgtgtaggctggagcttggcttggcttagaggttactagctagctcactctgaatgatctccattcttcaggaggagaaggcagatgcggcagaagcaccagcacactgaatgcaatcattcaatactcatctacagctagccaagatgtgagaagagagcaaggaagaattgtcaagcctcccacgtttccccaatcttctctcttcttttcatttccccacttttaatatgtttattttcctcttatttgcaacagctcctttaattatatagcaacattttttttaagatatagtagtatatatattaattttatcatatctctagtccgaataccacgcaaaagtagctagtaagtaggatgtaccaactagctacagcagtgtataataaagaaaaaagtcgttgggcggtcgatggagtaatgcacatcatatacgtacagcttggtacaaaacgaccgcaaattcacaaggcaaag

SEQ ID NO: 44521 - DNA, 5162 bp, Zea Mays
cctccgaaaggccttaaccccaaacgaaaccaccctccgcgacaaagccgactactataggctgtcgtagccaacaagcgcgacatcctccgcccccacctcgccgccggcgatggagccgccttcgcctccggcgacccactccgcggccgtccgtgtcctctcccgcactcctccgccgacctccccgaacccctcctccacgggcccggcggccccgtcgcccgcctcccgcgacggggtcgtcgccgtcggcttcgtgggcgccgcggggaccgcccgcctcgcggaccggatcctcgacgcccacgtcttctctcccggtggctcggcggggagcctcgcgggaagggtaaggtaccaccgcgacgccggcaagaggatggtgttccttcacctcacgccgccgccgcccgcgccgctcgaggcggtggcaggatgctgcgatgacggcgaactaccggagatgctcttcatgttctctgtctgccacgtaattatatttctgcaacaaggcttcagatttaacacacaaaccttaaagaagttccgactgctgcaatcttcaaagcatgctctcgctccatttgtcaagccattggtggcagctgcaatgcctgccagaactgttgcctctgacaccccaacaagagcaacccacagggcttcttccgtctcccctccaacacgccgaggaggtcacgctgggcgtcagtcctcggctatctcacttatgtctggaaccagttcaactccttctgtcttgccaggccaatgcattcctgtattgctctttgtctttgaggatgatgcggttgatgtttcaagtgctgcagcaagtcccgatgatataggtgatgcatcttcatcaaatcagggttctacccctgatggactaccaaaacagagcttagcttcaaaaagttctggttcagtaattatgctttcccgggcagcaaacaaatctgagggcagttcaggcaaaaaactgcattcgtcactggagggacagatccgtgtcttgatcaagaagtgcagggtgcttgcaggcatggagcctggacatattggcccaaggggcgtaagtaacatgagtcatcatttacccctgttctcactcgatacctcgagggtagttgcactgttggaacggtatattaataagaaacaggaaccactggacaccattgcaggactatttgaagattctttgtgctccaaatcgccattggatattctttcgctcgaaaacaactaccatccaacaaaccatgatgactttcagttgatcaaggattttatatttcggcagtctgatgcgctgagagggaaagggggatattcaagcaatgcaagtgccgggtctgttgcaggtgttggcatggtggctgctgctgctgcagcagctgcagcatcagctgcatctgggaaaccagttaatgcacctgacctccctacttttgataaatggttgtccataagtacctctattctaactgcactgttgagtggaagaaatgtgctgagatgtcagtctgaaagcaagactcatacaagtcctactgagaagaatggccaacttcctgtaggatctaatgctattgagatcgcattatcgtgcttggaaagtaacaatgggctgaacatgaaattttcttcatcatggtgtcaaagggtgcttccagctgctaaggagatatacctgaaaggtttgcctgccttttaccccacaagaatgcatgaagtgcagctacagaaggcattgcggtcctttggctcaatggttaaaggaccagcagtcagggtattctcaaagaagctagaagatgagtgccgggcaatatgggaatctggaaggcagcaatgtgacgctgttagcctaactggcagaccatgtaagcaccgcaggcatggcgatttcttttcatcagatgcaatggagcaacattctagtggatatgtcttcctccatgcatgttcctgtggccggtcacgccgccttagagatgatccttttgactttcagacagccaacgtgtcttttaattgtttccaaaattgcgatgacctattacctacccttgcgcttccaagaggcagcaatgatggttcattttcagtatcctcttggtgcttggtgcgtcttggaggagcaaggtactacaagccaacaaaaggactccttcaaagtggatttagctccaaggagaggtatcttctaaggtggattgtatctgttcataaggggcaagtgagaaatgacattcgttctaatactattacttcatccgcaagatctggtatgaacccgcagactcccccaatagtcactggtgaagtaaaatctgccataacccaagtcacagcacaaattaaatatgcaaagcttgaaaattctggaaaacaagctgaagttgaaccagtgagcaacttaggcattaattttggtaaaggtctgccaaattttactatgaaaaagcccttttctgaagttgttgctggcaccacatcaaaagataccgagtttcctgctcttcagcagacaaggccaccaaaacctggtggtcgaaaagatgagcagcgtcaaatgaatatagtagaccagactaatggccgaggtcatgtggctgtcagccaagggtctgtagctgaaactgaatcggcaaaagcaagcagaaacaagagtagtgaaaatgctgatgggaagccctttttacagatagggagcaatatagtaccagtgattgctggaaatgagactagagaaactagtcagccagtacaacagtttgttgtgtatattggatttgagcatgagtgtccctatggtcatcgcttcttactgtcagagaaacatatgaaggagatcgagtcttcctgtttgcagtatcaaagacctcatctaaacaaagaagcagaagtcaagcatgcacaaaagttgctccaaaatgcatctggtttaatagcatctgcagtggacataaacagtgcacggaaaaacagtaagccattggaatcatcagggagaaacagccagcagcaatcactgcagctgaggattgatgcagagacctcacagccttctcctcggctttcagatccacagaatgccaaaaggtgggagcattattttcgaagcgttacaattgatgatggtggagaagcattttcactgatgaacagaaacttgccaatatatatgcgctgtccacattgcaaggtctcagaaaggaaggaacatcaagatgtaaagtttgctggtgttgtgtctcaacttcagcggattttcattgtgacacctgatttccctgttctgttggcaagctgcccacttgtacagtttgaggggtcatgtttgccatcaaatgtctctgatcatgatcgagaaggatcattcagtattgggtgccgagttatcctcccacctgagagctttcttactatgaggcttccctttgtctatggtgttgagacaaaggagggaagtaaatttcccctcaaatactttgagcgacaaccagaactcacagcatggcttgttgcaggcacagccctgcaaatcgtgtcggtaggggatgtcactgagaaagaaaccgttatgaagtgatagacatgtcatataaagctttactggctttagcatgttctagtcatatatcagtgatttgctatcggtgagatgataataacttctcttttctttcctgctttcttcccccacatagtttttcttagttctcctttgttttgaatactcaaggcattgaataggtctgttgatggttatattctgtctgaagttttcacttctactcctgaacttgtgctgctaagctgttgacacaactattgcttgctttcactgtgctggaagcattgtgaaatagaagttccgctgatatctgcctgacctggatggtgtatatagatgcaagcagagggggcaggcccacaggcaatcacgccgttcttgtctttgtacatgaaaggtgccaggaggttaagtttagctggttatgtaaaggtccgctttttgaggacctgtccagtggatcaatcccattcctagactggtttgccttgaggcttggagattttgtatacaggtatttccccgcagtctttggagaagaagatggatttgtgaagtgatagcacaaaaaaaaaagtcatcaggcgcttctggtggtagactggagactgggctggagaaatgttggagctggaaggaaacgcacggatggctcctgcttgacaagtgtaaaggcaggcggcaagcagggacgtcgagtcgaggccccggccggctccaagagcttctttctccaatccaatccaatccaatccagaaccctgactgcagtccatgataagaataccggactgatggatggaagtggatgtgaacaaacagctggttggctcagggcaggctccacaccaccaacggccggagcagatggacatggacgtctcacttaggttagctagcttcttttcctttgtgaccgtgatctgctactgcaggaaaccatgcatgattcacaagcagctagcagcctccagtcatattcctctttattttatttttttatataaaaaaaagaaagaggaaagcaggatgggagctgcacgtgatgttccgtgcttgcacgagcaggatggtgtggagcatgtgacgtgtaggctggagcttggcttggcttagaggttactagctagctcactctgaatgatctccattcttcaggaggagaaggcagatgcggcagaagcaccagcacactgaatgcaatcattcaatactcatctacagctagccaagatgtgagaagagagcaaggaagaattgtcaagcctcccacgtttccccaatcttctctcttcttttcatttccccacttttaatatgtttattttcctcttatttgcaacagctcctttaattatatagcaacattttttttaagatatagtagtatatatattaattttatcatatctctagtccgaataccacgcaaaagtagctagtaagtaggatgtaccaactagctacagcagtgtataataaagaaaaaagtcgttgggcggtcgatggagtaatgcacatcatatacgtacagcttggtacaaaacgaccgcaaattcacaaggcaaag

SEQ ID NO: 44522 - DNA, 5192 bp, Zea Mays
cctccgaaaggccttaaccccaaacgaaaccaccctccgcgacaaagccgactactataggctgtcgtagccaacaagcgcgacatcctccgcccccacctcgccgccggcgatggagccgccttcgcctccggcgacccactccgcggccgtccgtgtcctctcccgcactcctccgccgacctccccgaacccctcctccacgggcccggcggccccgtcgcccgcctcccgcgacggggtcgtcgccgtcggcttcgtgggcgccgcggggaccgcccgcctcgcggaccggatcctcgacgcccacgtcttctctcccggtggctcggcggggagcctcgcgggaagggtaaggtaccaccgcgacgccggcaagaggatggtgttccttcacctcacgccgccgccgcccgcgccgctcgaggcggtggcaggatgctgcgatgacggcgaactaccggagatgctcttcatgttctctgtctgccacgtaattatatttctgcaacaaggcttcagatttaacacacaaaccttaaagaagttccgactgctgcaatcttcaaagcatgctctcgctccatttgtcaagccattggtggcagctgcaatgcctgccagaactgttgcctctgacaccccaacaagagcaacccacagggcttcttccgtctcccctccaacacgccgaggaggtcacgctgggcgtcagtcctcggctatctcacttatgtctggaaccagttcaactccttctgtcttgccaggccaatgcattcctgtattgctctttgtctttgaggatgatgcggttgatgtttcaagtgctgcagcaagtcccgatgatataggtgatgcatcttcatcaaatcagggttctacccctgatggactaccaaaacagagcttagcttcaaaaagttctggttcagtaattatgctttcccgggcagcaaacaaatctgagggcagttcaggcaaaaaactgcattcgtcactggagggacagatccgtgtcttgatcaagaagtgcagggtgcttgcaggcatggagcctggacatattggcccaaggggcgtaagtaacatgagtcatcatttacccctgttctcactcgatacctcgagggtagttgcactgttggaacggtatattaataagaaacaggaaccactggacaccattgcaggactatttgaagattctttgtgctccaaatcgccattggatattctttcgctcgaaaacaactaccatccaacaaaccatgatgactttcagttgatcaaggattttatatttcggcagtctgatgcgctgagagggaaagggggatattcaagcaatgcaagtgccgggtctgttgcaggtgttggcatggtggctgctgctgctgcagcagctgcagcatcagctgcatctgggaaaccagttaatgcacctgacctccctacttttgataaatggttgtccataagtacctctattctaactgcactgttgagtggaagaaatgtgctgagatgtcagtctgaaagcaagactcatacaagtcctactgagaagaatggccaacttcctgtaggatctaatgctattgagatcgcattatcgtgcttggaaagtaacaatgggctgaacatgaaattttcttcatcatggtgtcaaagggtgcttccagctgctaaggagatatacctgaaaggtttgcctgccttttaccccacaagaatgcatgaagtgcagctacagaaggcattgcggtcctttggctcaatggttaaaggaccagcagtcagggtattctcaaagaagctagaagatgagtgccgggcaatatgggaatctggaaggcagcaatgtgacgctgttagcctaactggcagaccatgtaagcaccgcaggcatggcgatttcttttcatcagatgcaatggagcaacattctagtggatatgtcttcctccatgcatgttcctgtggccggtcacgccgccttagagatgatccttttgactttcagacagccaacgtgtcttttaattgtttccaaaattgcgatgacctattacctacccttgcgcttccaagaggcagcaatgatggttcattttcagtatcctcttggtgcttggtgcgtcttggaggagcaaggtactacaagccaacaaaaggactccttcaaagtggatttagctccaaggagaggtatcttctaaggtggattgtatctgttcataaggggcaagtgagaaatgacattcgttctaatactattacttcatccgcaagatctggtatgaacccgcagactcccccaatagtcactggtgaagtaaaatctgccataacccaagtcacagcacaaattaaatatgcaaagcttgaaaattctggaaaacaagctgaagttgaaccagtgagcaacttaggcattaattttggtaaaggtctgccaaattttactatgaaaaagcccttttctgaagttgttgctggcaccacatcaaaagataccgagtttcctgctcttcagcagacaaggccaccaaaacctggtggtcgaaaagatgagcagcgtcaaatgaatatagtagaccagactaatggccgaggtcatgtggctgtcagccaagggtctgtagctgaaactgaatcggcaaaagcaagcagaaacaagagtagtgaaaatgctgatgggaagccctttttacagatagggagcaatatagtaccagtgattgctggaaatgagactagagaaactagtcagccagtacaacagtttgttgtgtatattggatttgagcatgagtgtccctatggtcatcgcttcttactgtcagagaaacatatgaaggagatcgagtcttcctgtttgcagtatcaaagacctcatctaaacaaagaagcagaagtcaagcatgcacaaaagttgctccaaaatgcatctggtttaatagcatctgcagtggacataaacagtgcacggaaaaacagtaagccattggaatcatcagggagaaacagccagcagcaatcactgcagctgaggattgatgcagagacctcacagccttctcctcggctttcagatccacagaatgccaaaaggtgggagcattattttcgaagcgttacaattgatgatggtggagaagcattttcactgatgaacagaaacttgccaatatatatgcgctgtccacattgcaaggtctcagaaaggaaggaacatcaagatgtaaagtttgctggtgttgtgtctcaacttcagcggattttcattgtgacacctgatttccctgttctgttggcaagctgcccacttgtacagtttgaggggtcatgtttgccatcaaatgtctctgatcatgatcgagaaggatcattcagtattgggtgccgagttatcctcccacctgagagctttcttactatgaggcttccctttgtctatggtgttgagacaaaggagggaagtaaatttcccctcaaatactttgagcgacaaccagaactcacagcatggcttgttgcaggcacagccctgcaaatcgtgtcggtaggggatgtcactgagaaagaaaccgttatgaagtgatagacatgtcatataaagctttactggctttagcatgttctagtcatatatcagtgatttgctatcgcattgtgaaatagaagttccgctgatatctgcctgacctggatggtgtatatagatgcaagcagagggggcaggcccacaggcaatcacgccgttcttgtctttgtacatgaaaggtgccaggaggttaagtttagctggttatgtaaaggtccgctttttgaggacctgtccagtggatcaatcccattcctagactggtttgccttgaggcttggagattttgtagtaagactattagttcaattgagctgtttgtccagttgatgagttgttttattcctaggcttgttgagaaatctggccttggaatatagaacccagaagaaaggatttttctgaatgatgttgtagcaaacggttgcttgagatgcatgatctcctcaaataaacttgactgatctgcctgtatcccttattctttcttgtatataatgtatgcagtacaggtatttccccgcagtctttggagaagaagatggatttgtgaagtgatagcacaaaaaaaaaagtcatcaggcgcttctggtggtagactggagactgggctggagaaatgttggagctggaaggaaacgcacggatggctcctgcttgacaagtgtaaaggcaggcggcaagcagggacgtcgagtcgaggccccggccggctccaagagcttctttctccaatccaatccaatccaatccagaaccctgactgcagtccatggtattgtagcgctaccatttgtccacgtccgatgggtgaagtgaagcatgactgactgactgcatgggtttgagtgagttgcttggacaagtggctgtgtgtggtgctgctactgctacctaaccttttgcttggccgatagataagaataccggactgatggatggaagtggatgtgaacaaacagctggttggctcagggcaggctccacaccaccaacggccggagcagatggacatggacgtctcacttagaggaaagcaggatgggagctgcacgtgatgttccgtgcttgcacgagcaggatggtgtggagcatgtgacgtgtaggctggagcttggcttggcttagaggttactagctagctcactctgaatgatctccattcttcaggaggagaaggcagatgcggcagaagcaccagcacactgaatgcaatcattcaatactcatctacagctagccaagatgtgagaagagagcaaggaagaattgtcaagcctcccacgtttccccaatcttctctcttcttttcatttccccacttttaatatgtttattttcctcttatttgcaacagctcctttaattatatagcaacattttttttaagatatagtagtatatatattaattttatcatatctctagtccgaataccacgcaaaagtagctagtaagtaggatgtaccaactagctacagcagtgtataataaagaaaaaagtcgttgggcggtcgatggagtaatgcacatcatatacgtacagcttggtacaaaacgaccgcaaattcacaaggcaaag

SEQ ID NO: 44523 - DNA, 4972 bp, Zea Mays
cctccgaaaggccttaaccccaaacgaaaccaccctccgcgacaaagccgactactataggctgtcgtagccaacaagcgcgacatcctccgcccccacctcgccgccggcgatggagccgccttcgcctccggcgacccactccgcggccgtccgtgtcctctcccgcactcctccgccgacctccccgaacccctcctccacgggcccggcggccccgtcgcccgcctcccgcgacggggtcgtcgccgtcggcttcgtgggcgccgcggggaccgcccgcctcgcggaccggatcctcgacgcccacgtcttctctcccggtggctcggcggggagcctcgcgggaagggtaaggtaccaccgcgacgccggcaagaggatggtgttccttcacctcacgccgccgccgcccgcgccgctcgaggcggtggcaggatgctgcgatgacggcgaactaccggagatgctcttcatgttctctgtctgccacgtaattatatttctgcaacaaggcttcagatttaacacacaaaccttaaagaagttccgactgctgcaatcttcaaagcatgctctcgctccatttgtcaagccattggtggcagctgcaatgcctgccagaactgttgcctctgacaccccaacaagagcaacccacagggcttcttccgtctcccctccaacacgccgaggaggtcacgctgggcgtcagtcctcggctatctcacttatgtctggaaccagttcaactccttctgtcttgccaggccaatgcattcctgtattgctctttgtctttgaggatgatgcggttgatgtttcaagtgctgcagcaagtcccgatgatataggtgatgcatcttcatcaaatcagggttctacccctgatggactaccaaaacagagcttagcttcaaaaagttctggttcagtaattatgctttcccgggcagcaaacaaatctgagggcagttcaggcaaaaaactgcattcgtcactggagggacagatccgtgtcttgatcaagaagtgcagggtgcttgcaggcatggagcctggacatattggcccaaggggcgtaagtaacatgagtcatcatttacccctgttctcactcgatacctcgagggtagttgcactgttggaacggtatattaataagaaacaggaaccactggacaccattgcaggactatttgaagattctttgtgctccaaatcgccattggatattctttcgctcgaaaacaactaccatccaacaaaccatgatgactttcagttgatcaaggattttatatttcggcagtctgatgcgctgagagggaaagggggatattcaagcaatgcaagtgccgggtctgttgcaggtgttggcatggtggctgctgctgctgcagcagctgcagcatcagctgcatctgggaaaccagttaatgcacctgacctccctacttttgataaatggttgtccataagtacctctattctaactgcactgttgagtggaagaaatgtgctgagatgtcagtctgaaagcaagactcatacaagtcctactgagaagaatggccaacttcctgtaggatctaatgctattgagatcgcattatcgtgcttggaaagtaacaatgggctgaacatgaaattttcttcatcatggtgtcaaagggtgcttccagctgctaaggagatatacctgaaaggtttgcctgccttttaccccacaagaatgcatgaagtgcagctacagaaggcattgcggtcctttggctcaatggttaaaggaccagcagtcagggtattctcaaagaagctagaagatgagtgccgggcaatatgggaatctggaaggcagcaatgtgacgctgttagcctaactggcagaccatgtaagcaccgcaggcatggcgatttcttttcatcagatgcaatggagcaacattctagtggatatgtcttcctccatgcatgttcctgtggccggtcacgccgccttagagatgatccttttgactttcagacagccaacgtgtcttttaattgtttccaaaattgcgatgacctattacctacccttgcgcttccaagaggcagcaatgatggttcattttcagtatcctcttggtgcttggtgcgtcttggaggagcaaggtactacaagccaacaaaaggactccttcaaagtggatttagctccaaggagaggtatcttctaaggtggattgtatctgttcataaggggcaagtgagaaatgacattcgttctaatactattacttcatccgcaagatctggtatgaacccgcagactcccccaatagtcactggtgaagtaaaatctgccataacccaagtcacagcacaaattaaatatgcaaagcttgaaaattctggaaaacaagctgaagttgaaccagtgagcaacttaggcattaattttggtaaaggtctgccaaattttactatgaaaaagcccttttctgaagttgttgctggcaccacatcaaaagataccgagtttcctgctcttcagcagacaaggccaccaaaacctggtggtcgaaaagatgagcagcgtcaaatgaatatagtagaccagactaatggccgaggtcatgtggctgtcagccaagggtctgtagctgaaactgaatcggcaaaagcaagcagaaacaagagtagtgaaaatgctgatgggaagccctttttacagatagggagcaatatagtaccagtgattgctggaaatgagactagagaaactagtcagccagtacaacagtttgttgtgtatattggatttgagcatgagtgtccctatggtcatcgcttcttactgtcagagaaacatatgaaggagatcgagtcttcctgtttgcagtatcaaagacctcatctaaacaaagaagcagaagtcaagcatgcacaaaagttgctccaaaatgcatctggtttaatagcatctgcagtggacataaacagtgcacggaaaaacagtaagccattggaatcatcagggagaaacagccagcagcaatcactgcagctgaggattgatgcagagacctcacagccttctcctcggctttcagatccacagaatgccaaaagaaaggaaggaacatcaagatgtaaagtttgctggtgttgtgtctcaacttcagcggattttcattgtgacacctgatttccctgttctgttggcaagctgcccacttgtacagtttgaggggtcatgtttgccatcaaatgtctctgatcatgatcgagaaggatcattcagtattgggtgccgagttatcctcccacctgagagctttcttactatgaggcttccctttgtctatggtgttgagacaaaggagggaagtaaatttcccctcaaatactttgagcgacaaccagaactcacagcatggcttgttgcaggcacagccctgcaaatcgtgtcggtaggggatgtcactgagaaagaaaccgttatgaagtgatagacatgtcatataaagctttactggctttagcatgttctagtcatatatcagtgatttgctatcggcattgaataggtctgttgatggttatattctgtctgaagttttcacttctactcctgaacttgtgctgctaagctgttgacacaactattgcttgctttcactgtgctggaagcattgtgaaatagaagttccgctgatatctgcctgacctggatggtgtatatagatgcaagcagagggggcaggcccacaggcaatcacgccgttcttgtctttgtacatgaaaggtgccaggaggttaagtttagctggttatgtaaaggtccgctttttgaggacctgtccagtggatcaatcccattcctagactggtttgccttgaggcttggagattttgtagtaagactattagttcaattgagctgtttgtccagttgatgagttgttttattcctaggcttgttgagaaatctggccttggaatatagaacccagaagaaaggatttttctgaatgatgttgtagcaaacggttgcttgagatgcatgatctcctcaaataaacttgactgatctgcctgtatcccttattctttcttgtatataatgtatgcagtacaggtatttccccgcagtctttggagaagaagatggatttgtgaagtgatagcacaaaaaaaaaagtcatcaggcgcttctggtggtagactggagactgggctggagaaatgttggagctggaaggaaacgcacggatggctcctgcttgacaagtgtaaaggcaggcggcaagcagggacgtcgagtcgagaatggccgccgctggactggactggaggcgtgacacgtttgggtttatactcatgcaggccccggccggctccaagagcttctttctccaatccaatccaatccaatccagaaccctgactgcagtccatgataagaataccggactgatggatggaagtggatgtgaacaaacagctggttggctcagggcaggctccacaccaccaacggccggagcagatggacatggacgtctcacttaggaggagaaggcagatgcggcagaagcaccagcacactgaatgcaatcattcaatactcatctacagctagccaagatgtgagaagagagcaaggaagaattgtcaagcctcccacgtttccccaatcttctctcttcttttcatttccccacttttaatatgtttattttcctcttatttgcaacagctcctttaattatatagcaacattttttttaagatatagtagtatatatattaattttatcatatctctagtccgaataccacgcaaaagtagctagtaagtaggatgtaccaactagctacagcagtgtataataaagaaaaaagtcgttgggcggtcgatggagtaatgcacatcatatacgtacagcttggtacaaaacgaccgcaaattcacaaggcaaag

SEQ ID NO: 44524 - DNA, 4959 bp, Zea Mays
cctccgaaaggccttaaccccaaacgaaaccaccctccgcgacaaagccgactactataggctgtcgtagccaacaagcgcgacatcctccgcccccacctcgccgccggcgatggagccgccttcgcctccggcgacccactccgcggccgtccgtgtcctctcccgcactcctccgccgacctccccgaacccctcctccacgggcccggcggccccgtcgcccgcctcccgcgacggggtcgtcgccgtcggcttcgtgggcgccgcggggaccgcccgcctcgcggaccggatcctcgacgcccacgtcttctctcccggtggctcggcggggagcctcgcgggaagggtaaggtaccaccgcgacgccggcaagaggatggtgttccttcacctcacgccgccgccgcccgcgccgctcgaggcggtggcaggatgctgcgatgacggcgaactaccggagatgctcttcatgttctctgtctgccacgtaattatatttctgcaacaaggcttcagatttaacacacaaaccttaaagaagttccgactgctgcaatcttcaaagcatgctctcgctccatttgtcaagccattggtggcagctgcaatgcctgccagaactgttgcctctgacaccccaacaagagcaacccacagggcttcttccgtctcccctccaacacgccgaggaggtcacgctgggcgtcagtcctcggctatctcacttatgtctggaaccagttcaactccttctgtcttgccaggccaatgcattcctgtattgctctttgtctttgaggatgatgcggttgatgtttcaagtgctgcagcaagtcccgatgatataggtgatgcatcttcatcaaatcagggttctacccctgatggactaccaaaacagagcttagcttcaaaaagttctggttcagtaattatgctttcccgggcagcaaacaaatctgagggcagttcaggcaaaaaactgcattcgtcactggagggacagatccgtgtcttgatcaagaagtgcagggtgcttgcaggcatggagcctggacatattggcccaaggggcgtaagtaacatgagtcatcatttacccctgttctcactcgatacctcgagggtagttgcactgttggaacggtatattaataagaaacaggaaccactggacaccattgcaggactatttgaagattctttgtgctccaaatcgccattggatattctttcgctcgaaaacaactaccatccaacaaaccatgatgactttcagttgatcaaggattttatatttcggcagtctgatgcgctgagagggaaagggggatattcaagcaatgcaagtgccgggtctgttgcaggtgttggcatggtggctgctgctgctgcagcagctgcagcatcagctgcatctgggaaaccagttaatgcacctgacctccctacttttgataaatggttgtccataagtacctctattctaactgcactgttgagtggaagaaatgtgctgagatgtcagtctgaaagcaagactcatacaagtcctactgagaagaatggccaacttcctgtaggatctaatgctattgagatcgcattatcgtgcttggaaagtaacaatgggctgaacatgaaattttcttcatcatggtgtcaaagggtgcttccagctgctaaggagatatacctgaaaggtttgcctgccttttaccccacaagaatgcatgaagtgcagctacagaaggcattgcggtcctttggctcaatggttaaaggaccagcagtcagggtattctcaaagaagctagaagatgagtgccgggcaatatgggaatctggaaggcagcaatgtgacgctgttagcctaactggcagaccatgtaagcaccgcaggcatggcgatttcttttcatcagatgcaatggagcaacattctagtggatatgtcttcctccatgcatgttcctgtggccggtcacgccgccttagagatgatccttttgactttcagacagccaacgtgtcttttaattgtttccaaaattgcgatgacctattacctacccttgcgcttccaagaggcagcaatgatggttcattttcagtatcctcttggtgcttggtgcgtcttggaggagcaaggtactacaagccaacaaaaggactccttcaaagtggatttagctccaaggagaggtatcttctaaggtggattgtatctgttcataaggggcaagtgagaaatgacattcgttctaatactattacttcatccgcaagatctggtatgaacccgcagactcccccaatagtcactggtgaagtaaaatctgccataacccaagtcacagcacaaattaaatatgcaaagcttgaaaattctggaaaacaagctgaagttgaaccagtgagcaacttaggcattaattttggtaaaggtctgccaaattttactatgaaaaagcccttttctgaagttgttgctggcaccacatcaaaagataccgagtttcctgctcttcagcagacaaggccaccaaaacctggtggtcgaaaagatgagcagcgtcaaatgaatatagtagaccagactaatggccgaggtcatgtggctgtcagccaagggtctgtagctgaaactgaatcggcaaaagcaagcagaaacaagagtagtgaaaatgctgatgggaagccctttttacagatagggagcaatatagtaccagtgattgctggaaatgagactagagaaactagtcagccagtacaacagtttgttgtgtatattggatttgagcatgagtgtccctatggtcatcgcttcttactgtcagagaaacatatgaaggagatcgagtcttcctgtttgcagtatcaaagacctcatctaaacaaagaagcagaagtcaagcatgcacaaaagttgctccaaaatgcatctggtttaatagcatctgcagtggacataaacagtgcacggaaaaacagtaagccattggaatcatcagggagaaacagccagcagcaatcactgcagctgaggattgatgcagagacctcacagccttctcctcggctttcagatccacagaatgccaaaaggtgggagcattattttcgaagcgttacaattgatgatggtggagaagcattttcactgatgaacagaaacttgccaatatatatgcgctgtccacattgcaaggtctcagaaaggaaggaacatcaagatgtaaagtttgctggtgttgtgtctcaacttcagcggattttcattgtgacacctgatttccctgttctgttggcaagctgcccacttgtacagtttgaggggtcatgtttgccatcaaatgtctctgatcatgatcgagaaggatcattcagtattgggtgccgagttatcctcccacctgagagctttcttactatgaggcttccctttgtctatggtgttgagacaaaggagggaagtaaatttcccctcaaatactttgagcgacaaccagaactcacagcatggcttgttgcaggcacagccctgcaaatcgtgtcggtaggggatgtcactgagaaagaaaccgttatgaagtgatagacatgtcatataaagctttactggctttagcatgttctagtcatatatcagtgatttgctatcggtgagatgataataacttctcttttctttcctgctttcttcccccacatagtttttcttagttctcctttgttttgaatactcaaggcattgaataggtctgttgatggttatattctgtctgaagttttcacttctactcctgaacttgtgctgctaagctgttgacacaactattgcttgctttcactgtgctggaagcattgtgaaatagaagttccgctgatatctgcctgacctggatggtgtatatagatgcaagcagagggggcaggcccacaggcaatcacgccgttcttgtctttgtacatgaaaggtgccaggaggttaagtttagctggttatgtaaagtacaggtatttccccgcagtctttggagaagaagatggatttgtgaagtgatagcacaaaaaaaaaagtcatcaggcgcttctggtggtagactggagactgggctggagaaatgttggagctggaaggaaacgcacggatggctcctgcttgacaagtgtaaaggcaggcggcaagcagggacgtcgagtcgaggccccggccggctccaagagcttctttctccaatccaatccaatccaatccagaaccctgactgcagtccatggtattgtagcgctaccatttgtccacgtccgatgggtgaagtgaagcatgactgactgactgcatgggtttgagtgagttgcttggacaagtggctgtgtgtggtgctgctactgctacctaaccttttgcttggccgatagataagaataccggactgatggatggaagtggatgtgaacaaacagctggttggctcagggcaggctccacaccaccaacggccggagcagatggacatggacgtctcacttaggaggagaaggcagatgcggcagaagcaccagcacactgaatgcaatcattcaatactcatctacagctagccaagatgtgagaagagagcaaggaagaattgtcaagcctcccacgtttccccaatcttctctcttcttttcatttccccacttttaatatgtttattttcctcttatttgcaacagctcctttaattatatagcaacattttttttaagatatagtagtatatatattaattttatcatatctctagtccgaataccacgcaaaagtagctagtaagtaggatgtaccaactagctacagcagtgtataataaagaaaaaagtcgttgggcggtcgatggagtaatgcacatcatatacgtacagcttggtacaaaacgaccgcaaattcacaaggcaaag

SEQ ID NO: 44525 - DNA, 5062 bp, Zea Mays
cgcagcctgtcctccgaaaggccttaaccccaaacgaaaccaccctccgcgacaaagccgactactataggctgtcgtagccaacaagcgcgacatcctccgcccccacctcgccgccggcgatggagccgccttcgcctccggcgacccactccgcggccgtccgtgtcctctcccgcactcctccgccgacctccccgaacccctcctccacgggcccggcggccccgtcgcccgcctcccgcgacggggtcgtcgccgtcggcttcgtgggcgccgcggggaccgcccgcctcgcggaccggatcctcgacgcccacgtcttctctcccggtggctcggcggggagcctcgcgggaagggtaaggtaccaccgcgacgccggcaagaggatggtgttccttcacctcacgccgccgccgcccgcgccgctcgaggcggtggcaggatgctgcgatgacggcgaactaccggagatgctcttcatgttctctgtctgccacgtaattatatttctgcaacaaggcttcagatttaacacacaaaccttaaagaagttccgactgctgcaatcttcaaagcatgctctcgctccatttgtcaagccattggtggcagctgcaatgcctgccagaactgttgcctctgacaccccaacaagagcaacccacagggcttcttccgtctcccctccaacacgccgaggaggtcacgctgggcgtcagtcctcggctatctcacttatgtctggaaccagttcaactccttctgtcttgccaggccaatgcattcctgtattgctctttgtctttgaggatgatgcggttgatgtttcaagtgctgcagcaagtcccgatgatataggtgatgcatcttcatcaaatcagggttctacccctgatggactaccaaaacagagcttagcttcaaaaagttctggttcagtaattatgctttcccgggcagcaaacaaatctgagggcagttcaggcaaaaaactgcattcgtcactggagggacagatccgtgtcttgatcaagaagtgcagggtgcttgcaggcatggagcctggacatattggcccaaggggcgtaagtaacatgagtcatcatttacccctgttctcactcgatacctcgagggtagttgcactgttggaacggtatattaataagaaacaggaaccactggacaccattgcaggactatttgaagattctttgtgctccaaatcgccattggatattctttcgctcgaaaacaactaccatccaacaaaccatgatgactttcagttgatcaaggattttatatttcggcagtctgatgcgctgagagggaaagggggatattcaagcaatgcaagtgccgggtctgttgcaggtgttggcatggtggctgctgctgctgcagcagctgcagcatcagctgcatctgggaaaccagttaatgcacctgacctccctacttttgataaatggttgtccataagtacctctattctaactgcactgttgagtggaagaaatgtgctgagatgtcagtctgaaagcaagactcatacaagtcctactgagaagaatggccaacttcctgtaggatctaatgctattgagatcgcattatcgtgcttggaaagtaacaatgggctgaacatgaaattttcttcatcatggtgtcaaagggtgcttccagctgctaaggagatatacctgaaaggtttgcctgccttttaccccacaagaatgcatgaagtgcagctacagaaggcattgcggtcctttggctcaatggttaaaggaccagcagtcagggtattctcaaagaagctagaagatgagtgccgggcaatatgggaatctggaaggcagcaatgtgacgctgttagcctaactggcagaccatgtaagcaccgcaggcatggcgatttcttttcatcagatgcaatggagcaacattctagtggatatgtcttcctccatgcatgttcctgtggccggtcacgccgccttagagatgatccttttgactttcagacagccaacgtgtcttttaattgtttccaaaattgcgatgacctattacctacccttgcgcttccaagaggcagcaatgatggttcattttcagtatcctcttggtgcttggtgcgtcttggaggagcaaggtactacaagccaacaaaaggactccttcaaagtggatttagctccaaggagaggtatcttctaaggtggattgtatctgttcataaggggcaagtgagaaatgacattcgttctaatactattacttcatccgcaagatctggtatgaacccgcagactcccccaatagtcactggtgaagtaaaatctgccataacccaagtcacagcacaaattaaatatgcaaagcttgaaaattctggaaaacaagctgaagttgaaccagtgagcaacttaggcattaattttggtaaaggtctgccaaattttactatgaaaaagcccttttctgaagttgttgctggcaccacatcaaaagataccgagtttcctgctcttcagcagacaaggccaccaaaacctggtggtcgaaaagatgagcagcgtcaaatgaatatagtagaccagactaatggccgaggtcatgtggctgtcagccaagggtctgtagctgaaactgaatcggcaaaagcaagcagaaacaagagtagtgaaaatgctgatgggaagccctttttacagatagggagcaatatagtaccagtgattgctggaaatgagactagagaaactagtcagccagtacaacagtttgttgtgtatattggatttgagcatgagtgtccctatggtcatcgcttcttactgtcagagaaacatatgaaggagatcgagtcttcctgtttgcagtatcaaagacctcatctaaacaaagaagcagaagtcaagcatgcacaaaagttgctccaaaatgcatctggtttaatagcatctgcagtggacataaacagtgcacggaaaaacagtaagccattggaatcatcagggagaaacagccagcagcaatcactgcagctgaggattgatgcagagacctcacagccttctcctcggctttcagatccacagaatgccaaaaggtgggagcattattttcgaagcgttacaattgatgatggtggagaagcattttcactgatgaacagaaacttgccaatatatatgcgctgtccacattgcaaggtctcagaaaggaaggaacatcaagatgtaaagtttgctggtgttgtgtctcaacttcagcggattttcattgtgacacctgatttccctgttctgttggcaagctgcccacttgtacagtttgaggggtcatgtttgccatcaaatgtctctgatcatgatcgagaaggatcattcagtattgggtgccgagttatcctcccacctgagagctttcttactatgaggcttccctttgtctatggtgttgagacaaaggagggaagtaaatttcccctcaaatactttgagcgacaaccagaactcacagcatggcttgttgcaggcacagccctgcaaatcgtgtcggtaggggatgtcactgagaaagaaaccgttatgaagtgatagacatgtcatataaagctttactggctttagcatgttctagtcatatatcagtgatttgctatcgcattgtgaaatagaagttccgctgatatctgcctgacctggatggtgtatatagatgcaagcagagggggcaggcccacaggcaatcacgccgttcttgtctttgtacatgaaaggtgccaggaggttaagtttagctggttatgtaaaggtccgctttttgaggacctgtccagtggatcaatcccattcctagactggtttgccttgaggcttggagattttgtagtaagactattagttcaattgagctgtttgtccagttgatgagttgttttattcctaggcttgttgagaaatctggccttggaatatagaacccagaagaaaggatttttctgaatgatgttgtagcaaacggttgcttgagatgcatgatctcctcaaataaacttgactgatctgcctgtatcccttattctttcttgtatataatgtatgcagtacaggtatttccccgcagtctttggagaagaagatggatttgtgaagtgatagcacaaaaaaaaaagtcatcaggcgcttctggtggtagactggagactgggctggagaaatgttggagctggaaggaaacgcacggatggctcctgcttgacaagtgtaaaggcaggcggcaagcagggacgtcgagtcgaggccccggccggctccaagagcttctttctccaatccaatccaatccaatccagaaccctgactgcagtccatggtattgtagcgctaccatttgtccacgtccgatgggtgaagtgaagcatgactgactgactgcatgggtttgagtgagttgcttggacaagtggctgtgtgtggtgctgctactgctacctaaccttttgcttggccgatagataagaataccggactgatggatggaagtggatgtgaacaaacagctggttggctcagggcaggctccacaccaccaacggccggagcagatggacatggacgtctcacttaggaggagaaggcagatgcggcagaagcaccagcacactgaatgcaatcattcaatactcatctacagctagccaagatgtgagaagagagcaaggaagaattgtcaagcctcccacgtttccccaatcttctctcttcttttcatttccccacttttaatatgtttattttcctcttatttgcaacagctcctttaattatatagcaacattttttttaagatatagtagtatatatattaattttatcatatctctagtccgaataccacgcaaaagtagctagtaagtaggatgtaccaactagctacagcagtgtataataaagaaaaaagtcgttgggcggtcgatggagtaatgcacatcatatacgtacagcttggtacaaaacgaccgcaaattcacaaggcaaag

SEQ ID NO: 44526 - DNA, 4997 bp, Zea Mays
cgcagcctgtcctccgaaaggccttaaccccaaacgaaaccaccctccgcgacaaagccgactactataggctgtcgtagccaacaagcgcgacatcctccgcccccacctcgccgccggcgatggagccgccttcgcctccggcgacccactccgcggccgtccgtgtcctctcccgcactcctccgccgacctccccgaacccctcctccacgggcccggcggccccgtcgcccgcctcccgcgacggggtcgtcgccgtcggcttcgtgggcgccgcggggaccgcccgcctcgcggaccggatcctcgacgcccacgtcttctctcccggtggctcggcggggagcctcgcgggaagggtaaggtaccaccgcgacgccggcaagaggatggtgttccttcacctcacgccgccgccgcccgcgccgctcgaggcggtggcaggatgctgcgatgacggcgaactaccggagatgctcttcatgttctctgtctgccacgtaattatatttctgcaacaaggcttcagatttaacacacaaaccttaaagaagttccgactgctgcaatcttcaaagcatgctctcgctccatttgtcaagccattggtggcagctgcaatgcctgccagaactgttgcctctgacaccccaacaagagcaacccacagggcttcttccgtctcccctccaacacgccgaggaggtcacgctgggcgtcagtcctcggctatctcacttatgtctggaaccagttcaactccttctgtcttgccaggccaatgcattcctgtattgctctttgtctttgaggatgatgcggttgatgtttcaagtgctgcagcaagtcccgatgatataggtgatgcatcttcatcaaatcagggttctacccctgatggactaccaaaacagagcttagcttcaaaaagttctggttcagtaattatgctttcccgggcagcaaacaaatctgagggcagttcaggcaaaaaactgcattcgtcactggagggacagatccgtgtcttgatcaagaagtgcagggtgcttgcaggcatggagcctggacatattggcccaaggggcgtaagtaacatgagtcatcatttacccctgttctcactcgatacctcgagggtagttgcactgttggaacggtatattaataagaaacaggaaccactggacaccattgcaggactatttgaagattctttgtgctccaaatcgccattggatattctttcgctcgaaaacaactaccatccaacaaaccatgatgactttcagttgatcaaggattttatatttcggcagtctgatgcgctgagagggaaagggggatattcaagcaatgcaagtgccgggtctgttgcaggtgttggcatggtggctgctgctgctgcagcagctgcagcatcagctgcatctgggaaaccagttaatgcacctgacctccctacttttgataaatggttgtccataagtacctctattctaactgcactgttgagtggaagaaatgtgctgagatgtcagtctgaaagcaagactcatacaagtcctactgagaagaatggccaacttcctgtaggatctaatgctattgagatcgcattatcgtgcttggaaagtaacaatgggctgaacatgaaattttcttcatcatggtgtcaaagggtgcttccagctgctaaggagatatacctgaaaggtttgcctgccttttaccccacaagaatgcatgaagtgcagctacagaaggcattgcggtcctttggctcaatggttaaaggaccagcagtcagggtattctcaaagaagctagaagatgagtgccgggcaatatgggaatctggaaggcagcaatgtgacgctgttagcctaactggcagaccatgtaagcaccgcaggcatggcgatttcttttcatcagatgcaatggagcaacattctagtggatatgtcttcctccatgcatgttcctgtggccggtcacgccgccttagagatgatccttttgactttcagacagccaacgtgtcttttaattgtttccaaaattgcgatgacctattacctacccttgcgcttccaagaggcagcaatgatggttcattttcagtatcctcttggtgcttggtgcgtcttggaggagcaaggtactacaagccaacaaaaggactccttcaaagtggatttagctccaaggagaggtatcttctaaggtggattgtatctgttcataaggggcaagtgagaaatgacattcgttctaatactattacttcatccgcaagatctggtatgaacccgcagactcccccaatagtcactggtgaagtaaaatctgccataacccaagtcacagcacaaattaaatatgcaaagcttgaaaattctggaaaacaagctgaagttgaaccagtgagcaacttaggcattaattttggtaaaggtctgccaaattttactatgaaaaagcccttttctgaagttgttgctggcaccacatcaaaagataccgagtttcctgctcttcagcagacaaggccaccaaaacctggtggtcgaaaagatgagcagcgtcaaatgaatatagtagaccagactaatggccgaggtcatgtggctgtcagccaagggtctgtagctgaaactgaatcggcaaaagcaagcagaaacaagagtagtgaaaatgctgatgggaagccctttttacagatagggagcaatatagtaccagtgattgctggaaatgagactagagaaactagtcagccagtacaacagtttgttgtgtatattggatttgagcatgagtgtccctatggtcatcgcttcttactgtcagagaaacatatgaaggagatcgagtcttcctgtttgcagtatcaaagacctcatctaaacaaagaagcagaagtcaagcatgcacaaaagttgctccaaaatgcatctggtttaatagcatctgcagtggacataaacagtgcacggaaaaacagtaagccattggaatcatcagggagaaacagccagcagcaatcactgcagctgaggattgatgcagagacctcacagccttctcctcggctttcagatccacagaatgccaaaagaaaggaaggaacatcaagatgtaaagtttgctggtgttgtgtctcaacttcagcggattttcattgtgacacctgatttccctgttctgttggcaagctgcccacttgtacagtttgaggggtcatgtttgccatcaaatgtctctgatcatgatcgagaaggatcattcagtattgggtgccgagttatcctcccacctgagagctttcttactatgaggcttccctttgtctatggtgttgagacaaaggagggaagtaaatttcccctcaaatactttgagcgacaaccagaactcacagcatggcttgttgcaggcacagccctgcaaatcgtgtcggtaggggatgtcactgagaaagaaaccgttatgaagtgatagacatgtcatataaagctttactggctttagcatgttctagtcatatatcagtgatttgctatcggcattgaataggtctgttgatggttatattctgtctgaagttttcacttctactcctgaacttgtgctgctaagctgttgacacaactattgcttgctttcactgtgctggaagcattgtgaaatagaagttccgctgatatctgcctgacctggatggtgtatatagatgcaagcagagggggcaggcccacaggcaatcacgccgttcttgtctttgtacatgaaaggtgccaggaggttaagtttagctggttatgtaaaggtccgctttttgaggacctgtccagtggatcaatcccattcctagactggtttgccttgaggcttggagattttgtagtaagactattagttcaattgagctgtttgtccagttgatgagttgttttattcctaggcttgttgagaaatctggccttggaatatagaacccagaagaaaggatttttctgaatgatgttgtagcaaacggttgcttgagatgcatgatctcctcaaataaacttgactgatctgcctgtatcccttattctttcttgtatataatgtatgcagtacaggtatttccccgcagtctttggagaagaagatggatttgtgaagtgatagcacaaaaaaaaaagtcatcaggcgcttctggtggtagactggagactgggctggagaaatgttggagctggaaggaaacgcacggatggctcctgcttgacaagtgtaaaggcaggcggcaagcagggacgtcgagtcgaggccccggccggctccaagagcttctttctccaatccaatccaatccaatccagaaccctgactgcagtccatggtattgtagcgctaccatttgtccacgtccgatgggtgaagtgaagcatgactgactgactgcatgggtttgaataagaataccggactgatggatggaagtggatgtgaacaaacagctggttggctcagggcaggctccacaccaccaacggccggagcagatggacatggacgtctcacttaggaggagaaggcagatgcggcagaagcaccagcacactgaatgcaatcattcaatactcatctacagctagccaagatgtgagaagagagcaaggaagaattgtcaagcctcccacgtttccccaatcttctctcttcttttcatttccccacttttaatatgtttattttcctcttatttgcaacagctcctttaattatatagcaacattttttttaagatatagtagtatatatattaattttatcatatctctagtccgaataccacgcaaaagtagctagtaagtaggatgtaccaactagctacagcagtgtataataaagaaaaaagtcgttgggcggtcgatggagtaatgcacatcatatacgtacagcttggtacaaaacgaccgcaaattcacaaggcaaag

SEQ ID NO: 44527 - DNA, 5073 bp, Zea Mays
cgcagcctgtcctccgaaaggccttaaccccaaacgaaaccaccctccgcgacaaagccgactactataggctgtcgtagccaacaagcgcgacatcctccgcccccacctcgccgccggcgatggagccgccttcgcctccggcgacccactccgcggccgtccgtgtcctctcccgcactcctccgccgacctccccgaacccctcctccacgggcccggcggccccgtcgcccgcctcccgcgacggggtcgtcgccgtcggcttcgtgggcgccgcggggaccgcccgcctcgcggaccggatcctcgacgcccacgtcttctctcccggtggctcggcggggagcctcgcgggaagggtaaggtaccaccgcgacgccggcaagaggatggtgttccttcacctcacgccgccgccgcccgcgccgctcgaggcggtggcaggatgctgcgatgacggcgaactaccggagatgctcttcatgttctctgtctgccacgtaattatatttctgcaacaaggcttcagatttaacacacaaaccttaaagaagttccgactgctgcaatcttcaaagcatgctctcgctccatttgtcaagccattggtggcagctgcaatgcctgccagaactgttgcctctgacaccccaacaagagcaacccacagggcttcttccgtctcccctccaacacgccgaggaggtcacgctgggcgtcagtcctcggctatctcacttatgtctggaaccagttcaactccttctgtcttgccaggccaatgcattcctgtattgctctttgtctttgaggatgatgcggttgatgtttcaagtgctgcagcaagtcccgatgatataggtgatgcatcttcatcaaatcagggttctacccctgatggactaccaaaacagagcttagcttcaaaaagttctggttcagtaattatgctttcccgggcagcaaacaaatctgagggcagttcaggcaaaaaactgcattcgtcactggagggacagatccgtgtcttgatcaagaagtgcagggtgcttgcaggcatggagcctggacatattggcccaaggggcgtaagtaacatgagtcatcatttacccctgttctcactcgatacctcgagggtagttgcactgttggaacggtatattaataagaaacaggaaccactggacaccattgcaggactatttgaagattctttgtgctccaaatcgccattggatattctttcgctcgaaaacaactaccatccaacaaaccatgatgactttcagttgatcaaggattttatatttcggcagtctgatgcgctgagagggaaagggggatattcaagcaatgcaagtgccgggtctgttgcaggtgttggcatggtggctgctgctgctgcagcagctgcagcatcagctgcatctgggaaaccagttaatgcacctgacctccctacttttgataaatggttgtccataagtacctctattctaactgcactgttgagtggaagaaatgtgctgagatgtcagtctgaaagcaagactcatacaagtcctactgagaagaatggccaacttcctgtaggatctaatgctattgagatcgcattatcgtgcttggaaagtaacaatgggctgaacatgaaattttcttcatcatggtgtcaaagggtgcttccagctgctaaggagatatacctgaaaggtttgcctgccttttaccccacaagaatgcatgaagtgcagctacagaaggcattgcggtcctttggctcaatggttaaaggaccagcagtcagggtattctcaaagaagctagaagatgagtgccgggcaatatgggaatctggaaggcagcaatgtgacgctgttagcctaactggcagaccatgtaagcaccgcaggcatggcgatttcttttcatcagatgcaatggagcaacattctagtggatatgtcttcctccatgcatgttcctgtggccggtcacgccgccttagagatgatccttttgactttcagacagccaacgtgtcttttaattgtttccaaaattgcgatgacctattacctacccttgcgcttccaagaggcagcaatgatggttcattttcagtatcctcttggtgcttggtgcgtcttggaggagcaaggtactacaagccaacaaaaggactccttcaaagtggatttagctccaaggagaggtatcttctaaggtggattgtatctgttcataaggggcaagtgagaaatgacattcgttctaatactattacttcatccgcaagatctggtatgaacccgcagactcccccaatagtcactggtgaagtaaaatctgccataacccaagtcacagcacaaattaaatatgcaaagcttgaaaattctggaaaacaagctgaagttgaaccagtgagcaacttaggcattaattttggtaaaggtctgccaaattttactatgaaaaagcccttttctgaagttgttgctggcaccacatcaaaagataccgagtttcctgctcttcagcagacaaggccaccaaaacctggtggtcgaaaagatgagcagcgtcaaatgaatatagtagaccagactaatggccgaggtcatgtggctgtcagccaagggtctgtagctgaaactgaatcggcaaaagcaagcagaaacaagagtagtgaaaatgctgatgggaagccctttttacagatagggagcaatatagtaccagtgattgctggaaatgagactagagaaactagtcagccagtacaacagtttgttgtgtatattggatttgagcatgagtgtccctatggtcatcgcttcttactgtcagagaaacatatgaaggagatcgagtcttcctgtttgcagtatcaaagacctcatctaaacaaagaagcagaagtcaagcatgcacaaaagttgctccaaaatgcatctggtttaatagcatctgcagtggacataaacagtgcacggaaaaacagtaagccattggaatcatcagggagaaacagccagcagcaatcactgcagctgaggattgatgcagagacctcacagccttctcctcggctttcagatccacagaatgccaaaaggtctcagaaaggaaggaacatcaagatgtaaagtttgctggtgttgtgtctcaacttcagcggattttcattgtgacacctgatttccctgttctgttggcaagctgcccacttgtacagtttgaggggtcatgtttgccatcaaatgtctctgatcatgatcgagaaggatcattcagtattgggtgccgagttatcctcccacctgagagctttcttactatgaggcttccctttgtctatggtgttgagacaaaggagggaagtaaatttcccctcaaatactttgagcgacaaccagaactcacagcatggcttgttgcaggcacagccctgcaaatcgtgtcggtaggggatgtcactgagaaagaaaccgttatgaagtgatagacatgtcatataaagctttactggctttagcatgttctagtcatatatcagtgatttgctatcggcattgaataggtctgttgatggttatattctgtctgaagttttcacttctactcctgaacttgtgctgctaagctgttgacacaactattgcttgctttcactgtgctggaagcattgtgaaatagaagttccgctgatatctgcctgacctggatggtgtatatagatgcaagcagagggggcaggcccacaggcaatcacgccgttcttgtctttgtacatgaaaggtgccaggaggttaagtttagctggttatgtaaaggtccgctttttgaggacctgtccagtggatcaatcccattcctagactggtttgccttgaggcttggagattttgtagtaagactattagttcaattgagctgtttgtccagttgatgagttgttttattcctaggcttgttgagaaatctggccttggaatatagaacccagaagaaaggatttttctgaatgatgttgtagcaaacggttgcttgagatgcatgatctcctcaaataaacttgactgatctgcctgtatcccttattctttcttgtatataatgtatgcagtacaggtatttccccgcagtctttggagaagaagatggatttgtgaagtgatagcacaaaaaaaaaagtcatcaggcgcttctggtggtagactggagactgggctggagaaatgttggagctggaaggaaacgcacggatggctcctgcttgacaagtgtaaaggcaggcggcaagcagggacgtcgagtcgaggccccggccggctccaagagcttctttctccaatccaatccaatccaatccagaaccctgactgcagtccatggtattgtagcgctaccatttgtccacgtccgatgggtgaagtgaagcatgactgactgactgcatgggtttgagtgagttgcttggacaagtggctgtgtgtggtgctgctactgctacctaaccttttgcttggccgatagataagaataccggactgatggatggaagtggatgtgaacaaacagctggttggctcagggcaggctccacaccaccaacggccggagcagatggacatggacgtctcacttaggaggagaaggcagatgcggcagaagcaccagcacactgaatgcaatcattcaatactcatctacagctagccaagatgtgagaagagagcaaggaagaattgtcaagcctcccacgtttccccaatcttctctcttcttttcatttccccacttttaatatgtttattttcctcttatttgcaacagctcctttaattatatagcaacattttttttaagatatagtagtatatatattaattttatcatatctctagtccgaataccacgcaaaagtagctagtaagtaggatgtaccaactagctacagcagtgtataataaagaaaaaagtcgttgggcggtcgatggagtaatgcacatcatatacgtacagcttggtacaaaacgaccgcaaattcacaaggcaaag

SEQ ID NO: 44528 - DNA, 3091 bp, Zea Mays
acctccaatcgctcgcgaatgccgcctcctcgccgcggccccaaccccgccctaatccccaccccgtcgcctccgcattagccatttcccagccaacaatctcttctcctcgcgttagggttagggcaccccatctatctattgcgacagacaaaacgacatggacgagtaccaccaccaccaccagcgcatgggcgccgccgccgacttccgccgcgacctcgaggacctcgtctgcgaccacctcggcggctgcttctccccggccccgtcctcctcctcctcctgctccgccgcggcgggcggaggcgccgcggaccatgagcccgacggcgaggccgagtcgtcggcggtgcgcaggcggaggcgggagtcgcgcctcctcagccgctgggtcgcgcgccaggctgaggaggtgctctcctccatggagcgcgaggtcgagcgccgcaaccgcgaggccgagctcctcgcgctcgcgcgcctccacccggtctccaccctcgacccctcctccttcctcctctcctcgaccgccgcgccgccgccgccgcgcccgcaggcgccctccctcaacgcgccctcctcgctcctgcagatgtggcgcgagctcgagcacccccgcgccgacgccgcccaccccttcgaccgcgagccttccccggacaacgccgaccgtgaccgcgagcgcgtgcgccagatcgcgcgacgcctcacggacaccgccgccgccgctgccaccgccaccgccggtggggagtggctcggcgagacggagcggcagagggtcaggctcgtaagggagtgggtacagatggcgagccagccgcgcgactcccgtgcgggcacgcgcagggacgagcctgcagccgggaccgacagggacaggcgaggggagctggagcctcctcggctacgaggccggcaggcgcgattggatgtcatcagccgtatggccagggagcgtcagcgcgagctgcagggcatatcagggtaccatgtggtgtcggagtttcctcgccgcagccgcaaccgcatccagggactgcttaggggaaggttcttaaggaatggggcgcttgaagaggagcgaccaccatctgtggcagcgagggagcttgggcagttgaggcagagccatcgtatgcccgccttgagaccagagagtattgcaagtagtcaagatgttagccaatctgatgcttctgtggttgagagtgttagattactagataacgatgaatctcagcaaggggctgaggtggcttttactgatagtgaggataccacccaaactgtgctggagaatgtggatttacaagaaatgggtgcagatggtgctgaggcacactcaccaagtatacctatggatgacatggttatgatgcaagagtctctaactcaaggtgacaacatgcagcaagatgggacagaagatgacacgggattctggcagacatctttggatgccagtcttaataggtggcccagtgagattggtggaggtgccgacagaacttgggaagataatgcagaagacttacacagtgaaaccatggaggaggatgacagggagcatggtcatctacaagaagagcatgatggatggcatgataacgagtctcatggtaccatggagaactggcaagatgattaccaagattccgcacttgatacaggccccattcctaggaacgaaaataggtttatcccacctgacgatgacaatgtgtacagcatggaacttagagaattacttagcagagcgtggtcatggtcccctcaactggaatcttgatgcagccatgcacccttcaaatggaccaaatgcaaatcaggaacaagaacggaaccctgaaactcagcaattccaggctcctgtcaatagacctgcccttgttatccctcctccacctttgccaccacgacaaccattatggcacagagaactgcgtcataacaactggaacagcagacacagggaatgggatgctattaatgatttaagagctgacatgggtagacttcagcaagggatgagcagcatgcagaggatgctggaagcgtgcatggacatgcagctggaattgcagcgttctgtgagacaagaagtgtcagctgccttgaatcggtttgcaggacctgaaggattgtcgatggatctgtgtgacgatggatcaaaatggaatcaggtgaggacaggaacctgctgcgtatgctgtgattcacagattgattctctactgtacaggtgtgggcacatgtgtacttgctcgaaatgtgcaaatgagctggtgcgcagcggcggcaagtgcccgctctgccgggctcccatcgtggaggtggtccgcgcatactcggtaatgtaaggtggtggaagatacagtcagtaggaaaggaataagttgacggcaagcgaagttttgctgcaagtgaagaaaagcttgtttaggaaatggaccccctcccaatcccccaaaaaagaactctgtttttcctcctttgtgaatctataggggaggctacttacgttgcctgcatattcgttgccttgctgctcgtgtcgccgagacgcaggcggcaaagggcgtgccattaatttttggaagagcttgcgttgggaagtggtgtccccagtgcaagctgtttcactgtatatttatacactgactgatcctcaactgaagcagacaccagcaatgcattggtatataccaggttccttgatcactctctggtcctcccagtgagcattgagctgtgatgtgtcagtgtttggtgcgttacatctgcgtatcagtccgtagtgtggtagtgggtatgtagctttcagctcccgttgcctttggttgagtcgacttctctttcaaatgcacggtccgtgatgtttcgagctgctgttgtacgctacacggagaatgtacgcttacaaacatatcacatatgaatattgatgaaatatagtacagtattattgtgctgtgcatacgtctttcgcactcaggagcaacaggcatggtctgcaagatgacgtgcgacgcgtttgcaatcgcaaccatgctggggctgggccaaacagacgacaacccca

SEQ ID NO: 44529 - DNA, 3378 bp, Zea Mays
acgcgtgagtgaaagagatacgcgcctctctcctctcgcggcccaaaccaaatttacaacaaccaaaaaagaaactaaataaaaaaataaataaatagcggccttttcttcttcgtcttccttccaccttgctcctcaacctctctctctctctcctttcctccgtgagttgcgtctccacctctcctccctcttccttccgtcctcgtcctccccacccaatccaaccccctccccgccgtccccgaggctggctgtagccgtctctccggctctggctcgcaatccaacctccaatcgctcgcgaatgccgcctcctcgccgcggccccaaccccgccctaatccccaccccgtcgcctccgcattagccatttcccagccaacaatctcttctcctcgcgttagggttagggcaccccatctatctattgcgacagacaaaacgacatggacgagtaccaccaccaccaccagcgcatgggcgccgccgccgacttccgccgcgacctcgaggacctcgtctgcgaccacctcggcggctgcttctccccggccccgtcctcctcctcctcctgctccgccgcggcgggcggaggcgccgcggaccatgagcccgacggcgaggccgagtcgtcggcggtgcgcaggcggaggcgggagtcgcgcctcctcagccgctgggtcgcgcgccaggctgaggaggtgctctcctccatggagcgcgaggtcgagcgccgcaaccgcgaggccgagctcctcgcgctcgcgcgcctccacccggtctccaccctcgacccctcctccttcctcctctcctcgaccgccgcgccgccgccgccgcgcccgcaggcgccctccctcaacgcgccctcctcgctcctgcagatgtggcgcgagctcgagcacccccgcgccgacgccgcccaccccttcgaccgcgagccttccccggacaacgccgaccgtgaccgcgagcgcgtgcgccagatcgcgcgacgcctcacggacaccgccgccgccgctgccaccgccaccgccggtggggagtggctcggcgagacggagcggcagagggtcaggctcgtaagggagtgggtacagatggcgagccagccgcgcgactcccgtgcgggcacgcgcagggacgagcctgcagccgggaccgacagggacaggcgaggggagctggagcctcctcggctacgaggccggcaggcgcgattggatgtcatcagccgtatggccagggagcgtcagcgcgagctgcagggcatatcagggtaccatgtggtgtcggagtttcctcgccgcagccgcaaccgcatccagggactgcttaggggaaggttcttaaggaatggggcgcttgaagaggagcgaccaccatctgtggcagcgagggagcttgggcagttgaggcagagccatcgtatgcccgccttgagaccagagagtattgcaagtagtcaagatgttagccaatctgatgcttctgtggttgagagtgttagattactagataacgatgaatctcagcaaggggctgaggtggcttttactgatagtgaggataccacccaaactgtgctggagaatgtggatttacaagaaatgggtgcagatggtgctgaggcacactcaccaagtatacctatggatgacatggttatgatgcaagagtctctaactcaaggtgacaacatgcagcaagatgggacagaagatgacacgggattctggcagacatctttggatgccagtcttaataggtggcccagtgagattggtggaggtgccgacagaacttgggaagataatgcagaagacttacacagtgaaaccatggaggaggatgacagggagcatggtcatctacaagaagagcatgatggatggcatgataacgagtctcatggtaccatggagaactggcaagatgattaccaagattccgcacttgatacaggccccattcctaggaacgaaaataggtttatcccacctgacgatgacaatgtgtacagcatggaacttagagaattacttagcagcgtggtcatggtcccctcaactggaatcttgatgcagccatgcacccttcaaatggaccaaatgcaaatcaggaacaagaacggaaccctgaaactcagcaattccaggctcctgtcaatagacctgcccttgttatccctcctccacctttgccaccacgacaaccattatggcacagagaactgcgtcataacaactggaacagcagacacagggaatgggatgctattaatgatttaagagctgacatgggtagacttcagcaagggatgagcagcatgcagaggatgctggaagcgtgcatggacatgcagctggaattgcagcgttctgtgagacaagaagtgtcagctgccttgaatcggtttgcaggacctgaaggattgtcgatggatctgtgtgacgatggatcaaaatggaatcaggtgaggacaggaacctgctgcgtatgctgtgattcacagattgattctctactgtacaggtgtgggcacatgtgtacttgctcgaaatgtgcaaatgagctggtgcgcagcggcggcaagtgcccgctctgccgggctcccatcgtggaggtggtccgcgcatactcggtaatgtaaggtggtggaagatacagtcagtaggaaaggaataagttgacggcaagcgaagttttgctgcaagtgaagaaaagcttgtttaggaaatggaccccctcccaatcccccaaaaaagaactctgtttttcctcctttgtgaatctataggggaggctacttacgttgcctgcatattcgttgccttgctgctcgtgtcgccgagacgcaggcggcaaagggcgtgccattaatttttggaagagcttgcgttgggaagtggtgtccccagtgcaagctgtttcactgtatatttatacactgactgatcctcaactgaagcagacaccagcaatgcattggtatataccaggttccttgatcactctctggtcctcccagtgagcattgagctgtgatgtgtcagtgtttggtgcgttacatctgcgtatcagtccgtagtgtggtagtgggtatgtagctttcagctcccgttgcctttggttgagtcgacttctctttcaaatgcacggtccgtgatgtttcgagctgctgttgtacgctacacggagaatgtacgcttacaaacatatcacatatgaatattgatgaaatatagtacagtattattgtgctgtgcatacgtctttcgcactcaggagcaacaggcatggtctgcaagatgacgtgcgacgcgtttgcaatcgcaaccatgctggggctgggccaaacagacgacaacccca

SEQ ID NO: 44530 - DNA, 2151 bp, Zea Mays
cgaaagcggagggaaaagcgagggaggcagccttctattttctgtcaaaacaagggcgatactcctcctactccagcgcacacgcagatcagcgtcgaaatccgtcgcatcgtgcccgcctcgctgtctccgctgggcgctggtggtcatggcccgcagggcgctggagctcgcggcggttctgctcgcgctggcggcgctggcggccgtggcggccggaggggacatcgtgcaccaggacgacgaggcgcccaagatccccggctgctccaacgacttcgtgctggtaaaagtgcagacctggatcaacaaaaaagataaagatgagtttgttggtgttggtgctcgatttggccccaagatagagtcaaaggaaaagcatgccaactggacaaacttgctgttagcagacccttctgattgctgcacccctccaagagagaaggttgctggagatattttgttagtggagaggggaaactgtaagttcactacaaaagctaaggtggctgaatctgctggtgcttctgcgattataattatcaatgataagcacgagttatacaagatggtatgtgagaccaatgaaacaaatttagatattggcatacatgctgttcttctgccaaaagatgcaggctcttctttacaaaggtctctctctagtggtgaagtcttagtggagctgtactctccagatcgtcctctggttgatactgcagaggtgtttctgtggcttatggcagttggtaccattctttgtgcatcatactggtcagcatggagtgcccgagaagcagatattgaacaagagaagcttctgaaggatggtcgtgaagtagcaccaaactttgagcctggaggttctagtggtatggtagatatcaacatggtatccgcaatactgtttgtggtgattgcatcatgcttcttgataacactctacaagctgatgtcccattggtttgtggagcttctggtggttatcttttgcataggtggtgtggagggtattaccttgatcgttacagtcatccaaattgttagaatacctaaccttaaggtgggttcagccctcctgggttgtgccttcttatatgacatcttctgggtttttatctccaagatgttgttccatgaaagtgtgatgattgtggttgcacgtggtgacaagactgatgaggatggtgtacccatgctgttaaagattcctcggatgtttgatccatggggtggatacagcatcataggctttggtgatatccttcttcctgggctgttggttgcttttgcattaaggtatgattgggctgccaagaagaccttgcaatctggctactttttgtggtcaatggtggcatatggttccggtctcctaattacatacgttgccttgaaccttatggatggccatggccagccggctctcctttacatcgtgcctttcacaatcgcactgggcatgaagagaggcgagctcagaaacctgtggacaaaaggacagcccgagagagtgtgcacgcacatgcacccatcccccaaggattcgcctgttgcggtcagctcgctgtcgtagacaaggctaacgaccttacctgatgttgcctggccccggagaatgttgctgatgaccaaaaaaagtttccagggttaatgaaggagtctactgatttgtaatgaaccttacatagggataagccaagatcccctgatcgtgatcctcgttgtacagtaggtggtgtatttgtatagtgagtgatgactattgagatgtgcggctgacactggataaaaaaggcgcaggagcttgatgtgggagcagcactgcatctgcatcatgtggctggtgtatggttttgaatgatctctgccgcctcattcttgttcttgacatggacctgttcctggtcttatgaggcgcacacgtggcaagacgctgctggttttgtcggtgaagcgatgtgacgcagtgtatatgtgtgtgtattatcggccatccgtgaccagttagttccttaatattgtaatactagtcgaatgcccgtgcgttgcaatgagaatatataatatcagtataatacgataacttatatacaaaatgtgtgttataccgttatgagaaaatgtttcataataaatttgtgattctgg

SEQ ID NO: 44531 - DNA, 2224 bp, Zea Mays
cgaaagcggagggaaaagcgagggaggcagccttctattttctgtcaaaacaagggcgatactcctcctactccagcgcacacgcagatcagcgtcgaaatccgtcgcatcgtgcccgcctcgctgtctccgctgggcgctggtggtcatggcccgcagggcgctggagctcgcggcggttctgctcgcgctggcggcgctggcggccgtggcggccggaggggacatcgtgcaccaggacgacgaggcgcccaagatccccggctgctccaacgacttcgtgctggtaaaagtgcagacctggatcaacaaaaaagataaagatgagtttgttggtgttggtgctcgatttggccccaagatagagtcaaaggaaaagcatgccaactggacaaacttgctgttagcagacccttctgattgctgcacccctccaagagagaaggttgctggagatattttgttagtggagaggggaaactgtaagttcactacaaaagctaaggtggctgaatctgctggtgcttctgcgattataattatcaatgataagcacgagttatacaagatggtatgtgagaccaatgaaacaaatttagatattggcatacatgctgttcttctgccaaaagatgcaggctcttctttacaaaggtctctctctagtggtgaagtcttagtggagctgtactctccagatcgtcctctggttgatactgcagaggtgtttctgtggcttatggcagttggtaccattctttgtgcatcatactggtcagcatggagtgcccgagaagcagatattgaacaagagaagcttctgaaggatggtcgtgaagtagcaccaaactttgagcctggaggttctagtgggtctgcaaacatgcttggtggccttactgtcaatgtcaaggcggtttaaacctgctgcagaatcgtatgtgaaagtgccattttttggagctgtttcataccttacattggcagtttgtccgttttgcattctgtttgctgttctgtggggtgtttatcgtcggttgccttatgcttggattgggcaagatattcttggtattaccttgatcgttacagtcatccaaattgttagaatacctaaccttaaggtgggttcagccctcctgggttgtgccttcttatatgacatcttctgggtttttatctccaagatgttgttccatgaaagtgtgatgattgtggttgcacgtggtgacaagactgatgaggatggtgtacccatgctgttaaagattcctcggatgtttgatccatggggtggatacagcatcataggctttggtgatatccttcttcctgggctgttggttgcttttgcattaaggtatgattgggctgccaagaagaccttgcaatctggctactttttgtggtcaatggtggcatatggttccggtctcctaattacatacgttgccttgaaccttatggatggccatggccagccggctctcctttacatcgtgcctttcacaatcggcaccttcttagcactgggcatgaagagaggcgagctcagaaacctgtggacaaaaggacagcccgagagagtgtgcacgcacatgcacccatcccccaaggattcgcctgttgcggtcagctcgctgtcgtagacaaggctaacgaccttacctgatgttgcctggccccggagaatgttgctgatgaccaaaaaaagtttccagggttaatgaaggagtctactgatttgtaatgaaccttacatagggataagccaagatcccctgatcgtgatcctcgttgtacagtaggtggtgtatttgtatagtgagtgatgactattgagatgtgcggctgacactggataaaaaaggcgcaggagcttgatgtgggagcagcactgcatctgcatcatgtggctggtgtatggttttgaatgatctctgccgcctcattcttgttcttgacatggacctgttcctggtcttatgaggcgcacacgtggcaagacgctgctggttttgtcggtgaagcgatgtgacgcagtgtatatgtgtgtgtattatcggccatccgtgaccagttagttccttaatattgtaatactagtcgaatgcccgtgcgttgcaatgagaatatataatatcagtataatacgataacttatatacaaaatgtgtgttataccgttatgagaaaatgtttcataataaatttgtgattctgg

SEQ ID NO: 44532 - DNA, 2830 bp, Zea Mays
ctcactgctcaggccgagttccaaactccgaccgcatgcgcatggtacgcgctggggctgggagcagagctggggcggccgcctcgctggcgtcattgcgtgcgcatacacctttctctgctgaagctgaagcttcgccactgcctatggaggagacggcggcaccgctaccgctaacagtgcgggccgcgggtgctgcccccgacggcgatgagcgaaggcagccgcagctggaaggaggaggacaccaccagattcagagccaggagacggaggaggagcacgcgcaggcggtgtactgcgccgtggggattgggaccggcagcggcagccaggagtggaaggacaacctgcgctgggtgctcgccgccctcgccccccgccggagcagcagcaggtgcctcgtgctcgcgcacctgcgccgacccacctcccggatcaacatcatgggggcgtgggtcccagtgagccagcttgcagaggaggaggtggctgcgtacaggcagctggaggaagagaggatcggcaaagtcctagacgacctcgtggaactctgccaaagtcaaaaggtgaacgcgagcaagatcgtcatcgcgagcgacgacatcggcaggggtctcgtgcagttggttgacgaccatggggtcaccgagctcgtcatgggcgctgcgtctgatcgggcgtacagcagatgcggacaccaaggtctaagaaggcgctgacggtgcagtggaaggcgaacccctcttgcaagatctggttcctttgcaggggaaatctcatctgcaccagggaggcgagcgagggacaagcgcatagtagagctgagtcgtccacagctagtacaagctccaggtcaagcacttccggctactcgacccctgctgcaagggaccgcagcatagaggatcaagctgttggaaccctcgatggtgcagctgtgcagttgctacaagagattgaagaggaccggccggagacgcccacgtcggatgctggtgagatggacgacgccttgtacgataagctgaagcgtgcgctcatggaagccgagagcctcaagcacgaggcgtacgaagagactcgccggcgtcagatggccgagcgcgagctcgctgaagcgtccaggatggccgacgaagcagagagatcgaaccagagagaggcgaggcaccggaaggaggtggaggagatggtggcgagagagcgcgcggccattgagcaggacaggcgagagctcgacgacatcctggagaagatacggaaggtcgacgaccggagcgccgagctggagcttcagatcacgagctcggagcgcacgatgaacgacctcgaagccagactgtcggaatcgtacaacctcctccacacactccggcaaggagatccctggtcgactgcgacggagtccgcgtccgagtccacagaggacggcggcggcgagcagagagtgagcttcttgcagctgggttactcggagctggacgaggccaccaagcatttcgacgagtctgtcaggatcgacggcggaggcgacggcagccggggcaaagtgtacggaggggagctgcgcggcatggccgtcgccgtgaaggtggtgaaccctgacgtggccgtgcacgaggcccggttcgcccgagcggtggaacgcatcggccgggcgagacacccgaacctggtgacgctcgtgggcgcgtgcccggcggcgcgcgccgtcgtgtacgagctggtgccgggcgggagcctggaggagcgcctggacccgggaggcgggagcgggtcggcgccgccgccgctgccgtggcacgcgcggtgcggcgtcgcctacggggcgtgctccgcgctggcgttcctgcactccacgctgccgcggccgacggtgcacggcgacgtgaggccggcgaacatcctggtgctggcggacaacgcgccgcacgggtggtcatgcaaactggccggcctcggcgcgcgcgggctcgtggaggagcgagagcagccccgccccggcgccgcggatcgggcgtacgcggacccgcggtacctcgctgcgacgggggagctgaacccgcaccgcgacgtgtacgcgctaggcgtggtcctcctccggctggtgaccgggagaccggcgttcctggcgaggaaggcagcgcgggaggccgtggacggcagggcgtcgtggcaggaggtggcgggagggtggccgacggagcgcgccagggaggtggccctgctcgggctgagatgctgcggcgtggacgtggaggcggagcagaggccgcggctccccgccgcgctgttgctggaggaggcccgcggcgtgctggaggccgcggtgagcgcagcgccgagcaggtcgccatcgtcgctgtccgagtccgacggcgccccatcctacttcctctgcccgatactcaaggaggtgatgagggacccgcagatctccggcgacgggttcacgtacgaggcggaggccatccgggagtggctgcgcagcggccacgacacgtcgccgatgacaaatctgaagctcccgacacagcaactggtccccaaccatgcgctccgctccgccatccacgagtggcgccaccgccagctccgtgctcatcatcggctgcactgatccggtgttaacttttaacttgtattgtatataaacgcgggagagctagttagtctttttctttcgttttgtttttggtaaatgttatctgattgcctgagtgtgtagcatcgatggtcttgacaacgtacactgtacagtcgcggatgcatgggagaaatgaatttttttcgcctttcatatacgggcaaatttgccatccttaac

SEQ ID NO: 44533 - DNA, 1961 bp, Zea Mays
gtgagactatccttgtcccccatacaatacatcgaatcattcatggaaggatctgcatgtggtttgtagaatcttccagaagcatgggtctggaccacagaacggtgcgcagtatggtgcaccatacatggaagaggaatgggaagaggatgatgatgctattgagaatggttctacccacgatgcatctggtcaaattgctgcaaccacctgtgctgtagatgaggagtcaaatgaggacgatgagaatgcatattgtgaaacaaacagacctgctcgagtagaaccatctcatctgccttcggtccatgaaatgctcaatccaccagagatggctcctctccaaggtcaagattctaaagagacaagcgatggaagttgttctgatgttgctatttctctggaagagattttgcaggaacctttgtcaaatattagtgtggagaatatgcatagacttgaagggcagaatgccactgatgataacatcagtgttgataacttgttatcagcatatcccacgaaagataatggctacgtaggccagtataacactatgaatgggagtgctccagcagatgaagctcacgcacgctggcctttgagaacatatagtaatcagaattatgtcaatggccctcttgctgatgagttctttgacacagggaatgataccaatggggttgcatattccaggcagcagcaagctgatggcttcccagcacctcgccaagttgatgaaagtatggtattttatgatgccccatctgattacaacttggtggatggaaaagatgacttcgtatatctgaacgacattctgaatgagccacttggaaatgaatcgctctttgatggagatgatatgatggcttactttgatgccacagagaatgatttcaagtatgacattttgggctctggtcagggtttggattatccacttgcagacatgccgttgaactttgcccaaaagagtgacaaggaagacaagtttacattcgaagggatctctgaggttccggaagcaaatcctcagtacggtgcatcctcatctggttcacatgaagatctgtatactgatactgaatttctaggtgtaccaacagatgacactgctgataaaacttacggaaatcgcctggccagcatgttaggctctatcccagctccacctgcaatggcctcagaattcccgccgtcaacagggaaatctgctgggatgctttcggctgtcagctcgagctcaattcgttttactgctggtatcatccaacttgatggcctcactttcagcagcggctccggtcagtggcccttgcagaagaatggagacttgagtttgcttgtctcttttgctgtggagggcgacgtggcatccaagctccctgttggtcttgggcgtgctactcggattagcaccgttcccatggtgctgcgcagtggtttttaccttttctttatgtcggccatgattctcttgtttagctacaaagtagggtcgtgtatctacagcaggtaagttgaagttgatggcgcctcttgtccggccagacctgtgggctgtttattttagttcaacacgtggatcattccctcagtgatgggggtatagcagtcgttcgacaccttttttacacatttaccattttgacctgtcaaaacatacagcaataaactttcgaactggtggtggtgatcatgccgggaccatgttctcgtcagggaaagcagtgcactgtgaatttggtgctctgctcttattattgtaaccaaaattaactgcaatatgttatattctgtcctgtagaggaaaagctattttatctggttattgtaaccaagattataccttggtgggttgctgtcaaagaaacaatggaaatatgattattatcaggccgtgttatttgctccaggccagataattaccatttgatcaacataaacctcaggtctca

SEQ ID NO: 44534 - DNA, 1932 bp, Zea Mays
cttatggttttgtgttctcacaatttatggatctgcatgtggtttgtagaatcttccagaagcatgggtctggaccacagaacggtgcgcagtatggtgcaccatacatggaagaggaatgggaagaggatgatgatgctattgagaatggttctacccacgatgcatctggtcaaattgctgcaaccacctgtgctgtagatgaggagtcaaatgaggacgatgagaatgcatattgtgaaacaaacagacctgctcgagtagaaccatctcatctgccttcggtccatgaaatgctcaatccaccagagatggctcctctccaaggtcaagattctaaagagacaagcgatggaagttgttctgatgttgctatttctctggaagagattttgcaggaacctttgtcaaatattagtgtggagaatatgcatagacttgaagggcagaatgccactgatgataacatcagtgttgataacttgttatcagcatatcccacgaaagataatggctacgtaggccagtataacactatgaatgggagtgctccagcagatgaagctcacgcacgctggcctttgagaacatatagtaatcagaattatgtcaatggccctcttgctgatgagttctttgacacagggaatgataccaatggggttgcatattccaggcagcagcaagctgatggcttcccagcacctcgccaagttgatgaaagtatggtattttatgatgccccatctgattacaacttggtggatggaaaagatgacttcgtatatctgaacgacattctgaatgagccacttggaaatgaatcgctctttgatggagatgatatgatggcttactttgatgccacagagaatgatttcaagtatgacattttgggctctggtcagggtttggattatccacttgcagacatgccgttgaactttgcccaaaaggaagacaagtttacattcgaagggatctctgaggttccggaagcaaatcctcagtacggtgcatcctcatctggttcacatgaagatctgtatactgatactgaatttctaggtgtaccaacagatgacactgctgataaaacttacggaaatcgcctggccagcatgttaggctctatcccagctccacctgcaatggcctcagaattcccgccgtcaacagggaaatctgctgggatgctttcggctgtcagctcgagctcaattcgttttactgctggtatcatccaacttgatggcctcactttcagcagcggctccggtcagtggcccttgcagaagaatggagacttgagtttgcttgtctcttttgctgtggagggcgacgtggcatccaagctccctgttggtcttgggcgtgctactcggattagcaccgttcccatggtgctgcgcagtggtttttaccttttctttatgtcggccatgattctcttgtttagctacaaagtagggtcgtgtatctacagcaggtaagttgaagttgatggcgcctcttgtccggccagacctgtgggctgtttattttagttcaacacgtggatcattccctcagtgatgggggtatagcagtcgttcgacaccttttttacacatttaccattttgacctgtcaaaacatacagcaataaactttcgaactggtggtggtgatcatgccgggaccatgttctcgtcagggaaagcagtgcactgtgaatttggtgctctgctcttattattgtaaccaaaattaactgcaatatgttatattctgtcctgtagaggaaaagctattttatctggttattgtaaccaagattataccttggtgggttgctgtcaaagaaacaatggaaatatgattattatcaggccgtgttatttgctccaggccagataattaccatttgatcaacataaacctcaggtctca

SEQ ID NO: 44535 - DNA, 2091 bp, Zea Mays
cccaattcagctacagtgcacgcgcttggctgactgcccagttagctatttgcatacaccaagcggcagtgtatatatattttttgtcggtttaaggacgatctgcaatacaatagatcgatcatcagccgcttaagaggagaagctccccttatggttttgtgttctcacaatttatggatctgcatgtggtttgtagaatcttccagaagcatgggtctggaccacagaacggtgcgcagtatggtgcaccatacatggaagaggaatgggaagaggatgatgatgctattgagaatggttctacccacgatgcatctggtcaaattgctgcaaccacctgtgctgtagatgaggagtcaaatgaggacgatgagaatgcatattgtgaaacaaacagacctgctcgagtagaaccatctcatctgccttcggtccatgaaatgctcaatccaccagagatggctcctctccaaggtcaagattctaaagagacaagcgatggaagttgttctgatgttgctatttctctggaagagattttgcaggaacctttgtcaaatattagtgtggagaatatgcatagacttgaagggcagaatgccactgatgataacatcagtgttgataacttgttatcagcatatcccacgaaagataatggctacgtaggccagtataacactatgaatgggagtgctccagcagatgaagctcacgcacgctggcctttgagaacatatagtaatcagaattatgtcaatggccctcttgctgatgagttctttgacacagggaatgataccaatggggttgcatattccaggcagcagcaagctgatggcttcccagcacctcgccaagttgatgaaagtatggtattttatgatgccccatctgattacaacttggtggatggaaaagatgacttcgtatatctgaacgacattctgaatgagccacttggaaatgaatcgctctttgatggagatgatatgatggcttactttgatgccacagagaatgatttcaagtatgacattttgggctctggtcagggtttggattatccacttgcagacatgccgttgaactttgcccaaaagagtgacaaggaagacaagtttacattcgaagggatctctgaggttccggaagcaaatcctcagtacggtgcatcctcatctggttcacatgaagatctgtatactgatactgaatttctaggtgtaccaacagatgacactgctgataaaacttacggaaatcgcctggccagcatgttaggctctatcccagctccacctgcaatggcctcagaattcccgccgtcaacagggaaatctgctgggatgctttcggctgtcagctcgagctcaattcgttttactgctggtatcatccaacttgatggcctcactttcagcagcggctccggtcagtggcccttgcagaagaatggagacttgagtttgcttgtctcttttgctgtggagggcgacgtggcatccaagctccctgttggtcttgggcgtgctactcggattagcaccgttcccatggtgctgcgcagtggtttttaccttttctttatgtcggccatgattctcttgtttagctacaaagtagggtcgtgtatctacagcaggtaagttgaagttgatggcgcctcttgtccggccagacctgtgggctgtttattttagttcaacacgtggatcattccctcagtgatgggggtatagcagtcgttcgacaccttttttacacatttaccattttgacctgtcaaaacatacagcaataaactttcgaactggtggtggtgatcatgccgggaccatgttctcgtcagggaaagcagtgcactgtgaatttggtgctctgctcttattattgtaaccaaaattaactgcaatatgttatattctgtcctgtagaggaaaagctattttatctggttattgtaaccaagattataccttggtgggttgctgtcaaagaaacaatggaaatatgattattatcaggccgtgttatttgctccaggccagataattaccatttgatcaacataaacctcaggtctca

SEQ ID NO: 44536 - DNA, 1915 bp, Zea Mays
cccagccatcctcagtcgatatcaattagagtgttcatctaatcaattagggtgtgtatctaaattatagtgtgtatgtatgtactacttatgatccgatccccaaacacaccacctcccatctctgcaggatgatatccgccccaattcagctacagtgcacgcgcttggctgactgcccagttagctatttgcatacaccaagcggcagtgtatatatattttttgtcggtttaaggacgatctgcaatacaatagatcgatcatcagccgcttaagaggagaagctccccttatggttttgtgttctcacaatttatggatctgcatgtggtttgtagaatcttccagaagcatgggtctggaccacagaacggtgcgcagtatggtgcaccatacatggaagaggaatgggaagaggatgatgatgctattgagaatggttctacccacgatgcatctggtcaaattgctgcaaccacctgtgctgtagatgaggagtcaaatgaggacgatgagaatgcatattgtgaaacaaacagacctgctcgagtagaaccatctcatctgccttcggtccatgaaatgctcaatccaccagagatggctcctctccaagggaatgataccaatggggttgcatattccaggcagcagcaagctgatggcttcccagcacctcgccaagttgatgaaagtatggtattttatgatgccccatctgattacaacttggtggatggaaaagatgacttcgtatatctgaacgacattctgaatgagccacttggaaatgaatcgctctttgatggagatgatatgatggcttactttgatgccacagagaatgatttcaagtatgacattttgggctctggtcagggtttggattatccacttgcagacatgccgttgaactttgcccaaaagagtgacaaggaagacaagtttacattcgaagggatctctgaggttccggaagcaaatcctcagtacggtgcatcctcatctggttcacatgaagatctgtatactgatactgaatttctaggtgtaccaacagatgacactgctgataaaacttacggaaatcgcctggccagcatgttaggctctatcccagctccacctgcaatggcctcagaattcccgccgtcaacagggaaatctgctgggatgctttcggctgtcagctcgagctcaattcgttttactgctggtatcatccaacttgatggcctcactttcagcagcggctccggtcagtggcccttgcagaagaatggagacttgagtttgcttgtctcttttgctgtggagggcgacgtggcatccaagctccctgttggtcttgggcgtgctactcggattagcaccgttcccatggtgctgcgcagtggtttttaccttttctttatgtcggccatgattctcttgtttagctacaaagtagggtcgtgtatctacagcaggtaagttgaagttgatggcgcctcttgtccggccagacctgtgggctgtttattttagttcaacacgtggatcattccctcagtgatgggggtatagcagtcgttcgacaccttttttacacatttaccattttgacctgtcaaaacatacagcaataaactttcgaactggtggtggtgatcatgccgggaccatgttctcgtcagggaaagcagtgcactgtgaatttggtgctctgctcttattattgtaaccaaaattaactgcaatatgttatattctgtcctgtagaggaaaagctattttatctggttattgtaaccaagattataccttggtgggttgctgtcaaagaaacaatggaaatatgattattatcaggccgtgttatttgctccaggccagataattaccatttgatcaacataaacctcaggtctca

SEQ ID NO: 44537 - DNA, 2417 bp, Zea Mays
gggagagggaagcgaaatgcgaaaggcagccgaggccgcgagccgacgcacgcggctcgttgcttcctccatcccctttcctcacgccgacgccaaagtataccaacgaattcctcctcgggctcccacctaatcgtgttcgccgcctgcctctcccaaaccctagcaacccacgatcgaacccaaatccgctcctcccacccgaggaattatgcgaaattccccgagatcctagcccagcactagcagatcgatccatcgcttgcccacctgccggccaccaacccttgtagtctcagtcaatctgtagattgagactacgatgagcctgtcaccgctcgactcctcctccccgccggccgcggctgcggctgctgctacggaggtgcccctcgccccgggcttccgcttccaccccaccgacgaggagctcgtctcctactacctccgccgccgcgtcctcggccgccgcctccgcgtcgacgccatcgccgagatcgacctctaccgcctcgagccctgggacctcccctccctctcccgcatccgcagccgcgacgcccagtggtacttcttcgcccgtctcgaccgcaaggtcgccggcgctggcgccgggggccggggcggtcccggcaacaggaccaaccgcgctacgccgagggggtactggaagaccacgggcaaggaccgcgaggtgcaccaccgcggcaagcccgtcgggatgaagaagacgctcgtcttccacgccgggagggcgcctaagggcgagaggaccaactgggtcatgcacgagtaccgcctcctcgatgcagacggacctcaggatctgcatgtggtttgtagaatcttccagaagcatgggtctggaccacagaacggtgcgcagtatggtgcaccatacatggaagaggaatgggaagaggatgatgatgctattgagaatggttctacccacgatgcatctggtcaaattgctgcaaccacctgtgctgtagatgaggagtcaaatgaggacgatgagaatgcatattgtgaaacaaacagacctgctcgagtagaaccatctcatctgccttcggtccatgaaatgctcaatccaccagagatggctcctctccaagggaatgataccaatggggttgcatattccaggcagcagcaagctgatggcttcccagcacctcgccaagttgatgaaagtatggtattttatgatgccccatctgattacaacttggtggatggaaaagatgacttcgtatatctgaacgacattctgaatgagccacttggaaatgaatcgctctttgatggagatgatatgatggcttactttgatgccacagagaatgatttcaagtatgacattttgggctctggtcagggtttggattatccacttgcagacatgccgttgaactttgcccaaaagagtgacaaggaagacaagtttacattcgaagggatctctgaggttccggaagcaaatcctcagtacggtgcatcctcatctggttcacatgaagatctgtatactgatactgaatttctaggtgtaccaacagatgacactgctgataaaacttacggaaatcgcctggccagcatgttaggctctatcccagctccacctgcaatggcctcagaattcccgccgtcaacagggaaatctgctgggatgctttcggctgtcagctcgagctcaattcgttttactgctggtatcatccaacttgatggcctcactttcagcagcggctccggtcagtggcccttgcagaagaatggagacttgagtttgcttgtctcttttgctgtggagggcgacgtggcatccaagctccctgttggtcttgggcgtgctactcggattagcaccgttcccatggtgctgcgcagtggtttttaccttttctttatgtcggccatgattctcttgtttagctacaaagtagggtcgtgtatctacagcaggtaagttgaagttgatggcgcctcttgtccggccagacctgtgggctgtttattttagttcaacacgtggatcattccctcagtgatgggggtatagcagtcgttcgacaccttttttacacatttaccattttgacctgtcaaaacatacagcaataaactttcgaactggtggtggtgatcatgccgggaccatgttctcgtcagggaaagcagtgcactgtgaatttggtgctctgctcttattattgtaaccaaaattaactgcaatatgttatattctgtcctgtagaggaaaagctattttatctggttattgtaaccaagattataccttggtgggttgctgtcaaagaaacaatggaaatatgattattatcaggccgtgttatttgctccaggccagataattaccatttgatcaacataaacctcaggtctca

SEQ ID NO: 44538 - DNA, 2715 bp, Zea Mays
gggagagggaagcgaaatgcgaaaggcagccgaggccgcgagccgacgcacgcggctcgttgcttcctccatcccctttcctcacgccgacgccaaagtataccaacgaattcctcctcgggctcccacctaatcgtgttcgccgcctgcctctcccaaaccctagcaacccacgatcgaacccaaatccgctcctcccacccgaggaattatgcgaaattccccgagatcctagcccagcactagcagatcgatccatcgcttgcccacctgccggccaccaacccttgtagtctcagtcaatctgtagattgagactacgatgagcctgtcaccgctcgactcctcctccccgccggccgcggctgcggctgctgctacggaggtgcccctcgccccgggcttccgcttccaccccaccgacgaggagctcgtctcctactacctccgccgccgcgtcctcggccgccgcctccgcgtcgacgccatcgccgagatcgacctctaccgcctcgagccctgggacctcccctccctctcccgcatccgcagccgcgacgcccagtggtacttcttcgcccgtctcgaccgcaaggtcgccggcgctggcgccgggggccggggcggtcccggcaacaggaccaaccgcgctacgccgagggggtactggaagaccacgggcaaggaccgcgaggtgcaccaccgcggcaagcccgtcgggatgaagaagacgctcgtcttccacgccgggagggcgcctaagggcgagaggaccaactgggtcatgcacgagtaccgcctcctcgatgcagacggacctcagaatcttccagaagcatgggtctggaccacagaacggtgcgcagtatggtgcaccatacatggaagaggaatgggaagaggatgatgatgctattgagaatggttctacccacgatgcatctggtcaaattgctgcaaccacctgtgctgtagatgaggagtcaaatgaggacgatgagaatgcatattgtgaaacaaacagacctgctcgagtagaaccatctcatctgccttcggtccatgaaatgctcaatccaccagagatggctcctctccaaggtcaagattctaaagagacaagcgatggaagttgttctgatgttgctatttctctggaagagattttgcaggaacctttgtcaaatattagtgtggagaatatgcatagacttgaagggcagaatgccactgatgataacatcagtgttgataacttgttatcagcatatcccacgaaagataatggctacgtaggccagtataacactatgaatgggagtgctccagcagatgaagctcacgcacgctggcctttgagaacatatagtaatcagaattatgtcaatggccctcttgctgatgagttctttgacacagggaatgataccaatggggttgcatattccaggcagcagcaagctgatggcttcccagcacctcgccaagttgatgaaagtatggtattttatgatgccccatctgattacaacttggtggatggaaaagatgacttcgtatatctgaacgacattctgaatgagccacttggaaatgaatcgctctttgatggagatgatatgatggcttactttgatgccacagagaatgatttcaagtatgacattttgggctctggtcagggtttggattatccacttgcagacatgccgttgaactttgcccaaaagagtgacaaggaagacaagtttacattcgaagggatctctgaggttccggaagcaaatcctcagtacggtgcatcctcatctggttcacatgaagatctgtatactgatactgaatttctaggtgtaccaacagatgacactgctgataaaacttacggaaatcgcctggccagcatgttaggctctatcccagctccacctgcaatggcctcagaattcccgccgtcaacagggaaatctgctgggatgctttcggctgtcagctcgagctcaattcgttttactgctggtatcatccaacttgatggcctcactttcagcagcggctccggtcagtggcccttgcagaagaatggagacttgagtttgcttgtctcttttgctgtggagggcgacgtggcatccaagctccctgttggtcttgggcgtgctactcggattagcaccgttcccatggtgctgcgcagtggtttttaccttttctttatgtcggccatgattctcttgtttagctacaaagtagggtcgtgtatctacagcaggtaagttgaagttgatggcgcctcttgtccggccagacctgtgggctgtttattttagttcaacacgtggatcattccctcagtgatgggggtatagcagtcgttcgacaccttttttacacatttaccattttgacctgtcaaaacatacagcaataaactttcgaactggtggtggtgatcatgccgggaccatgttctcgtcagggaaagcagtgcactgtgaatttggtgctctgctcttattattgtaaccaaaattaactgcaatatgttatattctgtcctgtagaggaaaagctattttatctggttattgtaaccaagattataccttggtgggttgctgtcaaagaaacaatggaaatatgattattatcaggccgtgttatttgctccaggccagataattaccatttgatcaacataaacctcaggtctca

SEQ ID NO: 44539 - DNA, 1372 bp, Zea Mays
cacaaattaaccatgctacttaagtaggaagcatatttctcctacttttgcaaatagtcttctagttctttgatggtcgtttattgaagaatcacatgctggaatcaaaatctcgccacaggataacaactatgttggtttgcatgataggcttgttacaatcacagggacctttgataaccaaatgaatgcaatagatttgatactgaaaaagttatctgaggatgttcactatccacctaatttgagctccccatttccttatgcaggccttactttcccaagctaccctggtgttcctgttggttatatgattccacaggtgccatatagtaatgctgtgaactatggacctaataatggttacggaggaaggtatcaaaataacaagccaactacacctatgagatcacctgctagtaatgaagcccaagaatctttgaccattggtatagccgatgaacacattggtgctgttgtaggtcgagcaggaaggaacataacagagatcattcaggctagtggtgctcggatcaagatatcagataggggtgactatatatctgggacatctgacaggaaagtgacgattactggaacacccgaagctatccggaccgcggagtccatgatcatgcagagggtgtcagccagttcagagaggtgatgagccccttctgaaggaagggcgtaggccattgctgtgtccgagcacagcagcgtgtttgatgcaagttaggaggatgtgggaactgctttccttttattttccccccttttttcttttttcctagcaagctcgagcagaaaaaagaaacaagctgttattgtttgttgcattgcgtccaaccgatggttttatgttagtataaactgctagtcgaagataattaggtgcagcgtttgaattgatttgggtttacggttgagttatatcccgtgtatgccataacaaaggcagtcgccgctctgttgctagtggcaagcgctgcctgtcctgtgtctgtttgtacgttgacaatttgattccgttgctcaaggatagaagaatattgatacaggagacccgaggactggtttggtttttgcagtgcttttgagtcgtgtgtgtagatctgtgctactgaggtgctatcttttacgtgatcaggaagagtatcggtggaagctttcaggtgttccattcacccatctgcgtgttgcgggtctcggcggttggcgaccgagcgtgtttgcctgcagtattgggaaacctgtctgactgagacgtctggctggatcgagctgcctggccgcggctcctatcccaggtcaagacaacgactaaacagcaaaaaccattaaatggatgtactgtgcaaaaaaaaaaaac

SEQ ID NO: 44540 - DNA, 1803 bp, Zea Mays
gaagtccaaaaaggcccaaccagcccccctccctctcctttcttcacttggaaatccatggtgtaggcccagagagatctagctagagtttcctgcatccgcctccgccccccaccgcctccacctccgccccccaccgccccgccccacagcaggaaggatggaagccccgggctccccctacgcctcctcgccggaatccgcccccaagcgtgccccacgctcccctccgcagcagcagcagtctccctccgaggaaggagatgacaaggagaaaccaacacatttgagatttctagtgtctaatacggcagcagggtgcatcattgaatcatcatggtttctggactgtttgatgaagtaatgaaggccatggagctgattcttgagaaactgttggctgagggtgaagaattcaacgaagcagaagctagacctaaagttagacttgtagttcctaatagctcttgtggtggtataattggtaaaggtggagcaacaataaagtcgtttattgaagaatcacatgctggaatcaaaatctcgccacaggataacaactatgttggtttgcatgataggcttgttacaatcacagggacctttgataaccaaatgaatgcaatagatttgatactgaaaaagttatctgaggatgttcactatccacctaatttgagctccccatttccttatgcaggccttactttcccaagctaccctggtgttcctgttggttatatgattccacaggtgccatatagtaatgctgtgaactatggacctaataatggttacggaggaaggtatcaaaataacaagccaactacacctatgagatcacctgctagtaatgaagcccaagaatctttgaccattggtatagccgatgaacacattggtgctgttgtaggtcgagcaggaaggaacataacagagatcattcaggctagtggtgctcggatcaagatatcagataggggtgactatatatctgggacatctgacaggaaagtgacgattactggaacacccgaagctatccggaccgcggagtccatgatcatgcagagggtgtcagccagttcagagaggtgatgagccccttctgaaggaagggcgtaggccattgctgtgtccgagcacagcagcgtgtttgatgcaagttaggaggatgtgggaactgctttccttttattttccccccttttttcttttttcctagcaagctcgagcagaaaaaagaaacaagctgttattgtttgttgcattgcgtccaaccgatggttttatgttagtataaactgctagtcgaagataattaggtgcagcgtttgaattgatttgggtttacggttgagttatatcccgtgtatgccataacaaaggcagtcgccgctctgttgctagtggcaagcgctgcctgtcctgtgtctgtttgtacgttgacaatttgattccgttgctcaaggatagaagaatattgatacaggagacccgaggactggtttggtttttgcagtgcttttgagtcgtgtgtgtagatctgtgctactgaggtgctatcttttacgtgatcaggaagagtatcggtggaagctttcaggtgttccattcacccatctgcgtgttgcgggtctcggcggttggcgaccgagcgtgtttgcctgcagtattgggaaacctgtctgactgagacgtctggctggatcgagctgcctggccgcggctcctatcccaggtcaagacaacgactaaacagcaaaaaccattaaatggatgtactgtgcaaaaaaaaaaaac

SEQ ID NO: 44541 - DNA, 1912 bp, Zea Mays
gaagtccaaaaaggcccaaccagcccccctccctctcctttcttcacttggaaatccatggtgtaggcccagagagatctagctagagtttcctgcatccgcctccgccccccaccgcctccacctccgccccccaccgccccgccccacagcaggaaggatggaagccccgggctccccctacgcctcctcgccggaatccgcccccaagcgtgccccacgctcccctccgcagcagcagcagtctccctccgaggaaggagatgacaaggagaaaccaacacatttgagatttctagtgtctaatacggcagcagggtgcatcattggcaagggtggatcaaccattaatgattttcagtcccagtctggggctcgtattcagttatcacgtagcaatgagtttttccctggtacaaatgacagaatcatcatggtttctggactgtttgatgaagtaatgaaggccatggagctgattcttgagaaactgttggctgagttattttaccagggtgaagaattcaacgaagcagaagctagacctaaagttagacttgtagttcctaatagctcttgtggtggtataattggtaaaggtggagcaacaataaagtcgtttattgaagaatcacatgctggaatcaaaatctcgccacaggataacaactatgttggtttgcatgataggcttgttacaatcacagggacctttgataaccaaatgaatgcaatagatttgatactgaaaaagttatctgaggatgttcactatccacctaatttgagctccccatttccttatgcaggccttactttcccaagctaccctggtgttcctgttggttatatgattccacaggtgccatatagtaatgctgtgaactatggacctaataatggttacggaggaaggtatcaaaataacaagccaactacacctatgagatcacctgctagtaatgaagcccaagaatctttgaccattggtatagccgatgaacacattggtgctgttgtaggtcgagcaggaaggaacataacagagatcattcaggctagtggtgctcggatcaagatatcagataggggtgactatatatctgggacatctgacaggaaagtgacgattactggaacacccgaagctatccggaccgcggagtccatgatcatgcagagggtgtcagccagttcagagaggtgatgagccccttctgaaggaagggcgtaggccattgctgtgtccgagcacagcagcgtgtttgatgcaagttaggaggatgtgggaactgctttccttttattttccccccttttttcttttttcctagcaagctcgagcagaaaaaagaaacaagctgttattgtttgttgcattgcgtccaaccgatggttttatgttagtataaactgctagtcgaagataattaggtgcagcgtttgaattgatttgggtttacggttgagttatatcccgtgtatgccataacaaaggcagtcgccgctctgttgctagtggcaagcgctgcctgtcctgtgtctgtttgtacgttgacaatttgattccgttgctcaaggatagaagaatattgatacaggagacccgaggactggtttggtttttgcagtgcttttgagtcgtgtgtgtagatctgtgctactgaggtgctatcttttacgtgatcaggaagagtatcggtggaagctttcaggtgttccattcacccatctgcgtgttgcgggtctcggcggttggcgaccgagcgtgtttgcctgcagtattgggaaacctgtctgactgagacgtctggctggatcgagctgcctggccgcggctcctatcccaggtcaagacaacgactaaacagcaaaaaccattaaatggatgtactgtgcaaaaaaaaaaaac

SEQ ID NO: 44542 - DNA, 2373 bp, Zea Mays
ctccttctattccatcacccccagcgtgcgcgctgcactccctccctgcccctgttctctctctcgtggcgacggcgacggcgacgactgggcggccgttgctgccgccctactcgccaggcgcccaggtattcttcggccccttcgccggcgacgagtgtcaccaggtacgcccactccccttggtcttccctttctgccgtgcgaaaccgagcatccaaaccctaacggactgtttttacccggatctgatccaaccactactgtatatgcatgaattttgcctactagcttcgatcgcgttgcaaaaaatatcgggcgatgcccttaaccggctcctcgcctgtgtgcgggaaccctaccgatcggaattctgctaactctgtccatccatggttcgattaggttcctcgtctccggaacgcagtgcaaagcagatcgatctcggcccagcaggggcctcacgacttgactcccaaggctgactcgatctctttggtttcgtggaccgtgatcagactccagggctggatcgtgtttcttccagtgtgcaagcttggatctcgtaggtctggtttagaaaggaccgtgcttgctctttgctgccgcaatcatgcagagtgggggcgacatgaggcctgtgcacaacagtgtcgatacagttaacgctgctgctgttgccatcgtcaccgcggagagccgcacacagcctcctgctgaacagagaaggaaatgggctgaccggttgagcgtgtacttctgctttggatcacagaagaatggccggcgcatgcgtgtcaaccatgccgcacttgtcccagaacctgcacctcaaaggacagatgcgcctgcagcagaaattccaaaccacccaccgcctcctgtgttcccctttgtggcaccgccatcctctcctgcttctttccttcaatcagaacccacatcaatcgtacaatcaccaagggctggagctccagctttttcgcccctctcaccaaattcccaatccccgacggggccaccatccatctttgctattgggccgtatgcacatgagacacaactcgtctcgcctccagtgttctcggccttcacaactgaaccatcaactgcccctttcactcctcctccggagtctgtccatctgacaaccccttcctctccagaggtcccatatgcaaagcttctgacatcgatcaacaatagcaagaatggtgaagcagggggtgatctccagtcgtatccaaactacccagacagcccaattgggcgcctgatatctccaagctcgggctgttctggcacatcctccccattccctgaccctgagatgcaggcttcttcacgcagcgctttacgcttgttcccagttcgtgagccccctaagatattggatggcgagggcgttgcgacacagaagttgatacctcgccatatgcgcaacggtgggtccctcttggatggccagatctcagcagctgtaccagttgtggacttctctgcccgacttcaacccaacgagcacgcaatggatcaccgggtgtcattcgagttgaccgtcgaagatgtcgcgcgctgccttgagaagaagactgcaatctccggggattctggcacggcatcattccaccttgcaccgaccggcagcggcgaccaccacagagaatccaacgaggcaagggcagggctctacgtcgacgaatcataccatgacttgcccgagaaagcgaggcggtccctgtccctgcgcctggccaaagagttcaatttcaacaacgtcgacgtcggtagcgtggagccgagcgtgggatccgactggtgggcgaacgagaaagtcgccgggatgacaactgagccaaaaaagaactggtctttccacccggtggtgcagcctggggtcagctaacctttgcactgaccataatgatcttatacagggatgaaggaattagcttcttctgcttctgcttctgcttcagtggtcgattccttagggatgacttgccagcttgttctaaacatgcagctagtggtaagttctggatttagatagtaataagtaatggggtgtccaccgtctaatatcgtcatgggatactaaaggtttttattctgggagatgtgacaaaccgcaaactctttggttaggggtcggtcggaactgtcctgttcgtctgttttatcctgataccggtgctgtgttgtgtatgtacataatgaagtagttttttttaaaaaaagtcaattaaaagggtagaacagtttccttcgataagttgccagatgctaccaaattgcttgtgattgttccctgcctgttcatgatattgttattacagaatttgtgagagaggaaacttctgggatttttct

SEQ ID NO: 44543 - DNA, 2343 bp, Zea Mays
ttcttttcctccttctattccatcacccccagcgtgcgcgctgcactccctccctgcccctgttctctctctcgtggcgacggcgacggcgacgactgggcggccgttgctgccgccctactcgccaggcgcccaggtattcttcggccccttcgccggcgacgagtgtcaccaggtacgcccactccccttggtcttccctttctgccgtgcgaaaccgagcatccaaaccctaacggactgtttttacccggatctgatccaaccactactgtatatgcatgaattttgcctactagcttcgatcgcgttgcaaaaaatatcgggcgatgcccttaaccggctcctcgcctgtgtgcgggaaccctaccgatcggaattctgctaactctgtccatccatggttcgattaggttcctcgtctccggaacgcagtgcaaagcagatcgatctcggcccagcaggggcctcacgacttgactcccaagactccagggctggatcgtgtttcttccagtgtgcaagcttggatctcgtaggtctggtttagaaaggaccgtgcttgctctttgctgccgcaatcatgcagagtgggggcgacatgaggcctgtgcacaacagtgtcgatacagttaacgctgctgctgttgccatcgtcaccgcggagagccgcacacagcctcctgctgaacagagaaggaaatgggctgaccggttgagcgtgtacttctgctttggatcacagaagaatggccggcgcatgcgtgtcaaccatgccgcacttgtcccagaacctgcacctcaaaggacagatgcgcctgcagcagaaattccaaaccacccaccgcctcctgtgttcccctttgtggcaccgccatcctctcctgcttctttccttcaatcagaacccacatcaatcgtacaatcaccaagggctggagctccagctttttcgcccctctcaccaaattcccaatccccgacggggccaccatccatctttgctattgggccgtatgcacatgagacacaactcgtctcgcctccagtgttctcggccttcacaactgaaccatcaactgcccctttcactcctcctccggagtctgtccatctgacaaccccttcctctccagaggtcccatatgcaaagcttctgacatcgatcaacaatagcaagaatggtgaagcagggggtgatctccagtcgtatccaaactacccagacagcccaattgggcgcctgatatctccaagctcgggctgttctggcacatcctccccattccctgaccctgagatgcaggcttcttcacgcagcgctttacgcttgttcccagttcgtgagccccctaagatattggatggcgagggcgttgcgacacagaagttgatacctcgccatatgcgcaacggtgggtccctcttggatggccagatctcagcagctgtaccagttgtggacttctctgcccgacttcaacccaacgagcacgcaatggatcaccgggtgtcattcgagttgaccgtcgaagatgtcgcgcgctgccttgagaagaagactgcaatctccggggattctggcacggcatcattccaccttgcaccgaccggcagcggcgaccaccacagagaatccaacgaggcaagggcagggctctacgtcgacgaatcataccatgacttgcccgagaaagcgaggcggtccctgtccctgcgcctggccaaagagttcaatttcaacaacgtcgacgtcggtagcgtggagccgagcgtgggatccgactggtgggcgaacgagaaagtcgccgggatgacaactgagccaaaaaagaactggtctttccacccggtggtgcagcctggggtcagctaacctttgcactgaccataatgatcttatacagggatgaaggaattagcttcttctgcttctgcttctgcttcagtggtcgattccttagggatgacttgccagcttgttctaaacatgcagctagtggtaagttctggatttagatagtaataagtaatggggtgtccaccgtctaatatcgtcatgggatactaaaggtttttattctgggagatgtgacaaaccgcaaactctttggttaggggtcggtcggaactgtcctgttcgtctgttttatcctgataccggtgctgtgttgtgtatgtacataatgaagtagttttttttaaaaaaagtcaattaaaagggtagaacagtttccttcgataagttgccagatgctaccaaattgcttgtgattgttccctgcctgttcatgatattgttattacagaatttgtgagagaggaaacttctgggatttttct

SEQ ID NO: 44544 - DNA, 2629 bp, Zea Mays
ctaatccccacgaaaaccctaaaccctcgctacccggcggcggtggcatgaagggcgggagcaaggccgtcgtggtggcgcacaagcacgccggtgtcttcatctccaagtccaaggaggatgcgctctgcaccaagaacatggtcccgggagagtccgtgtacggagagaagcgtgtctccgttcagaatgaggatggaacaaaagtcgaatacagggtgtggaaccccttccgttccaagctggctgctgctgtgcttggtggtgttgacaacatctggattgctcctggtacccgtgtgctgtatcttggtgctgcttctggcacaactgtatctcatgtgtctgatattgatggtctggtctacgctgttgagttctctcacaggagtggaagagaccttgtcaacatggcaaagaagaggaccaatgtgatccccattattgaggatgccaggcatccggcaaggtaccggatgttggttggcatggttgatgttatcttctctgatgttgcacagccagaccaggctaggatcttagcacttaatgcttcatacttcttgaagaacggtggccactttgtcatttcaatcaaggctaactgcatcgactccaccctgcctgctgaggccgtgtttgcagcggaagtggagaagctcaaggcggatcagttcaagcccgcggagcaggtgacgttggagccctacgagcgtgaccatgcatgtgttgtgggtgggtacagggtgcccaagaagcagaaggccacctcttaggatcggaatccgtgctcgtcttgcctaccaaagatgcttcgttgtattgtggtttattaagaaactttgaaggattagtcaaagtatgtgaaccttctgcagtgaaggctggtttagcagcgacagctgttagggtctgatgcagtgtttgctggtttaacagcattattattattattgttgatgaaacatgggtttggtttcgttgatctcactaaaagtgtcaatcttttggatacctctccattgtgcttgtggtggtctgtgctctctgtcgaccggtacgctcccctctgtaactgctgtgtgttcccgtcttaaagctggtttgaaggcccaatccggaaaaaacgatgggcccaacccaaccatggagatgccgttccgtccgggtggagtggcaactgggtcgcggaagcgaagaaaacgtctccgccgcacgcaacgccagaaacccccttccttcccattcccactgctcggattgctttccccacctccaccgccaccagaccagatagcaagcaaccgacccctcctcgctgtattcgcagggaaggagaagatggagcctggccagagcgggactgagcaggcctctccacgcgggaacgattgggaggtcgtgcagctcaccgcgtccgcatacgccgccgcgcccgctccgaggaagcccgagccctccgacgaagcggaagctaagagatacggcgcaaagggggacgatctagccgccggcctactcatgtccggccacttctccgtgtctcagagcgaggtcgagagcctcctcgtaggcgccgacaccaaagaaccaccgcccaaggacaaggaggagccttgcgagcatactaagctgctggaggacgacgtccccaccatcccgttcgatgacggcaaggcgctgaaaggcatgggtctggtcggggaagagccggccgggttctcgtcgcctgtctacagctccatcacggagagcaggagtgacaagaggagcgaggagcctactactctgcatagtttcaaccccgtgactggctcaacaaaggtcgtctcacctgacgagcagagcgagcctgctgctgggtctgggtccgggtctgggtcaggcccgcgtgaagcgtggtggaagaagcagcttctctccctttacaggaacgccaaggagagcaagcatctctggcctatcgtcgccaccactgctgctttggtgggcctggcgtatctggggcggcgctggcataagggcaggctgcagtttcagctgctcaagatatcgccttctaccaacaaggagaaaatcagcgacgcggttggaccgttaaaccgcatcaacgacattctcgttgctggcaaccacccaagtcacggtgtccatgggcatgcccgtgcaggctgaatgcagtcagttcgcgaacccatcgggcgtcctggacccatatactatcatgtgtcgctttgagaatcggctcaagacaaaccatcgggcaggactggagtagttgtccaaggactgaggatgtttatgcagacacaagtatgtttggtggctcgatgtatgtgaattccaaaactccatctgggtatgtaaatatttgtatgggtttagtttggttgctttttcgtttggtcatctcatgaaacctctgctggtggtttccttgtctatattactgtcttatttggggttcgttcatgcatgcatacatgtgatggggcataatatcactggattttatttcaccgtcatgttggctggctggctgctaccgtgaaggtagcctggttgttgcagtcccttgtatattttctgctgcagagttgacctgataataatgttttattgtggcttg

SEQ ID NO: 44545 - DNA, 2956 bp, Zea Mays
gagtatctgaccgtccactcagaatatgccgccccaacggtcctgatcagacacaaaccctaaaactcctctataaaatcctccacgctcatctcctttgccaagcctaatccccacgaaaaccctaaaccctcgctacccggcggcggctacaagctcttcgtcggttcagcaccatgaggccaccggctagaggaggacgtggtgggaggggtggcaggttcgatggcggcggccgtgggggcggcggcggcggccgtgggtttggcggtggtagaggcgggagaggggacaggggagggagaggtggcaggacccccagaggcggccgtggcggcggtggcaggggtggccgcggcggtggcatgaagggcgggagcaaggccgtcgtggtggcgcacaagcacgccggtgtcttcatctccaagtccaaggaggatgcgctctgcaccaagaacatggtcccgggagagtccgtgtacggagagaagcgtgtctccgttcagaatgaggatggaacaaaagtcgaatacagggtgtggaaccccttccgttccaagctggctgctgctgtgcttggtggtgttgacaacatctggattgctcctggtacccgtgtgctgtatcttggtgctgcttctggcacaactgtatctcatgtgtctgatattgtagggccggatggtctggtctacgctgttgagttctctcacaggagtggaagagaccttgtcaacatggcaaagaagaggaccaatgtgatccccattattgaggatgccaggcatccggcaaggtaccggatgttggttggcatggttgatgttatcttctctgatgttgcacagccagaccaggctaggatcttagcacttaatgcttcatacttcttgaagaacggtggccactttgtcatttcaatcaaggctaactgcatcgactccaccctgcctgctgaggccgtgtttgcagcggaagtggagaagctcaaggcggatcagttcaagcccgcggagcaggtgacgttggagccctacgagcgtgaccatgcatgtgttgtgggtgggtacagggtgcccaagaagcagaaggccacctcttaggatcggaatccgtgctcgtcttgcctaccaaagatgcttcgttgtattgtggtttattaagaaactttgaaggattagtcaaagtatgtgaaccttctgcagtgaaggctggtttagcagcgacagctgttagggtctgatgcagtgtttgctggtttaacagcattattattattattgttgatgaaacatgggtttggtttcgttgatctcactaaaagtgtcaatcttttggatacctctccattgtgcttgtggtggtctgtgctctctgtcgaccggtacgctcccctctgtaactgctgtgtgttcccgtcttaaagctggtttgaaggcccaatccggaaaaaacgatgggcccaacccaaccatggagatgccgttccgtccgggtggagtggcaactgggtcgcggaagcgaagaaaacgtctccgccgcacgcaacgccagaaacccccttccttcccattcccactgctcggattgctttccccacctccaccgccaccagaccagatagcaagcaaccgacccctcctcgctgtattcgcagggaaggagaagatggagcctggccagagcgggactgagcaggcctctccacgcgggaacgattgggaggtcgtgcagctcaccgcgtccgcatacgccgccgcgcccgctccgaggaagcccgagccctccgacgaagcggaagctaagagatacggcgcaaagggggacgatctagccgccggcctactcatgtccggccacttctccgtgtctcagagcgaggtcgagagcctcctcgtaggcgccgacaccaaagaaccaccgcccaaggacaaggaggagccttgcgagcatactaagctgctggaggacgacgtccccaccatcccgttcgatgacggcaaggcgctgaaaggcatgggtctggtcggggaagagccggccgggttctcgtcgcctgtctacagctccatcacggagagcaggagtgacaagaggagcgaggagcctactactctgcatagtttcaaccccgtgactggctcaacaaaggtcgtctcacctgacgagcagagcgagcctgctgctgggtctgggtccgggtctgggtcaggcccgcgtgaagcgtggtggaagaagcagcttctctccctttacaggaacgccaaggagagcaagcatctctggcctatcgtcgccaccactgctgctttggtgggcctggcgtatctggggcggcgctggcataagggcaggctgcagtttcagctgctcaagatatcgccttctaccaacaaggagaaaatcagcgacgcggttggaccgttaaaccgcatcaacgacattctcgttgctggcaaccacccaagtcacggtgtccatgggcatgcccgtgcaggctgaatgcagtcagttcgcgaacccatcgggcgtcctggacccatatactatcatgtgtcgctttgagaatcggctcaagacaaaccatcgggcaggactggagtagttgtccaaggactgaggatgtttatgcagacacaagtatgtttggtggctcgatgtatgtgaattccaaaactccatctgggtatgtaaatatttgtatgggtttagtttggttgctttttcgtttggtcatctcatgaaacctctgctggtggtttccttgtctatattactgtcttatttggggttcgttcatgcatgcatacatgtgatggggcataatatcactggattttatttcaccgtcatgttggctggctggctgctaccgtgaaggtagcctggttgttgcagtcccttgtatattttctgctgcagagttgacctgataataatgttttattgtggcttg

SEQ ID NO: 44546 - DNA, 2744 bp, Zea Mays
gagtatctgaccgtccactcagaatatgccgccccaacggtcctgatcagacacaaaccctaaaactcctctataaaatcctccacgctcatctcctttgccaagcctaatccccacgaaaaccctaaaccctcgctacccggcggcggtggcatgaagggcgggagcaaggccgtcgtggtggcgcacaagcacgccggtgtcttcatctccaagtccaaggaggatgcgctctgcaccaagaacatggtcccgggagagtccgtgtacggagagaagcgtgtctccgttcagaatgaggatggaacaaaagtcgaatacagggtgtggaaccccttccgttccaagctggctgctgctgtgcttggtggtgttgacaacatctggattgctcctggtacccgtgtgctgtatcttggtgctgcttctggcacaactgtatctcatgtgtctgatattgtagggccggatggtctggtctacgctgttgagttctctcacaggagtggaagagaccttgtcaacatggcaaagaagaggaccaatgtgatccccattattgaggatgccaggcatccggcaaggtaccggatgttggttggcatggttgatgttatcttctctgatgttgcacagccagaccaggctaggatcttagcacttaatgcttcatacttcttgaagaacggtggccactttgtcatttcaatcaaggctaactgcatcgactccaccctgcctgctgaggccgtgtttgcagcggaagtggagaagctcaaggcggatcagttcaagcccgcggagcaggtgacgttggagccctacgagcgtgaccatgcatgtgttgtgggtgggtacagggtgcccaagaagcagaaggccacctcttaggatcggaatccgtgctcgtcttgcctaccaaagatgcttcgttgtattgtggtttattaagaaactttgaaggattagtcaaagtatgtgaaccttctgcagtgaaggctggtttagcagcgacagctgttagggtctgatgcagtgtttgctggtttaacagcattattattattattgttgatgaaacatgggtttggtttcgttgatctcactaaaagtgtcaatcttttggatacctctccattgtgcttgtggtggtctgtgctctctgtcgaccggtacgctcccctctgtaactgctgtgtgttcccgtcttaaagctggtttgaaggcccaatccggaaaaaacgatgggcccaacccaaccatggagatgccgttccgtccgggtggagtggcaactgggtcgcggaagcgaagaaaacgtctccgccgcacgcaacgccagaaacccccttccttcccattcccactgctcggattgctttccccacctccaccgccaccagaccagatagcaagcaaccgacccctcctcgctgtattcgcagggaaggagaagatggagcctggccagagcgggactgagcaggcctctccacgcgggaacgattgggaggtcgtgcagctcaccgcgtccgcatacgccgccgcgcccgctccgaggaagcccgagccctccgacgaagcggaagctaagagatacggcgcaaagggggacgatctagccgccggcctactcatgtccggccacttctccgtgtctcagagcgaggtcgagagcctcctcgtaggcgccgacaccaaagaaccaccgcccaaggacaaggaggagccttgcgagcatactaagctgctggaggacgacgtccccaccatcccgttcgatgacggcaaggcgctgaaaggcatgggtctggtcggggaagagccggccgggttctcgtcgcctgtctacagctccatcacggagagcaggagtgacaagaggagcgaggagcctactactctgcatagtttcaaccccgtgactggctcaacaaaggtcgtctcacctgacgagcagagcgagcctgctgctgggtctgggtccgggtctgggtcaggcccgcgtgaagcgtggtggaagaagcagcttctctccctttacaggaacgccaaggagagcaagcatctctggcctatcgtcgccaccactgctgctttggtgggcctggcgtatctggggcggcgctggcataagggcaggctgcagtttcagctgctcaagatatcgccttctaccaacaaggagaaaatcagcgacgcggttggaccgttaaaccgcatcaacgacattctcgttgctggcaaccacccaagtcacggtgtccatgggcatgcccgtgcaggctgaatgcagtcagttcgcgaacccatcgggcgtcctggacccatatactatcatgtgtcgctttgagaatcggctcaagacaaaccatcgggcaggactggagtagttgtccaaggactgaggatgtttatgcagacacaagtatgtttggtggctcgatgtatgtgaattccaaaactccatctgggtatgtaaatatttgtatgggtttagtttggttgctttttcgtttggtcatctcatgaaacctctgctggtggtttccttgtctatattactgtcttatttggggttcgttcatgcatgcatacatgtgatggggcataatatcactggattttatttcaccgtcatgttggctggctggctgctaccgtgaaggtagcctggttgttgcagtcccttgtatattttctgctgcagagttgacctgataataatgttttattgtggcttg

SEQ ID NO: 44547 - DNA, 1905 bp, Zea Mays
agatagtaatggtatggatccaaagtggtgatcttttaatggtatggatccaaatttccctattattattagctgccctggcgggcggcagagctcggcgcgacacgggatcgcgtctgccggccaaccactgcgggccgcagagcatggccgggcgcgaccgccgcggggccttcctggcctcgtcgtcgtcgtcggggtcagggtcggggaggcgggcgccggagcacgagtggtggccgcgcagcccagcgtggtcgcgcccgctgtccgacagcggcggagcccgcggacgcaagagcggctcctccacgtcctcctcctccttcaggtccctgttccgctccatcggagtgtggttcagctcgctctctaccgcgtcgccgtcgcccgcgtcctcgtccatgaagcagaagagcagggacgccggggccaagaagccgcctttgccggggtacgccgggacgaagacgtccgcgcgcgggctgtacagcggcggcggcggcggcaggcagcaccggccttcgttccagaactccgtcttctccattgaggagatccttagcgccaccaacaacttctcgccggcgctcaagatcgggcagggtggcttcggcgcggtctacaagggcgtcctccccgatggcaccgtcgtcgccgtcaagcgagccaagctgcggatgcagaaccctcacgtggacgtggagttccggagcgaaatcaagatcatggcgcgcatcgagcaccagagccttgttcgcttctacggctacatggagtgcggcgaggagcgcatcgtcgtcgtcgagtacgtccctaacggcaccctccgggagcacctcgacaggtgcaacgggcggttcctggacttcggcacgcggctcgacatcgccatcgacgtcgcgcacgccgtcacgtacctgcacatgtactccgaccaccccatcatccaccgcgacatcaagtcctccaacatcctcctcaccgactcgatgcgggccaaggtggccgacttcggcttcgcgcgcctcggcgccggcctgggcgccggcggggaggccacgcacgtcaccacccaggtgaagggcacggcggggtacctggacccggagtacctcaagacgtgccagctcacggaccgcagcgacgtctactcctttggcgtgctcctcgtggagctcgcctcggcgcgccgcccaatcgagaccaagcgcgagatgaaggagcgcctcaccgcgcgctgggccatgggcaggttcatcggtggcgcctcggccgacgtgctggacccgcacctcgcccgcacgcccgccgccgaccgcgcgctggaggcggtgctggagctcgcgttccggtgcatgggacccgtcaggcaggacaggcccgccatgagcgactgctgcagggcgctctgggccatcaggaagacgtaccgggacatgctcgccgccgatgccacgccgcagttctccgatcggcgggccaccaccagcagcagcagcgccgacagcagcggcgacctctggaggatctgatcgttccaaggtcatgaatcctgctagctaagctgctagctgattttgtttgactgaaacacttaagtttgctgtaaatatatatacactgtaatttatttttttggccacattttacattttttggttattatatgtccatctgatgctaaacgttggattccatatgattgctgctgctgttagtagtcttgtttagaaaagtttttttggattctgttttagctagcagctcggtcatccaatacacccatctgaaagggtccaccttcaccaatgtgttctagtttttcttgtaggattctattatatctttgtgattagtcaaacaatcctaactttggtttagatttctataaacaattttcac

SEQ ID NO: 44548 - DNA, 556 bp, Zea Mays
atggccgggcgcgaccgccgcggggccttcctggcctcgtcgtcgtcgtcggggtcagggtcggggaggcgggcgccggagcacgagtggtggccgcgcagcccagcgtggtcgcgcccgctgtccgacagcggcggagcccgcggacgcaagagcggctcctccacgtcctcctcctccttcaggtccctgttccgctccatcggagtgtggttcagctcgctctctaccgcgtcgccgtcgcccgcgtcctcgtccatgaagcagaagagcagggacgccggggccaagaagccgcctttgccggggtacgccgggacgaagacgtccgcgcgcgggctgtacagcggcggcggcggcggcaggcagcaccggccttcgttccagaactccgtcttctccattgaggagatccttagcgccaccaacaacttctcgccggcgctcaagatcgggcagggtggcttcggcgcggtctacaagggcgtcctccccgatggcaccgtcgtcgccgtcaagcgagccaagctgataaatttaaattccgggatggatg

SEQ ID NO: 44549 - DNA, 4226 bp, Zea Mays
ctgagtccgctgacctgacgagtagacaaactccaagcaagcagcgcgagcgcgagggatggccgcccgccgccaccgccagattggttcagtggcggacccccgacggatccctcctgttccccactcgcagtcgcagacaaggcggcttgctttgcttgcttcgtgcctcttcctcgtcgcctaggccgcctccttcactcttcgttctgctccatccatccccaatccatccaccattccgcccgtctgtctctacttgattcctcttgccggggttccttggcctgcctatccttgctaatcgggcgggccagtccgccgcctgcagatctgaacgctgccctcccctgctccccgagcgcggcgaggatcgccgctccacggacgcaagaacaagtgcccttgatcttttccccccatttgattgattcatccagtgctgctggtactggtacccagcaacagttttcggtaggaaactactatggcaacttctccaggtacatacagatggtgctagtgagggagaggtccgcgagccgtcgccgccatttcggaccaaccaaggcggcgctagtatgcttctgcttgctttccttctacctggacactactgcaatgccgtcaacgtcattgtaaaccgtcagtgctagccacatggtaacgctagactgcgaaagttgcgatctttttctcgcatctcctcggcaacttgccaatttggtcagcatcgtcatcaccaccaccatcagcggcgcagctgaactgacgatgctttgcccgagatccggatgctcatccagatcgagacgccattcatctccccccccccccccccccccccgccgtgcggatgcggtggctcctcctcttggcgttcgccgccgcccccgccgccggcgagatggggtacgcgcattgcggctgcgacggcagcggcggcgctggcggtggaagcgggttctggagcctggacaacatcttcaagtggcagaaggtgagcgacctgctcatcgcggcggcctacttctccatcccgcttgagatcctctacttcgtcgcggggctccgccacctgctcccgttccggtgggtgctggtccagttcggcgccttcatcgtgctgtgcggcctcacccacctgctggcggccttcacctacgagccccacccgttcatggtcgtgctgctcctcactgccgccaagttcctcacggcgctcgtctccttcctcaccgccatcacgctgctcacgctcatcccgcaactgctgcgcgtcaaggtccgcgagagcctgctgtggatcaaggcccgcgagctggaccgcgaggtggttctcatgaagcggcaggaggaggcgagctggcacgtccgcatgctcacccaggagatccgccgctcgctggaccgccacaccgtgctctacaccacgctcatcgagctctccagggtgctcgcgctcgacaactgcgccgtctggatgccatccgaggacaagtccggaatgtgcctcacacacgagctccggcggggcagcgacgacggcgaggccgtagtgggcgctgacgacgcggacgtcctcgaggtcaagggcgccgacggggtcaagctgctgccgccgggctcggtacttggctccgccagcggcggcggcaaggaggggaccggcacggtggcggcgatccgaatgccgatgctcagggtcgccgacttcaagggtgggacgccccaggtgatcaaggcaagctacgccgtgctggttctggtgccgcccagcggcaggaagtgggcgccgcacgagctggagatcgtggaggtggtcgccgaccaggtggccgtggcgctctcgcacgcctcgctgctggaggagtcgcaggcgatgcgtgacaggctggccgagcagaaccgcgagctgctgcaggcgaggcgggacgctctcatggcgaacgaggccagggacgcgttccagcgcgtcatgagccagggaatgcggaggcccatccactccgtccagggactggtgtccgtggtgcaggaggaggagggactggcgtccgagcagaggctcgtcgtcgacgctgtggcgcggaccgcaaccgtcgtctcgacgctcatcaacgacgtcatggagatgtccgcggccaccagccaggagcgcttcccgctggagacgcggccgttccgcctgcgctccatggtgagggacgccgcctgcgtggccaggtgtctctgtgacctgagcgggcggtttggtttcgcggtgcacgtggagaacgtgctgccggaccttgtcatcggcgatgagcggaggatcttccacgtcctgctgcacatggtaggcaatctgatcggtcgggtcgacgagggggacgtcacgttccgggtgcgcgccgatgatgaggcgacggaggaccagaggtgggatccgtggaggccgagctactccggtgggcactcgtcggtcaggtttgtggtcggggtgaagaggcagcagaacgcaggcgactcgcttccgcggttcttgcggcggccaaggacccatgacgggttggatctcaggctcagcttcagcatgtgcaggaagcttgtgcagacgatgcaagggaacatctgggcagttctcgacggccaaggactcccggagagcatgaccctggtcctgaggttccagctccaaccatcgctggcgagctccaacctcctcggagggtcgtttgatcaggagcactactcatcattgccatctaaccaaatagccgggctgaaggttctgctcatcgatgacgacgagatcaacctggtggtggcccggaagctcctggagaggctaggctgcaccgtttcctcaggctcgggactcatggactcttcctctgcctgtgcctcgttccagctcgtcatggttaacctcgagatgtcagcgatagatcccctggatgctgcctcgaggatcaggcagcagtacaggagctcgcactggcccctggtgatggccatgacgtcggagcagaacgtgtgggagaagtgcgcgcagtccgggatcaacggcgtcctgaagaagccgcttgttctgctggaagtgaaagaagagctcgagcggatccttcagaacacatgatgcctgccatgacccatgagctactaccatgatgaatacgacccccgtccgtccgtctagcatactacatagcagaggggaggggacatggatctcgagttgagaagtggatgcaagtctcctacgctgctgtagttgagtgactgctgtgaggacggaggtggtgacgacgacggatttggcaggcaagcacgagggccgcgttatccgatccatgcccatgccgcgtaaggaggcttcacctcgattcaccaactacataatcacctcgattcacacacgtcaggctttcagtcgataaattcattagtttcatcagaaacggaatgcagttgccagttataatgttggcgtcagtcgcaggggatcttcggccatcgtcgccgcatcagaagcaatgcgcagctccagtggcctcgaccgaacaggacaagaaatagaatttgttgccaatctatcaactcagctaatgtgttgggagcttcttcaacgacatctgatgaggcaatcccagtcccagttgtccagatagatcaggactcagaccgtgatgcgactattgtgcagctaagttttggagatcattcggggatactacttgacacgtttttgtcatatctgccaattatttttcctgatattcactgttttcctgattctttcaaggcaatcaacgatgaaggcatgtccatgtatcagaggcccttcatgaagggcaagctgtacatccacttctcggtggagttcccggactcgttgagcctggagcagtgcaaggccctggaggctgttctcccgcccaagccagtatcacagtacactgacatggagctggacgagtgcgaagatacgatgccctatgacgtgaacatcaaagaggagatgcggaggcggcagcagcagcaccaggaggcctacgacgaggagatgatgtgccaggcggtgggcagagggtgcagtgcgcccagcagtaggcagcttgcggcaaatttgttgtttcgctttgggcgactattgagtttgcccgcttgtattggtctgatgatacttctgttacaagagtgcagtattactaaggattagttcctatataatgacacattgg

SEQ ID NO: 44550 - DNA, 4278 bp, Zea Mays
gctgagtccgctgacctgacgagtagacaaactccaagcaagcagcgcgagcgcgagggatggccgcccgccgccaccgccagattggttcagtggcggacccccgacggatccctcctgttccccactcgcagtcgcagacaaggcggcttgctttgcttgcttcgtgcctcttcctcgtcgcctaggccgcctccttcactcttcgttctgctccatccatccccaatccatccaccattccgcccgtctgtctctacttgattcctcttgccggggttccttggcctgcctatccttgctaatcgggcgggccagtccgccgcctgcagatctgaacgctgccctcccctgctccccgagcgcggcgaggatcgccgctccacggacgcaagaacaagtgcccttgatcttttccccccatttgattgattcatccagtgctgctggtactggtacccagcaacagttttcggtaggaaactactatggcaacttctccaggtacatacagatggtgctagtgagggagaggtccgcgagccgtcgccgccatttcggaccaaccaaggcggcgctagtatgcttctgcttgctttccttctacctggacactactgcaatgccgtcaacgtcattgtaaaccgtcagtgctagccacatggtaacgctagactgcgaaagttgcgatctttttctcgcatctcctcggcaacttgccaatttggtcagcatcgtcatcaccaccaccatcagcggcgcagctgaactgacgatgctttgcccgagatccggatgctcatccagatcgagacgccattcatctccccccccccccccccccccccgccgtgcggatgcggtggctcctcctcttggcgttcgccgccgcccccgccgccggcgagatggggtacgcgcattgcggctgcgacggcagcggcggcgctggcggtggaagcgggttctggagcctggacaacatcttcaagtggcagaaggtgagcgacctgctcatcgcggcggcctacttctccatcccgcttgagatcctctacttcgtcgcggggctccgccacctgctcccgttccggtgggtgctggtccagttcggcgccttcatcgtgctgtgcggcctcacccacctgctggcggccttcacctacgagccccacccgttcatggtcgtgctgctcctcactgccgccaagttcctcacggcgctcgtctccttcctcaccgccatcacgctgctcacgctcatcccgcaactgctgcgcgtcaaggtccgcgagagcctgctgtggatcaaggcccgcgagctggaccgcgaggtggttctcatgaagcggcaggaggaggcgagctggcacgtccgcatgctcacccaggagatccgccgctcgctggaccgccacaccgtgctctacaccacgctcatcgagctctccagggtgctcgcgctcgacaactgcgccgtctggatgccatccgaggacaagtccggaatgtgcctcacacacgagctccggcggggcagcgacgacggcgaggccgtagtgggcgctgacgacgcggacgtcctcgaggtcaagggcgccgacggggtcaagctgctgccgccgggctcggtacttggctccgccagcggcggcggcaaggaggggaccggcacggtggcggcgatccgaatgccgatgctcagggtcgccgacttcaagggtgggacgccccaggtgatcaaggcaagctacgccgtgctggttctggtgccgcccagcggcaggaagtgggcgccgcacgagctggagatcgtggaggtggtcgccgaccaggtggccgtggcgctctcgcacgcctcgctgctggaggagtcgcaggcgatgcgtgacaggctggccgagcagaaccgcgagctgctgcaggcgaggcgggacgctctcatggcgaacgaggccagggacgcgttccagcgcgtcatgagccagggaatgcggaggcccatccactccgtccagggactggtgtccgtggtgcaggaggaggagggactggcgtccgagcagaggctcgtcgtcgacgctgtggcgcggaccgcaaccgtcgtctcgacgctcatcaacgacgtcatggagatgtccgcggccaccagccaggagcgcttcccgctggagacgcggccgttccgcctgcgctccatggtgagggacgccgcctgcgtggccaggtgtctctgtgacctgagcgggcggtttggtttcgcggtgcacgtggagaacgtgctgccggaccttgtcatcggcgatgagcggaggatcttccacgtcctgctgcacatggtaggcaatctgatcggtcgggtcgacgagggggacgtcacgttccgggtgcgcgccgatgatgaggcgacggaggaccagaggtgggatccgtggaggccgagctactccggtgggcactcgtcggtcaggtttgtggtcggggtgaagaggcagcagaacgcaggcgactcgcttccgcggttcttgcggcggccaaggacccatgacgggttggatctcaggctcagcttcagcatgtgcaggaagcttgtgcaggtacctgcgtgcgtgcgtgccctttgctttttttttggtcttgttgtgtgatgtgctctctctctctctctctcgacagacgatgcaagggaacatctgggcagttctcgacggccaaggactcccggagagcatgaccctggtcctgaggttccagctccaaccatcgctggcgagctccaacctcctcggagggtcgtttgatcaggagcactactcatcattgccatctaaccaaatagccgggctgaaggttctgctcatcgatgacgacgagatcaacctggtggtggcccggaagctcctggagaggctaggctgcaccgtttcctcaggctcgggactcatggactcttcctctgcctgtgcctcgttccagctcgtcatggttaacctcgagatgtcagcgatagatcccctggatgctgcctcgaggatcaggcagcagtacaggagctcgcactggcccctggtgatggccatgacgtcggagcagaacgtgtgggagaagtgcgcgcagtccgggatcaacggcgtcctgaagaagccgcttgttctgctggaagtgaaagaagagctcgagcggatccttcagaacacatgatgcctgccatgacccatgagctactaccatgatgaatacgacccccgtccgtccgtctagcatactacatagcagaggggaggggacatggatctcgagttgagaagtggatgcaagtctcctacgctgctgtagttgagtgactgctgtgaggacggaggtggtgacgacgacggatttggcaggcaagcacgagggccgcgttatccgatccatgcccatgccgcgtaaggaggcttcacctcgattcaccaactacataatcacctcgattcacacacgtcaggctttcagtcgataaattcattagtttcatcagaaacggaatgcagttgccagttataatgttggcgtcagtcgcaggggatcttcggccatcgtcgccgcatcagaagcaatgcgcagctccagtggcctcgaccgaacaggacaagaaatagaatttgttgccaatctatcaactcagctaatgtgttgggagcttcttcaacgttgtccagatagatcaggactcagaccgtgatgcgactattgtgcagctaagttttggagatcattcggggatactacttgacacgtttttgtcatatctgccaattatttttcctgatattcactgttttcctgattctttcaaggcaatcaacgatgaaggcatgtccatgtatcagaggcccttcatgaagggcaagctgtacatccacttctcggtggagttcccggactcgttgagcctggagcagtgcaaggccctggaggctgttctcccgcccaagccagtatcacagtacactgacatggagctggacgagtgcgaagatacgatgccctatgacgtgaacatcaaagaggagatgcggaggcggcagcagcagcaccaggaggcctacgacgaggagatgatgtgccaggcggtgggcagagggtgcagtgcgcccagcagtaggcagcttgcggcaaatttgttgtttcgctttgggcgactattgagtttgcccgcttgtattggtctgatgatacttctgttacaagagtgcagtattactaaggattagttcctatataatgacacattgg

SEQ ID NO: 44551 - DNA, 2778 bp, Zea Mays
gctaggctagaaccccgcgtcaaagcatgcagcctccaacgttgttgccgcccgggcttctgcacaaacccctccaaagggcatcaacgcgccgccgcaatgctgcgtcggccgccaccactccggctgggcacacggaaccgggcaacaacttgccacatgcgtcacactgccgcgcaccaaagccgaagcccgctgtcgctgtcggccctggcacccgcgggcaccaaagccacctgccgtcgggcgctccaccgccgtcgccaccatcttgtgcctgcccaggtcacttgttgtcgttgccatgccatcaaacgagaggagggccccgtcgccgccgccatctcggccgaccgcgtagccctgctggcgcacctcgccgggccactggacgcctctctccatccgtgcagcctcccaacgcccaagcaggttccacccctcctccccacaagcaccaccacctcaatggtgtcgatccagcaagggagggccagatacaggccgacggggcctagatctgccggcaagcgcagcccttacacccacctctcctcctccccacccccaagtcgtttctcacgcagaggaccgcgctcgtgagaggcaggggcgcggggtctacgttaacacctgcccttgaatccgcctgcatcgacaaccttcatgccgccgccgcccttcaagtagtcgccaatgccgcgtggcacccgcccttgaggtgcgggtgtgggtgggaggggagagctgaggagctcctcgccgccgccttcctcgtgcccgcgtgagcctctctgcaggtcgctccggcgatggcgagactggggagcgggagggaggtattggcgagcgcgccgccttggctccgcctgtgttgcccgtggggaacgacacgggcgtggggagtggggactctcccgtcctcttaagcgctactattctaaagctactgatccctttgtttatttgtgctgatatttctgcgtgttaacagattcatactttgcccgctatcactgcctcatggtcaaaattctttctgttaggtctctatttctgtccctctctatctctgtcacaagctctgtaatctgtagttctgcataagactgcatctttacaaataatccaattatggaagggaatgaaatcatgaaaaggatatgctggagcaatatagctataattagaaaaatataagacacagtgatcctgcataaccgcagtacatgaatttcatcttagacggaattaacaggctctctatggtaactatggatctcaattgtattgctaattggggctattatgtactactaatgtcattgcctagttattgtcacacccttttttgtcaacttgtagtggttttctgtcgtaccaaaacattttagcagacaatgttttgtcttatttcgtgatatgggtccagagaactgtgtttgtcggtctatcacagagtatgcaagttccccatttctgatttattgaaacaacattgtgttcctctaaaaatagttcctttctgcgtcaacttcaatgcataatggtagatatgggatccttgtcaaccatgtgctttcctggaccagtttagtttgaaatatttgaaagtagttaagcacagttttctggttaattttacgtaaagggaatacgatggtccttgcaatgctgtattgatggctgcattgatgctatctgaatatttcattggccgaactttttttttagtgtggtatgcatttggaagctaacaactagaatgtctacattaataaggtatgtctttctttaaaagctaacaactagatgagatatagaaggattatggataagcttctagacaactatacatttgttattaggtactgaaagctcttttactttcctgtagttgtcaggtgatatccacgaagaggtggagactcataacagaatgctagaccgaatggggagcgacatggatacatcaaggggctttctctctggcaccgtgggcaaattcaagacggtattaagcgacatcagaaacaattattgctactatgcagttcatctgccctttgtgcccttcttgagatgattcatgtcatgtgtaaacgaacatgatacaggtgttcgagaccaaatctactggtttactacttgaccaggtagaatcatccacggtgaaagttttgtggggctgggcgtgttcaagaacattctgaaaatggacgtgctgatctggtggtgccgtgccgcgtatatatatactcatgagtagcagagtatgctgatgtgggttccgtgaacaccgcagcgtgttgggtcgaacctctctctgctacaggaaattgttgtccgttcctttggcatgatatgtgtgtatggagggagtatgtacatgtggtattaccgtactagtaaggtcctctttagaagcaattattttttagctaagagagattagcttcttagtttttaacaaactaataatttaattcttataaactaaggtatataccggtatgtttggaatcacttcaatttctataaaacagttttttaaaaaaactgggtgcatctaaacatgtagtacgtggaatctcgaccacagagatgtatctactaggtttccttgtggctgggactcgacttgtttgagcactgtgtgaggtcgacacgtgtctctcccccgcatctggcaagacggatccagatgaaaggaatgacattgtggctgcaccaagagcaaccggtataataacacttgacaaggagtattatatgctt

SEQ ID NO: 44552 - DNA, 1418 bp, Zea Mays
tagtaaaggagtgacgtctcggacgccaccctcacttgtcctagaaggaccgggctttcgcctatgtaaaactgtgctggaaacgtgacgcactcagcagataaacggcgcccatgattttcatcgtcgctaagcctgatgtcacccagcacataacatagctaggctagaaccccgcgtcaaagcatgcagcctccaacgttgttgccgcccgggcttctgcacaaacccctccaaagggcatcaacgcgccgccgcaatgctgcgtcggccgccaccactccggctgggcacacggaaccgggcaacaacttgccacatgcgtcacactgccgcgcaccaaagccgaagcccgctgtcgctgtcggccctggcacccgcgggcaccaaagccacctgccgtcgggcgctccaccgccgtcgccaccatcttgtgcctgcccaggtcacttgttgtcgttgccatgccatcaaacgagaggagggccccgtcgccgccgccatctcggccgaccgcgtagccctgctggcgcacctcgccgggccactggacgcctctctccatccgtgcagcctcccaacgcccaagcagtgtggtatgcatttggaagctaacaactagaatgtctacattaataagttgtcaggtgatatccacgaagaggtggagactcataacagaatgctagaccgaatggggagcgacatggatacatcaaggggctttctctctggcaccgtgggcaaattcaagacggtgttcgagaccaaatctactggtttactacttgaccaggtagaatcatccacggtgaaagttttgtggggctgggcgtgttcaagaacattctgaaaatggacgtgctgatctggtggtgccgtgccgcgtatatatatactcatgagtagcagagtatgctgatgtgggttccgtgaacaccgcagcgtgttgggtcgaacctctctctgctacaggaaattgttgtccgttcctttggcatgatatgtgtgtatggagggagtatgtacatgtggtattaccgtactagtaaggtcctctttagaagcaattattttttagctaagagagattagcttcttagtttttaacaaactaataatttaattcttataaactaaggtatataccggtatgtttggaatcacttcaatttctataaaacagttttttaaaaaaactgggtgcatctaaacatgtagtacgtggaatctcgaccacagagatgtatctactaggtttccttgtggctgggactcgacttgtttgagcactgtgtgaggtcgacacgtgtctctcccccgcatctggcaagacggatccagatgaaaggaatgacattgtggctgcaccaagagcaaccggtataataacacttgacaaggagtattatatgctt

SEQ ID NO: 44553 - DNA, 491 bp, Zea Mays
agcgcgtagcataactccttgtcctccagtcctcctcccctccgcggcttctcgcagtgcttcgtgaatcctaaattcacgccgatccgacgcgaatcgatcgagaggcaggaggcagcacgattcggatcgagacgagcgccatgaacccgagaggggcccgttgtggatggatcacacgcgattagtgcgatcggtacgctgtgattgttaaggattaagacgatgtgctgctgtctacttaccttggcttgtagataattcagttgttgtctcaaaattatggttgaggaattccttccaaagacaaatcgattgctgtattggacagtttcatttccccaactctaagtttgttgtttgtttgaggatcacgaatctaggtttatcagacatggaagttggtttcacgtgattattgaatgggcttgttttgcttatctgtctcaagagagaagagaccaataaatttgtaacttgggactctaagc

SEQ ID NO: 44554 - DNA, 497 bp, Zea Mays
tgagggctcggacgggaggcaggaggcagcacgattcggatcgagacgagcgccatgaacccgagagggtaagattctgcgcctttttgttgctttgagcttcgaattttgtgacatggtgttcggatatcagggttgatgagcgcaagcgatttgttagtagggcccgttgtggatggatcacacgcgattagtgcgatcggtacgctgtgattgttaaggattaagacgatgtgctgctgtctacttaccttggcttgtagataattcagttgttgtctcaaaattatggttgaggaattccttccaaagacaaatcgattgctgtattggacagtttcatttccccaactctaagtttgttgtttgtttgaggatcacgaatctaggtttatcagacatggaagttggtttcacgtgattattgaatgggcttgttttgcttatctgtctcaagagagaagagaccaataaatttgtaacttgggactctaagc

SEQ ID NO: 44555 - DNA, 1300 bp, Zea Mays
atggccgcggagcggaatgagtcccggcgtcaggtcgccgaagcttccctccgcgtcgactccctctccaagcacttggaggccaagcggtccgagagccgagctttgagggctcggacgggagagctcaagaaggatctggagaccgccgcccagaccatggaccagaaggtggccgagctgaaggagatatcggacactgtggcggaattcagccgagaccttgatgcggcggatatccacggagccgtatgcaagccctgagtggctatgtatggaacgaactctgcaaggccgttcaccttggggtgaagctggcgctgaccgtggtcgcctctcactacgagatcgatctcgagcgggtgtgcaaaggctacgtcctccccgacgagcccgacctcaccgacgccgagatgctggggctagttgatgtcgttgaggggccagggtcttcgctggctcgccacttcgaggccgaggtggttccacccatcccgtcgcctgccgcggtcgtgcctcctagtgactccaagggtggcgtccttcctcctccaacattgtagacccgacccttgccctgcggggttttaaagtttttaaatttgtataaaccgaactgtgagctcctcagttcttttaatgtctgcctgtttgctatgttatttttttttgttgttttgtgtctgtttgctcttttattgtatgtgtagttgggctggtaccactgttgagatgtcggcccattagggttagggttctgtgtctatatatgaaaccatcactctatgcaatacaacaagcagtgcattatctaacacattcctctaacagggggatgctcttttccatgccaatggctccaagagcttctgctgcctaaccaatacacgtacacagttatttagcatggatatgcaagaacaagaagcagcatataaatcgaattcactacctcatggaagacatggatgtagagaaaaatctttgagaactgccaccagatcaggaatagcctcagcatcctgcatttgtccaagtgcaaatgcagccccatgagcaagcaagttggaaggatcctttgcagctgaacaatttacaaataatgtcaggttttcttaagcacattcatttgatctctcaaacagtaagttgcagaaatctgaagatgcacagctagcaatgcaaaagtaggtggttgccattcaggcccttgatgtacttttcacttcttgcataactaatctagtacacttgtttttcagtaatggactactaaaaaacagtaatgcaaatttaagag

SEQ ID NO: 44556 - DNA, 3762 bp, Zea Mays
cgctctcgcctgccgccttcccttcgcgtctcctcgctccggccgcagcagccgcctccgccctccatccgcaaaattacccaatccatcatccccgaaccctaaataaatcctcgatcggccgcgcgcgggaatcaacggatgggaccgcggccggcggctccgtagcggattggaggcgctcggttcgcgggggccgcggttcggctgccgggtggcgcccgcttctagagggaaaccaagaaggaaggaaggagattggaataaagacaggcactgcaacgatggctccatctcaagcggcggcagcggctggccccacctttgaggacctcgagcgcgacctgcaggcagttctcatggaccaaaaccacatgtccccagtggacgacctcggcatgtttcgcagcggcagcgctccccccaccgtcgagggatctcgcacggccattggcgcactcttctctggtccaccgcttcacgccaacagccttggcgccggcggcggcagcggtgggactgcttctggccttgacgtgctcactgatgaggagatacggtcacacccagcgtatctgtcgtactactattctaatgagcacctcaacccaaggcttccgccaccaatggtttccaaagaggactggcgtgcagcgcagtggttccaggctgtgtctggaggtattggggataggaggaggaggcctgcggaggtcgggagtggaaactccctgttctcggtgcagccaggggcaaacgaggttggtggagagaaggcgctgctgagtgatagaatggagaggagtggaaggaatgggctcgcacgacagcagtcttcagagtggcttgggagaggctccgatgggctcatcggcttgtcagatgccagtgcccttgggtctccgcgcaagagctttgctgatgcattgcaggaaaatattagccgtcctgctgttatagccggtcatctttcacgttctaatagccgtaatgttcttgagggcccaactccaatcaggtcatctgattcacgcaagccacaactgcagaataggtcagaatccatgaatggcctgcgatctggatccacttcaccgagtctggtcagggtccaaagtcttggttcttcgatgtctcataccttcgcttctgctgttggttcatctatctcaagaagcaccacccctgacccccagctgatacggagaactcctagtccttgccttcctccagttggagttcggatggggagttctgataaaaaagttgaagcttctgtttcttcacttaatcatgatggtgctgacattgtggcaactctgtctagcttaagcctatctggaaataagatgtcgaatgtggaaaatgaagttcagactcatgcttaccagaactttggtgatcaggctgatgtgttgtttaatgtaccaaaggaacataggcaattttcaccacggaatttaactcaaaaaactgatgaagacttgcttaatgcccctgaatatgcagttttcccaaatggggggagtaacttcagtaatttgcatgctagtaaggtggcatctcatagcaatagcaagttccctatgcaatcaccacacggtaatgccaacaagaaaggatctttgatgagctcagctggatcagtttctcagtaccagcacttgaatggtgatagccatgacattgatgtatctggatggcatactcatacaggtggttttacttcatccatgctgaacaatcaactgaatcctgatggtgactatggcaatgttctttcgaatcatggtggatcgagttatcagggccaaccaacagagacgatgtacgcacaatgcttgcaggcaaaccctgattcaccccttggcgcagctgcaagcatgagccctttccaagggaggggttttactggttcaggacacttggatagtcctggataccaaaaagcttaccttgggtcattatttggccagcaaaagctacaatatgggatgccatacctgggcaattctggtgctcttaatcaaaatatctatggcaatgattctgcctttggcattggaatgacttatctaacaagcccgccatctactccatatatctcatctccccaaggccatgttgggcaaggaaaccgtctgactcgacttccagcagtggtgaggaacaccgctggaggatccatgggatcgtggaattcagagaatggtctgatggataatggttatgggtcctccttgctggaggaattcaaaagtaacaaaactagatcttttgagctgttagatattgtaggccatgtggtagagttcagttcggatcagtatgggagtcgctttatacagcagaaactagaaactgcttctactgaacagaagaatatgatttttcctgagatccttccccaggcacgtactttgatgactgatgtttttggaaactatgttatacagaaggctttggaagttgttgaagtggaacaacaaacacaaatggctttggagcttgatggatctatcatgagatgtgttcgtgatcagaatggcaaccatgtcatccaaaaatgtatagaatgcatccctcaggagaggatacgatttatcatttctgcattttacggacatgtcgtggagctttctatgcatccttatggttgtcgtgttattcagaggatcttggagcattgtgacgatgaaagcactcaaaatgccatgatggaagagatcatgcagtccgtggttactttaacggaggaccagtatggtaattatgtaatccagcatgtcctgcaatatgggaaaccagaagagcgttctactataattgcacaactcgctggacagatagtgaagatgagccagcagaaatttgcatccaatgttgttgagaagtgtcttacttttggttctcctgagcaacggcagattctaatcaatgaaatgcttggcacaactgatgagaacgagccgttacaggcaatgatgaaagaccagttcgcaaactatgttgtgcagaaggttctggagacatgtgatgaccagaaccgtgaattgattctttcccgtatcaaggtccacttgaatgcactgaaaaggtacacctatgggaagcatattgtgacacgtgttgagaagcttattgccgcaggagaacggcgcattggcgcactaccctcctgctgagatggcaatggttaggtcacctgtacagcagaagatagcgaggcctagctttttaccattaccagtagtcgttaatattgagcaagtacaaccgcagaagttaaaaaagaaaggctcccaaatcctttgtaaataaaggagagcctctggaaataaataagaatgagaaaagatgagattttacttgtcctcgaggaaagacttgtatatttgtattgtttttcccccctcttgcaagcagcaggataaagaagttttaaatattttgtcgagaagcaaagcagttactagaaggataaaggttttaggatcatagatgatgggaaggactgctgtagattctccttttttccttgggtttcatcagtcagtgtataagtactaatgtccatgctgatgttaatctctgtaagactgccttcagtttactgaatcttttttttctcttctggtgcctgccaagtgccagcatctgagcagttcttcaaatattacttgtttccaaccactcaactttcgtataatgttcataaaatgtttgtagctactactgaccttgatatgtgatgcatcatgg

SEQ ID NO: 44557 - DNA, 3816 bp, Zea Mays
cgctctcgcctgccgccttcccttcgcgtctcctcgctccggccgcagcagccgcctccgccctccatccgcaaaattacccaatccatcatccccgaaccctaaataaatcctcgatcggccgcgcgcgggaatcaacggatgggaccgcggccggcggctccgtagcggattggaggcgctcggttcgcgggggccgcggttcggctgccgggtggcgcccgcttctagagggaaaccaagaaggaaggaaggagattggaataaagacaggcactgcaacgatggctccatctcaagcggcggcagcggctggccccacctttgaggacctcgagcgcgacctgcaggcagttctcatggaccaaaaccacatgtccccagtggacgacctcggcatgtttcgcagcggcagcgctccccccaccgtcgagggatctcgcacggccattggcgcactcttctctggtccaccgcttcacgccaacagccttggcgccggcggcggcagcggtgggactgcttctggccttgacgtgctcactgatgaggagatacggtcacacccagcgtatctgtcgtactactattctaatgagcacctcaacccaaggcttccgccaccaatggtttccaaagaggactggcgtgcagcgcagtggttccaggctgtgtctggaggtattggggataggaggaggaggcctgcggaggtcgggagtggaaactccctgttctcggtgcagccaggggcaaacgaggttggtggagagaaggcgctgctgagtgatagaatggagaggagtggaaggaatgggctcgcacgacagcagtcttcagagtggcttgggagaggctccgatgggctcatcggcttgtcagatgccagtgcccttgggtctccgcgcaagagctttgctgatgcattgcaggaaaatattagccgtcctgctgttatagccggtcatctttcacgttctaatagccgtaatgttcttgagggcccaactccaatcaggtcatctgattcacgcaagccacaactgcagaataggtcagaatccatgaatggcctgcgatctggatccacttcaccgagtctggtcagggtccaaagtcttggttcttcgatgtctcataccttcgcttctgctgttggttcatctatctcaagaagcaccacccctgacccccagctgatacggagaactcctagtccttgccttcctccagttggagttcggatggggagttctgataaaaaagttgaagcttctgtttcttcacttaatcatgatggtgctgacattgtggcaactctgtctagcttaagcctatctggaaataagatgtcgaatgtggaaaatgaagttcagactcatgcttaccagaactttggtgatcaggctgatgtgttgtttaatgtaccaaaggaacataggcaattttcaccacggaatttaactcaaaaaactgatgaagacttgcttaatgcccctgaatatgcagttttcccaaatggggggagtaacttcagtaatttgcatgctagtaaggtggcatctcatagcaatagcaagttccctatgcaatcaccacacggtaatgccaacaagaaaggatctttgatgagctcagctggatcagtttctcagtaccagcacttgaatggtgatagccatgacattgatgtatctggatggcatactcatacaggtggttttacttcatccatgctgaacaatcaactgaatcctgatggtgactatggcaatgttctttcgaatcatggtggatcgagttatcagggccaaccaacagagacgatgtacgcacaatgcttgcaggcaaaccctgattcaccccttggcgcagctgcaagcatgagccctttccaagggaggggttttactggttcaggacacttggatagtcctggataccaaaaagcttaccttgggtcattatttggccagcaaaagctacaatatgggatgccatacctgggcaattctggtgctcttaatcaaaatatctatggcaatgattctgcctttggcattggaatgacttatctaacaagcccgccatctactccatatatctcatctccccaaggccatgttgggcaaggaaaccgtctgactcgacttccagcagtggtgaggaacaccgctggaggatccatgggatcgtggaattcagagaatggtctgatggataatggttatgggtcctccttgctggaggaattcaaaagtaacaaaactagatcttttgagctgttagatattgtaggccatgtggtagagttcagttcggatcagtatgggagtcgctttatacagcagaaactagaaactgcttctactgaacagaagaatatgatttttcctgagatccttccccaggcacgtactttgatgactgatgtttttggaaactatgttatacagaagggttttgtgttacagctgagtcttcaaatgtatggctgccgggtgattcagaaggctttggaagttgttgaagtggaacaacaaacacaaatggctttggagcttgatggatctatcatgagatgtgttcgtgatcagaatggcaaccatgtcatccaaaaatgtatagaatgcatccctcaggagaggatacgatttatcatttctgcattttacggacatgtcgtggagctttctatgcatccttatggttgtcgtgttattcagaggatcttggagcattgtgacgatgaaagcactcaaaatgccatgatggaagagatcatgcagtccgtggttactttaacggaggaccagtatggtaattatgtaatccagcatgtcctgcaatatgggaaaccagaagagcgttctactataattgcacaactcgctggacagatagtgaagatgagccagcagaaatttgcatccaatgttgttgagaagtgtcttacttttggttctcctgagcaacggcagattctaatcaatgaaatgcttggcacaactgatgagaacgagccgttacaggcaatgatgaaagaccagttcgcaaactatgttgtgcagaaggttctggagacatgtgatgaccagaaccgtgaattgattctttcccgtatcaaggtccacttgaatgcactgaaaaggtacacctatgggaagcatattgtgacacgtgttgagaagcttattgccgcaggagaacggcgcattggcgcactaccctcctgctgagatggcaatggttaggtcacctgtacagcagaagatagcgaggcctagctttttaccattaccagtagtcgttaatattgagcaagtacaaccgcagaagttaaaaaagaaaggctcccaaatcctttgtaaataaaggagagcctctggaaataaataagaatgagaaaagatgagattttacttgtcctcgaggaaagacttgtatatttgtattgtttttcccccctcttgcaagcagcaggataaagaagttttaaatattttgtcgagaagcaaagcagttactagaaggataaaggttttaggatcatagatgatgggaaggactgctgtagattctccttttttccttgggtttcatcagtcagtgtataagtactaatgtccatgctgatgttaatctctgtaagactgccttcagtttactgaatcttttttttctcttctggtgcctgccaagtgccagcatctgagcagttcttcaaatattacttgtttccaaccactcaactttcgtataatgttcataaaatgtttgtagctactactgaccttgatatgtgatgcatcatgg

SEQ ID NO: 44558 - DNA, 3915 bp, Zea Mays
ctcgctctcgcctgccgccttcccttcgcgtctcctcgctccggccgcagcagccgcctccgccctccatccgcaaaattacccaatccatcatccccgaaccctaaataaatcctcgatcggccgcgcgcgggaatcaacggatgggaccgcggccggcggctccgtagcggattggaggcgctcggttcgcgggggccgcggttcggctgccgggtggcgcccgcttctagagggaaaccaagaaggaaggaaggagattggaataaagacaggcactgcaacgatggctccatctcaagcggcggcagcggctggccccacctttgaggacctcgagcgcgacctgcaggcagttctcatggaccaaaaccacatgtccccagtggacgacctcggcatgtttcgcagcggcagcgctccccccaccgtcgagggatctcgcacggccattggcgcactcttctctggtccaccgcttcacgccaacagccttggcgccggcggcggcagcggtgggactgcttctggccttgacgtgctcactgatgaggagatacggtcacacccagcgtatctgtcgtactactattctaatgagcacctcaacccaaggcttccgccaccaatggtttccaaagaggactggcgtgcagcgcagtggttccaggctgtgtctggaggtattggggataggaggaggaggcctgcggaggtcgggagtggaaactccctgttctcggtgcagccaggggcaaacgaggttggtggagagaaggcgctgctgagtgatagaatggagaggagtggaaggaatgggctcgcacgacagcagtcttcagagtggcttgggagaggctccgatgggctcatcggcttgtcagatgccagtgcccttgggtctccgcgcaagagctttgctgatgcattgcaggaaaatattagccgtcctgctgttatagccggtcatctttcacgttctaatagccgtaatgttcttgagggcccaactccaatcaggtcatctgattcacgcaagccacaactgcagaataggtcagaatccatgaatggcctgcgatctggatccacttcaccgagtctggtcagggtccaaagtcttggttcttcgatgtctcataccttcgcttctgctgttggttcatctatctcaagaagcaccacccctgacccccagctgatacggagaactcctagtccttgccttcctccagttggagttcggatggggagttctgataaaaaagttgaagcttctgtttcttcacttaatcatgatggtgctgacattgtggcaactctgtctagcttaagcctatctggaaataagatgtcgaatgtggaaaatgaagttcagactcatgcttaccagaactttggtgatcaggctgatgtgttgtttaatgtaccaaaggaacataggcaattttcaccacggaatttaactcaaaaaactgatgaagacttgcttaatgcccctgaatatgcagttttcccaaatggggggagtaacttcagtaatttgcatgctagtaaggtggcatctcatagcaatagcaagttccctatgcaatcaccacacggtaatgccaacaagaaaggatctttgatgagctcagctggatcagtttctcagtaccagcacttgaatggtgatagccatgacattgatgtatctggatggcatactcatacaggtatggtgactatggcaatgttctttcgaatcatggtggatcgagttatcagggccaaccaacagagacgatgtacgcacaatgcttgcaggcaaaccctgattcaccccttggcgcagctgcaagcatgagccctttccaagggaggggttttactggttcaggacacttggatagtcctggataccaaaaagcttaccttgggtcattatttggccagcaaaagctacaatatgggatgccatacctgggcaattctggtgctcttaatcaaaatatctatggcaatgattctgcctttggcattggaatgacttatctaacaagcccgccatctactccatatatctcatctccccaaggccatgttgggcaaggaaaccgtctgactcgacttccagcagtggtgaggaacaccgctggaggatccatgggatcgtggaattcagagaatggtctgatggataatggttatgggtcctccttgctggaggaattcaaaagtaacaaaactagatcttttgagctgttagatattgtaggccatgtggtagagttcaggtattatttccttgaaattctaacgtagtcaagttcatttattttggtatgaatctactatggttctctctcttacctttcagttcggatcagtatgggagtcgctttatacagcagaaactagaaactgcttctactgaacagaagaatatgatttttcctgagatccttccccaggcacgtactttgatgactgatgtttttggaaactatgttatacagaagttctttgaatacggaactgaaacgcaaacgaagcaactggcaaccctgcttaagggttttgtgttacagctgagtcttcaaatgtatggctgccgggtgattcagaaggctttggaagttgttgaagtggaacaacaaacacaaatggctttggagcttgatggatctatcatgagatgtgttcgtgatcagaatggcaaccatgtcatccaaaaatgtatagaatgcatccctcaggagaggatacgatttatcatttctgcattttacggacatgtcgtggagctttctatgcatccttatggttgtcgtgttattcagaggatcttggagcattgtgacgatgaaagcactcaaaatgccatgatggaagagatcatgcagtccgtggttactttaacggaggaccagtatggtaattatgtaatccagcatgtcctgcaatatgggaaaccagaagagcgttctactataattgcacaactcgctggacagatagtgaagatgagccagcagaaatttgcatccaatgttgttgagaagtgtcttacttttggttctcctgagcaacggcagattctaatcaatgaaatgcttggcacaactgatgagaacgagccgttacaggcaatgatgaaagaccagttcgcaaactatgttgtgcagaaggttctggagacatgtgatgaccagaaccgtgaattgattctttcccgtatcaaggtccacttgaatgcactgaaaaggtacacctatgggaagcatattgtgacacgtgttgagaagcttattgccgcaggagaacggcgcattggcgcactaccctcctgctgagatggcaatggttaggtcacctgtacagcagaagatagcgaggcctagctttttaccattaccagtagtcgttaatattgagcaagtacaaccgcagaagttaaaaaagaaaggctcccaaatcctttgtaaataaaggagagcctctggaaataaataagaatgagaaaagatgagattttacttgtcctcgaggaaagacttgtatatttgtattgtttttcccccctcttgcaagcagcaggataaagaagttttaaatattttgtcgagaagcaaagcagttactagaaggataaaggttttaggatcatagatgatgggaaggactgctgtagattctccttttttccttgggtttcatcagtcagtgtataagtactaatgtccatgctgatgttaatctctgtaagactgccttcagtttactgaatcttttttttctcttctggtgcctgccaagtgccagcatctgagcagttcttcaaatattacttgtttccaaccactcaactttcgtataatgttcataaaatgtttgtagctactactgaccttgatatgtgatgcatcatgg

SEQ ID NO: 44559 - DNA, 3787 bp, Zea Mays
gtctcgctctcgcctgccgccttcccttcgcgtctcctcgctccggccgcagcagccgcctccgccctccatccgcaaaattacccaatccatcatccccgaaccctaaataaatcctcgatcggccgcgcgcgggaatcaacggatgggaccgcggccggcggctccgtagcggattggaggcgctcggttcgcgggggccgcggttcggctgccgggtggcgcccgcttctagagggaaaccaagaaggaaggaaggagattggaataaagacaggcactgcaacgatggctccatctcaagcggcggcagcggctggccccacctttgaggacctcgagcgcgacctgcaggcagttctcatggaccaaaaccacatgtccccagtggacgacctcggcatgtttcgcagcggcagcgctccccccaccgtcgagggatctcgcacggccattggcgcactcttctctggtccaccgcttcacgccaacagccttggcgccggcggcggcagcggtgggactgcttctggccttgacgtgctcactgatgaggagatacggtcacacccagcgtatctgtcgtactactattctaatgagcacctcaacccaaggcttccgccaccaatggtttccaaagaggactggcgtgcagcgcagtggttccaggctgtgtctggaggtattggggataggaggaggaggcctgcggaggtcgggagtggaaactccctgttctcggtgcagccaggggcaaacgaggttggtggagagaaggcgctgctgagtgatagaatggagaggagtggaaggaatgggctcgcacgacagcagtcttcagagtggcttgggagaggctccgatgggctcatcggcttgtcagatgccagtgcccttgggtctccgcgcaagagctttgctgatgcattgcaggaaaatattagccgtcctgctgttatagccggtcatctttcacgttctaatagccgtaatgttcttgagggcccaactccaatcaggtcatctgattcacgcaagccacaactgcagaataggtcagaatccatgaatggcctgcgatctggatccacttcaccgagtctggtcagggtccaaagtcttggttcttcgatgtctcataccttcgcttctgctgttggttcatctatctcaagaagcaccacccctgacccccagctgatacggagaactcctagtccttgccttcctccagttggagttcggatggggagttctgataaaaaagttgaagcttctgtttcttcacttaatcatgatggtgctgacattgtggcaactctgtctagcttaagcctatctggaaataagatgtcgaatgtggaaaatgaagttcagactcatgcttaccagaactttggtgatcaggctgatgtgttgtttaatgtaccaaaggaacataggcaattttcaccacggaatttaactcaaaaaactgatgaagacttgcttaatgcccctgaatatgcagttttcccaaatggggggagtaacttcagtaatttgcatgctagtaaggtggcatctcatagcaatagcaagttccctatgcaatcaccacacggtaatgccaacaagaaaggatctttgatgagctcagctggatcagtttctcagtaccagcacttgaatggtgatagccatgacattgatgtatctggatggcatactcatacaggtggttttacttcatccatgctgaacaatcaactgaatcctgatggtgactatggcaatgttctttcgaatcatggtggatcgagttatcagggccaaccaacagagacgatgtacgcacaatgcttgcaggcaaaccctgattcaccccttggcgcagctgcaagcatgagccctttccaagggaggggttttactggttcaggacacttggatagtcctggataccaaaaagcttaccttgggtcattatttggccagcaaaagctacaatatgggatgccatacctgggcaattctggtgctcttaatcaaaatatctatggcaatgattctgcctttggcattggaatgacttatctaacaagcccgccatctactccatatatctcatctccccaaggccatgttgggcaaggaaaccgtctgactcgacttccagcagtggtgaggaacaccgctggaggatccatgggatcgtggaattcagagaatggtctgatggataatggttatgggtcctccttgctggaggaattcaaaagtaacaaaactagatcttttgagctgttagatattgtaggccatgtggtagagttcagttcggatcagtatgggagtcgctttatacagcagaaactagaaactgcttctactgaacagaagaatatgatttttcctgagatccttccccagttctttgaatacggaactgaaacgcaaacgaagcaactggcaaccctgcttaagggttttgtgttacagctgagtcttcaaatgtatggctgccgggtgattcagaaggctttggaagttgttgaagtggaacaacaaacacaaatggctttggagcttgatggatctatcatgagatgtgttcgtgatcagaatggcaaccatgtcatccaaaaatgtatagaatgcatccctcaggagaggatacgatttatcatttctgcattttacggacatgtcgtggagctttctatgcatccttatggttgtcgtgttattcagaggatcttggagcattgtgacgatgaaagcactcaaaatgccatgatggaagagatcatgcagtccgtggttactttaacggaggaccagtatggtaattatgtaatccagcatgtcctgcaatatgggaaaccagaagagcgttctactataattgcacaactcgctggacagatagtgaagatgagccagcagaaatttgcatccaatgttgttgagaagtgtcttacttttggttctcctgagcaacggcagattctaatcaatgaaatgcttggcacaactgatgagaacgagccgttacagaaggttctggagacatgtgatgaccagaaccgtgaattgattctttcccgtatcaaggtccacttgaatgcactgaaaaggtacacctatgggaagcatattgtgacacgtgttgagaagcttattgccgcaggagaacggcgcattggcgcactaccctcctgctgagatggcaatggttaggtcacctgtacagcagaagatagcgaggcctagctttttaccattaccagtagtcgttaatattgagcaagtacaaccgcagaagttaaaaaagaaaggctcccaaatcctttgtaaataaaggagagcctctggaaataaataagaatgagaaaagatgagattttacttgtcctcgaggaaagacttgtatatttgtattgtttttcccccctcttgcaagcagcaggataaagaagttttaaatattttgtcgagaagcaaagcagttactagaaggataaaggttttaggatcatagatgatgggaaggactgctgtagattctccttttttccttgggtttcatcagtcagtgtataagtactaatgtccatgctgatgttaatctctgtaagactgccttcagtttactgaatcttttttttctcttctggtgcctgccaagtgccagcatctgagcagttcttcaaatattacttgtttccaaccactcaactttcgtataatgttcataaaatgtttgtagctactactgaccttgatatgtgatgcatcatgg

SEQ ID NO: 44560 - DNA, 3965 bp, Zea Mays
tcctttcccattcgtctcgtctcgctctcgcctgccgccttcccttcgcgtctcctcgctccggccgcagcagccgcctccgccctccatccgcaaaattacccaatccatcatccccgaaccctaaataaatcctcgatcggccgcgcgcgggaatcaacggatgggaccgcggccggcggctccgtagcggattggaggcgctcggttcgcgggggccgcggttcggctgccgggtggcgcccgcttctagagaaggaaggaaggagattggaataaagacaggcactgcaacgatggctccatctcaagcggcggcagcggctggccccacctttgaggacctcgagcgcgacctgcaggcagttctcatggaccaaaaccacatgtccccagtggacgacctcggcatgtttcgcagcggcagcgctccccccaccgtcgagggatctcgcacggccattggcgcactcttctctggtccaccgcttcacgccaacagccttggcgccggcggcggcagcggtgggactgcttctggccttgacgtgctcactgatgaggagatacggtcacacccagcgtatctgtcgtactactattctaatgagcacctcaacccaaggcttccgccaccaatggtttccaaagaggactggcgtgcagcgcagtggttccaggctgtgtctggaggtattggggataggaggaggaggcctgcggaggtcgggagtggaaactccctgttctcggtgcagccaggggcaaacgaggttggtggagagaaggcgctgctgagtgatagaatggagaggagtggaaggaatgggctcgcacgacagcagtcttcagagtggcttgggagaggctccgatgggctcatcggcttgtcagatgccagtgcccttgggtctccgcgcaagagctttgctgatgcattgcaggaaaatattagccgtcctgctgttatagccggtcatctttcacgttctaatagccgtaatgttcttgagggcccaactccaatcaggtcatctgattcacgcaagccacaactgcagaataggtcagaatccatgaatggcctgcgatctggatccacttcaccgagtctggtcagggtccaaagtcttggttcttcgatgtctcataccttcgcttctgctgttggttcatctatctcaagaagcaccacccctgacccccagctgatacggagaactcctagtccttgccttcctccagttggagttcggatggggagttctgataaaaaagttgaagcttctgtttcttcacttaatcatgatggtgctgacattgtggcaactctgtctagcttaagcctatctggaaataagatgtcgaatgtggaaaatgaagttcagactcatgcttaccagaactttggtgatcaggctgatgtgttgtttaatgtaccaaaggaacataggcaattttcaccacggaatttaactcaaaaaactgatgaagacttgcttaatgcccctgaatatgcagttttcccaaatggggggagtaacttcagtaatttgcatgctagtaaggtggcatctcatagcaatagcaagttccctatgcaatcaccacacggtaatgccaacaagaaaggatctttgatgagctcagctggatcagtttctcagtaccagcacttgaatggtgatagccatgacattgatgtatctggatggcatactcatacaggtggttttacttcatccatgctgaacaatcaactgaatcctgatggtgactatggcaatgttctttcgaatcatggtggatcgagttatcagggccaaccaacagagacgatgtacgcacaatgcttgcaggcaaaccctgattcaccccttggcgcagctgcaagcatgagccctttccaagggaggggttttactggttcaggacacttggatagtcctggataccaaaaagcttaccttgggtcattatttggccagcaaaagctacaatatgggatgccatacctgggcaattctggtgctcttaatcaaaatatctatggcaatgattctgcctttggcattggaatgacttatctaacaagcccgccatctactccatatatctcatctccccaaggccatgttgggcaaggaaaccgtctgactcgacttccagcagtggtgaggaacaccgctggaggatccatgggatcgtggaattcagagaatggtctgatggataatggttatgggtcctccttgctggaggaattcaaaagtaacaaaactagatcttttgagctgttagatattgtaggccatgtggtagagttcaggtattatttccttgaaattctaacgtagtcaagttcatttattttggtatgaatctactatggttctctctcttacctttcagttcggatcagtatgggagtcgctttatacagcagaaactagaaactgcttctactgaacagaagaatatgatttttcctgagatccttccccaggcacgtactttgatgactgatgtttttggaaactatgttatacagaagttctttgaatacggaactgaaacgcaaacgaagcaactggcaaccctgcttaagggttttgtgttacagctgagtcttcaaatgtatggctgccgggtgattcagaaggctttggaagttgttgaagtggaacaacaaacacaaatggctttggagcttgatggatctatcatgagatgtgttcgtgatcagaatggcaaccatgtcatccaaaaatgtatagaatgcatccctcaggagaggatacgatttatcatttctgcattttacggacatgtcgtggagctttctatgcatccttatggttgtcgtgttattcagaggatcttggagcattgtgacgatgaaagcactcaaaatgccatgatggaagagatcatgcagtccgtggttactttaacggaggaccagtatggtaattatgtaatccagcatgtcctgcaatatgggaaaccagaagagcgttctactataattgcacaactcgctggacagatagtgaagatgagccagcagaaatttgcatccaatgttgttgagaagtgtcttacttttggttctcctgagcaacggcagattctaatcaatgaaatgcttggcacaactgatgagaacgagccgttacaggcaatgatgaaagaccagttcgcaaactatgttgtgcagaaggttctggagacatgtgatgaccagaaccgtgaattgattctttcccgtatcaaggtccacttgaatgcactgaaaaggtacacctatgggaagcatattgtgacacgtgttgagaagcttattgccgcaggagaacggcgcattggcgcactaccctcctgctgagatggcaatggttaggtcacctgtacagcagaagatagcgaggcctagctttttaccattaccagtagtcgttaatattgagcaagtacaaccgcagaagttaaaaaagaaaggctcccaaatcctttgtaaataaaggagagcctctggaaataaataagaatgagaaaagatgagattttacttgtcctcgaggaaagacttgtatatttgtattgtttttcccccctcttgcaagcagcaggataaagaagttttaaatattttgtcgagaagcaaagcagttactagaaggataaaggttttaggatcatagatgatgggaaggactgctgtagattctccttttttccttgggtttcatcagtcagtgtataagtactaatgtccatgctgatgttaatctctgtaagactgccttcagtttactgaatcttttttttctcttctggtgcctgccaagtgccagcatctgagcagttcttcaaatattacttgtttccaaccactcaactttcgtataatgttcataaaatgtttgtagctactactgaccttgatatgtgatgcatcatgg

SEQ ID NO: 44561 - DNA, 3697 bp, Zea Mays
cttcctttcccattcgtctcgtctcgctctcgcctgccgccttcccttcgcgtctcctcgctccggccgcagcagccgcctccgccctccatccgcaaaattacccaatccatcatccccgaaccctaaataaatcctcgatcggccgcgcgcgggaatcaacggatgggaccgcggccggcggctccgtagcggattggaggcgctcggttcgcgggggccgcggttcggctgccgggtggcgcccgcttctagagggaaaccaagaaggaaggaaggagattggaataaagacaggcactgcaacgatggctccatctcaagcggcggcagcggctggccccacctttgaggacctcgagcgcgacctgcaggcagttctcatggaccaaaaccacatgtccccagtggacgacctcggcatgtttcgcagcggcagcgctccccccaccgtcgagggatctcgcacggccattggcgcactcttctctggtccaccgcttcacgccaacagccttggcgccggcggcggcagcggtgggactgcttctggccttgacgtgctcactgatgaggagatacggtcacacccagcgtatctgtcgtactactattctaatgagcacctcaacccaaggcttccgccaccaatggtttccaaagaggactggcgtgcagcgcagtggttccaggctgtgtctggaggtattggggataggaggaggaggcctgcggaggtcgggagtggaaactccctgttctcggtgcagccaggggcaaacgaggttggtggagagaaggcgctgctgagtgatagaatggagaggagtggaaggaatgggctcgcacgacagcagtcttcagagtggcttgggagaggctccgatgggctcatcggcttgtcagatgccagtgcccttgggtctccgcgcaagagctttgctgatgcattgcaggaaaatattagccgtcctgctgttatagccggtcatctttcacgttctaatagccgtaatgttcttgagggcccaactccaatcaggtcatctgattcacgcaagccacaactgcagaataggtcagaatccatgaatggcctgcgatctggatccacttcaccgagtctggtcagggtccaaagtcttggttcttcgatgtctcataccttcgcttctgctgttggttcatctatctcaagaagcaccacccctgacccccagctgatacggagaactcctagtccttgccttcctccagttggagttcggatggggagttctgataaaaaagttgaagcttctgtttcttcacttaatcatgatggtgctgacattgtggcaactctgtctagcttaagcctatctggaaataagatgtcgaatgtggaaaatgaagttcagactcatgcttaccagaactttggtgatcaggctgatgtgttgtttaatgtaccaaaggaacataggcaattttcaccacggaatttaactcaaaaaactgatgaagacttgcttaatgcccctgaatatgcagttttcccaaatggggggagtaacttcagtaatttgcatgctagtaaggtggcatctcatagcaatagcaagttccctatgcaatcaccacacggtaatgccaacaagaaaggatctttgatgagctcagctggatcagtttctcagtaccagcacttgaatggtgatagccatgacattgatgtatctggatggcatactcatacagatggtgactatggcaatgttctttcgaatcatggtggatcgagttatcagggccaaccaacagagacgatgtacgcacaatgcttgcaggcaaaccctgattcaccccttggcgcagctgcaagcatgagccctttccaagggaggggttttactggttcaggacacttggatagtcctggataccaaaaagcttaccttgggtcattatttggccagcaaaagctacaatatgggatgccatacctgggcaattctggtgctcttaatcaaaatatctatggcaatgattctgcctttggcattggaatgacttatctaacaagcccgccatctactccatatatctcatctccccaaggccatgttgggcaaggaaaccgtctgactcgacttccagcagtgttcggatcagtatgggagtcgctttatacagcagaaactagaaactgcttctactgaacagaagaatatgatttttcctgagatccttccccaggcacgtactttgatgactgatgtttttggaaactatgttatacagaagttctttgaatacggaactgaaacgcaaacgaagcaactggcaaccctgcttaagggttttgtgttacagctgagtcttcaaatgtatggctgccgggtgattcagaaggctttggaagttgttgaagtggaacaacaaacacaaatggctttggagcttgatggatctatcatgagatgtgttcgtgatcagaatggcaaccatgtcatccaaaaatgtatagaatgcatccctcaggagaggatacgatttatcatttctgcattttacggacatgtcgtggagctttctatgcatccttatggttgtcgtgttattcagaggatcttggagcattgtgacgatgaaagcactcaaaatgccatgatggaagagatcatgcagtccgtggttactttaacggaggaccagtatggtaattatgtaatccagcatgtcctgcaatatgggaaaccagaagagcgttctactataattgcacaactcgctggacagatagtgaagatgagccagcagaaatttgcatccaatgttgttgagaagtgtcttacttttggttctcctgagcaacggcagattctaatcaatgaaatgcttggcacaactgatgagaacgagccgttacaggcaatgatgaaagaccagttcgcaaactatgttgtgcagaaggttctggagacatgtgatgaccagaaccgtgaattgattctttcccgtatcaaggtccacttgaatgcactgaaaaggtacacctatgggaagcatattgtgacacgtgttgagaagcttattgccgcaggagaacggcgcattggcgcactaccctcctgctgagatggcaatggttaggtcacctgtacagcagaagatagcgaggcctagctttttaccattaccagtagtcgttaatattgagcaagtacaaccgcagaagttaaaaaagaaaggctcccaaatcctttgtaaataaaggagagcctctggaaataaataagaatgagaaaagatgagattttacttgtcctcgaggaaagacttgtatatttgtattgtttttcccccctcttgcaagcagcaggataaagaagttttaaatattttgtcgagaagcaaagcagttactagaaggataaaggttttaggatcatagatgatgggaaggactgctgtagattctccttttttccttgggtttcatcagtcagtgtataagtactaatgtccatgctgatgttaatctctgtaagactgccttcagtttactgaatcttttttttctcttctggtgcctgccaagtgccagcatctgagcagttcttcaaatattacttgtttccaaccactcaactttcgtataatgttcataaaatgtttgtagctactactgaccttgatatgtgatgcatcatgg

SEQ ID NO: 44562 - DNA, 3859 bp, Zea Mays
ctcccttcctttcccattcgtctcgtctcgctctcgcctgccgccttcccttcgcgtctcctcgctccggccgcagcagccgcctccgccctccatccgcaaaattacccaatccatcatccccgaaccctaaataaatcctcgatcggccgcgcgcgggaatcaacggatgggaccgcggccggcggctccgtagcggattggaggcgctcggttcgcgggggccgcggttcggctgccgggtggcgcccgcttctagagggaaaccaagaaggaaggaaggagattggaataaagacaggcactgcaacgatggctccatctcaagcggcggcagcggctggccccacctttgaggacctcgagcgcgacctgcaggcagttctcatggaccaaaaccacatgtccccagtggacgacctcggcatgtttcgcagcggcagcgctccccccaccgtcgagggatctcgcacggccattggcgcactcttctctggtccaccgcttcacgccaacagccttggcgccggcggcggcagcggtgggactgcttctggccttgacgtgctcactgatgaggagatacggtcacacccagcgtatctgtcgtactactattctaatgagcacctcaacccaaggcttccgccaccaatggtttccaaagaggactggcgtgcagcgcagtggttccaggctgtgtctggaggtattggggataggaggaggaggcctgcggaggtcgggagtggaaactccctgttctcggtgcagccaggggcaaacgaggttggtggagagaaggcgctgctgagtgatagaatggagaggagtggaaggaatgggctcgcacgacagcagtcttcagagtggcttgggagaggctccgatgggctcatcggcttgtcagatgccagtgcccttgggtctccgcgcaagagctttgctgatgcattgcaggaaaatattagccgtcctgctgttatagccggtcatctttcacgttctaatagccgtaatgttcttgagggcccaactccaatcaggtcatctgattcacgcaagccacaactgcagaataggtcagaatccatgaatggcctgcgatctggatccacttcaccgagtctggtcagggtccaaagtcttggttcttcgatgtctcataccttcgcttctgctgttggttcatctatctcaagaagcaccacccctgacccccagctgatacggagaactcctagtccttgccttcctccagttggagttcggatggggagttctgataaaaaagttgaagcttctgtttcttcacttaatcatgatggtgctgacattgtggcaactctgtctagcttaagcctatctggaaataagatgtcgaatgtggaaaatgaagttcagactcatgcttaccagaactttggtgatcaggctgatgtgttgtttaatgtaccaaaggaacataggcaattttcaccacggaatttaactcaaaaaactgatgaagacttgcttaatgcccctgaatatgcagttttcccaaatggggggagtaacttcagtaatttgcatgctagtaaggtggcatctcatagcaatagcaagttccctatgcaatcaccacacggtaatgccaacaagaaaggatctttgatgagctcagctggatcagtttctcagtaccagcacttgaatggtgatagccatgacattgatgtatctggatggcatactcatacaggtggttttacttcatccatgctgaacaatcaactgaatcctgatggtgactatggcaatgttctttcgaatcatggtggatcgagttatcagggccaaccaacagagacgatgtacgcacaatgcttgcaggcaaaccctgattcaccccttggcgcagctgcaagcatgagccctttccaagggaggggttttactggttcaggacacttggatagtcctggataccaaaaagcttaccttgggtcattatttggccagcaaaagctacaatatgggatgccatacctgggcaattctggtgctcttaatcaaaatatctatggcaatgattctgcctttggcattggaatgacttatctaacaagcccgccatctactccatatatctcatctccccaaggccatgttgggcaaggaaaccgtctgactcgacttccagcagtggtgaggaacaccgctggaggatccatgggatcgtggaattcagagaatggtctgatggataatggttatgggtcctccttgctggaggaattcaaaagtaacaaaactagatcttttgagctgttagatattgtaggccatgtggtagagttcagttcggatcagtatgggagtcgctttatacagcagaaactagaaactgcttctactgaacagaagaatatgatttttcctgagatccttccccaggcacgtactttgatgactgatgtttttggaaactatgttatacagaagttctttgaatacggaactgaaacgcaaacgaagcaactggcaaccctgcttaagggttttgtgttacagctgagtcttcaaatgtatggctgccgggtgattcagaaggctttggaagttgttgaagtggaacaacaaacacaaatggctttggagcttgatggatctatcatgagatgtgttcgtgatcagaatggcaaccatgtcatccaaaaatgtatagaatgcatccctcaggagaggatacgatttatcatttctgcattttacggacatgtcgtggagctttctatgcatccttatggttgtcgtgttattcagaggatcttggagcattgtgacgatgaaagcactcaaaatgccatgatggaagagatcatgcagtccgtggttactttaacggaggaccagtatggtaattatgtaatccagcatgtcctgcaatatgggaaaccagaagagcgttctactataattgcacaactcgctggacagatagtgaagatgagccagcagaaatttgcatccaatgttgttgagaagtgtcttacttttggttctcctgagcaacggcagattctaatcaatgaaatgcttggcacaactgatgagaacgagccgttacagaaggttctggagacatgtgatgaccagaaccgtgaattgattctttcccgtatcaaggtccacttgaatgcactgaaaaggtacacctatgggaagcatattgtgacacgtgttgagaagcttattgccgcaggagaacggcgcattggcgcactaccctcctgctgagatggcaatggttaggtcacctgtacagcagaagatagcgaggcctagctttttaccattaccagtagtcgttaatattgagcaagtacaaccgcagaagttaaaaaagaaaggctcccaaatcctttgtaaataaaggagagcctctggaaataaataagaatgagaaaagatgagattttacttgtcctcgaggaaagacttgtatatttgtattgtttttcccccctcttgcaagcagcaggataaagaagttttaaatattttgtcgagaagcaaagcagttactagaaggataaaggttttaggatcatagatgatgggaaggactgctgtagattctccttttttccttgggtttcatcagtcagtgtataagtactaatgtccatgctgatgttaatctctgtaagactgccttcagtttactgaatcttttttttctcttctggtgcctgccaagtgccagcatctgagcagttcttcaaatattacttgtttccaaccactcaactttcgtataatgttcataaaatgtttgtagctactactgaccttgatatgtgatgcatcatgg

SEQ ID NO: 44563 - DNA, 3842 bp, Zea Mays
ctcccttcctttcccattcgtctcgtctcgctctcgcctgccgccttcccttcgcgtctcctcgctccggccgcagcagccgcctccgccctccatccgcaaaattacccaatccatcatccccgaaccctaaataaatcctcgatcggccgcgcgcgggaatcaacggatgggaccgcggccggcggctccgtagcggattggaggcgctcggttcgcgggggccgcggttcggctgccgggtggcgcccgcttctagagggaaaccaagaaggaaggaaggagattggaataaagacaggcactgcaacgatggctccatctcaagcggcggcagcggctggccccacctttgaggacctcgagcgcgacctgcaggcagttctcatggaccaaaaccacatgtccccagtggacgacctcggcatgtttcgcagcggcagcgctccccccaccgtcgagggatctcgcacggccattggcgcactcttctctggtccaccgcttcacgccaacagccttggcgccggcggcggcagcggtgggactgcttctggccttgacgtgctcactgatgaggagatacggtcacacccagcgtatctgtcgtactactattctaatgagcacctcaacccaaggcttccgccaccaatggtttccaaagaggactggcgtgcagcgcagtggttccaggctgtgtctggaggtattggggataggaggaggaggcctgcggaggtcgggagtggaaactccctgttctcggtgcagccaggggcaaacgaggttggtggagagaaggcgctgctgagtgatagaatggagaggagtggaaggaatgggctcgcacgacagcagtcttcagagtggcttgggagaggctccgatgggctcatcggcttgtcagatgccagtgcccttgggtctccgcgcaagagctttgctgatgcattgcaggaaaatattagccgtcctgctgttatagccggtcatctttcacgttctaatagccgtaatgttcttgagggcccaactccaatcaggtcatctgattcacgcaagccacaactgcagaataggtcagaatccatgaatggcctgcgatctggatccacttcaccgagtctggtcagggtccaaagtcttggttcttcgatgtctcataccttcgcttctgctgttggttcatctatctcaagaagcaccacccctgacccccagctgatacggagaactcctagtccttgccttcctccagttggagttcggatggggagttctgataaaaaagttgaagcttctgtttcttcacttaatcatgatggtgctgacattgtggcaactctgtctagcttaagcctatctggaaataagatgtcgaatgtggaaaatgaagttcagactcatgcttaccagaactttggtgatcaggctgatgtgttgtttaatgtaccaaaggaacataggcaattttcaccacggaatttaactcaaaaaactgatgaagacttgcttaatgcccctgaatatgcagttttcccaaatggggggagtaacttcagtaatttgcatgctagtaaggtggcatctcatagcaatagcaagttccctatgcaatcaccacacggtaatgccaacaagaaaggatctttgatgagctcagctggatcagtttctcagtaccagcacttgaatggtgatagccatgacattgatgtatctggatggcatactcatacaggtggttttacttcatccatgctgaacaatcaactgaatcctgatggtgactatggcaatgttctttcgaatcatggtggatcgagttatcagggccaaccaacagagacgatgtacgcacaatgcttgcaggcaaaccctgattcaccccttggcgcagctgcaagcatgagccctttccaagggaggggttttactggttcaggacacttggatagtcctggataccaaaaagcttaccttgggtcattatttggccagcaaaagctacaatatgggatgccatacctgggcaattctggtgctcttaatcaaaatatctatggcaatgattctgcctttggcattggaatgacttatctaacaagcccgccatctactccatatatctcatctccccaaggccatgttgggcaaggaaaccgtctgactcgacttccagcagtggtgaggaacaccgctggaggatccatgggatcgtggaattcagagaatggtctgatggataatggttatgggtcctccttgctggaggaattcaaaagtaacaaaactagatcttttgagctgttagatattgtaggccatgtggtagagttcagttcggatcagtatgggagtcgctttatacagcagaaactagaaactgcttctactgaacagaagaatatgatttttcctgagatccttccccaggcacgtactttgatgactgatgtttttggaaactatgttatacagaagttctttgaatacggaactgaaacgcaaacgaagcaactggcaaccctgcttaagggttttgtgttacagctgagtcttcaaatgtatggctgccgggtgattcagaaggctttggaagttgttgaagtggaacaacaaacacaaatggctttggagcttgatggatctatcatgagatgtgttcgtgatcagaatggcaaccatgtcatccaaaaatgtatagaatgcatccctcaggagaggatacgatttatcatttctgcattttacggacatgtcgtggagctttctatgcatccttatggttgtcgtgttattcagaggatcttggagcattgtgacgatgaaagcactcaaaatgccatgatggaagagatcatgcagtccgtggttactttaacggaggaccagtatggtaattatgtaatccagcatgtcctgcaatatgggaaaccagaagagcgttctactataattgcacaactcgctggacagatagtgaagatgagccagcagaaatttgcatccaatgttgttgagaagtgtcttacttttggttctcctgagcaacggcagattctaatcaatgaaatgcttggcacaactgatgagaacgagccgttacaggcaatgatgaaagaccagttcgcaaactatgttgtgcagaaggttctggagacatgtgatgaccagaaccgtgaattgattctttcccgtatcaaggtccacttgaatgcactgaaaagaacggcgcattggcgcactaccctcctgctgagatggcaatggttaggtcacctgtacagcagaagatagcgaggcctagctttttaccattaccagtagtcgttaatattgagcaagtacaaccgcagaagttaaaaaagaaaggctcccaaatcctttgtaaataaaggagagcctctggaaataaataagaatgagaaaagatgagattttacttgtcctcgaggaaagacttgtatatttgtattgtttttcccccctcttgcaagcagcaggataaagaagttttaaatattttgtcgagaagcaaagcagttactagaaggataaaggttttaggatcatagatgatgggaaggactgctgtagattctccttttttccttgggtttcatcagtcagtgtataagtactaatgtccatgctgatgttaatctctgtaagactgccttcagtttactgaatcttttttttctcttctggtgcctgccaagtgccagcatctgagcagttcttcaaatattacttgtttccaaccactcaactttcgtataatgttcataaaatgtttgtagctactactgaccttgatatgtgatgcatcatgg

SEQ ID NO: 44564 - DNA, 3881 bp, Zea Mays
ctcccttcctttcccattcgtctcgtctcgctctcgcctgccgccttcccttcgcgtctcctcgctccggccgcagcagccgcctccgccctccatccgcaaaattacccaatccatcatccccgaaccctaaataaatcctcgatcggccgcgcgcgggaatcaacggatgggaccgcggccggcggctccgtagcggattggaggcgctcggttcgcgggggccgcggttcggctgccgggtggcgcccgcttctagagggaaaccaagaaggaaggaaggagattggaataaagacaggcactgcaacgatggctccatctcaagcggcggcagcggctggccccacctttgaggacctcgagcgcgacctgcaggcagttctcatggaccaaaaccacatgtccccagtggacgacctcggcatgtttcgcagcggcagcgctccccccaccgtcgagggatctcgcacggccattggcgcactcttctctggtccaccgcttcacgccaacagccttggcgccggcggcggcagcggtgggactgcttctggccttgacgtgctcactgatgaggagatacggtcacacccagcgtatctgtcgtactactattctaatgagcacctcaacccaaggcttccgccaccaatggtttccaaagaggactggcgtgcagcgcagtggttccaggctgtgtctggaggtattggggataggaggaggaggcctgcggaggtcgggagtggaaactccctgttctcggtgcagccaggggcaaacgaggttggtggagagaaggcgctgctgagtgatagaatggagaggagtggaaggaatgggctcgcacgacagcagtcttcagagtggcttgggagaggctccgatgggctcatcggcttgtcagatgccagtgcccttgggtctccgcgcaagagctttgctgatgcattgcaggaaaatattagccgtcctgctgttatagccggtcatctttcacgttctaatagccgtaatgttcttgagggcccaactccaatcaggtcatctgattcacgcaagccacaactgcagaataggtcagaatccatgaatggcctgcgatctggatccacttcaccgagtctggtcagggtccaaagtcttggttcttcgatgtctcataccttcgcttctgctgttggttcatctatctcaagaagcaccacccctgacccccagctgatacggagaactcctagtccttgccttcctccagttggagttcggatggggagttctgataaaaaagttgaagcttctgtttcttcacttaatcatgatggtgctgacattgtggcaactctgtctagcttaagcctatctggaaataagatgtcgaatgtggaaaatgaagttcagactcatgcttaccagaactttggtgatcaggctgatgtgttgtttaatgtaccaaaggaacataggcaattttcaccacggaatttaactcaaaaaactgatgaagacttgcttaatgcccctgaatatgcagttttcccaaatggggggagtaacttcagtaatttgcatgctagtaaggtggcatctcatagcaatagcaagttccctatgcaatcaccacacggtaatgccaacaagaaaggatctttgatgagctcagctggatcagtttctcagtaccagcacttgaatggtgatagccatgacattgatgtatctggatggcatactcatacaggtggttttacttcatccatgctgaacaatcaactgaatcctgatggtgactatggcaatgttctttcgaatcatggtggatcgagttatcagggccaaccaacagagacgatgtacgcacaatgcttgcaggcaaaccctgattcaccccttggcgcagctgcaagcatgagccctttccaagggaggggttttactggttcaggacacttggatagtcctggataccaaaaagcttaccttgggtcattatttggccagcaaaagctacaatatgggatgccatacctgggcaattctggtgctcttaatcaaaatatctatggcaatgattctgcctttggcattggaatgacttatctaacaagcccgccatctactccatatatctcatctccccaaggccatgttgggcaaggaaaccgtctgactcgacttccagcagtggtgaggaacaccgctggaggatccatgggatcgtggaattcagagaatggtctgatggataatggttatgggtcctccttgctggaggaattcaaaagtaacaaaactagatcttttgagctgttagatattgtaggccatgtggtagagttcagttcggatcagtatgggagtcgctttatacagcagaaactagaaactgcttctactgaacagaagaatatgatttttcctgagatccttccccaggcacgtactttgatgactgatgtttttggaaactatgttatacagaagttctttgaatacggaactgaaacgcaaacgaagcaactggcaaccctgcttaagggttttgtgttacagctgagtcttcaaatgtatggctgccgggtgattcagaaggctttggaagttgttgaagtggaacaacaaacacaaatggctttggagcttgatggatctatcatgagatgtgttcgtgatcagaatggcaaccatgtcatccaaaaatgtatagaatgcatccctcaggagaggatacgatttatcatttctgcattttacggacatgtcgtggagctttctatgcatccttatggttgtcgtgttattcagaggatcttggagcattgtgacgatgaaagcactcaaaatgccatgatggaagagatcatgcagtccgtggttactttaacggaggaccagtatgcatgtcctgcaatatgggaaaccagaagagcgttctactataattgcacaactcgctggacagatagtgaagatgagccagcagaaatttgcatccaatgttgttgagaagtgtcttacttttggttctcctgagcaacggcagattctaatcaatgaaatgcttggcacaactgatgagaacgagccgttacaggcaatgatgaaagaccagttcgcaaactatgttgtgcagaaggttctggagacatgtgatgaccagaaccgtgaattgattctttcccgtatcaaggtccacttgaatgcactgaaaaggtacacctatgggaagcatattgtgacacgtgttgagaagcttattgccgcaggagaacggcgcattggcgcactaccctcctgctgagatggcaatggttaggtcacctgtacagcagaagatagcgaggcctagctttttaccattaccagtagtcgttaatattgagcaagtacaaccgcagaagttaaaaaagaaaggctcccaaatcctttgtaaataaaggagagcctctggaaataaataagaatgagaaaagatgagattttacttgtcctcgaggaaagacttgtatatttgtattgtttttcccccctcttgcaagcagcaggataaagaagttttaaatattttgtcgagaagcaaagcagttactagaaggataaaggttttaggatcatagatgatgggaaggactgctgtagattctccttttttccttgggtttcatcagtcagtgtataagtactaatgtccatgctgatgttaatctctgtaagactgccttcagtttactgaatcttttttttctcttctggtgcctgccaagtgccagcatctgagcagttcttcaaatattacttgtttccaaccactcaactttcgtataatgttcataaaatgtttgtagctactactgaccttgatatgtgatgcatcatgg

SEQ ID NO: 44565 - DNA, 3856 bp, Zea Mays
ctcccttcctttcccattcgtctcgtctcgctctcgcctgccgccttcccttcgcgtctcctcgctccggccgcagcagccgcctccgccctccatccgcaaaattacccaatccatcatccccgaaccctaaataaatcctcgatcggccgcgcgcgggaatcaacggatgggaccgcggccggcggctccgtagcggattggaggcgctcggttcgcgggggccgcggttcggctgccgggtggcgcccgcttctagagggaaaccaagaaggaaggaaggagattggaataaagacaggcactgcaacgatggctccatctcaagcggcggcagcggctggccccacctttgaggacctcgagcgcgacctgcaggcagttctcatggaccaaaaccacatgtccccagtggacgacctcggcatgtttcgcagcggcagcgctccccccaccgtcgagggatctcgcacggccattggcgcactcttctctggtccaccgcttcacgccaacagccttggcgccggcggcggcagcggtgggactgcttctggccttgacgtgctcactgatgaggagatacggtcacacccagcgtatctgtcgtactactattctaatgagcacctcaacccaaggcttccgccaccaatggtttccaaagaggactggcgtgcagcgcagtggttccaggctgtgtctggaggtattggggataggaggaggaggcctgcggaggtcgggagtggaaactccctgttctcggtgcagccaggggcaaacgaggttggtggagagaaggcgctgctgagtgatagaatggagaggagtggaaggaatgggctcgcacgacagcagtcttcagagtggcttgggagaggctccgatgggctcatcggcttgtcagatgccagtgcccttgggtctccgcgcaagagctttgctgatgcattgcaggaaaatattagccgtcctgctgttatagccggtcatctttcacgttctaatagccgtaatgttcttgagggcccaactccaatcaggtcatctgattcacgcaagccacaactgcagaataggtcagaatccatgaatggcctgcgatctggatccacttcaccgagtctggtcagggtccaaagtcttggttcttcgatgtctcataccttcgcttctgctgttggttcatctatctcaagaagcaccacccctgacccccagctgatacggagaactcctagtccttgccttcctccagttggagttcggatggggagttctgataaaaaagttgaagcttctgtttcttcacttaatcatgatggtgctgacattgtggcaactctgtctagcttaagcctatctggaaataagatgtcgaatgtggaaaatgaagttcagactcatgcttaccagaactttggtgatcaggctgatgtgttgtttaatgtaccaaaggaacataggcaattttcaccacggaatttaactcaaaaaactgatgaagacttgcttaatgcccctgaatatgcagttttcccaaatggggggagtaacttcagtaatttgcatgctagtaaggtggcatctcatagcaatagcaagttccctatgcaatcaccacacggtaatgccaacaagaaaggatctttgatgagctcagctggatcagtttctcagtaccagcacttgaatggtgatagccatgacattgatgtatctggatggcatactcatacaggtggttttacttcatccatgctgaacaatcaactgaatcctgatggtgactatggcaatgttctttcgaatcatggtggatcgagttatcagggccaaccaacagagacgatgtacgcacaatgcttgcaggcaaaccctgattcaccccttggcgcagctgcaagcatgagccctttccaagggaggggttttactggttcaggacacttggatagtcctggataccaaaaagcttaccttgggtcattatttggccagcaaaagctacaatatgggatgccatacctgggcaattctggtgctcttaatcaaaatatctatggcaatgattctgcctttggcattggaatgacttatctaacaagcccgccatctactccatatatctcatctccccaaggccatgttgggcaaggaaaccgtctgactcgacttccagcagtggtgaggaacaccgctggaggatccatgggatcgtggaattcagagaatggtctgatggataatggttatgggtcctccttgctggaggaattcaaaagtaacaaaactagatcttttgagctgttagatattgtaggccatgtggtagagttcagttcggatcagtatgggagtcgctttatacagcagaaactagaaactgcttctactgaacagaagaatatgatttttcctgagatccttccccaggcacgtactttgatgactgatgtttttggaaactatgttatacagaagttctttgaatacggaactgaaacgcaaacgaagcaactggcaaccctgcttaagggttttgtgttacagctgagtcttcaaatgtatggctgccgggtgattcagaaggctttggaagttgttgaagtggaacaacaaacacaaatggctttggagcttgatggatctatcatgagatgtgttcgtgatcagaatggcaaccatgtcatccaaaaatgtatagaatgcatccctcaggagaggatacgatttatcatttctgcattttacggacatgtcgtggagctttctatgcatccttatggttgtcgtgttattcagaggatcttggagcattgtgacgatgaaagcactcaaaatgccatgatggaagagatcatgcagtccgtggttactttaacggaggaccagtatggtaattatgtaatccagcatgtcctgcaatatgggaaaccagaagagcgttctactataattgcacaactcgctggacagatagtgaagatgagccagcagaaatttgcatccaatgttgttgagaagtgtcttacttttggttctcctgagcaacggcagattctaatcaatgaaatgcttggcacaactgatgagaacgagccgttacaggttctggagacatgtgatgaccagaaccgtgaattgattctttcccgtatcaaggtccacttgaatgcactgaaaaggtacacctatgggaagcatattgtgacacgtgttgagaagcttattgccgcaggagaacggcgcattggcgcactaccctcctgctgagatggcaatggttaggtcacctgtacagcagaagatagcgaggcctagctttttaccattaccagtagtcgttaatattgagcaagtacaaccgcagaagttaaaaaagaaaggctcccaaatcctttgtaaataaaggagagcctctggaaataaataagaatgagaaaagatgagattttacttgtcctcgaggaaagacttgtatatttgtattgtttttcccccctcttgcaagcagcaggataaagaagttttaaatattttgtcgagaagcaaagcagttactagaaggataaaggttttaggatcatagatgatgggaaggactgctgtagattctccttttttccttgggtttcatcagtcagtgtataagtactaatgtccatgctgatgttaatctctgtaagactgccttcagtttactgaatcttttttttctcttctggtgcctgccaagtgccagcatctgagcagttcttcaaatattacttgtttccaaccactcaactttcgtataatgttcataaaatgtttgtagctactactgaccttgatatgtgatgcatcatgg

SEQ ID NO: 44566 - DNA, 3941 bp, Zea Mays
cgctcccttcctttcccattcgtctcgtctcgctctcgcctgccgccttcccttcgcgtctcctcgctccggccgcagcagccgcctccgccctccatccgcaaaattacccaatccatcatccccgaaccctaaataaatcctcgatcggccgcgcgcgggaatcaacggatgggaccgcggccggcggctccgtagcggattggaggcgctcggttcgcgggggccgcggttcggctgccgggtggcgcccgcttctagagggaaaccaagaaggaaggaaggagattggaataaagacaggcactgcaacgatggctccatctcaagcggcggcagcggctggccccacctttgaggacctcgagcgcgacctgcaggcagttctcatggaccaaaaccacatgtccccagtggacgacctcggcatgtttcgcagcggcagcgctccccccaccgtcgagggatctcgcacggccattggcgcactcttctctggtccaccgcttcacgccaacagccttggcgccggcggcggcagcggtgggactgcttctggccttgacgtgctcactgatgaggagatacggtcacacccagcgtatctgtcgtactactattctaatgagcacctcaacccaaggcttccgccaccaatggtttccaaagaggactggcgtgcagcgcagtggttccaggctgtgtctggaggtattggggataggaggaggaggcctgcggaggtcgggagtggaaactccctgttctcggtgcagccaggggcaaacgaggttggtggagagaaggcgctgctgagtgatagaatggagaggagtggaaggaatgggctcgcacgacagcagtcttcagagtggcttgggagaggctccgatgggctcatcggcttgtcagatgccagtgcccttgggtctccgcgcaagagctttgctgatgcattgcaggaaaatattagccgtcctgctgttatagccggtcatctttcacgttctaatagccgtaatgttcttgagggcccaactccaatcaggtcatctgattcacgcaagccacaactgcagaataggtcagaatccatgaatggcctgcgatctggatccacttcaccgagtctggtcagggtccaaagtcttggttcttcgatgtctcataccttcgcttctgctgttggttcatctatctcaagaagcaccacccctgacccccagctgatacggagaactcctagtccttgccttcctccagttggagttcggatggggagttctgataaaaaagttgaagcttctgtttcttcacttaatcatgatggtgctgacattgtggcaactctgtctagcttaagcctatctggaaataagatgtcgaatgtggaaaatgaagttcagactcatgcttaccagaactttggtgatcaggctgatgtgttgtttaatgtaccaaaggaacataggcaattttcaccacggaatttaactcaaaaaactgatgaagacttgcttaatgcccctgaatatgcagttttcccaaatggggggagtaacttcagtaatttgcatgctagtaaggtggcatctcatagcaatagcaagttccctatgcaatcaccacacggtaatgccaacaagaaaggatctttgatgagctcagctggatcagtttctcagtaccagcacttgaatggtgatagccatgacattgatgtatctggatggcatactcatacagatggtgactatggcaatgttctttcgaatcatggtggatcgagttatcagggccaaccaacagagacgatgtacgcacaatgcttgcaggcaaaccctgattcaccccttggcgcagctgcaagcatgagccctttccaagggaggggttttactggttcaggacacttggatagtcctggataccaaaaagcttaccttgggtcattatttggccagcaaaagctacaatatgggatgccatacctgggcaattctggtgctcttaatcaaaatatctatggcaatgattctgcctttggcattggaatgacttatctaacaagcccgccatctactccatatatctcatctccccaaggccatgttgggcaaggaaaccgtctgactcgacttccagcagtggtgaggaacaccgctggaggatccatgggatcgtggaattcagagaatggtctgatggataatggttatgggtcctccttgctggaggaattcaaaagtaacaaaactagatcttttgagctgttagatattgtaggccatgtggtagagttcaggtattatttccttgaaattctaacgtagtcaagttcatttattttggtatgaatctactatggttctctctcttacctttcagttcggatcagtatgggagtcgctttatacagcagaaactagaaactgcttctactgaacagaagaatatgatttttcctgagatccttccccaggcacgtactttgatgactgatgtttttggaaactatgttatacagaagttctttgaatacggaactgaaacgcaaacgaagcaactggcaaccctgcttaagggttttgtgttacagctgagtcttcaaatgtatggctgccgggtgattcagaaggctttggaagttgttgaagtggaacaacaaacacaaatggctttggagcttgatggatctatcatgagatgtgttcgtgatcagaatggcaaccatgtcatccaaaaatgtatagaatgcatccctcaggagaggatacgatttatcatttctgcattttacggacatgtcgtggagctttctatgcatccttatggttgtcgtgttattcagaggatcttggagcattgtgacgatgaaagcactcaaaatgccatgatggaagagatcatgcagtccgtggttactttaacggaggaccagtatggtaattatgtaatccagcatgtcctgcaatatgggaaaccagaagagcgttctactataattgcacaactcgctggacagatagtgaagatgagccagcagaaatttgcatccaatgttgttgagaagtgtcttacttttggttctcctgagcaacggcagattctaatcaatgaaatgcttggcacaactgatgagaacgagccgttacaggcaatgatgaaagaccagttcgcaaactatgttgtgcagaaggttctggagacatgtgatgaccagaaccgtgaattgattctttcccgtatcaaggtccacttgaatgcactgaaaaggtacacctatgggaagcatattgtgacacgtgttgagaagcttattgccgcaggagaacggcgcattggcgcactaccctcctgctgagatggcaatggttaggtcacctgtacagcagaagatagcgaggcctagctttttaccattaccagtagtcgttaatattgagcaagtacaaccgcagaagttaaaaaagaaaggctcccaaatcctttgtaaataaaggagagcctctggaaataaataagaatgagaaaagatgagattttacttgtcctcgaggaaagacttgtatatttgtattgtttttcccccctcttgcaagcagcaggataaagaagttttaaatattttgtcgagaagcaaagcagttactagaaggataaaggttttaggatcatagatgatgggaaggactgctgtagattctccttttttccttgggtttcatcagtcagtgtataagtactaatgtccatgctgatgttaatctctgtaagactgccttcagtttactgaatcttttttttctcttctggtgcctgccaagtgccagcatctgagcagttcttcaaatattacttgtttccaaccactcaactttcgtataatgttcataaaatgtttgtagctactactgaccttgatatgtgatgcatcatgg

SEQ ID NO: 44567 - DNA, 3843 bp, Zea Mays
ccgctcccttcctttcccattcgtctcgtctcgctctcgcctgccgccttcccttcgcgtctcctcgctccggccgcagcagccgcctccgccctccatccgcaaaattacccaatccatcatccccgaaccctaaataaatcctcgatcggccgcgcgcgggaatcaacggatgggaccgcggccggcggctccgtagcggattggaggcgctcggttcgcgggggccgcggttcggctgccgggtggcgcccgcttctagagggaaaccaagaaggaaggaaggagattggaataaagacaggcactgcaacgatggctccatctcaagcggcggcagcggctggccccacctttgaggacctcgagcgcgacctgcaggcagttctcatggaccaaaaccacatgtccccagtggacgacctcggcatgtttcgcagcggcagcgctccccccaccgtcgagggatctcgcacggccattggcgcactcttctctggtccaccgcttcacgccaacagccttggcgccggcggcggcagcggtgggactgcttctggccttgacgtgctcactgatgaggagatacggtcacacccagcgtatctgtcgtactactattctaatgagcacctcaacccaaggcttccgccaccaatggtttccaaagaggactggcgtgcagcgcagtggttccaggctgtgtctggaggtattggggataggaggaggaggcctgcggaggtcgggagtggaaactccctgttctcggtgcagccaggggcaaacgaggttggtggagagaaggcgctgctgagtgatagaatggagaggagtggaaggaatgggctcgcacgacagcagtcttcagagtggcttgggagaggctccgatgggctcatcggcttgtcagatgccagtgcccttgggtctccgcgcaagagctttgctgatgcattgcaggaaaatattagccgtcctgctgttatagccggtcatctttcacgttctaatagccgtaatgttcttgagggcccaactccaatcaggtcatctgattcacgcaagccacaactgcagaataggtcagaatccatgaatggcctgcgatctggatccacttcaccgagtctggtcagggtccaaagtcttggttcttcgatgtctcataccttcgcttctgctgttggttcatctatctcaagaagcaccacccctgacccccagctgatacggagaactcctagtccttgccttcctccagttggagttcggatggggagttctgataaaaaagttgaagcttctgtttcttcacttaatcatgatggtgctgacattgtggcaactctgtctagcttaagcctatctggaaataagatgtcgaatgtggaaaatgaagttcagactcatgcttaccagaactttggtgatcaggctgatgtgttgtttaatgtaccaaaggaacataggcaattttcaccacggaatttaactcaaaaaactgatgaagacttgcttaatgcccctgaatatgcagttttcccaaatggggggagtaacttcagtaatttgcatgctagtaaggtggcatctcatagcaatagcaagttccctatgcaatcaccacacggtaatgccaacaagaaaggatctttgatgagctcagctggatcagtttctcagtaccagcacttgaatggtgatagccatgacattgatgtatctggatggcatactcatacaggtggttttacttcatccatgctgaacaatcaactgaatcctgatggtgactatggcaatgttctttcgaatcatggtggatcgagttatcagggccaaccaacagagacgatgtacgcacaatgcttgcaggcaaaccctgattcaccccttggcgcagctgcaagcatgagccctttccaagggaggggttttactggttcaggacacttggatagtcctggataccaaaaagcttaccttgggtcattatttggccagcaaaagctacaatatgggatgccatacctgggcaattctggtgctcttaatcaaaatatctatggcaatgattctgcctttggcattggaatgacttatctaacaagcccgccatctactccatatatctcatctccccaaggccatgttgggcaaggaaaccgtctgactcgacttccagcagtggtgaggaacaccgctggaggatccatgggatcgtggaattcagagaatggtctgatggataatggttatgggtcctccttgctggaggaattcaaaattcggatcagtatgggagtcgctttatacagcagaaactagaaactgcttctactgaacagaagaatatgatttttcctgagatccttccccaggcacgtactttgatgactgatgtttttggaaactatgttatacagaagttctttgaatacggaactgaaacgcaaacgaagcaactggcaaccctgcttaagggttttgtgttacagctgagtcttcaaatgtatggctgccgggtgattcagaaggctttggaagttgttgaagtggaacaacaaacacaaatggctttggagcttgatggatctatcatgagatgtgttcgtgatcagaatggcaaccatgtcatccaaaaatgtatagaatgcatccctcaggagaggatacgatttatcatttctgcattttacggacatgtcgtggagctttctatgcatccttatggttgtcgtgttattcagaggatcttggagcattgtgacgatgaaagcactcaaaatgccatgatggaagagatcatgcagtccgtggttactttaacggaggaccagtatggtaattatgtaatccagcatgtcctgcaatatgggaaaccagaagagcgttctactataattgcacaactcgctggacagatagtgaagatgagccagcagaaatttgcatccaatgttgttgagaagtgtcttacttttggttctcctgagcaacggcagattctaatcaatgaaatgcttggcacaactgatgagaacgagccgttacaggcaatgatgaaagaccagttcgcaaactatgttgtgcagaaggttctggagacatgtgatgaccagaaccgtgaattgattctttcccgtatcaaggtccacttgaatgcactgaaaaggtacacctatgggaagcatattgtgacacgtgttgagaagcttattgccgcaggagaacggcgcattggcgcactaccctcctgctgagatggcaatggttaggtcacctgtacagcagaagatagcgaggcctagctttttaccattaccagtagtcgttaatattgagcaagtacaaccgcagaagttaaaaaagaaaggctcccaaatcctttgtaaataaaggagagcctctggaaataaataagaatgagaaaagatgagattttacttgtcctcgaggaaagacttgtatatttgtattgtttttcccccctcttgcaagcagcaggataaagaagttttaaatattttgtcgagaagcaaagcagttactagaaggataaaggttttaggatcatagatgatgggaaggactgctgtagattctccttttttccttgggtttcatcagtcagtgtataagtactaatgtccatgctgatgttaatctctgtaagactgccttcagtttactgaatcttttttttctcttctggtgcctgccaagtgccagcatctgagcagttcttcaaatattacttgtttccaaccactcaactttcgtataatgttcataaaatgtttgtagctactactgaccttgatatgtgatgcatcatgg

SEQ ID NO: 44568 - DNA, 895 bp, Zea Mays
cgtcagagttgggcgcatatccagataaaaaaaacttgcctgcttgcactgcagatgcgttgtttttgctaacagcaagcaggcaagtcagcagcctaaccttctttgatatttacagagaagatgaaaaggagaactggagagcagtagtggcagtcacttcactggtcaagcattcctatccacctcggcccacctccacctccctgacagtcattttgttatataaaacccatcaagctcccctgcaaggagatacagaaccctgcaactgcaagctaaggagagtgtgatcaccaacagctagtgctagtcccccttccttccatccatccatggcatgcgtcagcaccttccagagctgccccattgccagaagagcaaagatcaacaccaggtccaggggcagcagcagtagcgtggcgaaggggtcaccaccaccagccttccagttccagtgcagggcgtcgactttcgcggcggacaccagcctccggctcgagctggacgagaaccccgaggcgatcatctcgggggcgtggcccgggaactgctccctcctcagctacgacgacctccgcgcctacctcgagtcgcaggagacggcggcccaggcagacgatcagcgcggcgtggcgctcctgagcgagaccatgtccacacccgtgctggtggccacagcagaccagaccctggaggacgtcgagtgccacttcgaggccgtgtcggggcttccggtcgtcgacagcggcctcagatgcgtcggggtgatcgtcaagaacgaccgggcaagagcctctcatgggtccaagacgaagatatcggaagtgatgacatctccagctatcacactatcgtctgacaaaaccgtgatggtgcatgcctaacgtctaca

SEQ ID NO: 44569 - DNA, 1023 bp, Zea Mays
aacaaaaaaattggtcaatggggtgtggttaatggtacaaggttgagtctgagttcttgccactttacagcacctatggcattggtttgactacatggagtcctctggcttcaggagtactatctggaaaatatggcaaaggggacatacctgctgatagcaggtttgccctagacaattacaagaacctggcgaacaggtccctggttgacgacacgcttcgaaaagtgaatgggctaaaacctatcgccgctgaacttggcgtttcgttagctcagctctcgattgcttggtgcgcgtcgaaccccaatgtgtcgtctgtgatcactggagccaccaaagaaagccagattgtggagaacatgaaggccctagatgtcatcccactgctgacgccggaggtcgtcgacaggatcgaggcggtggtccaaagcaagcccaaacgcaacgtcgagtcatacaggtgaaaattcggtgttcatccgacggagttcaggcctcctccacgaaacttcatccatgatccgtgtgtattctgggcgtggtgctgtgttcacaaacacaagtctgtcagtcctgtgttgtgtattctgctttccgatacagattttggaccaattcaatcctgcattgtgttgcttgcgagcagaaagatttgttggatgaccatgatcctttctggtcgtgctgcaagatttctggagcgtgagatcctctgctgtatcactgtatcagcagctcatgctgttggctgttgcttgcagaaatattcgagtccgttttagcagaatcctgccccatgattctctagcttggagacccgagttatcatcggtagagtgatttcgagtgtttctctagcagaagtcaatttatctgataaaaaccatttgacaagccgtatgtaaagtggtaaagtgagataggttaaagagtaggttgagagtgaccgaaaacagaattttttggctcaaaatctctactacaaagcaccatggatcagtttagttttttattgtttgg

SEQ ID NO: 44570 - DNA, 1290 bp, Zea Mays
gctgtgtttacaaattacacctgcttgctgttgatcttcgtttcccgtccagccgtttttcgcatccacgtgggccagccggccaggcgaccgccgccaccgccgccctactcctggtcccagctctgctgcacccttcgccggcgacgagcgtccaccgcggcagccgaagctcccagcgtcctcctgcaggccgagctgaaggttcagcgcgccggtggagttcgacgacgaaactccgtcacgtcatacctctccgcctcccgtctccaatcggggctcccagcgtctcggagaagaggagcagcacggcacggcggctgtggcgaggaaggctcctgtcccatcccaacccagttagcagccgcccaaggaggaggagatccaatcggcgtgcgggcgtccgcggtccatccatcgatccaattccaatctgcagcgaggaggtcggctacctttctcctccggcgagctccacgagggcgccgacgaggggatggacgcgcagcctaactggagaggtggaccggcggcgactaggatatcgtacaagaacgccaccatcgtcatgtgcgcctttaacctcttcgttgcggccctcctcctccacaactactactcgtcctggacgcgtatcgccggaggcaacaagctcgattctgctcagcttcggtatatatgggaatctgaggagctgcgtcgtgctatggagcctgtggatttgattagaagagtgaaggaaattgagcaagaagcttatggtgagcatggcatggcgacagatgaagatcctaagcaaactgccgctgttgatttatcaaaacggcttaaggatttgagggcaggcaatgatggcagtagccaaaaagctctcgaagaatggcgtaaacggaagatggagcgtgcaaggcagcgagccatcgaaaagaatgggacttctagtgtgaaaactaaatgaggagaacgttttatagctgagtcaaggatgatggacccagactgccacaagcgacttgtcaagccaacacaacacaacatttttaaacactgtctgacttgaaaacaacgctggctgaggtggaggagtcgaatgagcaagttgctgagattggagaagccgagagtacaatcgcagaggtcgaagcacttgtcaagccaacacaacctctccagttttatcgtgttgagccctcgtgtgctcactacagacaatattgctacttgtagttttcctgttagcaaggggcaaacaaaaagagaacactctacaaaaatgtctcccggattatc

SEQ ID NO: 44571 - DNA, 1591 bp, Zea Mays
gctgtgtttacaaattacacctgcttgctgttgatcttcgtttcccgtccagccgtttttcgcatccacgtgggccagccggccaggcgaccgccgccaccgccgccctactcctggtcccagctctgctgcacccttcgccggcgacgagcgtccaccgcggcagccgaagctcccagcgtcctcctgcaggccgagctgaaggttcagcgcgccggtggagttcgacgacgaaactccgtcacgtcatacctctccgcctcccgtctccaatcggggctcccagcgtctcggagaagaggagcagcacggcacggcggctgtggcgaggaaggctcctgtcccatcccaacccagttagcagccgcccaaggaggaggagatccaatcggcgtgcgggcgtccgcggtccatccatcgatccaattccaatctgcagctcagcttcggtatatatgggaatctgaggagctgcgtcgtgctatggagcctgtggatttgattagaagagtgaaggaaattgagcaagaagcttatggtgagcatggcatggcgacagatgaagatcctaagcaaactgccgctgttgatttatcaaaacggcttaaggatttgagggcaggcaatgatggcagtagccaaaaagctctcgaagaatggcgtaaacggaagatggagcgtgcaaggcagcgagccatcgaaaagaatgggacttctagtgtgaaaactaaatgaggtgaggagtgtaatgcagcacaagggattttgttttcatgtgtctcggagctgctccatgatgcattcaagtcaatccgtccatcgtaagcgagtgtagctgtgatgacccatgtttttaaagccacaggcagcggtgttcttgtagaaacgtgaagttttaatatttgtgattgtccatgttgccgtgttttttaaccgtcatgtatcagtatcaactttgtttgttcatggaatcatccctgcaaatactttatgcttttgcttgagtcctcatagtgtttggtttgacgagaagggtgaatgggatggggtcatctgtggatttggaaatatgaatatgtatgatatctgtttggttgaatggatgaggcaagttcttttggtttggttagatggatgagagtgaacaaaatgagaataattgactatttgtatctacattatttttttaaaaaataaaaattaattatacaaagataaatatgcgctaacacaaattttgtcatggtaattgctaatttcaaattctaattggcatataaaacatgcaataatcaacgtattagcacttattaaaattaatttcggttcttttgttttcctaattttttgggggcaaaaccctttgttggacccgccgctgcctcgtgcgtttctaggatggccacgctgaggaacctgaaggtcaagacgtcaacgtgcaggagaacgttttatagctgagtcaaggatgatggacccagactgccacaagcgacttgtcaagccaacacaacacaacatttttaaacactgtctgacttgaaaacaacgctggctgaggtggaggagtcgaatgagcaagttgctgaga

SEQ ID NO: 44572 - DNA, 867 bp, Zea Mays
gctgtgtttacaaattacacctgcttgctgttgatcttcgtttcccgtccagccgtttttcgcatccacgtgggccagccggccaggcgaccgccgccaccgccgccctactcctggtcccagctctgctgcacccttcgccggcgacgagcgtccaccgcggcagccgaagctcccagcgtcctcctgcaggccgagctgaaggttcagcgcgccggtggagttcgacgacgaaactccgtcacgtcatacctctccgcctcccgtctccaatcggggctcccagcgtctcggagaagaggagcagcacggcacggcggctgtggcgaggaaggctcctgtcccatcccaacccagttagcagccgcccaaggaggaggagatccaatcggcgtgcgggcgtccgcggtccatccatcgatccaattccaatctgcagctcagcttcggtatatatgggaatctgaggagctgcgtcgtgctatggagcctgtggatttgattagaagagtatgtttccgtgcactttgtgaaggaaattgagcaagaagcttatggtgagcatggcatggcgacagatgaagatcctaagcaaactgccgctgttgatttatcaaaacggcttaaggatttgagggcaggcaatgatggcagtagccaaaaagctctcgaagaatggcgtaaacggaagatggagcgtgcaaggcagcgagccatcgaaaagaatgggacttctagtgtgaaaactaaatgaggatggccacgctgaggaacctgaaggtcaagacgtcaacgtgcaggagaacgttttatagctgagtcaaggatgatggacccagactgccacaagcgacttgtcaagccaac

SEQ ID NO: 44573 - DNA, 843 bp, Zea Mays
gctgtgtttacaaattacacctgcttgctgttgatcttcgtttcccgtccagccgtttttcgcatccacgtgggccagccggccaggcgaccgccgccaccgccgccctactcctggtcccagctctgctgcacccttcgccggcgacgagcgtccaccgcggcagccgaagctcccagcgtcctcctgcaggccgagctgaaggttcagcgcgccggtggagttcgacgacgaaactccgtcacgtcatacctctccgcctcccgtctccaatcggggctcccagcgtctcggagaagaggagcagcacggcacggcggctgtggcgaggaaggctcctgtcccatcccaacccagttagcagccgcccaaggaggaggagatccaatcggcgtgcgggcgtccgcggtccatccatcgatccaattccaatctgcagcttcggtatatatgggaatctgaggagctgcgtcgtgctatggagcctgtggatttgattagaagagtgaaggaaattgagcaagaagcttatggtgagcatggcatggcgacagatgaagatcctaagcaaactgccgctgttgatttatcaaaacggcttaaggatttgagggcaggcaatgatggcagtagccaaaaagctctcgaagaatggcgtaaacggaagatggagcgtgcaaggcagcgagccatcgaaaagaatgggacttctagtgtgaaaactaaatgaggatggccacgctgaggaacctgaaggtcaagacgtcaacgtgcaggagaacgttttatagctgagtcaaggatgatggacccagactgccacaagcgacttgtcaagccaac

SEQ ID NO: 44574 - DNA, 1071 bp, Zea Mays
gctgtgtttacaaattacacctgcttgctgttgatcttcgtttcccgtccagccgtttttcgcatccacgtgggccagccggccaggcgaccgccgccaccgccgccctactcctggtcccagctctgctgcacccttcgccggcgacgagcgtccaccgcggcagccgaagctcccagcgtcctcctgcaggccgagctgaaggttcagcgcgccggtggagttcgacgacgaaactccgtcacgtcatacctctccgcctcccgtctccaatcggggctcccagcgtctcggagaagaggagcagcacggcacggcggctgtggcgaggaaggctcctgtcccatcccaacccagttagcagccgcccaaggaggaggagatccaatcggcgtgcgggcgtccgcggtccatccatcgatccaattccaatctgcagcgaggaggtcggctacctttctcctccggcgagctccacgagggcgccgacgaggggatggacgcgcagcctaactggagaggtggaccggcggcgactaggatatcgtacaagaacgccaccatcgtcatgtgcgcctttaacctcttcgttgcggccctcctcctccacaactactactcgtcctggacgcgtatcgccggaggcaacaagctcgattctgctcagcttcggtatatatgggaatctgaggagctgcgtcgtgctatggagcctgtggatttgattagaagagtgaaggaaattgagcaagaagcttatggtgagcatggcatggcgacagatgaagatcctaagcaaactgccgctgttgatttatcaaaacggcttaaggatttgagggcaggcaatgatggcagtagccaaaaagctctcgaagaatggcgtaaacggaagatggagcgtgcaaggcagcgagccatcgaaaagaatgggacttctagtgtgaaaactaaatgaggatggccacgctgaggaacctgaaggtcaagacgtcaacgtgcaggagaacgttttatagctgagtcaaggatgatggacccagactgccacaagcgacttgtcaagccaac

SEQ ID NO: 44575 - DNA, 931 bp, Zea Mays
gctgtgtttacaaattacacctgcttgctgttgatcttcgtttcccgtccagccgtttttcgcatccacgtgggccagccggccaggcgaccgccgccaccgccgccctactcctggtcccagctctgctgcacccttcgccggcgacgagcgtccaccgcggcagctcagcttcggtatatatgggaatctgaggagctgcgtcgtgctatggagcctgtggatttgattagaagagtgaaggaaattgagcaagaagcttatggtgagcatggcatggcgacagatgaagatcctaagcaaactgccgctgttgatttatcaaaacggcttaaggatttgagggcaggcaatgatggcagtagccaaaaagctctcgaagaatggcgtaaacggaagatggagcgtgcaaggcagcgagccatcgaaaagaatgggacttctagtgtgaaaactaaatgaggtgaggagtgtaatgcagcacaagggattttgttttcatgtgtctcggagctgctccatgatgcattcaagtcaatccgtccatcgtaagcgagtgtagctgtgatgacccatgtttttaaagccacaggcagcggtgttcttgtagaaacgtgaagttttaatatttgtgattgtccatgttgccgtgttttttaaccgtcatgtatcagtatcaactttgtttgttcatggaatcatccctgcaaatactttatgcttttgcttgagtcctcatagtgtttggtttgacgagaagggtgaatgggatggggtcatctgtggatttggaaatatgaatatgtatgatatctgtttggttgaatggatgaggcaagttcttttggtttggttagatggatgagagtgaacaaaatgagaataattgactatttgtatctacattatttttttaaaaaataaaaattaa

SEQ ID NO: 44576 - DNA, 1223 bp, Zea Mays
gctgtgtttacaaattacacctgcttgctgttgatcttcgtttcccgtccagccgtttttcgcatccacgtgggccagccggccaggcgaccgccgccaccgccgccctactcctggtcccagctctgctgcacccttcgccggcgacgagcgtccaccgcggcagccgaagctcccagcgtcctcctgcaggccgagctgaaggttcagcgcgccggtggagttcgacgacgaaactccgtcacgtcatacctctccgcctcccgtctccaatcggggctcccagcgtctcggagaagaggagcagcacggcacggcggctgtggcgaggaaggctcctgtcccatcccaacccagttagcagccgcccaaggaggaggagatccaatcggcgtgcgggcgtccgcggtccatccatcgatccaattccaatctgcagctcagcttcggtatatatgggaatctgaggagctgcgtcgtgctatggagcctgtggatttgattagaagagtatgtttccgtgcactttgtgaaggaaattgagcaagaagcttatggtgagcatggcatggcgacagatgaagatcctaagcaaactgccgctgttgatttatcaaaacggcttaaggatttgagggcaggcaatgatggcagtagccaaaaagctctcgaagaatggcgtaaacggaagatggagcgtgcaaggcagcgagccatcgaaaagaatgggacttctagtgtgaaaactaaatgaggtgaggagtgtaatgcagcacaagggattttgttttcatgtgtctcggagctgctccatgatgcattcaagtcaatccgtccatcgtaagcgagtgtagctgtgatgacccatgtttttaaagccacaggcagcggtgttcttgtagaaacgtgaagttttaatatttgtgattgtccatgttgccgtgttttttaaccgtcatgtatcagtatcaactttgtttgttcatggaatcatccctgcaaatactttatgcttttgcttgagtcctcatagtgtttggtttgacgagaagggtgaatgggatggggtcatctgtggatttggaaatatgaatatgtatgatatctgtttggttgaatggatgaggcaagttcttttggtttggttagatggatgagagtgaacaaaatgagaataattgactatttgtatctacattatttttttaaaaaataaaaattaa

SEQ ID NO: 44577 - DNA, 1772 bp, Zea Mays
gctgtgtttacaaattacacctgcttgctgttgatcttcgtttcccgtccagccgtttttcgcatccacgtgggccagccggccaggcgaccgccgccaccgccgccctactcctggtcccagctctgctgcacccttcgccggcgacgagcgtccaccgcggcaggtacacccacccccctcacttttgcccctccaaccaaaagcgccggcatctcaaaccggacggcgctctcttctctatcctctgtgtcccctccaccaaaaccgacgacgacgtcgctctcctccaccggtgctcggcgctctccctccaccagcggcggtccaccgacgctcggcgagctccaccggcgggcgctggtcagatcctctcggcagtcatccacctggcacgtcggatagctcgcgcctccgttggcagtcccaccgccgcccggccctcccccagcgcccccggtgatccggaccgcacccgcttgctcggcctaacgaccggctcctgccccgccgcagccgaagctcccagcgtcctcctgcaggccgagctgaaggttcagcgcgccggtggagttcgacgacgaaactccgtcacgtcatacctctccgcctcccgtctccaatcggggctcccagcgtctcggagaagaggagcagcacggcacggcggctgtggcgaggaaggctcctgtcccatcccaacccagttagcagccgcccaaggaggaggagatccaatcggcgtgcgggcgtccgcggtccatccatcgatccaattccaatctgcagcgaggaggtcggctacctttctcctccggcgagctccacgagggcgccgacgaggggatggacgcgcagcctaactggagaggtggaccggcggcgactaggatatcgtacaagaacgccaccatcgtcatgtgcgcctttaacctcttcgttgcggccctcctcctccacaactactactcgtcctggacgcgtatcgccggaggcaacaagctcgattctgcttcggtatatatgggaatctgaggagctgcgtcgtgctatggagcctgtggatttgattagaagagtgaaggaaattgagcaagaagcttatggtgagcatggcatggcgacagatgaagatcctaagcaaactgccgctgttgatttatcaaaacggcttaaggatttgagggcaggcaatgatggcagtagccaaaaagctctcgaagaatggcgtaaacggaagatggagcgtgcaaggcagcgagccatcgaaaagaatgggacttctagtgtgaaaactaaatgaggtgaggagtgtaatgcagcacaagggattttgttttcatgtgtctcggagctgctccatgatgcattcaagtcaatccgtccatcgtaagcgagtgtagctgtgatgacccatgtttttaaagccacaggcagcggtgttcttgtagaaacgtgaagttttaatatttgtgattgtccatgttgccgtgttttttaaccgtcatgtatcagtatcaactttgtttgttcatggaatcatccctgcaaatactttatgcttttgcttgagtcctcatagtgtttggtttgacgagaagggtgaatgggatggggtcatctgtggatttggaaatatgaatatgtatgatatctgtttggttgaatggatgaggcaagttcttttggtttggttagatggatgagagtgaacaaaatgagaataattgactatttgtatctacattatttttttaaaaaataaaaattaa

SEQ ID NO: 44578 - DNA, 1549 bp, Zea Mays
gctgtgtttacaaattacacctgcttgctgttgatcttcgtttcccgtccagccgtttttcgcatccacgtgggccagccggccaggcgaccgccgccaccgccgccctactcctggtcccagctctgctgcacccttcgccggcgacgagcgtccaccgcggcaggtacacccacccccctcacttttgcccctccaaccaaaagcgccggcatctcaaaccggacggcgctctcttctctatcctctgtgtcccctccaccaaaaccgacgacgacgtcgctctcctccaccggtgctcggcgctctccctccaccagcggcggtccaccgacgctcggcgagctccaccggcgggcgctggtcagatcctctcggcagtcatccacctggcacgtcggatagctcgcgcctccgttggcagtcccaccgccgcccggccctcccccagcgcccccggtgatccggaccgcacccgcttgctcggcctaacgaccggctcctgccccgccgcagccgaagctcccagcgtcctcctgcaggccgagctgaaggttcagcgcgccggtggagttcgacgacgaaactccgtcacgtcatacctctccgcctcccgtctccaatcggggctcccagcgtctcggagaagaggagcagcacggcacggcggctgtggcgaggaaggctcctgtcccatcccaacccagttagcagccgcccaaggaggaggagatccaatcggcgtgcgggcgtccgcggtccatccatcgatccaattccaatctgcagcttcggtatatatgggaatctgaggagctgcgtcgtgctatggagcctgtggatttgattagaagagtgaaggaaattgagcaagaagcttatggtgagcatggcatggcgacagatgaagatcctaagcaaactgccgctgttgatttatcaaaacggcttaaggatttgagggcaggcaatgatggcagtagccaaaaagctctcgaagaatggcgtaaacggaagatggagcgtgcaaggcagcgagccatcgaaaagaatgggacttctagtgtgaaaactaaatgaggtgaggagtgtaatgcagcacaagggattttgttttcatgtgtctcggagctgctccatgatgcattcaagtcaatccgtccatcgtaagcgagtgtagctgtgatgacccatgtttttaaagccacaggcagcggtgttcttgtagaaacgtgaagttttaatatttgtgattgtccatgttgccgtgttttttaaccgtcatgtatcagtatcaactttgtttgttcatggaatcatccctgcaaatactttatgcttttgcttgagtcctcatagtgtttggtttgacgagaagggtgaatgggatggggtcatctgtggatttggaaatatgaatatgtatgatatctgtttggttgaatggatgaggcaagttcttttggtttggttagatggatgagagtgaacaaaatgagaataattgactatttgtatctacattatttttttaaaaaataaaaattaa

SEQ ID NO: 44579 - DNA, 1400 bp, Zea Mays
gctgtgtttacaaattacacctgcttgctgttgatcttcgtttcccgtccagccgtttttcgcatccacgtgggccagccggccaggcgaccgccgccaccgccgccctactcctggtcccagctctgctgcacccttcgccggcgacgagcgtccaccgcggcagcggcggtccaccgacgctcggcgagctccaccggcgggcgctggtcagatcctctcggcagtcatccacctggcacgtcggatagctcgcgcctccgttggcagtcccaccgccgcccggccctcccccagcgcccccggtgatccggaccgcacccgcttgctcggcctaacgaccggctcctgccccgccgcagccgaagctcccagcgtcctcctgcaggccgagctgaaggttcagcgcgccggtggagttcgacgacgaaactccgtcacgtcatacctctccgcctcccgtctccaatcggggctcccagcgtctcggagaagaggagcagcacggcacggcggctgtggcgaggaaggctcctgtcccatcccaacccagttagcagccgcccaaggaggaggagatccaatcggcgtgcgggcgtccgcggtccatccatcgatccaattccaatctgcagctcagcttcggtatatatgggaatctgaggagctgcgtcgtgctatggagcctgtggatttgattagaagagtgaaggaaattgagcaagaagcttatggtgagcatggcatggcgacagatgaagatcctaagcaaactgccgctgttgatttatcaaaacggcttaaggatttgagggcaggcaatgatggcagtagccaaaaagctctcgaagaatggcgtaaacggaagatggagcgtgcaaggcagcgagccatcgaaaagaatgggacttctagtgtgaaaactaaatgaggtgaggagtgtaatgcagcacaagggattttgttttcatgtgtctcggagctgctccatgatgcattcaagtcaatccgtccatcgtaagcgagtgtagctgtgatgacccatgtttttaaagccacaggcagcggtgttcttgtagaaacgtgaagttttaatatttgtgattgtccatgttgccgtgttttttaaccgtcatgtatcagtatcaactttgtttgttcatggaatcatccctgcaaatactttatgcttttgcttgagtcctcatagtgtttggtttgacgagaagggtgaatgggatggggtcatctgtggatttggaaatatgaatatgtatgatatctgtttggttgaatggatgaggcaagttcttttggtttggttagatggatgagagtgaacaaaatgagaataattgactatttgtatctacattatttttttaaaaaataaaaattaa

SEQ ID NO: 44580 - DNA, 1173 bp, Zea Mays
gctgtgtttacaaattacacctgcttgctgttgatcttcgtttcccgtccagccgtttttcgcatccacgtgggccagccggccaggcgaccgccgccaccgccgccctactcctggtcccagctctgctgcacccttcgccggcgacgagcgtccaccgcggcagcgaggaggtcggctacctttctcctccggcgagctccacgagggcgccgacgaggggatggacgcgcagcctaactggagaggtggaccggcggcgactaggatatcgtacaagaacgccaccatcgtcatgtgcgcctttaacctcttcgttgcggccctcctcctccacaactactactcgtcctggacgcgtatcgccggaggcaacaagctcgattctgctcagcttcggtatatatgggaatctgaggagctgcgtcgtgctatggagcctgtggatttgattagaagagtatgtttccgtgcactttgtgaaggaaattgagcaagaagcttatggtgagcatggcatggcgacagatgaagatcctaagcaaactgccgctgttgatttatcaaaacggcttaaggatttgagggcaggcaatgatggcagtagccaaaaagctctcgaagaatggcgtaaacggaagatggagcgtgcaaggcagcgagccatcgaaaagaatgggacttctagtgtgaaaactaaatgaggtgaggagtgtaatgcagcacaagggattttgttttcatgtgtctcggagctgctccatgatgcattcaagtcaatccgtccatcgtaagcgagtgtagctgtgatgacccatgtttttaaagccacaggcagcggtgttcttgtagaaacgtgaagttttaatatttgtgattgtccatgttgccgtgttttttaaccgtcatgtatcagtatcaactttgtttgttcatggaatcatccctgcaaatactttatgcttttgcttgagtcctcatagtgtttggtttgacgagaagggtgaatgggatggggtcatctgtggatttggaaatatgaatatgtatgatatctgtttggttgaatggatgaggcaagttcttttggtttggttagatggatgagagtgaacaaaatgagaataattgactatttgtatctacattatttttttaaaaaataaaaattaa

SEQ ID NO: 44581 - DNA, 1573 bp, Zea Mays
gctgtgtttacaaattacacctgcttgctgttgatcttcgtttcccgtccagccgtttttcgcatccacgtgggccagccggccaggcgaccgccgccaccgccgccctactcctggtcccagctctgctgcacccttcgccggcgacgagcgtccaccgcggcaggtacacccacccccctcacttttgcccctccaaccaaaagcgccggcatctcaaaccggacggcgctctcttctctatcctctgtgtcccctccaccaaaaccgacgacgacgtcgctctcctccaccggtgctcggcgctctccctccaccagcggcggtccaccgacgctcggcgagctccaccggcgggcgctggtcagatcctctcggcagtcatccacctggcacgtcggatagctcgcgcctccgttggcagtcccaccgccgcccggccctcccccagcgcccccggtgatccggaccgcacccgcttgctcggcctaacgaccggctcctgccccgccgcagccgaagctcccagcgtcctcctgcaggccgagctgaaggttcagcgcgccggtggagttcgacgacgaaactccgtcacgtcatacctctccgcctcccgtctccaatcggggctcccagcgtctcggagaagaggagcagcacggcacggcggctgtggcgaggaaggctcctgtcccatcccaacccagttagcagccgcccaaggaggaggagatccaatcggcgtgcgggcgtccgcggtccatccatcgatccaattccaatctgcagctcagcttcggtatatatgggaatctgaggagctgcgtcgtgctatggagcctgtggatttgattagaagagtatgtttccgtgcactttgtgaaggaaattgagcaagaagcttatggtgagcatggcatggcgacagatgaagatcctaagcaaactgccgctgttgatttatcaaaacggcttaaggatttgagggcaggcaatgatggcagtagccaaaaagctctcgaagaatggcgtaaacggaagatggagcgtgcaaggcagcgagccatcgaaaagaatgggacttctagtgtgaaaactaaatgaggtgaggagtgtaatgcagcacaagggattttgttttcatgtgtctcggagctgctccatgatgcattcaagtcaatccgtccatcgtaagcgagtgtagctgtgatgacccatgtttttaaagccacaggcagcggtgttcttgtagaaacgtgaagttttaatatttgtgattgtccatgttgccgtgttttttaaccgtcatgtatcagtatcaactttgtttgttcatggaatcatccctgcaaatactttatgcttttgcttgagtcctcatagtgtttggtttgacgagaagggtgaatgggatggggtcatctgtggatttggaaatatgaatatgtatgatatctgtttggttgaatggatgaggcaagttcttttggtttggttagatggatgagagtgaacaaaatgagaataattgactatttgtatctacattatttttttaaaaaataaaaattaa

SEQ ID NO: 44582 - DNA, 3191 bp, Zea Mays
cttggcgcatctgcgggtacacaggcctcggtttgttgggacggtgtgaatgaaaggggctcaggatacaaggcacaggaagaagctggacctccaggttctcgcgcccttcccaggatgcctggggaggatgatcgacatgttcgacctcagcaatggcgtggttgccaccaagatgctaactgagaaggcacatagagatgtttctccggccggaaaagaccgaagtaacactttcaagatggcaattatccccccagctcagacagaagataaacaaatagatagccagacgagaaggaattcccctactaaaagatcaaactcgcctactaaaaggagcggtgcagcgcctgttaagatgatcatggagcagggcatgtggaaagaagggatgcctgatgaggagccactgaatgttgttgcaagattaatgggactacatgatgctccagttcagcaatctaatttccatttagcgagacaattggataaggaatatcaacgtggtggttttgaagagaactaccggaatctcaagccaaataaggaaagcaaatgccatcaaaaccaaaaggcagggcacacttggaatggttctggtgaccaaccttcaagaatcaatagcagccggagcaagcatcaaggaaatgagccttgctgtgagaagaggatgtcgcttgtccgcgagaagtttgctgaagcgaagcgtctagccacggacgagaagcttcttcattcgaaggagttccaagatgcactacagtttttaagctcaaatagggacctattcttggagttccttgatgagccaaatcctctgttatcaagcaaccgttatgagttccaacctgtcgcgccaccttctcaagcgaagcagataaccatactgaagccatcagaactagcaaagagaaaaggcagcattcttgtggggagacaactgttttcagatggagatgaaaggggacttaacagatacaggcgccatcagagtttagatgtttgcccggcaaattcaaatttgtccgagccaacaaaaattgtgttactgaagccaggacgactgtcaaaacctcatgattccaggattgcaaggtcttcattatcatcagcagaaaacagtgaagatgaaagtatgacgacggttgatgaaaccgtgtgctcaagaaggttggcaaaggaggtcacttggcagacgaggatgcggctaaaagacaagcaagacgaaaagagcacgctctcatgtgaataccttgacttctatatcggagatgactccttcagtaaatcagaagttgagatttcaaaagagatgcctggtgaaacaagtgaggagttggagtttggcactccgacttctggccgttcctgggattttctgagcagaagtggaagtccttactctgcgtcatgctctagccaggcatcccatagaagggaaccgtcggtagttagggaaggcaagaagaagattttggagagatggtctatggtatcgtcaacagtcagtagcgaggaggaaatggaaggtcgcagaagtacaggcacgcttggtgacatactcacaataccgaaagtcaaggaccaggaaggaattggggcggaaacactggggagcccagcacctgagctggaacctgaggagcctttctcatgcttgccaagatctcggtctcttccactttctctgtcctgtggagtcgccgagtctaatggaggagtagcctctggtagtactcaggaagctgaaagggagaggatcaggaagtcatcatcgtttagggaaaaggtttcaagcctgttctctaaaaacaagaaaccagttagggagaaggcagatctatccgtgagcaatagactcgaggtctatggaggggctgaaactactgctgatgtgaagaagggcttgaaccgtcttgcgttagacaatcttcagaaacaaagtactagtcgtgtaaacacagacgggaagaagaacgctgcgcaaggactcgtcactagttcttgtggtactaatgatacagctaataccacccctgccaaggacaacattgcctccattccaagtcttggcgccccaggaatccttggtgaccctcaggaccagcctagtcctgtatctgtgctagatggaccgtttattatacgtgataacagcaggaatgtactgtactcatctccatccccacaggctttgtcgaggtctcccttgatcggatcgtttccacggtccctgccagtgtcgtgggaggaccccccgccggaagccacgtcgccgaattccctgagactctcgaggcttttctccaaggccgacgaggatctagactcgctgacgttcatccagaagctggtccgctcctgtggcatggaccgagcaagctgcgtgttggctggccctctggacccggacctgctcgagaaggtttcagagcacgaagacgacggaaccaggttcgggagaaggcggcttcttttcgacgccgtaaacgaagcgctcgccgagctcgcctggacggcggaactggccgcgtacccctggggcggcggcagatcacgcctggactgcaactgcaagaacggttccggtggtgactcggcggccgaggagatctggcgcgttatcaggaactggtcgacacttgacaagtaccctccctgcgaaactatcgaaggaaacgtcttgctggagatgatactcaggcgggaggcggacagcggcgagacggctcggttggaggtgtttggtctcggcgcctcggtctgcgccgtggtgttggaggagctggttgaagagacggttgtggatctcctgactgactgctagtgagtgatacttgctgctgctgttaacactgctccgttaatccacccctcaagatggaatgggtctctttgccttgttcacatctttgttttgaccggcatttgctctagccgttgactggtaatggatcatgccatttgtttcgccgtttaattacacacacgagaccaaaaaaaaaaactgtaagtagttgcatctcggagcctgtccctaccctgtccacaagatgatcttgttttaatccaagcttagagcctagtcccatgcatgccacaagtatgaaacataatacatttttttattattctgagatccagactaaaaactgccgccttgtcgtcgcctcgagattggaactaag

SEQ ID NO: 44583 - DNA, 3409 bp, Zea Mays
atggctgcgtccccgccaaccgccgcgtatatatatacggttgttgccgccttgcaggctccgttctgccgaccaggacggtgtgaatgaaaggggctcaggatacaaggcacaggaagaagctggacctccaggttctcgcgcccttcccaggatgcctggggaggatgatcgacatgttcgacctcagcaatggcgtggttgccaccaagatgctaactgagaaggcacatagagatgtttctccggccggaaaagaccgaagtaacactttcaagatggcaattatccccccagctcagacagaagataaacaagtctgaaaaaaaatgtttattcttgcatcgaaaccaaacttgacacaactggaagttacacaaccttgatcttctctaatttacctgcagatagatagccagacgagaaggaattcccctactaaaagatcaaactcgcctactaaaaggagcggtgcagcgcctgttaagatgatcatggagcagggcatgtggaaagaagggatgcctgatgaggagccactgaatgttgttgcaagattaatgggactacatgatgctccagttcagcaatctaatttccatttagcgagacaattggataaggaatatcaacgtggtggttttgaagagaactaccggaatctcaagccaaataaggaaagcaaatgccatcaaaaccaaaaggcagggcacacttggaatggttctggtgaccaaccttcaagaatcaatagcagccggagcaagcatcaaggaaatgagccttgctgtgagaagaggatgtcgcttgtccgcgagaagtttgctgaagcgaagcgtctagccacggacgagaagcttcttcattcgaaggagttccaagatgcactacagtttttaagctcaaatagggacctattcttggagttccttgatgagccaaatcctctgttatcaagcaaccgttatgagttccaacctgtcgcgccaccttctcaagcgaagcagataaccatactgaagccatcagaactagcaaagagaaaaggcagcattcttgtggggagacaactgttttcagatggagatgaaaggggacttaacagatacaggcgccatcagagtttagatgtttgcccggcaaattcaaatttgtccgagccaacaaaaattgtgttactgaagccaggacgactgtcaaaacctcatgattccaggattgcaaggtcttcattatcatcagcagaaaacagtgaagatgaaagtatgacgacggttgatgaaaccgtgtgctcaagaaggttggcaaaggaggtcacttggcagacgaggatgcggctaaaagacaagcaagacgaaaagagcacgctctcatgtgaataccttgacttctatatcggagatgactccttcagtaaatcagaagttgagatttcaaaagagatgcctggtgaaacaagtgaggagttggagtttggcactccgacttctggccgttcctgggattttctgagcagaagtggaagtccttactctgcgtcatgctctagccaggcatcccatagaagggaaccgtcggtagttagggaaggcaagaagaagattttggagagatggtctatggtatcgtcaacagtcagtagcgaggaggaaatggaaggtcgcagaagtacaggcacgcttggtgacatactcacaataccgaaagtcaaggaccaggaaggaattggggcggaaacactggggagcccagcacctgagctggaacctgaggagcctttctcatgcttgccaagatctcggtctcttccactttctctgtcctgtggagtcgccgagtctaatggaggagtagcctctggtagtactcaggaagctgaaagggagaggatcaggaagtcatcatcgtttagggaaaaggtttcaagcctgttctctaaaaacaagaaaccagttagggagaaggcagatctatccgtgagcaatagactcgaggtctatggaggggctgaaactactgctgatgtgaagaagggcttgaaccgtcttgcgttagacaatcttcagaaacaaagtactagtcgtgtaaacacagacgggaagaagaacgctgcgcaaggactcgtcactagttcttgtggtactaatgatacagctaataccacccctgccaaggtaattcaaaacctattattatcttgttaaagctggtgctcatggttttcaaaagtcacaaaaaacatgatagttagcttcgctgtatcaggacaacattgcctccattccaagtcttggcgccccaggaatccttggtgaccctcaggaccagcctagtcctgtatctgtgctagatggaccgtttattatacgtgataacagcaggaatgtactgtactcatctccatccccacaggctttgtcgaggtctcccttgatcggatcgtttccacggtccctgccagtgtcgtgggaggaccccccgccggaagccacgtcgccgaattccctgagactctcgaggcttttctccaaggccgacgaggatctagactcgctgacgttcatccagaagctggtccgctcctgtggcatggaccgagcaagctgcgtgttggctggccctctggacccggacctgctcgagaaggtttcagagcacgaagacgacggaaccaggttcgggagaaggcggcttcttttcgacgccgtaaacgaagcgctcgccgagctcgcctggacggcggaactggccgcgtacccctggggcggcggcagatcacgcctggactgcaactgcaagaacggttccggtggtgactcggcggccgaggagatctggcgcgttatcaggaactggtcgacacttgacaagtaccctccctgcgaaactatcgaaggaaacgtcttgctggagatgatactcaggcgggaggcggacagcggcgagacggctcggttggaggtgtttggtctcggcgcctcggtctgcgccgtggtgttggaggagctggttgaagagacggttgtggatctcctgactgactgctagtgagtgatacttgctgctgctgttaacactgctccgttaatccacccctcaagatggaatgggtctctttgccttgttcacatctttgttttgaccggcatttgctctagccgttgactggtaatggatcatgccatttgtttcgccgtttaattacacacacgagaccaaaaaaaaaaactgtaagtagttgcatctcggagcctgtccctaccctgtccacaagatgatcttgttttaatccaagcttagagcctagtcccatgcatgccacaagtatgaaacataatacatttttttattattctgagatccagactaaaaactgccgccttgtcgtcgcctcgagattggaactaag

SEQ ID NO: 44584 - DNA, 3316 bp, Zea Mays
ccggccgactgcacgcagtccggccggcgctgcctcgcagcaacaagacggacagctcgccaccggcagggggacctctgctcgcccccgtcctcgcggggagacacgggttaggcgctagatccacgcgtccggccccgcctgcggtgcccgcggcagtgcaggacggtgtgaatgaaaggggctcaggatacaaggcacaggaagaagctggacctccaggttctcgcgcccttcccaggatgcctggggaggatgatcgacatgttcgacctcagcaatggcgtggttgccaccaagatgctaactgagaaggcacatagagatgtttctccggccggaaaagaccgaagtaacactttcaagatggcaattatccccccagctcagacagaagataaacaaatagatagccagacgagaaggaattcccctactaaaagatcaaactcgcctactaaaaggagcggtgcagcgcctgttaagatgatcatggagcagggcatgtggaaagaagggatgcctgatgaggagccactgaatgttgttgcaagattaatgggactacatgatgctccagttcagcaatctaatttccatttagcgagacaattggataaggaatatcaacgtggtggttttgaagagaactaccggaatctcaagccaaataaggaaagcaaatgccatcaaaaccaaaaggcagggcacacttggaatggttctggtgaccaaccttcaagaatcaatagcagccggagcaagcatcaaggaaatgagccttgctgtgagaagaggatgtcgcttgtccgcgagaagtttgctgaagcgaagcgtctagccacggacgagaagcttcttcattcgaaggagttccaagatgcactacagtttttaagctcaaatagggacctattcttggagttccttgatgagccaaatcctctgttatcaagcaaccgttatgagttccaacctgtcgcgccaccttctcaagcgaagcagataaccatactgaagccatcagaactagcaaagagaaaaggcagcattcttgtggggagacaactgttttcagatggagatgaaaggggacttaacagatacaggcgccatcagagtttagatgtttgcccggcaaattcaaatttgtccgagccaacaaaaattgtgttactgaagccaggacgactgtcaaaacctcatgattccaggattgcaaggtcttcattatcatcagcagaaaacagtgaagatgaaagtatgacgacggttgatgaaaccgtgtgctcaagaaggttggcaaaggaggtcacttggcagacgaggatgcggctaaaagacaagcaagacgaaaagagcacgctctcatgtgaataccttgacttctatatcggagatgactccttcagtaaatcagaagttgagatttcaaaagagatgcctggtgaaacaagtgaggagttggagtttggcactccgacttctggccgttcctgggattttctgagcagaagtggaagtccttactctgcgtcatgctctagccaggcatcccatagaagggaaccgtcggtagttagggaaggcaagaagaagattttggagagatggtctatggtatcgtcaacagtcagtagcgaggaggaaatggaaggtcgcagaagtacaggcacgcttggtgacatactcacaataccgaaagtcaaggaccaggaaggaattggggcggaaacactggggagcccagcacctgagctggaacctgaggagcctttctcatgcttgccaagatctcggtctcttccactttctctgtcctgtggagtcgccgagtctaatggaggagtagcctctggtagtactcaggaagctgaaagggagaggatcaggaagtcatcatcgtttagggaaaaggtttcaagcctgttctctaaaaacaagaaaccagttagggagaaggcagatctatccgtgagcaatagactcgaggtctatggaggggctgaaactactgctgatgtgaagaagggcttgaaccgtcttgcgttagacaatcttcagaaacaaagtactagtcgtgtaaacacagacgggaagaagaacgctgcgcaaggactcgtcactagttcttgtggtactaatgatacagctaataccacccctgccaaggacaacattgcctccattccaagtcttggcgccccaggaatccttggtgaccctcaggaccagcctagtcctgtatctgtgctagatggaccgtttattatacgtgataacagcaggaatgtactgtactcatctccatccccacaggctttgtcgaggtctcccttgatcggatcgtttccacggtccctgccagtgtcgtgggaggaccccccgccggaagccacgtcgccgaattccctgagactctcgaggcttttctccaaggccgacgaggatctagactcgctgacgttcatccagaagctggtccgctcctgtggcatggaccgagcaagctgcgtgttggctggccctctggacccggacctgctcgagaaggtttcagagcacgaagacgacggaaccaggttcgggagaaggcggcttcttttcgacgccgtaaacgaagcgctcgccgagctcgcctggacggcggaactggccgcgtacccctggggcggcggcagatcacgcctggactgcaactgcaagaacggttccggtggtgactcggcggccgaggagatctggcgcgttatcaggaactggtcgacacttgacaagtaccctccctgcgaaactatcgaaggaaacgtcttgctggagatgatactcaggcgggaggcggacagcggcgagacggctcggttggaggtgtttggtctcggcgcctcggtctgcgccgtggtgttggaggagctggttgaagagacggttgtggatctcctgactgactgctagtgagtgatacttgctgctgctgttaacactgctccgttaatccacccctcaagatggaatgggtctctttgccttgttcacatctttgttttgaccggcatttgctctagccgttgactggtaatggatcatgccatttgtttcgccgtttaattacacacacgagaccaaaaaaaaaaactgtaagtagttgcatctcggagcctgtccctaccctgtccacaagatgatcttgttttaatccaagcttagagcctagtcccatgcatgccacaagtatgaaacataatacatttttttattattctgagatccagactaaaaactgccgccttgtcgtcgcctcgagattggaactaag

SEQ ID NO: 44585 - DNA, 1649 bp, Zea Mays
gaacgtacagcagcaagaccctgcacatgtaacagaactcactacatgtaaaaccccccagaataaccgcagacaccatacaagctatggagaagcaccttagggaactcgggacttgaagtgagctcaaggagtgccgcatcgagttctcttgcagaatcctcgtactggcccgagtcgagcagacttctagcataagaaagcggaacggagaagacgttatgaagtcgaagggcaggaggcgagagggatcgccactgacctcctcgaagaagagcgcccaccggagggccttcttgatctcgtcggcgctccaagtagcagcggcgccggacgaggtgcggccgccggcaaggacaaggacgtcgacgaaaccccgcaccagacggagcacctcctccatggtcaccgccggcctgaggacctgaaaattcagctgaaattgttacaaggggtactcgaataatagccgcaaaaccctaaccttggcaccgtataaacgagccaacctgtccaccccgcgccgccgccactccgccgctcctctccgcttccaagatgtcgaagcgaggacgtggaggttctgctggtaacaagttccggatgtcactgggtctaccagtggcagccactggaatcaaggggcgccttaacaggcttccttctgcctgtgttggtgacatggttatggcaactgtgaagaagggaaagcctgaccttaggaagaaggtgatgccagctgtcattgtgaggcagcgcaagccatggcgccgaaaggatggtgtctacatgtactttgaagacaatgctggagtgattgtgaacccaaagggagagatgaaaggctctgccatcactggacccatcggaaaggagtgtgctgatctgtggcctaggattgccagcgcggcaaatgcgattgtctagtggaatcagttgatcgaaatttacttcaaataacatttgtttgtgttgcgaattgggaagagagtttttagttagacgagcttttgatggccctaaagatgttttcccggatgatgtttgtgctgctggaccgtttcctgttagcttcgatggcatcctccccatatcgataaactgttgcttagcctgacaatcggaagagtttaaatgttaaagatttgatatctctctcgctgtttcgcattgcttttcttttacttgcgggagctgaaatgttggcgcttttggaatggaatgcaggaatttcatgggaatggcgtagaatctggaggtaatcagctcattttcattgaaataagatactgtatgttgagaacttgttctcaaatgctataaattaagaacaaggcaacataaaatgttaaatattaatacccttcgtccgtggaagcattatttccccaaggatttaatgacctccgaacgaaggctataaacgaaatatcacgaagatcatgtcttcgtggttagacttgaaaaacaatatgaagtaaaatacttgaaaaacaatatgaagtaaaatacagaacacaaaacattattgaaagatataccgaaaatgaataacaatatttttatatatattctattatatgaacctaaatattatgtttaatatttaggtatatttgtaccttcgtcttagcagaaagcaataatcc

SEQ ID NO: 44586 - DNA, 1087 bp, Zea Mays
catctgtcgactggtagcagagagaagagatagaccgagagagggagggagagagagaacctgacactgagactgaagcatcggcgctagctagcttgggcagcaacatcacgatgtcgtccaactgcggcgaggatgagaaggagctggtgtgcgtgaccggcgccggcggcttcatcggctcgtgggtggtgaatgagctgctccagcggggttaccgcgtcaggggaaccgcgagggaccctgcggacagcaagaacgcgcacctgctggctctggagggagccaaggagcgcctcaccctgtgccgcgccgacgtcctcgaccgcgcctccctgcgcgccgccttcgccggctgccacggcgtcttccacgtcgcctccccggtgtccaacgacccggagcttgtcccggtggcggtggagggcaccaggaacgtcatcaacgccgcggcggacgagggcgcgcgccgtgtcgtcttcacctcctcctatggcgccgtgcacatggaccccagccggagccccgacgccgtcctcgacgagacctgctggagcgactacgacttctgcaagcgaaccgacaacctgtactgctgcgccaagatgatggcggaggtgacggcggcggcggaggcggacgcgcggggcctgcagctggccgtggtgctgccctgcatgaccacgggccccatgctgcagcagacgctcaacttcagcaccaaccacgtcgcgcgctacctcatgggcaccaagcgctccatccccaacgccgtcgccgcctacgtcgacgtccgcgacgtcgcgcgcgcgcacgtgctcgcctacgagcgccccggagccaggggccggtacctctgcatcggcaccgtgctgcaccgcgccgacctcgtcgacatgctcagagacctctttccgcagtaccccgtcacggccaagtgcgaggaggacggcaagccaatggcgaagccgttcaagttctccaaccagaggctcagggacctggggctggagttcactccgctgaggaagagcctgtacgagaccgtgctgtgcctgcagcagaagggccacctgcctgcagctgc

SEQ ID NO: 44587 - DNA, 1940 bp, Zea Mays
actttgaccatgagaaagcagtctctttttctagtctggttataagagcatctctattagttctctaaagcaacccatggaaggtccgtctctggcctacggatggaacagggtgtggggcagacgagatctcggtttaaatccgagtcagcactgcgatcggattggacccagcgaagcgaagcaacgctctcccaactgatacacccgcggacccgccccgcccaccttctggcttctgctcgtctcgtgagccttagcgcttaagcttgccgtcttccgccccttataagaagcccgccgcccgcccgccgccgtcactctcggcctcggcagcaaactaacaaggcacatcgtacgctcgaggagaggagctgcgttcgtggtgtgcatggcggaatcggcgatctaccggctgccggaggagtgcgtggcatacgccatctcgctgacgacgcccggcgacgcgtgccactcgtccgcggtgtcgccggccttcagggccgccgcggactccgacgccgtctgggcgcggttcctgccgccggaccacgccgacatcctggcgcgcgccgacgacccgggcgccgtcaccgccggctgcgcgtccaagaaggagctcttctcgcgcctctgcgacagccccgtcctcctcgacggcgccaccatgagctttgggctggagaggcggagcggcgccaagtgcttcatgttgtcggcgagggcgctcagcaggaaaaacgacccttcgcgctggacgtgggccgctagcccgccaggatccaggtggcccattgttttttttttgtattactacacacacgtgtgtcaccatgcatgcctctacatctgttcatgcatgcatgcgcgcacgtattccaaaggtccttcgtgacaaagcacgtctcttacgcatgcaacttgcaacctcacgaaagcctacctcagcgcgcgcggaaacgacacaccctttccatgaccatgagtccatgaccataactgcactgcatgcatggttgcacatccttctgccatcaaagaaaccatgtgaccgatcgacccatcaggttcccggaggtggtgaagctgcaggacgtgtgctggctggagatcagcgggaagctcagtctgtcgctgctgtctccggggacgacctacgcggcgcacctcgtcttcgccatagccgacgactcgtacggcctcgagtgccacgtcgggatgccggcgcttaaggccacggtcaccgtcaccgtctccggcaagacaacgatggcggagcacgacatctgcctgcaccacatgcagggcgaggcggaggccgcggcgcaccggcggacgcagcagtacgtgcgcctccgcaggggctacggcggcggagggaaggcgacggtgctgacgacgacgagggaggccgaccccgacatcaggtgcccccggcggaggggcgacgggtgggccgaggtcgaggtgggcgagttcgccgtggcgggcgacgagggcgacgccgcggacgtggaggtgacggtgcaggaggatagcctgcgctggaagaggggcctcgtggtgctgggcgtcgacatccggcccaagcagcacacgccaacgccatgctagctagctagcgcaatggccggtgcccgctgcccggtggattttattttttatacaaaaatctagggagaaattaacaagctaagtgctgatcaaattagatccagtcaggaacaggtaggcgatgtgcccactgctcaataaggccaagctttaaaacctgtatcttttatggacagactagtgcacttttaaaacggccgtccatttcttagcgctttagcttctctgaatatgcgcatggtgtattatttattattgtgtcagttgcttgcatgcaggctacgtacgtagcccataaaaccgtgatgaaattataggtgtgtttt

SEQ ID NO: 44588 - DNA, 1154 bp, Zea Mays
ggacacctcaatcccaaactgtcccttacccgcgtcccgacccaacccagtgaagacccctccgcccgcgagacaattgccattataaaacatcagagaaacggtttcgaagaatcggaggcgttgccgagggcttcgctgttttggagacgcaggcagcaggcaatcactaaaatggaaaacagagagcgatttggtaaccagatcaacattaaactcactccgtcctcacgccgtctattgcattcgacgcgagctgcttccaaactggaaccctaggcgccgccgccgcctagtggttgccgatgcggtacaagcggctcgtgcggctgccgtcgcggctgctgaggcaagatgcgctgccattatcgcagagaaggaggccaaggctgctgttgagtgcgccgccattgccgtcgacaaggtcgaagcagtgaatgtggcatcaaatgtggaaattgtcgactttaagtatcttgtgaacgtaaagaattctttgagatatgctattcaagaaatgaggaggcactcttcactgttgaattcggttaaaaaactgtgttccactatccccgaagtagaaggtggcaagataagaaaggtttgtgggcatttggatcatgtgtgcaagaagctagaggaaacttcaattgtctgtgaacaagatttggaaacaaagaatcctagttgggagattgatgacagcccttccttagatgatgaacatcctttagatgatgatgaacttagcgagggctacagtacagaagatccagagctatgggaaatggtttttgacgacctaaagtgggaagagattaaagctaatgtctcatttgaagagcactaccgtgtcataaactacaggttcgaagaaataattgatcgtaacatgtagttgtgaggcagtgtttggaatggatgaagttattttgtatgtaatgctccacatgtagtctggagcaatgtatctgtctttatgtctggtatggatgaaactaaatgtatcttgttatgtgtctgtattgtggctggttatctttctgaaactaaggtctggctgtgtattgtgcctgtgtattgtcggacatctcgccccttgtattggagatggttgtctattgttcctgtgtattgtggctgtctattgtgtt

SEQ ID NO: 44589 - DNA, 3289 bp, Zea Mays
agcgacctttcctctcgccccatcttccccgaatccccggatcccccaaaccctagcactgcatcccctcccgctatgtcctcccgcctcaaggatcgcggcggcggcagggccacggccgcggccacccgcccgctcaccccgaagcccttctccatttcgtcatccgcccggcagacgaccgccgccgccgggaaggagaacacggcgtccaagccgtccaagcccacctccgccgtgcggtggtccacgtcgtcgctcccgcgggccagcaggatccaaagctcggtggactcctccaagctcgcctccaccctcagggctcccgtgctgccggggaggacttccatcagtaaggatcccgtggtggaggcaggcttgcggcggagcgtcagtggtgggatcagggcttcttctgtagagaaagggaggaggtcgattagtgttgttggatccagggcctccgaggctaggagagggagtgctggcgctggtagtgatgacactggtagaagggcgaggtttgatgcgaaggcgaaggggtcggatgagatcagcaggaaaagaggtgaccttgatgccaaggggaagcagactgatgagattggcaggaaaagggagagctttgatgcaaaggccaagcagatcggtgggaaaagagatagcttttgtgtgaatgtgttgaagcaatgtgatgagaacaaagggaaaacaaatgcattcgtgactaatatgaagaagcaatgtgaagatgttggtgggcaaataaagggctctgattcaaaggtaaaggcagctgaagaaatcaatatgaagaaagaggggcccaataaattgatgaaggagatgaataccaaaaaggctgatccaggagaggctgcttccaaatctgtggaatgttgtgccatccagaaggatgacgatataggcaagacttctgtcatccctgttttcactgtccatgtggtgaattcaaatgatgtccctgatccaataaggaaacagcaaaagaataatgaagagggcaggaagcaggaagaaaaggtaaaattggcagacaggataggagtttttgagaaagtggctgcaggtggggagggagggtcagcaaaacccgtgtctgctatgaacaggtacccaagcaaattacatgagaaactagccgcgctggaagggagggttcagaagattgctaccgatatcaagaaaaccaaagaaatgcttgatgagaacaacccgaatgagccaaaacagatcttgtcaaatatccagaaggaaatcactgccattgagaaggcaatttctcatgtaaaggatgataataagatacagctgggtactgcagatagcagtgaatgtgagagctctcaccctgaaacagctgaaaaatgtaccataacaaagccaggtaacctgaagcaagctggaaaaggcttgaatgctgatgagctggaggcaaggttctttccacaccacaaattgttgaggggtcgcatatcttcaacttctactcaacaggagttatctgtggatgcaaaaaaagattgtagtggaaaaacaagacctgccgcatctgatcctggcgatgatgagaacagtatagccatggagtttctggcttctttagatggggaagaaaatgatttcttcaaggatcgtcgagctaagaaattggaaaagaataaaatatgtgaagtagcagatgctaccagcaagacatcaagtcaaggtagcacaaagaatccagttgctcccaatcataaggatgaagttgaattgcttgctacagaggagctagaagaatttgatgatcaggaaaacaagtcatccatgatgttacaggaagaaactgaggagtcatgcaatagtcagttatcgggtataggaaacaagtcttcaactggtggatggtttgtttcagagggggaagctgtgcttcttgctcatggagatggcacatgctcctattatgacattgcaaaccatgagttcaaatctgagtacaagcctcccagcttggtatcaaataatacgtggggcgattgctggttgattcgtgccccaggcgtagatggatgttctggtagatttgttgttgctgcatcggctgggaatgcattggagcctgggttttgcagctgggattactataccagagaagtaaaatcatttcatgtcgaggaggaagcttctcaaacttttgctccaacatccagggctattcttggtgctctctctaatgtaggctcatcaagatccagctctgcgctgtcaaatacagagaggcagcaatggtggtataaaccatgcggacctctcctgctatctactgctagcaagcaaaagatggtcacagcttatgatatacgtgacggtgatgttgtgatgaaatgggaagttagcaatctagtaatgggaatggaatactccagcccactacaatggcgtagcagggggaaagtagtaattgctgggagtgaatcaatagggctgtgggatgtgaattcacttaacccacaacccttgttgtctgttgcttctggtaagaaagtgtactgccttcacgtgaataacactgatgctgaggtgggcggcggagtgcgtcaaagggttagttcatctgaggtggaaggaaatgatggtgttttcagcacacaggaaagtgtcaatgtatttgattttcgtgtacctgctggcattgggcttaaaatagcaagacatggcggcacagcaaactcaatcttttcacgtggggactcggtatttattggtagcacagaaggaaggctgcaaataaaaggagggtcaagatcacgagttcagcaatactcgttgagaaaggggaaacttgtcgccacctatgagttacccgaattcaacgctcatatccatcactctgcgataacccaagtatggggcgactcaaaccttgtcttggctgcatgtggtatggggctgttcgcctttgacacgtttaaggaagacacgcagccaacctacagctttgaccgtggaaacaccattgcagcgagagaagctattggccctgatgatctgtactgtcctacatttgactactcatcatcaagggttcttctcgtctcaagagaccgcccggcacattggagttacgcaccttgacgaatttcttcaatattttggtgaaagccttcacattgagggagctgcatccatgcaatgcatttaaactgggctcaaatttggaaatttgcgtctaagagcaacagaacagagtaagcgttggtttgtgtgagcagagcaagatagt

SEQ ID NO: 44590 - DNA, 2404 bp, Zea Mays
ctcaatttctctgtctagctagctataccctactactagatcctattatctactcctcagatctcaatgcctgcctgcctaaccaaaaggctaaaaacctatcccctccaaccccagccttccttccagcatccactgccaccatctccagagcttcatgctgactcccaaggatggcttgaccacctgagctgctgagcgtcagagagcatggcatagcatttcttggtgtcgctggatggatggggatgactggatcactcatcaagaggcggatcacaaaagagtactagctaaccactgccaagattccgccgcgcgcacgcatgcatctgtgttgagcttcttacacgccgcagagaaaactagatcacggcgctgcacataccgcgcgcgcaggaagcaagcggctaaggatcgatggatcaccatcaccaccaccaccatcacatgatcccgggccaagagccaccggcggcggatagctcagccccggacagcttcttcctcggccccgcgggagccatcatattctccggaggcgccggggtgtcgggggccggctcgtcgtcgggcgccgcggccctcggatcatccgcgggggcaggaggtgggccgtcgccgtccagctcgtcaccgtcgctgagccggtacgagtcccagaagcgccgggactggaacacgttcgggcagtacctccgaaaccaccggccgccactgtcgttgtcgcggtgcagcggtgcacacgtgctggagttcctcaaatatatggatcagttcggcaagaccaaggtgcacacgccggtgtgccccttctacgggcaccccaacccgcccgcgccgtgcccgtgcccgctgcgccaggcctggggttccctcgacgcgctcatcggccgcctccgcgccgcctacgaggagaacggcggcacgcccgagatgaacccgttcggcgcgcgcgccgtgcggctctacctgcgcgaggtgcgcgagtcgcaggcgcgtgccagggggatcagctacgagaagaagaagcgcaagaagccgtcggcagcctcggccgcggcccctgggccgtcgtccgagggaagcccaccaccaggaccgtccggcggaggaggaggattcggcacgtcggcgtcgccgcggttcatcatgccgtgagtttttttttttcctggctagctagccaagtgatccatcgccggcatctacaccccttgatcgtctattttaatctgatgagctagccaggacagcacagctggagttggaattcttgcatggaacgccattgttctggtagtagagcaaacaaaagtctaagccattgttctttgcctcctcctcctccttcggtggcttgcatttcgggaaaaaaaattctcgatccccttttcttttctttcctttttcttttctctgtttcatccgtgcgtgagtactggtttaatcgtggatgttttatttagctttcaatccattggcaacaagagcagtttatgatagttttgcttggtttatatatgctcctcccgagggatgcaaacttggcagaacagtttgagattccctagtccctaccaatgctagcttatatatgcatgtcatgtcatgtcatgccatggtgtaggagaagagtttagtttgcagttagcaacaacagtggcaaaaggctgtagctagctgtatgactagctactagtagcatcttttcagaatttgttcttgtatgcaacttgcaaagcaacactagtagtttggttctgttgcagaagccagcagccaaactaggttgctgtgctattcattatattggctgaacagaaattgatacaatgcttcatcacactacatatatctattcatggactgctggtggtgtgtgtggttcaaattcctttctttcttaggagagcagaagggcaatgcacatggtttctaaagccagggaagacatatatactccaggcgaacccatatatatatcttgtaacttgaacaatgtatttcttcagttgagcttacaaattgcacatgtttagtttcctttgtgtttggcattctgttgttgttatgctggctactatttaaacccagaaaacttcgatggccaaaagggtagctcctggccacgagcagcccagaagaaacaaacacatggggcaagcaaatgaagcaatgaagagagaagtctttagaaaaagaaaaggtaaaagatatatacgcaggaactgaaaacgtatagttttttgtttcagtaggctgcagtgtgtgtacaatcgggcagcacctgttttagcccatgctttcatgcttctggctatgcctcatttttcatgttagaattactggatctggctacatttgccttcacttcttgtctctttctctgctgggagtattg

SEQ ID NO: 44591 - DNA, 1973 bp, Zea Mays
aaaaatggcagaagacaatgataggaaacctcttcatattgtgcacatctgtagtgaaatgtacccagtagcatcatgtggaccattatcagcatatgttgccagtttatcttgtgagattcaaaaaaaggctaacttggtggaggtgatactacccaagtacaccagcataaacttggatggaattcatggtctaaggagatctgaggcagaatatgaatcttatttcggtggcctttggcataaaaataaaatatggactgggtaaagatacactcctagtgtgcaaagagattacgtcaagtggtgttggtcttgtaataatagaaccatctcagctctcctattttagtcgtgatatgttacgtggctaccctgatgactttgagcgattttcctatttttcccgtgcatccctggattatattgttaaatctggaaagcggccagacattatacacatacataactgggaaactgctatagtggcaccgcttttctgggaaatatttgctcaccagggacttgggaacactcggatattactgacatgccaagacttgaattcagaatgcctagaggagccaaataaactggagatgtgtgggcttgatccccgtaagcttcatcgtcctgatcgtctgcaggatacaaacaagacacatcttgttaatattcttaagggaggcattgtttattcaaataaagtcgttttgatgtcctcaacacattcaaaagatgctcttattcagggttcacgacatgagctgcaatcaacattagccgcacatagggagaagatattggttgcatcttatggattggatggtgaactttgggatccattcaaagacatttatcttcctcgaaggtattctgccaatgatattgaggggaagtccatttgcagacaagcacttaggcgtagacttcggttcaatggtgattcatccattatagtaggatgtatctgtgatgataattcagatgtccatagtcttaaagaagcagttcatgttgctctgcacaggaatactcaggtcatcatcatggaaacgttagggtctgttgtgaactcaattttgcaagcattaaagggagagataaagggagacaaaatagcatttgttgaggcatatgatgaagctctggcacatttaatatatgcaggctctgatatcattctttgctcttccttccaagatccatcactgcaaatagcgatgaaggcaatgaagtatggatctgtgccagtacagttaaacttttccagcgatgaatcaagggagtcaaaggggcatgagtgccgcaatacagtaatgtctcagtacatcatctcaacctatggagatttgtctctttctcaagcacttgatgactttaaaaatgacccttcgcattgggatcgacagatcaaggatgggatggctaggggttcttcatgggacgcaaagtgctatagccttcattgggaggcttattcatccataacgaagctgtgaactgggcatctgctagagaagcacatgacctacatgaggcaccatctccccaaattaagggtggatgaagactggcaattattggcctgcgctgcggtctcgacgccgtgcagaggcgtcatgtggtttcgtgatccacgcggggatgggaggagccgcatgagatgctgagtgattggacggttagttggcctcctcacgtggcgcgtctctgcacctttgtctctctggctgactgactggctctgctttcgcctgcgcctgggcatatcgtggaaccctgattggcctagctcgatacggccgcagctatcatgtggtgtttgtttcagcttattttcagcttctggcagctgtggaacatttagctttttaactcgtttttgtgagaatcgatttggtaaaaaccgttaaaaatcaatttaaacatataatcggctgattcgtcatccgttaccttctggatcataa

SEQ ID NO: 44592 - DNA, 2840 bp, Zea Mays
cccgataaacacaacacgcaccaccgctcactcgctcgcccacgtgccacgtcccacctccgcgagcacgcacgccgaacggcgcctcctcgcaccgatcagcgcagcggctcagcgcccgccagccgccatcaggcagcagcctcgcctctggccattgaagcacacggaattgtctctttcacctgggcaatccgcggagaggtacggcgcgcatagctaaccaaggaggcgtacgagcagcgtgcgtagcaggcaaccatggagacgccgcgcctcgtggtcggtgcggcgtcgcgggccccgccaccagctcctcgatcacagcgacggcgtatcctgcgtccgtgcggcggggcacattgctccccctccgcccgcgctgctccaccggtgcttctaacccggtgctcctcctactcctcttccagggaggggaacggcgattctcatggtaaggcccgccgcgagagctccggttccgtccggttggacgtcgaagcagatagcgatcaggtaccaagtttggctgacgagcaacgtgagggtgatattacagagctcttcaacctggctcaacggaatatcctgtacattaacaagcagcggcttattgccatggaggagatgaagaaactgcatgatgaaaataatttgcttctcgaggaaatacaaggactagaaacagaaatgcaaggtgcggtctcggttgccaacattttcaggcttaggaactatatggatgataatgtgaaatttctcaatcttcagcaatcctatgctgattgttgatatgattgttttactttccatttctcattcttaactatagaggtattcccctagaagcagcacagtcgtcaagtttcagtgagttactcctgcggatagatacaatggtcatttctggaatgatcagcatgacggaagcatctgatttaagagagaaacttgtcactaatagaagcataatacaaagcaccttttgtgatattcatcataagccaaatactgaattgctgtctgaactgcaactctttttgcgtaaaccaatagagaaacctcttcatattgtgcacatctgtagtgaaatgtacccagtagcatcatgtggaccattatcagcatatgttgccagtttatcttgtgagattcaaaaaaaggctaacttggtggaggtgatactacccaagtacaccagcataaacttggatggaattcatggtctaaggagatctgaggcagaatatgaatcttatttcggtggcctttggcataaaaataaaatatggactgggtaaagatacactcctagtgtgcaaagagattacgtcaagtggtgttggtcttgtaataatagaaccatctcagctctcctattttagtcgtgatatgttacgtggctaccctgatgactttgagcgattttcctatttttcccgtgcatccctggattatattgttaaatctggaaagcggccagacattatacacatacataactgggaaactgctatagtggcaccgcttttctgggaaatatttgctcaccagggacttgggaacactcggatattactgacatgccaagacttgaattcagaatgcctagaggagccaaataaactggagatgtgtgggcttgatccccgtaagcttcatcgtcctgatcgtctgcaggatacaaacaagacacatcttgttaatattcttaagggaggcattgtttattcaaataaagtcgttttgatgtcctcaacacattcaaaagatgctcttattcagggttcacgacatgagctgcaatcaacattagccgcacataggtaggatgtatctgtgatgataattcagatgtccatagtcttaaagaagcagttcatgttgctctgcacaggaatactcaggtcatcatcatggaaacgttagggtctgttgtgaactcaattttgcaagcattaaagggagagataaagggagacaaaatagcatttgttgaggcatatgatgaagctctggcacatttaatatatgcaggctctgatatcattctttgctcttccttccaagatccatcactgcaaatagcgatgaaggcaatgaagtatggatctgtgccagtacagttaaacttttccagcgatgaatcaagggagtcaaaggggcatgagtgccgcaatacagtaatgtctcagtacatcatctcaacctatggagatttgtctctttctcaagcacttgatgactttaaaaatgacccttcgcattgggatcgacagatcaaggatgggatggctaggggttcttcatgggacgcaaagtgctatagccttcattgggaggcttattcatccataacgaagctgtgaactgggcatctgctagagaagcacatgacctacatgaggcaccatctccccaaattaagggtggatgaagactggcaattattggcctgcgctgcggtctcgacgccgtgcagaggcgtcatgtggtttcgtgatccacgcggggatgggaggagccgcatgagatgctgagtgattggacggttagttggcctcctcacgtggcgcgtctctgcacctttgtctctctggctgactgactggctctgctttcgcctgcgcctgggcatatcgtggaaccctgattggcctagctcgatacggccgcagctatcatgtggtgtttgtttcagcttattttcagcttctggcagctgtggaacatttagctttttaactcgtttttgtgagaatcgatttggtaaaaaccgttaaaaatcaatttaaacatataatcggctgattcgtcatccgttaccttctggatcataa

SEQ ID NO: 44593 - DNA, 3118 bp, Zea Mays
cccgataaacacaacacgcaccaccgctcactcgctcgcccacgtgccacgtcccacctccgcgagcacgcacgccgaacggcgcctcctcgcaccgatcagcgcagcggctcagcgcccgccagccgccatcaggcagcagcctcgcctctggccattgaagcacacggaattgtctctttcacctgggcaatccgcggagaggtacggcgcgcatagctaaccaaggaggcgtacgagcagcgtgcgtagcaggcaaccatggagacgccgcgcctcgtggtcggtgcggcgtcgcgggccccgccaccagctcctcgatcacagcgacggcgtatcctgcgtccgtgcggcggggcacattgctccccctccgcccgcgctgctccaccggtgcttctaacccggtgctcctcctactcctcttccagggaggggaacggcgattctcatggtaaggcccgccgcgagagctccggttccgtccggttggacgtcgaagcagatagcgatcaggtaccaagtttggctgacgagcaacgtgagggtgatattacagagctcttcaacctggctcaacggaatatcctgtacattaacaagcagcggcttattgccatggaggagatgaagaaactgcatgatgaaaataatttgcttctcgaggaaatacaaggactagaaacagaaatgcaaggtattcccctagaagcagcacagtcgtcaagtttcagtgagttactcctgcggatagatacaatggtcatttctggaatgatcagcatgacggaagcatctgatttaagagagaaacttgtcactaatagaagcataatacaaagcaccttttgtgatattcatcataagccaaatactgaattgctgtctgaactgcaactctttttgcgtaaaccaatagagaaacctcttcatattgtgcacatctgtagtgaaatgtacccagtagcatcatgtggaccattatcagcatatgttgccagtttatcttgtgagattcaaaaaaaggctaacttggtggaggtgatactacccaagtacaccagcataaacttggatggaattcatggtctaaggagatctgaggcagaatatgaatcttatttcggtggcctttggcataaaaataaaatatggactgggtaaagatacactcctagtgtgcaaagagattacgtcaagtggtgttggtcttgtaataatagaaccatctcagctctcctattttagtcgtgatatgttacgtggctaccctgatgactttgagcgattttcctatttttcccgtgcatccctggattatattgttaaatctggaaagcggccagacattatacacatacataactgggaaactgctatagtggcaccgcttttctgggaaatatttgctcaccagggacttgggaacactcggatattactgacatgccaagacttgaattcagaagtaaatattcatgcctagaggagccaaataaactggagatgtgtgggcttgatccccgtaagcttcatcgtcctgatcgtctgcaggatacaaacaagacacatcttgttaatattcttaagggaggcattgtttattcaaataaagtcgttttgatgtcctcaacacattcaaaagatgctcttattcagggttcacgacatgagctgcaatcaacattagccgcacatagggagaagatattggttgcatcttatggattggatggtgaactttgggatccattcaaagacatttatcttcctcgaaggtattctgccaatgatattgaggggaagtccatttgcagacaagcacttaggcgtagacttcggttcaatggtgattcatccattatagtaggatgtatctgtgatgataattcagatgtccatagtcttaaagaagcagttcatgttgctctgcacaggaatactcaggtgtgtggtagagtactttgttagataacttccttgggacttaaacagtttatttctctgctagcacagttgcaagagtttataatgtacaggtcatcatcatggaaacgttagggtctgttgtgaactcaattttgcaagcattaaagggagagataaagggagacaaaatagcatttgttgaggcatatgatgaagctctggcacatttaatatatgcaggctctgatatcattctttgctcttccttccaagatccatcactgcaaatagcgatgaaggcaatgaagtatggatctgtgccagtacagttaaacttttccagcgatgaatcaagggagtcaaaggggcatgagtgccgcaatacagtaatgtctcagtacatcatctcaacctatggagatttgtctctttctcaagcacttgatgactttaaaaatgacccttcgcattgggatcgacagatcaaggatgggatggctaggggttcttcatgggacgcaaagtgctatagccttcattgggaggcttattcatccataacgaagctgtgaactgggcatctgctagagaagcacatgacctacatgaggcaccatctccccaaattaagggtggatgaagactggcaattattggcctgcgctgcggtctcgacgccgtgcagaggtagctgcagctttgctcattgggtttgttgcttgcttttgtccagagactagggcaggacaggactgtgttaaggcaggcggccgcgttattgcctgtgcttctgttgttaccttgtgctatgctatatgctaatcatttggcaggcgtcatgtggtttcgtgatccacgcggggatgggaggagccgcatgagatgctgagtgattggacggttagttggcctcctcacgtggcgcgtctctgcacctttgtctctctggctgactgactggctctgctttcgcctgcgcctgggcatatcgtggaaccctgattggcctagctcgatacggccgcagctatcatgtggtgtttgtttcagcttattttcagcttctggcagctgtggaacatttagctttttaactcgtttttgtgagaatcgatttggtaaaaaccgttaaaaatcaatttaaacatataatcggctgattcgtcatccgttaccttctggatcataa

SEQ ID NO: 44594 - DNA, 3724 bp, Zea Mays
cccgataaacacaacacgcaccaccgctcactcgctcgcccacgtgccacgtcccacctccgcgagcacgcacgccgaacggcgcctcctcgcaccgatcagcgcagcggctcagcgcccgccagccgccatcaggcagcagcctcgcctctggccattgaagcacacggaattgtctctttcacctgggcaatccgcggagaggtacggcgcgcatagctaaccaaggaggcgtacgagcagcgtgcgtagcaggcaaccatggagacgccgcgcctcgtggtcggtgcggcgtcgcgggccccgccaccagctcctcgatcacagcgacggcgtatcctgcgtccgtgcggcggggcacattgctccccctccgcccgcgctgctccaccggtgcttctaacccggtgctcctcctactcctcttccagggaggggaacggcgattctcatggtaaggcccgccgcgagagctccggttccgtccggttggacgtcgaagcagatagcgatcaggtaccaagtttggctgacgagcaacgtgagggtgatattacagagctcttcaacctggctcaacggaatatcctgtacattaacaagcagcggcttattgccatggaggagatgaagaaactgcatgatgaaaataatttgcttctcgaggaaatacaaggactagaaacagaaatgcaaggtattcccctagaagcagcacagtcgtcaagtttcagtgagttactcctgcggatagatacaatggtcatttctggaatgatcagcatgacggaagcatctgatttaagagagaaacttgtcactaatagaagcataatacaaagcaccttttgtgatattcatcataagccaaatactgaattgctgtctgaactgcaactctttttgcgtaaaccaatagagtatgctaccacttaccttacttttttttcccagttttaccgccttttactcaaattttctgcagtgttgcgggatacctatgtccattttttattgctgccatgacaacttgacacagcgaattgcccattgacacctgacatggcctggctcatatctgatacattgagaaagaatcttgctgcagagggcaagaggaagctcatgtgtgttatccatgagagggaaaaatggcagaagacaatgataggtgtgtagccgtagagagggaatcactttaaatgctggttaagacaatgataggtgtgtagccgtagagagggaatcactttaaatgctggttttgactgttgttctatgcacaaactgtagctaatctggagcttttgctgtaatcccaggtcttttcctttggtaaagcacacaatggaatctttagtgtccttttagtttgttttatagtaaataggattaatcttagattttttttaacgacataggagagttgcatgtcattttactaagaagagggattaatattgtacttaatatttgaagagctaaaatgctgttctattttttaaaatttattagaagaattcctgaatcctatttttctgagcctgcctagctaaacacctgcatctgtatcggattctggttcccacacctgcgtcctggtaacactatttttgcctatgttttgaatcttttggctgcctccctatgtataatttttggccccgccactgcttcccgctgatatttcacctagtgtatctgcaattactttataataatcatgcgacatatttaatttgtcttgttttatcatatttgttgatgctatatttgagcctatgttcaatgcaggaaacctcttcatattgtgcacatctgtagtgaaatgtacccagtagcatcatgtggaccattatcagcatatgttgccagtttatcttgtgagattcaaaaaaaggctaacttggtggaggtgatactacccaagtacaccagcataaacttggatggaattcatggtctaaggagatctgaggcagaatatgaatcttatttcggtggcctttggcataaaaataaaatatggactgggtaaagatacactcctagtgtgcaaagagattacgtcaagtggtgttggtcttgtaataatagaaccatctcagctctcctattttagtcgtgatatgttacgtggctaccctgatgactttgagcgattttcctatttttcccgtgcatccctggattatattgttaaatctggaaagcggccagacattatacacatacataactgggaaactgctatagtggcaccgcttttctgggaaatatttgctcaccagggacttgggaacactcggatattactgacatgccaagacttgaattcagaagtaaatattcatgcctagaggagccaaataaactggagatgtgtgggcttgatccccgtaagcttcatcgtcctgatcgtctgcaggatacaaacaagacacatcttgttaatattcttaagggaggcattgtttattcaaataaagtcgttttgatgtcctcaacacattcaaaagatgctcttattcagggttcacgacatgagctgcaatcaacattagccgcacatagggagaagatattggttgcatcttatggattggatggtgaactttgggatccattcaaagacatttatcttcctcgaaggtattctgccaatgatattgaggggaagtccatttgcagacaagcacttaggcgtagacttcggttcaatggtgattcatccattatagtaggatgtatctgtgatgataattcagatgtccatagtcttaaagaagcagttcatgttgctctgcacaggaatactcaggtcatcatcatggaaacgttagggtctgttgtgaactcaattttgcaagcattaaagggagagataaagggagacaaaatagcatttgttgaggcatatgatgaagctctggcacatttaatatatgcaggctctgatatcattctttgctcttccttccaagatccatcactgcaaatagcgatgaaggcaatgaagtatggatctgtgccagtacagttaaacttttccagcgatgaatcaagggagtcaaaggggcatgagtgccgcaatacagtaatgtctcagtacatcatctcaacctatggagatttgtctctttctcaagcacttgatgactttatcaaggatgggatggctaggggttcttcatgggacgcaaagtgctatagccttcattgggaggcttattcatccataacgaagctgtgaactgggcatctgctagagaagcacatgacctacatgaggcaccatctccccaaattaagggtggatgaagactggcaattattggcctgcgctgcggtctcgacgccgtgcagaggcgtcatgtggtttcgtgatccacgcggggatgggaggagccgcatgagatgctgagtgattggacggttagttggcctcctcacgtggcgcgtctctgcacctttgtctctctggctgactgactggctctgctttcgcctgcgcctgggcatatcgtggaaccctgattggcctagctcgatacggccgcagctatcatgtggtgtttgtttcagcttattttcagcttctggcagctgtggaacatttagctttttaactcgtttttgtgagaatcgatttggtaaaaaccgttaaaaatcaatttaaacatataatcggctgattcgtcatccgttaccttctggatcataa

SEQ ID NO: 44595 - DNA, 3320 bp, Zea Mays
ggatactataattccaaatctccaggtggagagcacatttttttttggatggattgcgtagttagttccgccgggcttgtttcagcaacagaacgaactgggcctgcagacgtgcctcacaacgtcgcaaaagccgctcccgttctgtgggccgtaaaagacaagcccacgggcgggccatgccgggctgcccttgcggaacgcctcggccgaacatgtgaccgccagcctagtaactaatccttgcccgattccccgataaacacaacacgcaccaccgctcactcgctcgcccacgtgccacgtcccacctccgcgagcacgcacgccgaacggcgcctcctcgcaccgatcagcgcagcggctcagcgcccgccagccgccatcaggcagcagcctcgcctctggccattgaagcacacggaattgtctctttcacctgggcaatccgcggagaggtacggcgcgcatagctaaccaaggaggcgtacgagcagcgtgcgtagcaggcaaccatggagacgccgcgcctcgtggtcggtgcggcgtcgcgggccccgccaccagctcctcgatcacagcgacggcgtatcctgcgtccgtgcggcggggcacattgctccccctccgcccgcgctgctccaccggtgcttctaacccggtgctcctcctactcctcttccagggaggggaacggcgattctcatggtaaggcccgccgcgagagctccggttccgtccggttggacgtcgaagcagatagcgatcaggtaccaagtttggctgacgagcaacgtgagggtgatattacagagctcttcaacctggctcaacggaatatcctgtacattaacaagcagcggcttattgccatggaggagatgaagaaactgcatgatgaaaataatttgcttctcgaggaaatacaaggactagaaacagaaatgcaagcacagtcgtcaagtttcagtgagttactcctgcggatagatacaatggtcatttctggaatgatcagcatgacggaagcatctgatttaagagagaaacttgtcactaatagaagcataatacaaagcaccttttgtgatattcatcataagccaaatactgaattgctgtctgaactgcaactctttttgcgtaaaccaatagagaaacctcttcatattgtgcacatctgtagtgaaatgtacccagtagcatcatgtggaccattatcagcatatgttgccagtttatcttgtgagattcaaaaaaaggctaacttggtggaggtgatactacccaagtacaccagcataaacttggatggaattcatggtctaaggagatctgaggcagaatatgaatcttatttcggtggcctttggcataaaaataaaatatggactgggtaaagatacactcctagtgtgcaaagagattacgtcaagtggtgttggtcttgtaataatagaaccatctcagctctcctattttagtcgtgatatgttacgtggctaccctgatgactttgagcgattttcctatttttcccgtgcatccctggattatattgttaaatctggaaagcggccagacattatacacatacataactgggaaactgctatagtggcaccgcttttctgggaaatatttgctcaccagggacttgggaacactcggatattactgacatgccaagacttgaattcagaatgcctagaggagccaaataaactggagatgtgtgggcttgatccccgtaagcttcatcgtcctgatcgtctgcaggatacaaacaagacacatcttgttaatattcttaagggaggcattgtttattcaaataaagtcgttttgatgtcctcaacacattcaaaagatgctcttattcagggttcacgacatgagctgcaatcaacattagccgcacatagggagaagatattggttgcatcttatggattggatggtgaactttgggatccattcaaagacatttatcttcctcgaaggtattctgccaatgatattgaggggaagtccatttgcagacaagcacttaggcgtagacttcggttcaatggtgattcatccattatagtaggatgtatctgtgatgataattcagatgtccatagtcttaaagaagcagttcatgttgctctgcacaggaatactcaggtgtgtggtagagtactttgttagataacttccttgggacttaaacagtttatttctctgctagcacagttgcaagagtttataatgtacaggtcatcatcatggaaacgttagggtctgttgtgaactcaattttgcaagcattaaagggagagataaagggagacaaaatagcatttgttgaggcatatgatgaagctctggcacatttaatatatgcaggctctgatatcattctttgctcttccttccaagatccatcactgcaaatagcgatgaaggcaatgaagtatggatctgtgccagtacagttaaacttttccagcgatgaatcaagggagtcaaaggggcatgagtgccgcaatacagtaatgtctcagtacatcatctcaacctatggagatttgtctctttctcaagcacttgatgactttatcaaggatgggatggctaggggttcttcatgggacgcaaagtgctatagccttcattgggaggcttattcatccataacgaagctgtgaactgggcatctgctagagaagcacatgacctacatgaggcaccatctccccaaattaagggaacaagcatgaacagtgtcagtgcacttggcacatacacatcattctggacaaacaaacagtacccctccgttttaggggcctttttaaagcgtttttcaaggaataagaactcggataatagatttgcctcgcaattgtaactcatcagcggtggatgaagactggcaattattggcctgcgctgcggtctcgacgccgtgcagaggcgtcatgtggtttcgtgatccacgcggggatgggaggagccgcatgagatgctgagtgattggacggttagttggcctcctcacgtggcgcgtctctgcacctttgtctctctggctgactgactggctctgctttcgcctgcgcctgggcatatcgtggaaccctgattggcctagctcgatacggccgcagctatcatgtggtgtttgtttcagcttattttcagcttctggcagctgtggaacatttagctttttaactcgtttttgtgagaatcgatttggtaaaaaccgttaaaaatcaatttaaacatataatcggctgattcgtcatccgttaccttctggatcataa

SEQ ID NO: 44596 - DNA, 1716 bp, Zea Mays
gaagacaatgataggaaacctcttcatattgtgcacatctgtagtgaaatgtacccagtagcatcatgtggaccattatcagcatatgttgccagtttatcttgtgagattcaaaaaaaggctaacttggtggaggtgatactacccaagtacaccagcataaacttggatggaattcatggtctaaggagatctgaggcagaatatgaatcttatttcggtggcctttggcataaaaataaaatatggactgggtaaagatacactcctagtgtgcaaagagattacgtcaagtggtgttggtcttgtaataatagaaccatctcagctctcctattttagtcgtgatatgttacgtggctaccctgatgactttgagcgattttcctatttttcccgtgcatccctggattatattgttaaatctggaaagcggccagacattatacacatacataactgggaaactgctatagtggcaccgcttttctgggaaatatttgctcaccagggacttgggaacactcggatattactgacatgccaagacttgaattcagaagtaaatattcatgcctagaggagccaaataaactggagatgtgtgggcttgatccccgtaagcttcatcgtcctgatcgtctgcaggatacaaacaagacacatcttgttaatattcttaagggaggcattgtttattcaaataaagtcgttttgatgtcctcaacacattcaaaagatgctcttattcagggttcacgacatgagctgcaatcaacattagccgcacatagggagaagatattggttgcatcttatggattggatggtgaactttgggatccattcaaagacatttatcttcctcgaaggtattctgccaatgatattgaggggaagtccatttgcagacaagcacttaggcgtagacttcggttcaatggtgattcatccattatagtaggatgtatctgtgatgataattcagatgtccatagtcttaaagaagcagttcatgttgctctgcacaggaatactcaggtcatcatcatggaaacgttagggtctgttgtgaactcaattttgcaagcattaaagggagagataaagggagacaaaatagcatttgttgaggcatatgatgaagctctggcacatttaatatatgcaggctctgatatcattctttgctcttccttccaagatccatcactgcaaatagcgatgaaggcaatgaagtatggatctgtgccagtacagttaaacttttccagcgatgaatcaagggagtcaaaggggcatgagtgccgcaatacagtaatgtctcagtacatcatctcaacctatggagatttgtctctttctcaagcacttgatgactttaaaaatgacccttcgcattgggatcgacagatcaaggatgggatggctaggggttcttcatgggacgcaaagtgctatagccttcattgggaggcttattcatccataacgaagctgtgaactgggcatctgctagagaagcacatgacctacatgaggcaccatctccccaaattaagggaacaagcatgaacagtgtcagtgcacttggcacatacacatcattctggacaaacaaacagtacccctccgttttaggggcctttttaaagcgtttttcaaggaataagaactcggataatagatttgcctcgcaattgtaactcatcagcg

SEQ ID NO: 44597 - DNA, 1846 bp, Zea Mays
cctatgtccattttttattgctgccatgacaacttgacacagcgaattgcccattgacacctgacatggcctggctcatatctgatacattgagaaagaatcttgctgcagagggcaagaggaagctcatgtgtgttatccatgagagggaaaaatggcagaagacaatgataggaaacctcttcatattgtgcacatctgtagtgaaatgtacccagtagcatcatgtggaccattatcagcatatgttgccagtttatcttgtgagattcaaaaaaaggctaacttggtggaggtgatactacccaagtacaccagcataaacttggatggaattcatggtctaaggagatctgaggcagaatatgaatcttatttcggtggcctttggcataaaaataaaatatggactgggtaaagatacactcctagtgtgcaaagagattacgtcaagtggtgttggtcttgtaataatagaaccatctcagctctcctattttagtcgtgatatgttacgtggctaccctgatgactttgagcgattttcctatttttcccgtgcatccctggattatattgttaaatctggaaagcggccagacattatacacatacataactgggaaactgctatagtggcaccgcttttctgggaaatatttgctcaccagggacttgggaacactcggatattactgacatgccaagacttgaattcagaagtaaatattcatgcctagaggagccaaataaactggagatgtgtgggcttgatccccgtaagcttcatcgtcctgatcgtctgcaggatacaaacaagacacatcttgttaatattcttaagggaggcattgtttattcaaataaagtcgttttgatgtcctcaacacattcaaaagatgctcttattcagggttcacgacatgagctgcaatcaacattagccgcacatagggagaagatattggttgcatcttatggattggatggtgaactttgggatccattcaaagacatttatcttcctcgaaggtattctgccaatgatattgaggggaagtccatttgcagacaagcacttaggcgtagacttcggttcaatggtgattcatccattatagtaggatgtatctgtgatgataattcagatgtccatagtcttaaagaagcagttcatgttgctctgcacaggaatactcaggtcatcatcatggaaacgttagggtctgttgtgaactcaattttgcaagcattaaagggagagataaagggagacaaaatagcatttgttgaggcatatgatgaagctctggcacatttaatatatgcaggctctgatatcattctttgctcttccttccaagatccatcactgcaaatagcgatgaaggcaatgaagtatggatctgtgccagtacagttaaacttttccagcgatgaatcaagggagtcaaaggggcatgagtgccgcaatacagtaatgtctcagtacatcatctcaacctatggagatttgtctctttctcaagcacttgatgactttatcaaggatgggatggctaggggttcttcatgggacgcaaagtgctatagccttcattgggaggcttattcatccataacgaagctgtgaactgggcatctgctagagaagcacatgacctacatgaggcaccatctccccaaattaagggaacaagcatgaacagtgtcagtgcacttggcacatacacatcattctggacaaacaaacagtacccctccgttttaggggcctttttaaagcgtttttcaaggaataagaactcggataatagatttgcctcgcaattgtaactcatcagcg

SEQ ID NO: 44598 - DNA, 2713 bp, Zea Mays
cccgataaacacaacacgcaccaccgctcactcgctcgcccacgtgccacgtcccacctccgcgagcacgcacgccgaacggcgcctcctcgcaccgatcagcgcagcggctcagcgcccgccagccgccatcaggcagcagcctcgcctctggccattgaagcacacggaattgtctctttcacctgggcaatccgcggagaggtacggcgcgcatagctaaccaaggaggcgtacgagcagcgtgcgtagcaggcaaccatggagacgccgcgcctcgtggtcggtgcggcgtcgcgggccccgccaccagctcctcgatcacagcgacggcgtatcctgcgtccgtgcggcggggcacattgctccccctccgcccgcgctgctccaccggtgcttctaacccggtgctcctcctactcctcttccagggaggggaacggcgattctcatggtaaggcccgccgcgagagctccggttccgtccggttggacgtcgaagcagatagcgatcaggtaccaagtttggctgacgagcaacgtgagggtgatattacagagctcttcaacctggctcaacggaatatcctgtacattaacaagcagcggcttattgccatggaggagatgaagaaactgcatgatgaaaataatttgcttctcgaggaaatacaaggactagaaacagaaatgcaaggtattcccctagaagcagcacagtcgtcaagtttcagtgagttactcctgcggatagatacaatggtcatttctggaatgatcagcatgacggaagcatctgatttaagagagaaacttgtcactaatagaagcataatacaaagcaccttttgtgatattcatcataagccaaatactgaattgctgtctgaactgcaactctttttgcgtaaaccaatagagaaacctcttcatattgtgcacatctgtagtgaaatgtacccagtagcatcatgtggaccattatcagcatatgttgccagtttatcttgtgagattcaaaaaaaggctaacttggtggaggtgatactacccaagtacaccagcataaacttggatggaattcatggtctaaggagatctgaggcagaatatgaatcttatttcggtggcctttggcataaaaataaaatatggactggtacgtcaagtggtgttggtcttgtaataatagaaccatctcagctctcctattttagtcgtgatatgttacgtggctaccctgatgactttgagcgattttcctatttttcccgtgcatccctggattatattgttaaatctggaaagcggccagacattatacacatacataactgggaaactgctatagtggcaccgcttttctgggaaatatttgctcaccagggacttgggaacactcggatattactgacatgccaagacttgaattcagaatgcctagaggagccaaataaactggagatgtgtgggcttgatccccgtaagcttcatcgtcctgatcgtctgcaggatacaaacaagacacatcttgttaatattcttaagggaggcattgtttattcaaataaagtcgttttgatgtcctcaacacattcaaaagatgctcttattcagggttcacgacatgagctgcaatcaacattagccgcacatagggagaagatattggttgcatcttatggattggatggtgaactttgggatccattcaaagacatttatcttcctcgaaggtattctgccaatgatattgaggggaagtccatttgcagacaagcacttaggcgtagacttcggttcaatggtaggatgtatctgtgatgataattcagatgtccatagtcttaaagaagcagttcatgttgctctgcacaggaatactcaggtcatcatcatggaaacgttagggtctgttgtgaactcaattttgcaagcattaaagggagagataaagggagacaaaatagcatttgttgaggcatatgatgaagctctggcacatttaatatatgcaggctctgatatcattctttgctcttccttccaagatccatcactgcaaatagcgatgaaggcaatgaagtatggatctgtgccagtacagttaaacttttccagcgatgaatcaagggagtcaaaggggcatgagtgccgcaatacagtaatgtctcagtacatcatctcaacctatggagatttgtctctttctcaagcacttgatgactttaaaaatgacccttcgcattgggatcgacagatcaaggatgggatggctaggggttcttcatgggacgcaaagtgctatagccttcattgggaggcttattcatccataacgaagctgtgaactgggcatctgctagagaagcacatgacctacatgaggcaccatctccccaaattaagggtaccattttttggcatataattagactatcatttaatttcttagatgaacatttaatcaagcaaaaggtcagtgaataaaaaatggtatgtagagctgcactggatttcacaatatttccaatttactattttgagtgtgcgtttttaggaacaagcatgaacagtgtcagtgcacttggcacatacacatcattctggacaaacaaacagtacccctccgttttaggggcctttttaaagcgtttttcaaggaataagaactcggataatagatttgcctcgcaattgtaactcatcagcg

SEQ ID NO: 44599 - DNA, 2824 bp, Zea Mays
cccgataaacacaacacgcaccaccgctcactcgctcgcccacgtgccacgtcccacctccgcgagcacgcacgccgaacggcgcctcctcgcaccgatcagcgcagcggctcagcgcccgccagccgccatcaggcagcagcctcgcctctggccattgaagcacacggaattgtctctttcacctgggcaatccgcggagaggtacggcgcgcatagctaaccaaggaggcgtacgagcagcgtgcgtagcaggcaaccatggagacgccgcgcctcgtggtcggtgcggcgtcgcgggccccgccaccagctcctcgatcacagcgacggcgtatcctgcgtccgtgcggcggggcacattgctccccctccgcccgcgctgctccaccggtgcttctaacccggtgctcctcctactcctcttccagggaggggaacggcgattctcatggtaaggcccgccgcgagagctccggttccgtccggttggacgtcgaagcagatagcgatcaggtaccaagtttggctgacgagcaacgtgagggtgatattacagagctcttcaacctggctcaacggaatatcctgtacattaacaagcagcggcttattgccatggaggagatgaagaaactgcatgatgaaaataatttgcttctcgaggaaatacaaggactagaaacagaaatgcaaggtattcccctagaagcagcacagtcgtcaagtttcagtgagttactcctgcggatagatacaatggtcatttctggaatgatcagcatgacggaagcatctgatttaagagagaaacttgtcactaatagaagcataatacaaagcaccttttgtgatattcatcataagccaaatactgaattgctgtctgaactgcaactctttttgcgtaaaccaatagagaaacctcttcatattgtgcacatctgtagtgaaatgtacccagtagcatcatgtggaccattatcagcatatgttgccagtttatcttgtgagattcaaaaaaaggctaacttggtggaggtgatactacccaagtacaccagcataaacttggatggaattcatggtctaaggagatctgaggcagaatatgaatcttatttcggtggcctttggcataaaaataaaatatggactgggtaaagatacactcctagtgtgcaaagagattacgtcaagtggtgttggtcttgtaataatagaaccatctcagctctcctattttagtcgtgatatgttacgtggctaccctgatgactttgagcgattttcctatttttcccgtgcatccctggattatattgttaaatctggaaagcggccagacattatacacatacataactgggaaactgctatagtggcaccgcttttctgggaaatatttgctcaccagggacttgggaacactcggatattactgacatgccaagacttgaattcagaatgcctagaggagccaaataaactggagatgtgtgggcttgatccccgtaagcttcatcgtcctgatcgtctgcaggatacaaacaagacacatcttgttaatattcttaagggaggcattgtttattcaaataaagtcgttttgatgtcctcaacacattcaaaagatgctcttattcagggttcacgacatgagctgcaatcaacattagccgcacatagggagaagatattggttgcatcttatggattggatggtgaactttgggatccattcaaagacatttatcttcctcgaaggtattctgccaatgatattgaggggaagtccatttgcagacaagcacttaggcgtagacttcggttcaatggtgattcatccattatagtaggatgtatctgtgatgataattcagatgtccatagtcttaaagaagcagttcatgttgctctgcacaggaatactcaggtcatcatcatggaaacgttagggtctgttgtgaactcaattttgcaagcattaaagggagagataaagggagacaaaatagcatttgttgaggcatatgatgaagctctggcacatttaatatatgcaggctctgatatcattctttgctcttccttccaagatccatcactgcaaatagcgatgaaggcaatgaagtatggatctgtgccagtacagttaaacttttccagcgatgaatcaagggagtcaaaggggcatgagtgccgcaatacagtaatgtctcagtacatcatctcaacctatggagatttgtctctttctcaagcacttgatgactttgtaagtttgcaatctcaagggagaatatctattctgtcacgggctgctcattgtgcacaatcaatatctcttaacagattaaataatgttctgaacaacaatataggtcaaagttgcaatcggaaggctcaggaagatgattgagtgaaactatcttattttctgaagttacttgcttcttgaatttaacataatttacttcccaatgtacagaaaaatgacccttcgcattgggatcgacagatcaaggatgggatggctaggggttcttcatgggacgcaaagtgctatagccttcattgggaggcttattcatccataacgaagctgtgaactgggcatctgctagagaagcacatgacctacatgaggcaccatctccccaaattaagggaacaagcatgaacagtgtcagtgcacttggcacatacacatcattctggacaaacaaacagtacccctccgttttaggggcctttttaaagcgtttttcaaggaataagaactcggataatagatttgcctcgcaattgtaactcatcagcg

SEQ ID NO: 44600 - DNA, 2727 bp, Zea Mays
cccgataaacacaacacgcaccaccgctcactcgctcgcccacgtgccacgtcccacctccgcgagcacgcacgccgaacggcgcctcctcgcaccgatcagcgcagcggctcagcgcccgccagccgccatcaggcagcagcctcgcctctggccattgaagcacacggaattgtctctttcacctgggcaatccgcggagaggtacggcgcgcatagctaaccaaggaggcgtacgagcagcgtgcgtagcaggcaaccatggagacgccgcgcctcgtggtcggtgcggcgtcgcgggccccgccaccagctcctcgatcacagcgacggcgtatcctgcgtccgtgcggcggggcacattgctccccctccgcccgcgctgctccaccggtgcttctaacccggtgctcctcctactcctcttccagggaggggaacggcgattctcatggtaaggcccgccgcgagagctccggttccgtccggttggacgtcgaagcagatagcgatcaggtaccaagtttggctgacgagcaacgtgagggtgatattacagagctcttcaacctggctcaacggaatatcctgtacattaacaagcagcggcttattgccatggaggagatgaagaaactgcatgatgaaaataatttgcttctcgaggaaatacaaggactagaaacagaaatgcaaggtattcccctagaagcagcacagtcgtcaagtttcagtgagttactcctgcggatagatacaatggtcatttctggaatgatcagcatgacggaagcatctgatttaagagagaaacttgtcactaatagaagcataatacaaagcaccttttgtgatattcatcataagccaaatactgaattgctgtctgaactgcaactctttttgcgtaaaccaatagagaaacctcttcatattgtgcacatctgtagtgaaatgtacccagtagcatcatgtggaccattatcagcatatgttgccagtttatcttgtgagattcaaaaaaaggctaacttggtggaggtgatactacccaagtacaccagcataaacttggatggaattcatggtctaaggagatctgaggcagaatatgaatcttatttcggtggcctttggcataaaaataaaatatggactgggtaaagatacactcctagtgtgcaaagagattacgtcaagtggtgttggtcttgtaataatagaaccatctcagctctcctattttagtcgtgatatgttacgtggctaccctgatgactttgagcgattttcctatttttcccgtgcatccctggattatattgttaaatctggaaagcggccagacattatacacatacataactgggaaactgctatagtggcaccgcttttctgggaaatatttgctcaccagggacttgggaacactcggatattactgacatgccaagacttgaattcagaatgcctagaggagccaaataaactggagatgtgtgggcttgatccccgtaagcttcatcgtcctgatcgtctgcaggatacaaacaagacacatcttgttaatattcttaagggaggcattgtttattcaaataaagtcgttttgatgtcctcaacacattcaaaagatgctcttattcagggttcacgacatgagctgcaatcaacattagccgcacatagggagaagatattggttgcatcttatggattggatggtgaactttgggatccattcaaagacatttatcttcctcgaaggtattctgccaatgatattgaggggaagtccatttgcagacaagcacttaggcgtagacttcggttcaatggtgattcatccattatagatgtatctgtgatgataattcagatgtccatagtcttaaagaagcagttcatgttgctctgcacaggaatactcaggtcatcatcatggaaacgttagggtctgttgtgaactcaattttgcaagcattaaagggagagataaagggagacaaaatagcatttgttgaggcatatgatgaagctctggcacatttaatatatgcaggctctgatatcattctttgctcttccttccaagatccatcactgcaaatagcgatgaaggcaatgaagtatggatctgtgccagtacagttaaacttttccagcgatgaatcaagggagtcaaaggggcatgagtgccgcaatacagtaatgtctcagtacatcatctcaacctatggagatttgtctctttctcaagcacttgatgactttatcaaggatgggatggctaggggttcttcatgggacgcaaagtgctatagccttcattgggaggcttattcatccataacgaagctgtgaactgggcatctgctagagaagcacatgacctacatgaggcaccatctccccaaattaagggtaccattttttggcatataattagactatcatttaatttcttagatgaacatttaatcaagcaaaaggtcagtgaataaaaaatggtatgtagagctgcactggatttcacaatatttccaatttactattttgagtgtgcgtttttaggaacaagcatgaacagtgtcagtgcacttggcacatacacatcattctggacaaacaaacagtacccctccgttttaggggcctttttaaagcgtttttcaaggaataagaactcggataatagatttgcctcgcaattgtaactcatcagcg

SEQ ID NO: 44601 - DNA, 2700 bp, Zea Mays
cccgataaacacaacacgcaccaccgctcactcgctcgcccacgtgccacgtcccacctccgcgagcacgcacgccgaacggcgcctcctcgcaccgatcagcgcagcggctcagcgcccgccagccgccatcaggcagcagcctcgcctctggccattgaagcacacggaattgtctctttcacctgggcaatccgcggagaggtacggcgcgcatagctaaccaaggaggcgtacgagcagcgtgcgtagcaggcaaccatggagacgccgcgcctcgtggtcggtgcggcgtcgcgggccccgccaccagctcctcgatcacagcgacggcgtatcctgcgtccgtgcggcggggcacattgctccccctccgcccgcgctgctccaccggtgcttctaacccggtgctcctcctactcctcttccagggaggggaacggcgattctcatggtaaggcccgccgcgagagctccggttccgtccggttggacgtcgaagcagatagcgatcaggtaccaagtttggctgacgagcaacgtgagggtgatattacagagctcttcaacctggctcaacggaatatcctgtacattaacaagcagcggcttattgccatggaggagatgaagaaactgcatgatgaaaataatttgcttctcgaggaaatacaaggactagaaacagaaatgcaaggtattcccctagaagcagcacagtcgtcaagtttcagtgagttactcctgcggatagatacaatggtcatttctggaatgatcagcatgacggaagcatctgatttaagagagaaacttgtcactaatagaagcataatacaaagcaccttttgtgatattcatcataagccaaatactgaattgctgtctgaactgcaactctttttgcgtaaaccaatagagaaacctcttcatattgtgcacatctgtagtgaaatgtacccagtagcatcatgtggaccattatcagcatatgttgccagtttatcttgtgagattcaaaaaaaggctaacttggtggaggtgatactacccaagtacaccagcataaacttggatggaattcatggtctaaggagatctgaggcagaatatgaatcttatttcggtggcctttggcataaaaataaaatatggactgggtaaagatacactcctagtgtgcaaagagattacgtcaagtggtgttggtcttgtaataatagaaccatctcagctctcctattttagtcgtgatatgttacgtggctaccctgatgactttgagcgattttcctatttttcccgtgcatccctggattatattgttaaatctggaaagcggccagacattatacacatacataactgggaaactgctatagtggcaccgcttttctgggaaatatttgctcaccagggacttgggaacactcggatattactgacatgccaagacttgaattcagaatgcctagaggagccaaataaactggagatgtgtgggcttgatccccgtaagcttcatcgtcctgatcgtctgcaggatacaaacaagacacatcttgttaatattcttaagggaggcattgtttattcaaataaagtcgttttgatgtcctcaacacattcaaaagatgctcttattcagggttcacgacatgagctgcaatcaacattagccgcacatagggagaagatattggttgcatcttatggattggatggtgaactttgggatccattcaaagacatttatcttcctcgaaggtattctgccaatgatattgaggggaagtccatttgcagacaagcacttaggcgtagacttcggttcaatggtgattcatccattatagtaggatgtatctgtgatgataattcagatgtccatagtcttaaagaagcagttcatgttgctctgcacaggaatactcaggtcatcatcatggaaacgttagggtctgttgtgaactcaattttgcaagcattaaagggagagataaaggctctgatatcattctttgctcttccttccaagatccatcactgcaaatagcgatgaaggcaatgaagtatggatctgtgccagtacagttaaacttttccagcgatgaatcaagggagtcaaaggggcatgagtgccgcaatacagtaatgtctcagtacatcatctcaacctatggagatttgtctctttctcaagcacttgatgactttaaaaatgacccttcgcattgggatcgacagatcaaggatgggatggctaggggttcttcatgggacgcaaagtgctatagccttcattgggaggcttattcatccataacgaagctgtgaactgggcatctgctagagaagcacatgacctacatgaggcaccatctccccaaattaagggtaccattttttggcatataattagactatcatttaatttcttagatgaacatttaatcaagcaaaaggtcagtgaataaaaaatggtatgtagagctgcactggatttcacaatatttccaatttactattttgagtgtgcgtttttaggaacaagcatgaacagtgtcagtgcacttggcacatacacatcattctggacaaacaaacagtacccctccgttttaggggcctttttaaagcgtttttcaaggaataagaactcggataatagatttgcctcgcaattgtaactcatcagcg

SEQ ID NO: 44602 - DNA, 2669 bp, Zea Mays
cccgataaacacaacacgcaccaccgctcactcgctcgcccacgtgccacgtcccacctccgcgagcacgcacgccgaacggcgcctcctcgcaccgatcagcgcagcggctcagcgcccgccagccgccatcaggcagcagcctcgcctctggccattgaagcacacggaattgtctctttcacctgggcaatccgcggagaggtacggcgcgcatagctaaccaaggaggcgtacgagcagcgtgcgtagcaggcaaccatggagacgccgcgcctcgtggtcggtgcggcgtcgcgggccccgccaccagctcctcgatcacagcgacggcgtatcctgcgtccgtgcggcggggcacattgctccccctccgcccgcgctgctccaccggtgcttctaacccggtgctcctcctactcctcttccagggaggggaacggcgattctcatggtaaggcccgccgcgagagctccggttccgtccggttggacgtcgaagcagatagcgatcaggtaccaagtttggctgacgagcaacgtgagggtgatattacagagctcttcaacctggctcaacggaatatcctgtacattaacaagcagcggcttattgccatggaggagatgaagaaactgcatgatgaaaataatttgcttctcgaggaaatacaaggactagaaacagaaatgcaaggtattcccctagaagcagcacagtcgtcaagtttcagtgagttactcctgcggatagatacaatggtcatttctggaatgatcagcatgacggaagcatctgatttaagagagaaacttgtcactaatagaagcataatacaaagcaccttttgtgatattcatcataagccaaatactgaattgctgtctgaactgcaactctttttgcgtaaaccaatagagaaacctcttcatattgtgcacatctgtagtgaaatgtacccagtagcatcatgtggaccattatcagcatatgttgccagtttatcttgtgagattcaaaaaaaggctaacttggtggaggtgatactacccaagtacaccagcataaacttggatggaattcatggtctaaggagatctgaggcagaatatgaatcttatttcggtggcctttggcataaaaataaaatatggactggtacgtcaagtggtgttggtcttgtaataatagaaccatctcagctctcctattttagtcgtgatatgttacgtggctaccctgatgactttgagcgattttcctatttttcccgtgcatccctggattatattgttaaatctggaaagcggccagacattatacacatacataactgggaaactgctatagtggcaccgcttttctgggaaatatttgctcaccagggacttgggaacactcggatattactgacatgccaagacttgaattcagaatgcctagaggagccaaataaactggagatgtgtgggcttgatccccgtaagcttcatcgtcctgatcgtctgcaggatacaaacaagacacatcttgttaatattcttaagggaggcattgtttattcaaataaagtcgttttgatgtcctcaacacattcaaaagatgctcttattcagggttcacgacatgagctgcaatcaacattagccgcacatagggagaagatattggttgcatcttatggattggatggtgaactttgggatccattcaaagacatttatcttcctcgaaggtattctgccaatgatattgaggggaagtccatttgcagacaagcacttaggcgtagacttcggttcaatggtgattcatccattatagtaggatgtatctgtgatgataattcagatgtccatagtcttaaagaagcagttcatgttgctctgcacaggaatactcaggtcatcatcatggaaacgttagggtctgttgtgaactcaattttgcaagcattaaagggagagataaaggctctgatatcattctttgctcttccttccaagatccatcactgcaaatagcgatgaaggcaatgaagtatggatctgtgccagtacagttaaacttttccagcgatgaatcaagggagtcaaaggggcatgagtgccgcaatacagtaatgtctcagtacatcatctcaacctatggagatttgtctctttctcaagcacttgatgactttaaaaatgacccttcgcattgggatcgacagatcaaggatgggatggctaggggttcttcatgggacgcaaagtgctatagccttcattgggaggcttattcatccataacgaagctgtgaactgggcatctgctagagaagcacatgacctacatgaggcaccatctccccaaattaagggtaccattttttggcatataattagactatcatttaatttcttagatgaacatttaatcaagcaaaaggtcagtgaataaaaaatggtatgtagagctgcactggatttcacaatatttccaatttactattttgagtgtgcgtttttaggaacaagcatgaacagtgtcagtgcacttggcacatacacatcattctggacaaacaaacagtacccctccgttttaggggcctttttaaagcgtttttcaaggaataagaactcggataatagatttgcctcgcaattgtaactcatcagcg

SEQ ID NO: 44603 - DNA, 2595 bp, Zea Mays
cccgataaacacaacacgcaccaccgctcactcgctcgcccacgtgccacgtcccacctccgcgagcacgcacgccgaacggcgcctcctcgcaccgatcagcgcagcggctcagcgcccgccagccgccatcaggcagcagcctcgcctctggccattgaagcacacggaattgtctctttcacctgggcaatccgcggagaggtacggcgcgcatagctaaccaaggaggcgtacgagcagcgtgcgtagcaggcaaccatggagacgccgcgcctcgtggtcggtgcggcgtcgcgggccccgccaccagctcctcgatcacagcgacggcgtatcctgcgtccgtgcggcggggcacattgctccccctccgcccgcgctgctccaccggtgcttctaacccggtgctcctcctactcctcttccagggaggggaacggcgattctcatggtaaggcccgccgcgagagctccggttccgtccggttggacgtcgaagcagatagcgatcaggtaccaagtttggctgacgagcaacgtgagggtgatattacagagctcttcaacctggctcaacggaatatcctgtacattaacaagcagcggcttattgccatggaggagatgaagaaactgcatgatgaaaataatttgcttctcgaggaaatacaaggactagaaacagaaatgcaaggtattcccctagaagcagcacagtcgtcaagtttcagtgagttactcctgcggatagatacaatggtcatttctggaatgatcagcatgacggaagcatctgatttaagagagaaacttgtcactaatagaagcataatacaaagcaccttttgtgatattcatcataagccaaatactgaattgctgtctgaactgcaactctttttgcgtaaaccaatagagaaacctcttcatattgtgcacatctgtagtgaaatgtacccagtagcatcatgtggaccattatcagcatatgttgccagtttatcttgtgagattcaaaaaaaggctaacttggtggaggtgatactacccaagtacaccagcataaacttggatggaattcatggtctaaggagatctgaggcagaatatgaatcttatttcggtggcctttggcataaaaataaaatatggactgggtaaagatacactcctagtgtgcaaagagattacgtcaagtggtgttggtcttgtaataatagaaccatctcagctctcctattttagtcgtgatatgttacgtggctaccctgatgactttgagcgattttcctatttttcccgtgcatccctggattatattgttaaatctggaaagcggccagacattatacacatacataactgggaaactgctatagtggcaccgcttttctgggaaatatttgctcaccagggacttgggaacactcggatattactgacatgccaagacttgaattcagaatgcctagaggagccaaataaactggagatgtgtgggcttgatccccgtaagcttcatcgtcctgatcgtctgcaggatacaaacaagacacatcttgttaatattcttaagggaggcattgtttattcaaataaagtcgttttgatgtcctcaacacattcaaaagatgctcttattcagggttcacgacatgagctgcaatcaacattagccgcacataggtaggatgtatctgtgatgataattcagatgtccatagtcttaaagaagcagttcatgttgctctgcacaggaatactcaggtcatcatcatggaaacgttagggtctgttgtgaactcaattttgcaagcattaaagggagagataaagggagacaaaatagcatttgttgaggcatatgatgaagctctggcacatttaatatatgcaggctctgatatcattctttgctcttccttccaagatccatcactgcaaatagcgatgaaggcaatgaagtatggatctgtgccagtacagttaaacttttccagcgatgaatcaagggagtcaaaggggcatgagtgccgcaatacagtaatgtctcagtacatcatctcaacctatggagatttgtctctttctcaagcacttgatgactttaaaaatgacccttcgcattgggatcgacagatcaaggatgggatggctaggggttcttcatgggacgcaaagtgctatagccttcattgggaggcttattcatccataacgaagctgtgaactgggcatctgctagagaagcacatgacctacatgaggcaccatctccccaaattaagggtaccattttttggcatataattagactatcatttaatttcttagatgaacatttaatcaagcaaaaggtcagtgaataaaaaatggtatgtagagctgcactggatttcacaatatttccaatttactattttgagtgtgcgtttttaggaacaagcatgaacagtgtcagtgcacttggcacatacacatcattctggacaaacaaacagtacccctccgttttaggggcctttttaaagcgtttttcaaggaataagaactcggataatagatttgcctcgcaattgtaactcatcagcg

SEQ ID NO: 44604 - DNA, 2427 bp, Zea Mays
cccgataaacacaacacgcaccaccgctcactcgctcgcccacgtgccacgtcccacctccgcgagcacgcacgccgaacggcgcctcctcgcaccgatcagcgcagcggctcagcgcccgccagccgccatcaggcagcagcctcgcctctggccattgaagcacacggaattgtctctttcacctgggcaatccgcggagaggtacggcgcgcatagctaaccaaggaggcgtacgagcagcgtgcgtagcaggcaaccatggagacgccgcgcctcgtggtcggtgcggcgtcgcgggccccgccaccagctcctcgatcacagcgacggcgtatcctgcgtccgtgcggcggggcacattgctccccctccgcccgcgctgctccaccggtgcttctaacccggtgctcctcctactcctcttccagggaggggaacggcgattctcatggtaaggcccgccgcgagagctccggttccgtccggttggacgtcgaagcagatagcgatcaggtaccaagtttggctgacgagcaacgtgagggtgatattacagagctcttcaacctggctcaacggaatatcctgtacattaacaagcagcggcttattgccatggaggagatgaagaaactgcatgatgaaaataatttgcttctcgaggaaatacaaggactagaaacagaaatgcaagcacagtcgtcaagtttcagtgagttactcctgcggatagatacaatggtcatttctggaatgatcagcatgacggaagcatctgatttaagagagaaacttgtcactaatagaagcataatacaaagcaccttttgtgatattcatcataagccaaatactgaattgctgtctgaactgcaactctttttgcgtaaaccaatagagtacaccagcataaacttggatggaattcatggtctaaggagatctgaggcagaatatgaatcttatttcggtggcctttggcataaaaataaaatatggactggtacgtcaagtggtgttggtcttgtaataatagaaccatctcagctctcctattttagtcgtgatatgttacgtggctaccctgatgactttgagcgattttcctatttttcccgtgcatccctggattatattgttaaatctggaaagcggccagacattatacacatacataactgggaaactgctatagtggcaccgcttttctgggaaatatttgctcaccagggacttgggaacactcggatattactgacatgccaagacttgaattcagaatgcctagaggagccaaataaactggagatgtgtgggcttgatccccgtaagcttcatcgtcctgatcgtctgcaggatacaaacaagacacatcttgttaatattcttaagggaggcattgtttattcaaataaagtcgttttgatgtcctcaacacattcaaaagatgctcttattcagggttcacgacatgagctgcaatcaacattagccgcacatagggagaagatattggttgcatcttatggattggatggtgaactttgggatccattcaaagacatttatcttcctcgaaggtattctgccaatgatattgaggggaagtccatttgcagacaagcacttaggcgtagacttcggttcaatggtgattcatccattatagtaggatgtatctgtgatgataattcagatgtccatagtcttaaagaagcagttcatgttgctctgcacaggaatactcaggtcatcatcatggaaacgttagggtctgttgtgaactcaattttgcaagcattaaagggagagataaagggagacaaaatagcatttgttgaggcatatgatgaagctctggcacatttaatatatgcaggctctgatatcattctttgctcttccttccaagatccatcactgcaaatagcgatgaaggcaatgaagtatggatctgtgccagtacagttaaacttttccagcgatgaatcaagggagtcaaaggggcatgagtgccgcaatacagtaatgtctcagtacatcatctcaacctatggagatttgtctctttctcaagcacttgatgactttaaaaatgacccttcgcattgggatcgacagatcaaggatgggatggctaggggttcttcatgggacgcaaagtgctatagccttcattgggaggcttattcatccataacgaagctgtgaactgggcatctgctagagaagcacatgacctacatgaggcaccatctccccaaattaagggaacaagcatgaacagtgtcagtgcacttggcacatacacatcattctggacaaacaaacagtacccctccgttttaggggcctttttaaagcgtttttcaaggaataagaactcggataatagatttgcctcgcaattgtaactcatcagcg

SEQ ID NO: 44605 - DNA, 2919 bp, Zea Mays
ggaacgcctcggccgaacatgtgaccgccagcctagtaactaatccttgcccgattccccgataaacacaacacgcaccaccgctcactcgctcgcccacgtgccacgtcccacctccgcgagcacgcacgccgaacggcgcctcctcgcaccgatcagcgcagcggctcagcgcccgccagccgccatcaggcagcagcctcgcctctggccattgaagcacacggaattgtctctttcacctgggcaatccgcggagaggtacggcgcgcatagctaaccaaggaggcgtacgagcagcgtgcgtagcaggcaaccatggagacgccgcgcctcgtggtcggtgcggcgtcgcgggccccgccaccagctcctcgatcacagcgacggcgtatcctgcgtccgtgcggcggggcacattgctccccctccgcccgcgctgctccaccggtgcttctaacccggtgctcctcctactcctcttccagggaggggaacggcgattctcatggtaaggcccgccgcgagagctccggttccgtccggttggacgtcgaagcagatagcgatcaggtaccaagtttggctgacgagcaacgtgagggtgatattacagagctcttcaacctggctcaacggaatatcctgtacattaacaagcagcggcttattgccatggaggagatgaagaaactgcatgatgaaaataatttgcttctcgaggaaatacaaggactagaaacagaaatgcaaggtattcccctagaagcagcacagtcgtcaagtttcagtgagttactcctgcggatagatacaatggtcatttctggaatgatcagcatgacggaagcatctgatttaagagagaaacttgtcactaatagaagcataatacaaagcaccttttgtgatattcatcataagccaaatactgaattgctgtctgaactgcaactctttttgcgtaaaccaatagagtatgctaccacttaccttacttttttttcccagttttaccgccttttactcaaattttctgcagtgttgcgggatacctatgtccattttttattgctgccatgacaacttgacacagcgaattgcccattgacacctgacatggcctggctcatatctgatacattgagaaagaatcttgctgcagagggcaagaggaagctcatgtgtgttatccatgagagggaaaaatggcagaagacaatgataggaaacctcttcatattgtgcacatctgtagtgaaatgtacccagtagcatcatgtggaccattatcagcatatgttgccagtttatcttgtgagattcaaaaaaaggctaacttggtggaggtgatactacccaagtacaccagcataaacttggatggaattcatggtctaaggagatctgaggcagaatatgaatcttatttcggtggcctttggcataaaaataaaatatggactgggtaaagatacactcctagtgtgcaaagagattacgtcaagtggtgttggtcttgtaataatagaaccatctcagctctcctattttagtcgtgatatgttacgtggctaccctgatgactttgagcgattttcctatttttcccgtgcatccctggattatattgttaaatctggaaagcggccagacattatacacatacataactgggaaactgctatagtggcaccgcttttctgggaaatatttgctcaccagggacttgggaacactcggatattactgacatgccaagacttgaattcagaatgcctagaggagccaaataaactggagatgtgtgggcttgatccccgtaagcttcatcgtcctgatcgtctgcaggatacaaacaagacacatcttgttaatattcttaagggaggcattgtttattcaaataaagtcgttttgatgtcctcaacacattcaaaagatgctcttattcagggttcacgacatgagctgcaatcaacattagccgcacatagggagaagatattggttgcatcttatggattggatggtgaactttgggatccattcaaagacatttatcttcctcgaaggtattctgccaatgatattgaggggaagtccatttgcagacaagcacttaggcgtagacttcggttcaatggtgattcatccattatagtaggatgtatctgtgatgataattcagatgtccatagtcttaaagaagcagttcatgttgctctgcacaggaatactcaggtcatcatcatggaaacgttagggtctgttgtgaactcaattttgcaagcattaaagggagagataaagggagacaaaatagcatttgttgaggcatatgatgaagctctggcacatttaatatatgcaggctctgatatcattctttgctcttccttccaagatccatcactgcaaatagcgatgaaggcaatgaagtatggatctgtgccagtacagttaaacttttccagcgatgaatcaagggagtcaaaggggcatgagtgccgcaatacagtaatgtctcagtacatcatctcaacctatggagatttgtctctttctcaagcacttgatgactttaaaaatgacccttcgcattgggatcgacagatcaaggatgggatggctaggggttcttcatgggacgcaaagtgctatagccttcattgggaggcttattcatccataacgaagctgtgaactgggcatctgctagagaagcacatgacctacatgaggcaccatctccccaaattaagggaacaagcatgaacagtgtcagtgcacttggcacatacacatcattctggacaaacaaacagtacccctccgttttaggggcctttttaaagcgtttttcaaggaataagaactcggataatagatttgcctcgcaattgtaactcatcagcg

SEQ ID NO: 44606 - DNA, 773 bp, Zea Mays
gtccggttccggctccccctcgccgcactcggcacggcagtgcgccgctgccgtgggttttatttgctgccgacaggggcggcgcattggcggcgagcgcaggattaccccttctcgcggccagcttgaatccccggcgccaatggacagttccggtggccggataggctgtaggaaaaccgactgcgcctcacgacgaccccgcctcttacaatcaggttggacgcggacgccgttccatggctgctcacgccgccgccgccgccgcctaccgcggaggtgcggcacatgcagcgtcctcgccaccactgctcatcatgatccccgttcgcgcgtcttctccggcggtccgctccgctccgctccggccggtggtgctccgtgctcgacagctcgaggtatgcctcgactggagtcgtccctcgtccgtccgtgcgcgcgtgcgtgcatgccatattgttgttgccatgccatcctctggattcctgcgcgcgcttttctttgacctgagcggcactgtggcctgtgggccctaggcccaggagacgacgcgccgatacgatgcggtcttgtagcagcagccaaggaacgaataatataatcctggggcgtcctagcccgtggcatggttggagacgggtcaaagtttttgggcatccacatgcagtggtggtgcagtgcttgctggtgcaggcagtcggccattcgcgatgcggccactgttcatgattccacaaaacaaactacaaaccgccacatgtgtcatgtgaggc

SEQ ID NO: 44607 - DNA, 544 bp, Zea Mays
gtccggttccggctccccctcgccgcactcggcacggcagtgcgccgctgccgtgggttttatttgctgccgacaggggcggcgcattggcggcgagcgcaggattaccccttctcgcggccagcttgaatccccggcgccaatggacagttccggtggccggataggctgtaggaaaaccgactgcgcctcacgacgaccccgcctcttacaatcagattccaagggggagctgatagatgatgactgtgagtcggtgtggcctgtgggatgaaggaggaggccaccggcaggcaggacgtggtgggaagcggccgaaccgtacggggagagccgccgcaacgcaacaagccagcacaaacagatgccaaacgctcgtgagtgaaaatcagaccaccgactgtcgcggagatatggatgaggggccaaagcgtgacgagctgctctactagctccctcgtctctttcatcaagtcttgttcgatcccatggtcgccaaaaccttatacccgtttggttgtggatattgtagcatggaactaag

SEQ ID NO: 44608 - DNA, 3228 bp, Zea Mays
aaaaagaatacgaattcattcgcctccctgccctccatatgcagtcgtcgtcgtatctttggaataagtaaatagcagccccggaggcgactgactgactggcgcaactgtgttgctcgatccatcgaagcagacgcaggcggcggattcgcggaggagagatgatgagggagcagagcctcctggaggcgacgtgcggcgacctcttcgaccacatcgacgacctgctcgacttccccaaggaggactcggccgccgacgtgctcctgctggacgcgccggcgccggggagcccgctgtcgtcggcgcgcatcatcgacgtcggccgcgccggcagtgcgcccgctccccccgcgctggcgccgtcgcttcccgcgcagcaagacaccaccgccttcttcgccgccgcggggcccgacgtgttcgaccccagggacgtcggcgctcacctcggctcggtgggtgcctccttcctcgcattgcccgtgccagtcgtgcaaccgcgacgcgtttttcttcttcttttttccccccttttctctaaccctgctcgtgctgtgcgggcgattcctcgtggaatggagcggagttcaaaatagctggacgccaacgccgcgggcaccacgggacacgccacgcgcgtcggccacggccacgacctggtgcctgccttgcgtcgcgcgcgggacgtgatgacttgttgtcttgtccgtgcgctgcgcggcgcggtgcggtgcggttggtggttgctggttgggacaggaggaggagcgggcggtgtcggtggccggtgggagtcgtgaccggagttaccaccgcccggccgctgtttggtttgttggttggacttggatattacggccgggcccgtgttacgtcggtcggggggcccgtcgcttttcttggtagttcgccagcccagtaactaattcactagtgctgtactagtatttttatttcctgctctacacaaacctgggccccggcctggcccgttcgttcatgattgctttgctgcagtgcaaacgtgggccccggcctggcacgtaatgtgtgcagtgactgaagtagtggggaaagacgatgacgtcattcatggcagatacacagtgcgacgacattgacatggacatggacatggcgcagctggagtggctgtcggggctcttcgacgacgcatccatcccgcacgagccggcgttccccggcgcggcgcccatcatcaagagctccgcgctggcggccggcgcgctgctgccgccggacaagatggaggacgcgctgctgttccgcagctccagccccatctcggtgctggagcacggcagcttcaacaacgccaacggcggtggcggcggctgctccgcgtcgtcggagtcgtcctcggcgtcctcgtcctcggagtctttctccggcagcgggagcgggagcggcgaaggccacgcgtggtcggcgcccgtgtcgccgccgcccgtgctcgtcataccggcgcgcgcgcggagcaagcgctcccgcccgtccgcgttcacgcgcgccggggcggaggcgcccaccatcctcgtgccgacgcccatgtactcgtccgggccgtcccactcggaccccgagagcatcgctgagtccagcccgcacccggcgccgcccatgaagaaaaagaagaaggccaagaagccgccggcgccgcccgcgcccgcctcttccgacgacaacgacggcgacgccgactacgaggaaggcggcgagcgcgcggagccgcagggcggcgccgtcaggaggtgcacgcactgccagatcgagaagacgccgcagtggcgcgcggggccgctggggcccaagacgctgtgcaacgcctgtggcgtgcgctacaagtccggccgcctgttcccggagtaccgtcccgcggcgagccccaccttcgtgccgtccatccactccaactcgcacaagaaggtggtggagatgcgccagaaggctgtccggagcggtgacccgtcgtgcgacctcctgcagttcatccgccgccgggattgacgtcccggcacggcgtcgccggactgtcggtcggtctcgtcccccttatagctagctatatagtatatgtatacatgctagtatgtatgcatgcatggttgcttcagcagtcgtcggtcgtcgtcgtcgtcgtccatcatggtcatcatcaccacttcaccggtcaccgccatggcatggatcccacccctcatcacatgcattggtttctgtcaacatccatccaatcccaatccatcgccgggcatcccggcgcgtttagttcattaggtcttctttctcatcgggggctagtgttattttacctttcttcttttctgtctattggttaattggttccccctgaatgtttttttgtttgtatagagagagaaagagagaggagggtgagaggagaggcaggagaaatagatgaatcagagtggttgctgcattgcagttgcagttgcttgcaggttaggtactaggtgagaaggagagctaaaccagcagcagagggagacagatctagagaggaaactttgcagctagtcagtcagtcagtcaatcaattagaagaaagcatggagagtgcttttaagcaaatgaaaggggaatttgttggtttgctaattagaagggaggttatgcagggcaggtcagtagtagctatcatcgtccatgatgattttaaaacttaagaagagggggacagccatcatccatcatagtctgtactctgtatccggagcttggtgtactgaactctgaaacttctttttgcagttcatctatgtttagggatttgataagtgttgtttggtttcttctatactagtagtgctacctcttagcgaataattaattatatatgcttttgctctcgttcttttctcctgccttgttgcctccatggctccccatccatacagaagctgtgagctgagggctttatccttttcaagctcctcactcggttgcagctcagaaatggcttcagtaatcctaatgagctgagggctttggctacttttgcagctgcaagatgactaacaagcaacatgaactggactatgaaaaagtaccttagcatgaacgagcgaataattatcgtggcatttgttgctatggtatacagtatacttcctctattctatctaaaaatgtcgattagtgtatgaatagagaagtagatatatcaataatattgaaaaccag

SEQ ID NO: 44609 - DNA, 431 bp, Zea Mays
tgactcttccaaagctcaagacgtggatggcagccatgaaaatggccatataataaggaggttgccatatgtccaagaaacaaggtcaggcctggctacgtgtcccagtaactaatctatgcatgtccagttcctttttctatgttaataacaagcacaagcagttaactctatatatcattcgatctgaagcgctgtatgtgttcagacatttggttaacacttctcctatagttcaggaacctgaattttaagatgatttcagacaacactttcgtacagccaactagtaaggcagtttgttacttttttgattttttatttgtctttgtaacataatatatcaagtttttgtccttgtctaactacagagagaaatttagaattctgccattatggaaaatgggtttccctactttgccatcgatttg

SEQ ID NO: 44610 - DNA, 1568 bp, Zea Mays
caggcgttgtgaaaaatcgtgttcccagcagagccagtgcaattatcggaagcaactgcagagctgcagcgaccaagcggacgacgcgagagagatgagggcggtggtgatcacgcgcggcggcggcggcccggaggtgctggaggcgcaggaggtagaggaccccgcgccgctgggcgacggcgaggtcctcctccaggtggtcgccgcgggcgtcaaccgcgccgacacgctccagcgccacggccgccacccgccgcccgccggcgcccccccgtacccggggctcgagtgctccggcaccatcctcgcgctcggccccaacgccccaccacggtgggccgtcggcgacaaggtctgcgcgctgcttagcggcggcgggtacgccgagaaggtggtggtgccggcgggacagctgctgccggtgccggagggcgtgtcccttgcggacgcggccggcttacccgaggtggcatgcaccgtctggtccaccgtcttcatgaagtcatgaccagccacctctcccccggagaatcgttccttgaactgaagaaaaattagcggcctgcaaaggtttgggtgccgatgtatgcataaactacaaaaccgaagattttgttgagcgtgtcaaacaggaaacaaatgggaaagcggtaatgtgtcaaggcattataaccagattaatatgtggtaccaactggaatctgaacatctaccaggtgttgatgtaatccttgacaacatcggaggaccatatctcgagcgcaatctgaacagcctaggtgttgatggtagacttttcatcatcggcttccaaggcggcgctgtagctgaagtgaacctgcaagcggtgtttgcgtggcgtttaaccatacaagctgctggactgcgcggcagaagcgctgctagtaaaacccagatcgtcagtgaggtggagaagaacgtgtggcccgccgtcgctgctggcaaggtgaacccggtgatctacaagacattcccgttatccgaagcagctgatgctcatcggttgatcgaatctagcatgcacattggcaaaatactgctgctcccatgactccatgtccagtgtctgctgtcaaactcttggagagagtcagctaaagcgagctacaaactcctgtaacgacctctaaacatactactatcatgtactggtgtgtagcatgcctttctatattttgttagttcgatccttgatactgccgatgaaactgttctgtgaaccgtggtgcacagtaatacattatggttggttgctacagtaccttgatgtcagcttgtttaccagtgcattcagtgatattctctggggaaacgtccatgtaaattcatcatccggtcaaaagagagatagtttcttgcttgaacaaatataaagttggtgtccctcttaactaatggacaaagagcacagagtcgtcgtggtatcctcaaaaggttctcttggacattagagaatcagagccaaacaagtgtcgtacttgtttgacacaatgccaatttgccactgaccactaagtgctgcagaaagagagggtggagccagg

SEQ ID NO: 44611 - DNA, 1507 bp, Zea Mays
ggattggcaggcgttgtgaaaaatcgtgttcccagcagagccagtgcaattatcggaagcaactgcagagctgcagcgaccaagcggacgacgcgagagagatgagggcggtggtgatcacgcgcggcggcggcggcccggaggtgctggaggcgcaggaggtagaggaccccgcgccgctgggcgacggcgaggtcctcctccaggtggtcgccgcgggcgtcaaccgcgccgacacgctccagcgccacggccgccacccgccgcccgccggcgcccccccgtacccggggctcgagtgctccggcaccatcctcgcgctcggccccaacgccccaccacggtgggccgtcggcgacaaggtctgcgcgctgcttagcggcggcgggtacgccgagaaggtggtggtgccggcgggacagctgctgccggtgccggagggcgtgtcccttgcggacgcggccggcttacccgaggtggcatgcaccgtctggtccaccgtcttcatgaagtcatgaccagccacctctcccccggagaatcgttccttgaactgaagaaaaattagcggcctgcaaaggtttgggtgccgatgtatgcataaactacaaaaccgaagattttgttgagcgtgtcaaacaggaaacaaatgggaaaggtgttgatgtaatccttgacaacatcggaggaccatatctcgagcgcaatctgaacagcctaggtgttgatggtagacttttcatcatcggcttccaaggcggcgctgtagctgaagtgaacctgcaagcggtgtttgcgtggcgtttaaccatacaagctgctggactgcgcggcagaagcgctgctagtaaaacccagatcgtcagtgaggtggagaagaacgtgtggcccgccgtcgctgctggcaaggtgaacccggtgatctacaagacattcccgttatccgaagcagctgatgctcatcggttgatcgaatctagcatgcacattggcaaaatactgctgctcccatgactccatgtccagtgtctgctgtcaaactcttggagagagtcagctaaagcgagctacaaactcctgtaacgacctctaaacatactactatcatgtactggtgtgtagcatgcctttctatattttgttagttcgatccttgatactgccgatgaaactgttctgtgaaccgtggtgcacagtaatacattatggttggttgctacagtaccttgatgtcagcttgtttaccagtgcattcagtgatattctctggggaaacgtccatgtaaattcatcatccggtcaaaagagagatagtttcttgcttgaacaaatataaagttggtgtccctcttaactaatggacaaagagcacagagtcgtcgtggtatcctcaaaaggttctcttggacattagagaatcagagccaaacaagtgtcgtacttgtttgacacaatgccaatttgccactgaccactaagtgctgcagaaagagagggtggagccagg

SEQ ID NO: 44612 - DNA, 918 bp, Zea Mays
ctggcaacgaggacatcatcaccatcaaggccgacgacggctccgacaccgtcactttcatgttcgagtcgcccaataagatcgcggatttcgagatgaaactgatggacattgatagcgagcacctcggaatcccggattccgagtaccaggccatcgtccgcatgccttctgctgagtttatgaggatctgcaaagatcttagcagcatcggagacacagtcgtcatctcggtgactaaggagggcgtgaagttctccacatctggagaaattgggagtgcaaacattgtctgcaggcagaaccaaactattgacaagccagaagaggctaccattatagagatgcaggagccggtttccctgacctttgccctgcggtacatgaactccttcaccaaggcgtcttcactgtctgagcaagtcactatcagcctgtcgtccgagcttccagtggtggtcgagtacaagatcgctgagatgggttacattagattttacctggcccccaagatcgacgatgacgaggagatgaagccctgatggcctgtgacgacataatgctcgtgttgcctgctcttccttccagccgttgtttgcttagctactctttgcaagcgaagaagggatgtgatgtgtatctcttaggctagactgcttcagctagttttctgtgactgctacatgaatccatggattactgatttactgggcttgtgctttgtgtatgatgctgccatctggtctcccaacaaagaagggatgtggtgtgtatctcttaggcctggttttcttttttcttggcataagtgtcatcattcatcaagttctccttgtggcggtggcaaggaagttgaaaaagctgaacgtgatgtgtttgctgccgatgaaccctaaagtagggcccctcgaagtggaa

SEQ ID NO: 44613 - DNA, 1227 bp, Zea Mays
agctcgccccgctcccagctagggtttcctcttcccatccacagccgccggggcgccgccgacgaggacagcgccgccacgatgttggagttgcgtctggtgcaggggagcctcctcaagaaggtcttggaggcgatccgcgagctggtcacggacgccaacttcgactgctccgggaccgggttctcgctgcaggccatggactcgagccacgtcgcgctcgtcgcgctgctccttcgcgccgagggcttcgagcactaccgctgcgaccgcaacctctccatgggcatgaacctcaacaacatggccaagatgctccgctgcgctggcaacgaggacatcatcaccatcaaggccgacgacggctccgacaccgtcactttcatgttcgagtcgcccaagcaagataagatcgcggatttcgagatgaaactgatggacattgatagcgagcacctcggaatcccggattccgagtaccaggccatcgtccgcatgccttctgctgagtttatgaggatctgcaaagatcttagcagcatcggagacacagtcgtcatctcggtgactaaggagggcgtgaagttctccacatctggagaaattgggagtgcaaacattgtctgcaggcagaaccaaactattgacaagagatgcaggagccggtttccctgacctttgccctgcggtacatgaactccttcaccaaggcgtcttcactgtctgagcaagtcactatcagcctgtcgtccgagcttccagtggtggtcgagtacaagatcgctgagatgggttacattagattttacctggcccccaagatcgacgatgacgaggagatgaagccctgatggcctgtgacgacataatgctcgtgttgcctgctcttccttccagccgttgtttgcttagctactctttgcaagcgaagaagggatgtgatgtgtatctcttaggctagactgcttcagctagttttctgtgactgctacatgaatccatggattactgatttactgggcttgtgctttgtgtatgatgctgccatctggtctcccaacaaagaagggatgtggtgtgtatctcttaggcctggttttcttttttcttggcataagtgtcatcattcatcaagttctccttgtggcggtggcaaggaagttgaaaaagctgaacgtgatgtgtttgctgccgatgaaccctaaagtagggcccctcgaagtggaa

SEQ ID NO: 44614 - DNA, 1552 bp, Zea Mays
atcacagcacacaaagtcatctaagccaacgcgatatgccatgatttatgaagccgggcttgcagaagagagtaagctgacgtatgtcgaggagcagcttggggacgccatcgttggggagagcgagcagctccagcgccctctcggaaatcctagactgaaagaaggtacgtcacttcgcatcagtaccgcgaaattggcaaagctcaaatcaaactgtatttcgatgatacggcaggaagtggtgtacttgcgggcctccgactcgtcgtagaacacatccggcggcgcctggaactcaggccgaggcatcttcactctcctccgagttgccgctctcctcggtttctcgcctcgcaggcacaaacgttgctggtgccgctggctaacgaatcgaagccagtatgggccgagttccgttttctcagaagacttctgagctcaattgccagttagcgagccccgcgggacatttacatgggccacataacagccggcccagtaaagcgtggcgtttataaatcttctcaaccgtctagggcatcgtttgcagcagcagcagcagccgccgacgccgacgtaaaagcccgagtcgctcgtctcttcccagatcctccgagcacaacagctctccgtcgccgtcgccatgggtaaggttcacggatcgcttgcccgcgcggggaaggtgcgtgggcagacgcccaaggtggcgaagcaggacaagaagaagaagccccgcggccgcgcgtacaagcgcatgcagtacaaccgccgcttcgtcaccgccgtcgtcggattcggcaagaaacgcggccccaactcctcggagaagtagatatagccatgtctttgtgttttggtcccccactagtttccttgtactgatggcaagttgctgaagacttatatgctattattatctgtatcgatgtgttactgcaacactatgaaatatggtatgcatcgttgagctaatcacgttgcctgtggaggcgatctttttagttgtctcgaatgttgttcgtcttgttttgaaattggtgacacaggagtctcggtctattctgtttcagtttgtcctgctgatagtggagtgcaattgtgaattgtgataagtaggctgagcaaattgtactgcttgtgtagtttgttttgtttgatttgtgtgggcacacttgaaattggcgtgagtctagtaacataagttgtgccattttgctcagaagccttacatatgagttctttctggttcataatttgcttgtttagaagcagagttctagaacgtgaactgtctgtctgaagcagagctctagaacctgaactgtccgtctgattggttgctgcttactttgtgctgcactgaaattggtagtggtgtctgtctaattcatctatggcaatcctgttttattattatatgcctcgtttggttgatcaagtgaagtttaaaatagtggttgatcaagtgaagtcttttgcacggcagatagatactgttcaccgagtgaagtttaaagtggttgatgagatatgagatataatggataag

SEQ ID NO: 44615 - DNA, 1642 bp, Zea Mays
atggcgcgtcgcggtcttcctccttttgtccaaggttttggtgtatgcgtcgtcgtgtttcttttggcgttgtgcggcccgtctggcgaagtcgtacattgtgttgagctcaacaacaatgactctggaagggctttgtatttggggttgccgctgcctgtgttgtttagacactatgtgtcggcgccaacgcgatatgccatgatttatgaagccgggcttgcagaagagagtaagctgacgtatgtcgaggagcagcttggggacgccatcgttggggagagcgagcagctccagcgccctctcggaaatcctagactgaaagaaggaagtggtgtacttgcgggcctccgactcgtcgtagaacacatccggcggcgcctggaactcaggccgaggcatcttcactctcctccgagttgccgctctcctcggtttctcgcctcgcaggcacaaacgttgctggtgccgctggctaacgaatcgaagccagtatgggccgagttccgttttctcagaagacttctgagctcaattgccagttagcgagccccgcgggacatttacatgggccacataacagccggcccagtaaagcgtggcgtttataaatcttctcaaccgtctagggcatcgtttgcagcagcagcagcagccgccgacgccgacgtaaaagcccgagtcgctcgtctcttcccagatcctccgagcacaacagctctccgtcgccgtcgccatgggtaaggttcacggatcgcttgcccgcgcggggaaggtgcgtgggcagacgcccaaggtggcgaagcaggacaagaagaagaagccccgcggccgcgcgtacaagcgcatgcagtacaaccgccgcttcgtcaccgccgtcgtcggattcggcaagaaacgcggccccaactcctcggagaagtagatatagccatgtctttgtgttttggtcccccactagtttccttgtactgatggcaagttgctgaagacttatatgctattattatctgtatcgatgtgttactgcaacactatgaaatatggtatgcatcgttgagctaatcacgttgcctgtggaggcgatctttttagttgtctcgaatgttgttcgtcttgttttgaaattggtgacacaggagtctcggtctattctgtttcagtttgtcctgctgatagtggagtgcaattgtgaattgtgataagtaggctgagcaaattgtactgcttgtgtagtttgttttgtttgatttgtgtgggcacacttgaaattggcgtgagtctagtaacataagttgtgccattttgctcagaagccttacatatgagttctttctggttcataatttgcttgtttagaagcagagttctagaacgtgaactgtctgtctgaagcagagctctagaacctgaactgtccgtctgattggttgctgcttactttgtgctgcactgaaattggtagtggtgtctgtctaattcatctatggcaatcctgttttattattatatgcctcgtttggttgatcaagtgaagtttaaaatagtggttgatcaagtgaagtcttttgcacggcagatagatactgttcaccgagtgaagtttaaagtggttgatgagatatgagatataatggataag

SEQ ID NO: 44616 - DNA, 1716 bp, Zea Mays
ttcaataaataagtgtattaaggtgccaagcttaaggtttctatttgccccacttgcgcaggagagggcgaagtcatctcagagtattgtaggaaatgttctggagaggggcgtatccgtgtcaggaaggagatcaaagtaaaaatccctccaggagtgagcaaaggcagtactcttcgtgtacgtggggaaggtgatgcaggatcaaaaggtgggcctcctggagatctctttgtttgcctcgatatagaggagccatcagatatcaagagggatggtataaacttgtattcaactgtgtcaataagctatcttgaagctattttgggcaccattaagaaggtcagaacagttgatggaaccaatgaccttcgaatacctccaggtacccaacctggtgatgtaattgccttagcgaagcaaggggttccatcattgaataagccgactatacgtggtgatcatctgttcactgttaaagttgcaatacccaagcgcataagtgggcgcgaaagggaattactggaggaacttgcatctttgagtaatggtggctttgttcgaacagatgccaagccaaaacctgcccagccaaaacgtgtacatctagagaaagaagttggtgctagccaagaagatacagacaaatctaaagcagcgggtgattggttgaagaaacttacacattttgctgggtcaattgctaatggtgctgcaaagtggctgaaagaaaacctgtaggctgtaaatatttactgcaggatagaagatttcttcagttaccatggtgctgtagtccaatctccaattcttagattcattggggtccccaagagctcttacatttttgttttgttttgttggagagtttcaagattttcaggctgtgagtaacaaccgagggagtgagaattgtctactaatactgtcggcatattggtcccttgtcattcttgcaaagcaattattttttatgtagttggagttattttcagtttggcaagtgcatgcagcagtctgaaagagtgaaagttcgccctgaaagttatgggatgctgctgctggtcccaaaccttgagacttagacaacactgtaaatatgtctctgttcctgattctgtacttgaggttttgggttaatcaaattcaagatcaacgggcgttctttttctgatttcttctggagctgcaaagcttgcatcgagcgatgccaaaaaaagatcattcagcagagttcaaacattttcatcttacaatgaagctatcattagaaacaagtttcagtaatctcgaattctaggtttcgtggagtcctcgcgtcgtatcactatcaatccaccgagctcgctttgagcaaagccaagactgcggctaccacgggcagggacaccatcagcagagctaccacaatgtttggcctcgtgatgtccgggagcaggatgcttccgtacttgataaccgcggcgccaccaagggacccaagcaccaatgtccacagatagccggagtcatcaccctattcatcaacacatcataacaaaggaaggaaacggactataaaattctttgcatccaaataaatgttgctatcgaactagtcgctcacaaggatgaaggatctacagccacaatggttgctgttgctgaatgttgacaagagaatgcagaggtaccttgaggatttgccccacgcccgcgtcggtcccggcctcgccg

SEQ ID NO: 44617 - DNA, 1719 bp, Zea Mays
ccacagttcctaagcagcaaggatgataagagtattaaggtttctatttgccccacttgcgcaggagagggcgaagtcatctcagagtattgtaggaaatgttctggagaggggcgtatccgtgtcaggaaggagatcaaagtaaaaatccctccaggagtgagcaaaggcagtactcttcgtgtacgtggggaaggtgatgcaggatcaaaaggtgggcctcctggagatctctttgtttgcctcgatatagaggagccatcagatatcaagagggatggtataaacttgtattcaactgtgtcaataagctatcttgaagctattttgggcaccattaagaaggtcagaacagttgatggaaccaatgaccttcgaatacctccaggtacccaacctggtgatgtaattgccttagcgaagcaaggggttccatcattgaataagccgactatacgtggtgatcatctgttcactgttaaagttgcaatacccaagcgcataagtgggcgcgaaagggaattactggaggaacttgcatctttgagtaatggtggctttgttcgaacagatgccaagccaaaacctgcccagccaaaacgtgtacatctagagaaagaagttggtgctagccaagaagatacagacaaatctaaagcagcgggtgattggttgaagaaacttacacattttgctgggtcaattgctaatggtgctgcaaagtggctgaaagaaaacctgtaggctgtaaatatttactgcaggatagaagatttcttcagttaccatggtgctgtagtccaatctccaattcttagattcattggggtccccaagagctcttacatttttgttttgttttgttggagagtttcaagattttcaggctgtgagtaacaaccgagggagtgagaattgtctactaatactgtcggcatattggtcccttgtcattcttgcaaagcaattattttttatgtagttggagttattttcagtttggcaagtgcatgcagcagtctgaaagagtgaaagttcgccctgaaagttatgggatgctgctgctggtcccaaaccttgagacttagacaacactgtaaatatgtctctgttcctgattctgtacttgaggttttgggttaatcaaattcaagatcaacgggcgttctttttctgatttcttctggagctgcaaagcttgcatcgagcgatgccaaaaaaagatcattcagcagagttcaaacattttcatcttacaatgaagctatcattagaaacaagtttcagtaatctcgaattctaggtttcgtggagtcctcgcgtcgtatcactatcaatccaccgagctcgctttgagcaaagccaagactgcggctaccacgggcagggacaccatcagcagagctaccacaatgtttggcctcgtgatgtccgggagcaggatgcttccgtacttgataaccgcggcgccaccaagggacccaagcaccaatgtccacagatagccggagtcatcaccctattcatcaacacatcataacaaaggaaggaaacggactataaaattctttgcatccaaataaatgttgctatcgaactagtcgctcacaaggatgaaggatctacagccacaatggttgctgttgctgaatgttgacaagagaatgcagaggtaccttgaggatttgccccacgcccgcgtcggtcccggcctcgccg

SEQ ID NO: 44618 - DNA, 2221 bp, Zea Mays
ctagaagcataaaccagtcgaaccagtgaaaggttatttggatatttatatttttgcacagtaccatcctgatgtcaataaggagccgggagcgaccgaaaagtttaaagagataagtgcagcatatgaggtgctgtcagatgaaaagaagaggacgttgtatgaccaatatggtgaagctggggttaagagtgcggttggaggctcgggtggagcttacacaaccaacccatttgatttgtttgagacattctttggaggcagcatgggtggtttttctggcatggaccagagcacgtttaggacaagcaggcaaaatactgttttacagggtgaagacatcagatatgatgtggttttggggttcacagaggcgatatttggaacagagaaatatattatactatctcatttggaaacatgtgatacatgtggtggttctggatcaaaagctggctccaagatgagaatatgttcgacatgtggtgggcgagggcaagtaatgcgaactgagcaaacaccatttggtctgttctcccaggtttctatttgccccacttgcgcaggagagggcgaagtcatctcagagtattgtaggaaatgttctggagaggggcgtatccgtgtcaggaaggagatcaaagtaaaaatccctccaggagtgagcaaaggcagtactcttcgtgtacgtggggaaggtgatgcaggatcaaaaggtgggcctcctggagatctctttgtttgcctcgatatagaggagccatcagatatcaagagggatggtataaacttgtattcaactgtgtcaataagctatcttgaagctattttgggcaccattaagaaggtcagaacagttgatggaaccaatgaccttcgaatacctccaggtacccaacctggtgatgtaattgccttagcgaagcaaggggttccatcattgaataagccgactatacgtggtgatcatctgttcactgttaaagttgcaatacccaagcgcataagtgggcgcgaaagggaattactggaggaacttgcatctttgagtaatggtggctttgttcgaacagatgccaagccaaaacctgcccagccaaaacgtgtacatctagagaaagaagttggtgctagccaagaagatacagacaaatctaaagcagcgggtgattggttgaagaaacttacacattttgctgggtcaattgctaatggtgctgcaaagtggctgaaagaaaacctgtaggctgtaaatatttactgcaggatagaagatttcttcagttaccatggtgctgtagtccaatctccaattcttagattcattggggtccccaagagctcttacatttttgttttgttttgttggagagtttcaagattttcaggctgtgagtaacaaccgagggagtgagaattgtctactaatactgtcggcatattggtcccttgtcattcttgcaaagcaattattttttatgtagttggagttattttcagtttggcaagtgcatgcagcagtctgaaagagtgaaagttcgccctgaaagttatgggatgctgctgctggtcccaaaccttgagacttagacaacactgtaaatatgtctctgttcctgattctgtacttgaggttttgggttaatcaaattcaagatcaacgggcgttctttttctgatttcttctggagctgcaaagcttgcatcgagcgatgccaaaaaaagatcattcagcagagttcaaacattttcatcttacaatgaagctatcattagaaacaagtttcagtaatctcgaattctaggtttcgtggagtcctcgcgtcgtatcactatcaatccaccgagctcgctttgagcaaagccaagactgcggctaccacgggcagggacaccatcagcagagctaccacaatgtttggcctcgtgatgtccgggagcaggatgcttccgtacttgataaccgcggcgccaccaagggacccaagcaccaatgtccacagatagccggagtcatcaccctattcatcaacacatcataacaaaggaaggaaacggactataaaattctttgcatccaaataaatgttgctatcgaactagtcgctcacaaggatgaaggatctacagccacaatggttgctgttgctgaatgttgacaagagaatgcagaggtaccttgaggatttgccccacgcccgcgtcggtcccggcctcgccg

SEQ ID NO: 44619 - DNA, 2515 bp, Zea Mays
atccaccatgtgaccatgtcttctccgctccatccctaaaactgccttccgctcatggtcatgggctcatggcgctcacgtcgttcccgttcgcgccatccaacacctcgctgtcctactcctcccgcgcctcaaccgccgccgcgttcgctcctcgtggggttcactttgccgcgcccggaaggagcggcggcggccaaccgctcgcgtgcgctgcgcctcggtgccgcggacgggctccgaggcggcggcgcggagggggcctgctggtctgggcagcggctgactactacgcgacgctgggcgtgccgcgcgccgcgagtaacaaggacatcaaggccgcgtaccggaagctcgcgcgccagtaccatcctgatgtcaataaggagccgggagcgaccgaaaagtttaaagagataagtgcagcatatgagatgaaaagaagaggacgttgtatgaccaatatggtgaagctggggttaagagtgcggttggaggctcgggtggagcttacacaaccaacccatttgatttgtttgagacattctttggaggcagcatgggtggtttttctggcatggaccagagcacgtttaggacaagcaggcaaaatactgttttacagggtgaagacatcagatatgatgtggttttggggttcacagaggcgatatttggaacagagaaatatattatactatctcatttggaaacatgtgatacatgtggtggttctggatcaaaagctggctccaagatgagaatatgttcgacatgtggtgggcgagggcaagtaatgcgaactgagcaaacaccatttggtctgttctcccaggtttctatttgccccacttgcgcaggagagggcgaagtcatctcagagtattgtaggaaatgttctggagaggggcgtatccgtgtcaggaaggagatcaaagtaaaaatccctccaggagtgagcaaaggcagtactcttcgtgtacgtggggaaggtgatgcaggatcaaaaggtgggcctcctggagatctctttgtttgcctcgatatagaggagccatcagatatcaagagggatggtataaacttgtattcaactgtgtcaataagctatcttgaagctattttgggcaccattaagaaggtcagaacagttgatggaaccaatgaccttcgaatacctccaggtacccaacctggtgatgtaattgccttagcgaagcaaggggttccatcattgaataagccgactatacgtggtgatcatctgttcactgttaaagttgcaatacccaagcgcataagtgggcgcgaaagggaattactggaggaacttgcatctttgagtaatggtggctttgttcgaacagatgccaagccaaaacctgcccagccaaaacgtgtacatctagagaaagaagttggtgctagccaagaagatacagacaaatctaaagcagcgggtgattggttgaagaaacttacacattttgctgggtcaattgctaatggtgctgcaaagtggctgaaagaaaacctgtaggctgtaaatatttactgcaggatagaagatttcttcagttaccatggtgctgtagtccaatctccaattcttagattcattggggtccccaagagctcttacatttttgttttgttttgttggagagtttcaagattttcaggctgtgagtaacaaccgagggagtgagaattgtctactaatactgtcggcatattggtcccttgtcattcttgcaaagcaattattttttatgtagttggagttattttcagtttggcaagtgcatgcagcagtctgaaagagtgaaagttcgccctgaaagttatgggatgctgctgctggtcccaaaccttgagacttagacaacactgtaaatatgtctctgttcctgattctgtacttgaggttttgggttaatcaaattcaagatcaacgggcgttctttttctgatttcttctggagctgcaaagcttgcatcgagcgatgccaaaaaaagatcattcagcagagttcaaacattttcatcttacaatgaagctatcattagaaacaagtttcagtaatctcgaattctaggtttcgtggagtcctcgcgtcgtatcactatcaatccaccgagctcgctttgagcaaagccaagactgcggctaccacgggcagggacaccatcagcagagctaccacaatgtttggcctcgtgatgtccgggagcaggatgcttccgtacttgataaccgcggcgccaccaagggacccaagcaccaatgtccacagatagccggagtcatcaccctattcatcaacacatcataacaaaggaaggaaacggactataaaattctttgcatccaaataaatgttgctatcgaactagtcgctcacaaggatgaaggatctacagccacaatggttgctgttgctgaatgttgacaagagaatgcagaggtaccttgaggatttgccccacgcccgcgtcggtcccggcctcgccg

SEQ ID NO: 44620 - DNA, 2721 bp, Zea Mays
atccaccatgtgaccatgtcttctccgctccatccctaaaactgccttccgctcatggtcatgggctcatggcgctcacgtcgttcccgttcgcgccatccaacacctcgctgtcctactcctcccgcgcctcaaccgccgccgcgttcgctcctcgtggggttcactttgccgcgcccggaaggagcggcggcggccaaccgctcgcgtgcgctgcgcctcggtgccgcggacgggctccgaggcggcggcgcggagggggcctgctggtctgggcagcggctgactactacgcgacgctgggcgtgccgcgcgccgcgagtaacaaggacatcaaggccgcgtaccggaagctcgcgcgccaggttctcgacgcttgcctcacatcaaaccccaccattcctcgtctcaccgcgaggcaaccgtgcatagttgggctgattggttggccggccgtgcgaagccgggtccgcgcaagcctggccagccgcatacgcaggattcgagcgtaccggtggatgcagaaaaatagcagtaagatgaattattttgcatctactcgtgcagctcacgtctggcacatacagtaccatcctgatgtcaataaggagccgggagcgaccgaaaagtttaaagagataagtgcagcatatgaggtgctgtcagatgaaaagaagaggacgttgtatgaccaatatggtgaagctggggttaagagtgcggttggaggctcgggtggagcttacacaaccaacccatttgatttgtttgagacattctttggaggcagcatgggtggtttttctggcatggaccagagcacgtttaggacaagcaggcaaaatactgttttacagggtgaagacatcagaggcgatatttggaacagagaaatatattatactatctcatttggaaacatgtgatacatgtggtggttctggatcaaaagctggctccaagatgagaatatgttcgacatgtggtgggcgagggcaagtaatgcgaactgagcaaacaccatttggtctgttctcccaggtttctatttgccccacttgcgcaggagagggcgaagtcatctcagagtattgtaggaaatgttctggagaggggcgtatccgtgtcaggaaggagatcaaagtaaaaatccctccaggagtgagcaaaggcagtactcttcgtgtacgtggggaaggtgatgcaggatcaaaaggtgggcctcctggagatctctttgtttgcctcgatatagaggagccatcagatatcaagagggatggtataaacttgtattcaactgtgtcaataagctatcttgaagctattttgggcaccattaagaaggtcagaacagttgatggaaccaatgaccttcgaatacctccaggtacccaacctggtgatgtaattgccttagcgaagcaaggggttccatcattgaataagccgactatacgtggtgatcatctgttcactgttaaagttgcaatacccaagcgcataagtgggcgcgaaagggaattactggaggaacttgcatctttgagtaatggtggctttgttcgaacagatgccaagccaaaacctgcccagccaaaacgtgtacatctagagaaagaagttggtgctagccaagaagatacagacaaatctaaagcagcgggtgattggttgaagaaacttacacattttgctgggtcaattgctaatggtgctgcaaagtggctgaaagaaaacctgtaggctgtaaatatttactgcaggatagaagatttcttcagttaccatggtgctgtagtccaatctccaattcttagattcattggggtccccaagagctcttacatttttgttttgttttgttggagagtttcaagattttcaggctgtgagtaacaaccgagggagtgagaattgtctactaatactgtcggcatattggtcccttgtcattcttgcaaagcaattattttttatgtagttggagttattttcagtttggcaagtgcatgcagcagtctgaaagagtgaaagttcgccctgaaagttatgggatgctgctgctggtcccaaaccttgagacttagacaacactgtaaatatgtctctgttcctgattctgtacttgaggttttgggttaatcaaattcaagatcaacgggcgttctttttctgatttcttctggagctgcaaagcttgcatcgagcgatgccaaaaaaagatcattcagcagagttcaaacattttcatcttacaatgaagctatcattagaaacaagtttcagtaatctcgaattctaggtttcgtggagtcctcgcgtcgtatcactatcaatccaccgagctcgctttgagcaaagccaagactgcggctaccacgggcagggacaccatcagcagagctaccacaatgtttggcctcgtgatgtccgggagcaggatgcttccgtacttgataaccgcggcgccaccaagggacccaagcaccaatgtccacagatagccggagtcatcaccctattcatcaacacatcataacaaaggaaggaaacggactataaaattctttgcatccaaataaatgttgctatcgaactagtcgctcacaaggatgaaggatctacagccacaatggttgctgttgctgaatgttgacaagagaatgcagaggtaccttgaggatttgccccacgcccgcgtcggtcccggcctcgccg

SEQ ID NO: 44621 - DNA, 2561 bp, Zea Mays
atccaccatgtgaccatgtcttctccgctccatccctaaaactgccttccgctcatggtcatgggctcatggcgctcacgtcgttcccgttcgcgccatccaacacctcgctgtcctactcctcccgcgcctcaaccgccgccgcgttcgctcctcgtggggttcactttgccgcgcccggaaggagcggcggcggccaaccgctcgcgtgcgctgcgcctcggtgccgcggacgggctccgaggcggcggcgcggagggggcctgctggtctgggcagcggctgactactacgcgacgctgggcgtgccgcgcgccgcgagtaacaaggacatcaaggccgcgtaccggaagctcgcgcgccagtaccatcctgatgtcaataaggagccgggagcgaccgaaaagtttaaagagataagtgcagcatatgaggtgctgtcagatgaaaagaagaggacgttgtatgaccaatatggtgaagctggggttaagagtgcggttggaggctcgggtggagcttacacaaccaacccatttgatttgtttgagacattctttggaggcagcatgggtggtttttctggcatggaccagagcacgtttaggacaagcaggcaaaatactgttttacagggtgaagacatcagatatgatgtggttttggggttcacagaggcgatatttggaacagagaaatatattatactatctcatttggaaacatgtgatacatgtggtggttctggatcaaaagctggctccaagatgagaatatgttcgacatgtggtgggcgagggcaagtaatgcgaactgagcaaacaccatttggtctgttctcccaggaaatctatgtgtcatttgattgaagaggaaaaaaggtttctatttgccccacttgcgcaggagagggcgaagtcatctcagagtattgtaggaaatgttctggagaggggcgtatccgtgtcaggaaggagatcaaagtaaaaatccctccaggagtgagcaaaggcagtactcttcgtgtacgtggggaaggtgatgcaggatcaaaaggtgggcctcctggagatctctttgtttgcctcgatatagaggagccatcagatatcaagagggatggtataaacttgtattcaactgtgtcaataagctatcttgaagctattttgggcaccattaagaaggtcagaacagttgatggaaccaatgaccttcgaatacctccaggtacccaacctggtgatgtaattgccttagcgaagcaaggggttccatcattgaataagccgactatacgtggtgatcatctgttcactgttaaagttgcaatacccaagcgcataagtgggcgcgaaagggaattactggaggaacttgcatctttgagtaatggtggctttgttcgaacagatgccaagccaaaacctgcccagccaaaacgtgtacatctagagaaagaagttggtgctagccaagaagatacagacaaatctaaagcagcgggtgattggttgaagaaacttacacattttgctgggtcaattgctaatggtgctgcaaagtggctgaaagaaaacctgtaggctgtaaatatttactgcaggatagaagatttcttcagttaccatggtgctgtagtccaatctccaattcttagattcattggggtccccaagagctcttacatttttgttttgttttgttggagagtttcaagattttcaggctgtgagtaacaaccgagggagtgagaattgtctactaatactgtcggcatattggtcccttgtcattcttgcaaagcaattattttttatgtagttggagttattttcagtttggcaagtgcatgcagcagtctgaaagagtgaaagttcgccctgaaagttatgggatgctgctgctggtcccaaaccttgagacttagacaacactgtaaatatgtctctgttcctgattctgtacttgaggttttgggttaatcaaattcaagatcaacgggcgttctttttctgatttcttctggagctgcaaagcttgcatcgagcgatgccaaaaaaagatcattcagcagagttcaaacattttcatcttacaatgaagctatcattagaaacaagtttcagtaatctcgaattctaggtttcgtggagtcctcgcgtcgtatcactatcaatccaccgagctcgctttgagcaaagccaagactgcggctaccacgggcagggacaccatcagcagagctaccacaatgtttggcctcgtgatgtccgggagcaggatgcttccgtacttgataaccgcggcgccaccaagggacccaagcaccaatgtccacagatagccggagtcatcaccctattcatcaacacatcataacaaaggaaggaaacggactataaaattctttgcatccaaataaatgttgctatcgaactagtcgctcacaaggatgaaggatctacagccacaatggttgctgttgctgaatgttgacaagagaatgcagaggtaccttgaggatttgccccacgcccgcgtcggtcccggcctcgccg

SEQ ID NO: 44622 - DNA, 2578 bp, Zea Mays
agtgatcaccccgtggcgcccctgcgctggcagcctggcacacgagcaggtgcaatgacaggtgggcctacattgttccatccaccatgtgaccatgtcttctccgctccatccctaaaactgccttccgctcatggtcatgggctcatggcgctcacgtcgttcccgttcgcgccatccaacacctcgctgtcctactcctcccgcgcctcaaccgccgccgcgttcgctcctcgtggggttcactttgccgcgcccggaaggagcggcggcggccaaccgctcgcgtgcgctgcgcctcggtgccgcggacgggctccgaggcggcggcgcggagggggcctgctggtctgggcagcggctgactactacgcgacgctgggcgtgccgcgcgccgcgagtaacaaggacatcaaggccgcgtaccggaagctcgcgcgccagtaccatcctgatgtcaataaggagccgggagcgaccgaaaagtttaaagagataagtgcagcatatgaggtgctgtcagatgaaaagaagaggacgttgtatgaccaatatggtgaagctggggttaagagtgcggttggaggctcgggtggagcttacacaaccaacccatttgatttgtttgagacattctttggaggcagcatgggtggtttttctggcatggaccagagcacgtttaggacaagcaggcaaaatactgttttacagggtgaagacatcagaggcgatatttggaacagagaaatatattatactatctcatttggaaacatgtgatacatgtggtggttctggatcaaaagctggctccaagatgagaatatgttcgacatgtggtgggcgagggcaagtaatgcgaactgagcaaacaccatttggtctgttctcccaggtttctatttgccccacttgcgcaggagagggcgaagtcatctcagagtattgtaggaaatgttctggagaggggcgtatccgtgtcaggaaggagatcaaagtaaaaatccctccaggagtgagcaaaggcagtactcttcgtgtacgtggggaaggtgatgcaggatcaaaaggtgggcctcctggagatctctttgtttgcctcgatatagaggagccatcagatatcaagagggatggtataaacttgtattcaactgtgtcaataagctatcttgaagctattttgggcaccattaagaaggtcagaacagttgatggaaccaatgaccttcgaatacctccaggtacccaacctggtgatgtaattgccttagcgaagcaaggggttccatcattgaataagccgactatacgtggtgatcatctgttcactgttaaagttgcaatacccaagcgcataagtgggcgcgaaagggaattactggaggaacttgcatctttgagtaatggtggctttgttcgaacagatgccaagccaaaacctgcccagccaaaacgtgtacatctagagaaagaagttggtgctagccaagaagatacagacaaatctaaagcagcgggtgattggttgaagaaacttacacattttgctgggtcaattgctaatggtgctgcaaagtggctgaaagaaaacctgtaggctgtaaatatttactgcaggatagaagatttcttcagttaccatggtgctgtagtccaatctccaattcttagattcattggggtccccaagagctcttacatttttgttttgttttgttggagagtttcaagattttcaggctgtgagtaacaaccgagggagtgagaattgtctactaatactgtcggcatattggtcccttgtcattcttgcaaagcaattattttttatgtagttggagttattttcagtttggcaagtgcatgcagcagtctgaaagagtgaaagttcgccctgaaagttatgggatgctgctgctggtcccaaaccttgagacttagacaacactgtaaatatgtctctgttcctgattctgtacttgaggttttgggttaatcaaattcaagatcaacgggcgttctttttctgatttcttctggagctgcaaagcttgcatcgagcgatgccaaaaaaagatcattcagcagagttcaaacattttcatcttacaatgaagctatcattagaaacaagtttcagtaatctcgaattctaggtttcgtggagtcctcgcgtcgtatcactatcaatccaccgagctcgctttgagcaaagccaagactgcggctaccacgggcagggacaccatcagcagagctaccacaatgtttggcctcgtgatgtccgggagcaggatgcttccgtacttgataaccgcggcgccaccaagggacccaagcaccaatgtccacagatagccggagtcatcaccctattcatcaacacatcataacaaaggaaggaaacggactataaaattctttgcatccaaataaatgttgctatcgaactagtcgctcacaaggatgaaggatctacagccacaatggttgctgttgctgaatgttgacaagagaatgcagaggtaccttgaggatttgccccacgcccgcgtcggtcccggcctcgccg

SEQ ID NO: 44623 - DNA, 2171 bp, Zea Mays
gccatcctggccctatgcaaacaaggtttcagtaactatttccaaaatccgctgcacattattcatatatatgtatccagaacagatgaccttatttacaatctagatatttagcttagggaaatgaactgaattgctaaggaaccttatcaaccgacggtgcactactattcatctaatttgtggtaacagaatcagatgctgtggatgctgtagaggtcgctcttaaccgctactcagcagatatgacaactggagcaatgtgtctggttgctcttctgaaactctcctcacgatttcctttgacatcagagaggataaaacaaatagttgcccagaataaagggaatgttgtccttgaactacagcaaagatcaattgaattcacttccattatacaaagacatcagtctatcagatcgtccttgcttgaacgcatgcctgtattagatgaagctagttatctggtgaagcgggctactgctacacaatcaactatttcagcagataaaattgctccaacagtcactcctggaagccttaagcttccgaatggtgtagcaaaacccacctcagctcctttagctgatttgcttgatttcagttctgatggtgccccagcttccaccgttgcttctactacaacacctaatgattttttgcaagatcttctgggtattggtggagttagttcatcaacgacaggtgtaacttcaaccgcaagcacagatattcttatggatcttctgtccattggatcatctccatcacagaatggcacccccgtaacagacttccgtcatcctggacaagcagagtctaaacctgttcctggtgtacctgaagctgttgacctcctcggtagtttgtcaccagccgagtctaaacccacaccagttgtacctaaggacatggatctgctcgacggtttgtcatcaaatacatctatttctggacatgagaatacaacccacccatcaataacagcttttcagagtgcaaccttgaagatcacgtttgatttcaaaatgaagcttggaaacccacgagagactacaattcatgccacttttaccaatttgacatctagtacttttacagattttatttttcaggctgctgttccaaagttcatccaattgagactggatccggctagtggcaacactgttccagctaatggaagtggttcagtcacacaagggctcaacatcaccaataaccaacagggacagaaaccgcttgcaatgcggatccggatgtcttataaagtgaatggcgaggacagattggaacaaggccaagtcagcaattttccttctggactataggccgtttctgtatactatgacgtgtcggggacaggcatatagaacgaagccttgttttaccctctacctcattttttaattattctggggatttgtcggggtgcttagagaaaatgttttttccggcggttagttttcctgtactaagtatattgtatattattccagcagcgatgtgatcttcaaattcatcgtgatgtattcgacaccacgctaaaggatggtctgagcaaactttcttcagctcctcaatcattgtaaaactagcttctgtttttcttgtacactagagagtagagactggtagcatattctgtagcatattctgccagtaccgttgcacttctgatttgcggccgtgcaaattatgggatgccgaacgcgcggatttctatcgtaatgcgcaaactttcaactgccttttaatttttaaaccgctggtctgtacatcgagcaggtcggtcaggtgcaggcgctggtgctcgtcaagcttggacagcgctgctgagtgctgagtaacctcttacaacaattgcaccatatgaacttataacaagtacagtacattgaaccacgacaattactctagttgaccataattgagatcgaataagcagggtcaggcattatggtttctgtctacaagtttatctttgtaccttgcatcacaaccttccagtggaaaactgcaatgcaaaggacttctgcagcgcataatttgctttgcttatcttatcctgctctcatctgcaataaagaaaatgacggtttctcaaatgatgaattgaagcttacaagatataaacatggaaaatagtaatatgcccccaaacttttcaa

SEQ ID NO: 44624 - DNA, 3728 bp, Zea Mays
tggcttcccagtctcacacgtaaaattcgtacaaagttccttagtccaaatgggacccaaaagaggattactttagtatatacaaacgattcagaggacctaatcgctctttccaccgtcacctgtccagttccagtgctttagatccgcggccctgttcgcaccttgctcgcctcgcctcgcctcgccttccgctgcttcccgcctctaaccaccacggcatccagatcccgcgactccacctccactcgcggcggcgtgccctcgccgagatctcatcatggacacggtcgagaagatcgtcgaggacttcgcctcggacatcgccgtgagccccttctcctccgggacgagcctccgggagatgatacgcgcgatacgcgcgtgcaagacggcggcggaggagcgcgcggtggtgcggcgggaatgtgcggcgatacgcacggccatcagcgagaatgagccggagctccggcacaggaacatggccaagctcatgttcatccacatgctgggctaccccacccatttcgcgcagatggagtgcctcaagctcatcgcggccgcgggattcccggagaagcgggtgggctacctcggcctcatgctgctccttgacgagcggcaggaggtgctcatgctcgtcaccaactccctcaaacaagatctcaaccacacgaaccagttcatcgtgggccttgcattgtgtgctcttgggaacatctgctctgctgaaatggcgcgggatctttcacctgaagtggagaggttgatgcgcagtagggaagtcaatacaaagaaaaaggctgctttgtgctctataaggattgtcaggaaagtgccagatttggcagagaacttcatgggcctggctgcatcattgttgaaggagaaacaccatggggtcctcatatctgcaattcagctctgcacagaactatgcaaagcaagcaaagattctctagagtacctgaggaagaactgcatcgaaggtttggctcgcatactgagagatgtgtccaataggtcatatgctccggagtatgatgtttctggcattgttgatccattcttgcatattcgagtccttaaacttttgcggatcttgggtcaaggagatgcagattgcagtgaatatatgaatgatattcttgctcaggttgcaacaaaaactgagtccaacaagaatgctggaaacgccattctgtatgaatgtgttcagactataatgggtattgaagctactagtggtttacgtgtgctggcaatcaatattttgggtagattcttgtctaaccgtgacaacaatataagatatgttgctcttaacatgcttatgagggccattacagttgatgcactagcagtgcagagacacagaacaacaatattagagtgtgtaaaggatgccgatgcctccattcgcaaaagggctcttgaacttgtttatttgttagtcaatgatacaaatgttttctcaagagaagttatggtaccttgaccagatgttcaatgttttatctctggctggaaatcatgtgaaggatgacatatgtcatgcccttattgttgtactaagtaatacatcagagcttcaaggatattcagtgaggtcattgtataaggccttacaagaatatggtaaacagggaagtttagtaagagtagctgtttggtgcattggtgaatatggtgaaatgctggtgaacaatgttggcatgctggatggggaggagccaattaaggtaacagaatcagatgctgtggatgctgtagaggtcgctcttaaccgctactcagcagatatgacaactggagcaatgtgtctggttgctcttctgaaactctcctcacgatttcctttgacatcagagaggataaaacaaatagttgcccagaataaagggaatgttgtccttgaactacagcaaagatcaattgaattcacttccattatacaaagacatcagtctatcagatcgtccttgcttgaacgcatgcctgtattagatgaagctagttatctggtgaagcgggctactgctacacaatcaactatttcagcagataaaattgctccaacagtcactcctggaagccttaagcttccgaatggtgtagcaaaacccacctcagctcctttagctgatttgcttgatttcagttctgatggtgccccagcttccaccgttgcttctactacaacacctaatgattttttgcaagatcttctgggtattggtggagttagttcatcaacgacaggtgtaacttcaaccgcaagcacagatattcttatggatcttctgtccattggatcatctccatcacagaatggcacccccgtaacagacttccgtcatcctggacaagagtctaaacctgttcctggtgtacctgaagctgttgacctcctcggtagtttgtcaccagccgagtctaaacccacaccagttgtacctaaggacatggatctgctcgacggtttgtcatcaaatacatctatttctggacatgagaatacaacccacccatcaataacagcttttcagagtgcaaccttgaagatcacgtttgatttcaaaatgaagcttggaaacccacgagagactacaattcatgccacttttaccaatttgacatctagtacttttacagattttatttttcaggctgctgttccaaagttcatccaattgagactggatccggctagtggcaacactgttccagctaatggaagtggttcagtcacacaagggctcaacatcaccaataaccaacagggacagaaaccgcttgcaatgcggatccggatgtcttataaagtgaatggcgaggacagattggaacaaggccaagtcagcaattttccttctggactataggccgtttctgtatactatgacgtgtcggggacaggcatatagaacgaagccttgttttaccctctacctcattttttaattattctggggatttgtcggggtgcttagagaaaatgttttttccggcggttagttttcctgtactaagtatattgtatattattccagcagcgatgtgatcttcaaattcatcgtgatgtattcgacaccacgctaaaggatggtctgagcaaactttcttcagctcctcaatcattgtaaaactagcttctgtttttcttgtacactagagagtagagactggtagcatattctgtagcatattctgccagtaccgttgcacttctgatttgcggccgtgcaaattatgggatgccgaacgcgcggatttctatcgtaatgcgcaaactttcaactgccttttaatttttaaaccgctggtctgtacatcgagcaggtcggtcaggtgcaggcgctggtgctcgtcaagcttggacagcgctgctgagtgctgagtaacctcttacaacaattgcaccatatgaacttataacaagtacagtacattgaaccacgacaattactctagttgaccataattgagatcgaataagcagggtcaggcattatggtttctgtctacaagtttatctttgtaccttgcatcacaaccttccagtggaaaactgcaatgcaaaggacttctgcagcgcataatttgctttgcttatcttatcctgctctcatctgcaataaagaaaatgacggtttctcaaatgatgaattgaagcttacaagatataaacatggaaaatagtaatatgcccccaaacttttcaa

SEQ ID NO: 44625 - DNA, 3816 bp, Zea Mays
tggcttcccagtctcacacgtaaaattcgtacaaagttccttagtccaaatgggacccaaaagaggattactttagtatatacaaacgattcagaggacctaatcgctctttccaccgtcacctgtccagttccagtgctttagatccgcggccctgttcgcaccttgctcgcctcgcctcgcctcgccttccgctgcttcccgcctctaaccaccacggcatccagatcccgcgactccacctccactcgcggcggcgtgccctcgccgagatctcatcatggacacggtcgagaagatcgtcgaggacttcgcctcggacatcgccgtgagccccttctcctccgggacgagcctccgggagatgatacgcgcgatacgcgcgtgcaagacggcggcggaggagcgcgcggtggtgcggcgggaatgtgcggcgatacgcacggccatcagcgagaatgagccggagctccggcacaggaacatggccaagctcatgttcatccacatgctgggctaccccacccatttcgcgcagatggagtgcctcaagctcatcgcggccgcgggattcccggagaagcgggtgggctacctcggcctcatgctgctccttgacgagcggcaggaggtgctcatgctcgtcaccaactccctcaaacaagatctcaaccacacgaaccagttcatcgtgggccttgcattgtgtgctcttgggaacatctgctctgctgaaatggcgcgggatctttcacctgaagtggagaggttgatgcgcagtagggaagtcaatacaaagaaaaaggctgctttgtgctctataaggattgtcaggaaagtgccagatttggcagagaacttcatgggcctggctgcatcattgttgaaggagaaacaccatggggtcctcatatctgcaattcagctctgcacagaactatgcaaagcaagcaaagattctctagagtacctgaggaagaactgcatcgaaggtttggctcgcatactgagagatgtgtccaataggtcatatgctccggagtatgatgtttctggcattgttgatccattcttgcatattcgagtccttaaacttttgcggatcttgggtcaaggagatgcagattgcagtgaatatatgaatgatattcttgctcaggttgcaacaaaaactgagtccaacaagaatgctggaaacgccattctgtatgaatgtgttcagactataatgggtattgaagctactagtggtttacgtgtgctggcaatcaatattttgggtagattcttgtctaaccgtgacaacaatataagatatgttgctcttaacatgcttatgagggccattacagttgatgcactagcagtgcagagacacagaacaacaatattagagtgtgtaaaggatgccgatgcctccattcgcaaaagggctcttgaacttgtttatttgttagtcaatgatacaaatgtaaagcctttgactaaagagctcatcgattacttaaacatagcggatccagattttataggagatctcacagtaaatatatgctctatagttgaaaagttttctcaagagaagttatggtaccttgaccagatgttcaatgttttatctctggctggaaatcatgtgaaggatgacatatgtcatgcccttattgttgtactaagtaatacatcagagcttcaaggatattcagtgaggtcattgtataaggccttacaagaatatggtaaacagtaagagtagctgtttggtgcattggtgaatatggtgaaatgctggtgaacaatgttggcatgctggatggggaggagccaattaaggtaacagaatcagatgctgtggatgctgtagaggtcgctcttaaccgctactcagcagatatgacaactggagcaatgtgtctggttgctcttctgaaactctcctcacgatttcctttgacatcagagaggataaaacaaatagttgcccagaataaagggaatgttgtccttgaactacagcaaagatcaattgaattcacttccattatacaaagacatcagtctatcagatcgtccttgcttgaacgcatgcctgtattagatgaagctagttatctggtgaagcgggctactgctacacaatcaactatttcagcagataaaattgctccaacagtcactcctggaagccttaagcttccgaatggtgtagcaaaacccacctcagctcctttagctgatttgcttgatttcagttctgatggtgccccagcttccaccgttgcttctactacaacacctaatgattttttgcaagatcttctgggtattggtggagttagttcatcaacgacaggtgtaacttcaaccgcaagcacagatattcttatggatcttctgtccattggatcatctccatcacagaatggcacccccgtaacagacttccgtcatcctggacaagagtctaaacctgttcctggtgtacctgaagctgttgacctcctcggtagtttgtcaccagccgagtctaaacccacaccagttgtacctaaggacatggatctgctcgacggtttgtcatcaaatacatctatttctggacatgagaatacaacccacccatcaataacagcttttcagagtgcaaccttgaagatcacgtttgatttcaaaatgaagcttggaaacccacgagagactacaattcatgccacttttaccaatttgacatctagtacttttacagattttatttttcaggctgctgttccaaagttcatccaattgagactggatccggctagtggcaacactgttccagctaatggaagtggttcagtcacacaagggctcaacatcaccaataaccaacagggacagaaaccgcttgcaatgcggatccggatgtcttataaagtgaatggcgaggacagattggaacaaggccaagtcagcaattttccttctggactataggccgtttctgtatactatgacgtgtcggggacaggcatatagaacgaagccttgttttaccctctacctcattttttaattattctggggatttgtcggggtgcttagagaaaatgttttttccggcggttagttttcctgtactaagtatattgtatattattccagcagcgatgtgatcttcaaattcatcgtgatgtattcgacaccacgctaaaggatggtctgagcaaactttcttcagctcctcaatcattgtaaaactagcttctgtttttcttgtacactagagagtagagactggtagcatattctgtagcatattctgccagtaccgttgcacttctgatttgcggccgtgcaaattatgggatgccgaacgcgcggatttctatcgtaatgcgcaaactttcaactgccttttaatttttaaaccgctggtctgtacatcgagcaggtcggtcaggtgcaggcgctggtgctcgtcaagcttggacagcgctgctgagtgctgagtaacctcttacaacaattgcaccatatgaacttataacaagtacagtacattgaaccacgacaattactctagttgaccataattgagatcgaataagcagggtcaggcattatggtttctgtctacaagtttatctttgtaccttgcatcacaaccttccagtggaaaactgcaatgcaaaggacttctgcagcgcataatttgctttgcttatcttatcctgctctcatctgcaataaagaaaatgacggtttctcaaatgatgaattgaagcttacaagatataaacatggaaaatagtaatatgcccccaaacttttcaa

SEQ ID NO: 44626 - DNA, 3844 bp, Zea Mays
tggcttcccagtctcacacgtaaaattcgtacaaagttccttagtccaaatgggacccaaaagaggattactttagtatatacaaacgattcagaggacctaatcgctctttccaccgtcacctgtccagttccagtgctttagatccgcggccctgttcgcaccttgctcgcctcgcctcgcctcgccttccgctgcttcccgcctctaaccaccacggcatccagatcccgcgactccacctccactcgcggcggcgtgccctcgccgagatctcatcatggacacggtcgagaagatcgtcgaggacttcgcctcggacatcgccgtgagccccttctcctccgggacgagcctccgggagatgatacgcgcgatacgcgcgtgcaagacggcggcggaggagcgcgcggtggtgcggcgggaatgtgcggcgatacgcacggccatcagcgagaatgagccggagctccggcacaggaacatggccaagctcatgttcatccacatgctgggctaccccacccatttcgcgcagatggagtgcctcaagctcatcgcggccgcgggattcccggagaagcgggtgggctacctcggcctcatgctgctccttgacgagcggcaggaggtgctcatgctcgtcaccaactccctcaaacatgcttaatttgggggcagagatctcaaccacacgaaccagttcatcgtgggccttgcattgtgtgctcttgggaacatctgctctgctgaaatggcgcgggatctttcacctgaagtggagaggttgatgcgcagtagggaagtcaatacaaagaaaaaggctgctttgtgctctataaggattgtcaggaaagtgccagatttggcagagaacttcatgggcctggctgcatcattgttgaaggagaaacaccatggggtcctcatatctgcaattcagctctgcacagaactatgcaaagcaagcaaagattctctagagtacctgaggaagaactgcatcgaaggtttggctcgcatactgagagatgtgtccaataggtcatatgctccggagtatgatgtttctggcattgttgatccattcttgcatattcgagtccttaaacttttgcggatcttgggtcaaggagatgcagattgcagtgaatatatgaatgatattcttgctcaggttgcaacaaaaactgagtccaacaagaatgctggaaacgccattctgtatgaatgtgttcagactataatgggtattgaagctactagtggtttacgtgtgctggcaatcaatattttgggtagattcttgtctaaccgtgacaacaatataagatatgttgctcttaacatgcttatgagggccattacagttgatgcactagcagtgcagagacacagaacaacaatattagagtgtgtaaaggatgccgatgcctccattcgcaaaagggctcttgaacttgtttatttgttagtcaatgatacaaatgtaaagcctttgactaaagagctcatcgattacttaaacatagcggatccagattttataggagatctcacagtaaatatatgctctatagttgaaaagttttctcaagagaagttatggtaccttgaccagatgttcaatgttttatctctggctggaaatcatgtgaaggatgacatatgtcatgcccttattgttgtactaagtaatacatcagagcttcaaggatattcagtgaggtcattgtataaggccttacaagaatatggtaaacagggaagtttagtaagagtagctgtttggtgcattggtgaatatggtgaaatgctggtgaacaatgttggcatgctggatggggaggagccaattaaggtaacagaatcagatgctgtggatgctgtagaggtcgctcttaaccgctactcagcagatatgacaactggagcaatgtgtctggttgctcttctgaaactctcctcacgatttcctttgacatcagagaggataaaacaaatagttgcccagaataaagggaatgttgtccttgaactacagcaaagatcaattgaattcacttccattatacaaagacatcagtctatcagatcgtccttgcttgaacgcatgcctgtattagatgaagctagttatctggtgaagcgggctactgctacacaatcaactatttcagcagataaaattgctccaacagtcactcctggaagccttaagcttccgaatggtgtagcaaaacccacctcagctcctttagctgatttgcttgatttcagttctgatggtgccccagcttccaccgttgcttctactacaacacctaatgattttttgcaagatcttctgggtattggtggagttagttcatcaacgacaggtgtaacttcaaccgcaagcacagatattcttatggatcttctgtccattggatcatctccatcacagaatggcacccccgtaacagacttccgtcatcctggacaagagtctaaacctgttcctggtgtacctgaagctgttgacctcctcggtagtttgtcaccagccgagtctaaacccacaccagttgtacctaaggacatggatctgctcgacggtttgtcatcaaatacatctatttctggacatgagaatacaacccacccatcaataacagcttttcagagtgcaaccttgaagatcacgtttgatttcaaaatgaagcttggaaacccacgagagactacaattcatgccacttttaccaatttgacatctagtacttttacagattttatttttcaggctgctgttccaaagttcatccaattgagactggatccggctagtggcaacactgttccagctaatggaagtggttcagtcacacaagggctcaacatcaccaataaccaacagggacagaaaccgcttgcaatgcggatccggatgtcttataaagtgaatggcgaggacagattggaacaaggccaagtcagcaattttccttctggactataggccgtttctgtatactatgacgtgtcggggacaggcatatagaacgaagccttgttttaccctctacctcattttttaattattctggggatttgtcggggtgcttagagaaaatgttttttccggcggttagttttcctgtactaagtatattgtatattattccagcagcgatgtgatcttcaaattcatcgtgatgtattcgacaccacgctaaaggatggtctgagcaaactttcttcagctcctcaatcattgtaaaactagcttctgtttttcttgtacactagagagtagagactggtagcatattctgtagcatattctgccagtaccgttgcacttctgatttgcggccgtgcaaattatgggatgccgaacgcgcggatttctatcgtaatgcgcaaactttcaactgccttttaatttttaaaccgctggtctgtacatcgagcaggtcggtcaggtgcaggcgctggtgctcgtcaagcttggacagcgctgctgagtgctgagtaacctcttacaacaattgcaccatatgaacttataacaagtacagtacattgaaccacgacaattactctagttgaccataattgagatcgaataagcagggtcaggcattatggtttctgtctacaagtttatctttgtaccttgcatcacaaccttccagtggaaaactgcaatgcaaaggacttctgcagcgcataatttgctttgcttatcttatcctgctctcatctgcaataaagaaaatgacggtttctcaaatgatgaattgaagcttacaagatataaacatggaaaatagtaatatgcccccaaacttttcaa

SEQ ID NO: 44627 - DNA, 3800 bp, Zea Mays
tggcttcccagtctcacacgtaaaattcgtacaaagttccttagtccaaatgggacccaaaagaggattactttagtatatacaaacgattcagaggacctaatcgctctttccaccgtcacctgtccagttccagtgctttagatccgcggccctgttcgcaccttgctcgcctcgcctcgcctcgccttccgctgcttcccgcctctaaccaccacggcatccagatcccgcgactccacctccactcgcggcggcgtgccctcgccgagatctcatcatggacacggtcgagaagatcgtcgaggacttcgcctcggacatcgccgtgagccccttctcctccgggacgagcctccgggagatgatacgcgcgatacgcgcgtgcaagacggcggcggaggagcgcgcggtggtgcggcgggaatgtgcggcgatacgcacggccatcagcgagaatgagccggagctccggcacaggaacatggccaagctcatgttcatccacatgctgggctaccccacccatttcgcgcagatggagtgcctcaagctcatcgcggccgcgggattcccggagaagcgggtgggctacctcggcctcatgctgctccttgacgagcggcaggaggtgctcatgctcgtcaccaactccctcaaacaagatctcaaccacacgaaccagttcatcgtgggccttgcattgtgtgctcttgggaacatctgctctgctgaaatggcgcgggatctttcacctgaagtggagaggttgatgcgcagtagggaagtcaatacaaagaaaaaggctgctttgtgctctataaggattgtcaggaaagtgccagatttggcagagaacttcatgggcctggctgcatcattgttgaaggagaaacaccatggggtcctcatatctgcaattcagctctgcacagaactatgcaaagcaagcaaagattctctagagtacctgaggaagaactgcatcgaaggtttggctcgcatactgagagatgtgtccaataggtcatatgctccggagtatgatgtttctggcattgttgatccattcttgcatattcgagtccttaaacttttgcggatcttgggtcaaggagatgcagattgcagtgaatatatgaatgatattcttgctcaggttgcaacaaaaactgagtccaacaagaatgctggaaacgccattctgtatgaatgtgttcagactataatgggtattgaagctactagtggtttacgtgtgctggcaatcaatattttgggtagattcttgtctaaccgtgacaacaatataagatatgttgctcttaacatgcttatgagggccattacagttgatgcactagcagtgcagagacacagaacaacaatattagagtgtgtaaaggatgccgatgcctccattcgcaaaagggctcttgaacttgtttatttgttagtcaatgatacaaatgtaaagcctttgactaaagagctcatcgattacttaaacatagcggatccagattttataggagatctcacagttttctcaagagaagttatggtaccttgaccagatgttcaatgttttatctctggctggaaatcatgtgaaggatgacatatgtcatgcccttattgttgtactaagtaatacatcagagcttcaaggatattcagtgaggtcattgtataaggccttacaagaatatggtaaacagggaagtttagtaagagtagctgtttggtgcattggtgaatatggtgaaatgctggtgaacaatgttggcatgctggatggggaggagccaattaaggtaacagaatcagatgctgtggatgctgtagaggtcgctcttaaccgctactcagcagatatgacaactggagcaatgtgtctggttgctcttctgaaactctcctcacgatttcctttgacatcagagaggataaaacaaatagttgcccagaataaagggaatgttgtccttgaactacagcaaagatcaattgaattcacttccattatacaaagacatcagtctatcagatcgtccttgcttgaacgcatgcctgtattagatgaagctagttatctggtgaagcgggctactgctacacaatcaactatttcagcagataaaattgctccaacagtcactcctggaagccttaagcttccgaatggtgtagcaaaacccacctcagctcctttagctgatttgcttgatttcagttctgatggtgccccagcttccaccgttgcttctactacaacacctaatgattttttgcaagatcttctgggtattggtggagttagttcatcaacgacaggtgtaacttcaaccgcaagcacagatattcttatggatcttctgtccattggatcatctccatcacagaatggcacccccgtaacagacttccgtcatcctggacaagagtctaaacctgttcctggtgtacctgaagctgttgacctcctcggtagtttgtcaccagccgagtctaaacccacaccagttgtacctaaggacatggatctgctcgacggtttgtcatcaaatacatctatttctggacatgagaatacaacccacccatcaataacagcttttcagagtgcaaccttgaagatcacgtttgatttcaaaatgaagcttggaaacccacgagagactacaattcatgccacttttaccaatttgacatctagtacttttacagattttatttttcaggctgctgttccaaagttcatccaattgagactggatccggctagtggcaacactgttccagctaatggaagtggttcagtcacacaagggctcaacatcaccaataaccaacagggacagaaaccgcttgcaatgcggatccggatgtcttataaagtgaatggcgaggacagattggaacaaggccaagtcagcaattttccttctggactataggccgtttctgtatactatgacgtgtcggggacaggcatatagaacgaagccttgttttaccctctacctcattttttaattattctggggatttgtcggggtgcttagagaaaatgttttttccggcggttagttttcctgtactaagtatattgtatattattccagcagcgatgtgatcttcaaattcatcgtgatgtattcgacaccacgctaaaggatggtctgagcaaactttcttcagctcctcaatcattgtaaaactagcttctgtttttcttgtacactagagagtagagactggtagcatattctgtagcatattctgccagtaccgttgcacttctgatttgcggccgtgcaaattatgggatgccgaacgcgcggatttctatcgtaatgcgcaaactttcaactgccttttaatttttaaaccgctggtctgtacatcgagcaggtcggtcaggtgcaggcgctggtgctcgtcaagcttggacagcgctgctgagtgctgagtaacctcttacaacaattgcaccatatgaacttataacaagtacagtacattgaaccacgacaattactctagttgaccataattgagatcgaataagcagggtcaggcattatggtttctgtctacaagtttatctttgtaccttgcatcacaaccttccagtggaaaactgcaatgcaaaggacttctgcagcgcataatttgctttgcttatcttatcctgctctcatctgcaataaagaaaatgacggtttctcaaatgatgaattgaagcttacaagatataaacatggaaaatagtaatatgcccccaaacttttcaa

SEQ ID NO: 44628 - DNA, 3650 bp, Zea Mays
tggcttcccagtctcacacgtaaaattcgtacaaagttccttagtccaaatgggacccaaaagaggattactttagtatatacaaacgattcagaggacctaatcgctctttccaccgtcacctgtccagttccagtgctttagatccgcggccctgttcgcaccttgctcgcctcgcctcgcctcgccttccgctgcttcccgcctctaaccaccacggcatccagatcccgcgactccacctccactcgcggcggcgtgccctcgccgagatctcatcatggacacggtcgagaagatcgtcgaggacttcgcctcggacatcgccgtgagccccttctcctccgggacgagcctccgggagatgatacgcgcgatacgcgcgtgcaagacggcggcggaggagcgcgcggtggtgcggcgggaatgtgcggcgatacgcacggccatcagcgagaatgagccggagctccggcacaggaacatggccaagctcatgttcatccacatgctgggctaccccacccatttcgcgcagatggagtgcctcaagctcatcgcggccgcgggattcccggagaagcgggtgggctacctcggcctcatgctgctccttgacgagcggcaggaggtgctcatgctcgtcaccaactccctcaaacaagatctcaaccacacgaaccagttcatcgtgggccttgcattgtgtgctcttgggaacatctgctctgctgaaatggcgcgggatctttcacctgaagtggagaggttgatgcgcagtagggaagtcaatacaaagaaaaaggctgctttgtgctctataaggattgtcaggaaagtgccagatttggcagagaacttcatgggcctggctgcatcattgttgaaggagaaacaccatggggtcctcatatctgcaattcagctctgcacagaactatgcaaagcaagcaaagattctctagagtacctgaggaagaactgcatcgaaggtttggctcgcatactgagagatgtgtccaataggtcatatgctccggagtatgatgtttctggcattgttgatccattcttgcatattcgagtccttaaacttttgcggatcttgggtcaaggagatgcagattgcagtgaatatatgaatgatattcttgctcaggttgcaacaaaaactgagtccaacaagaatgctggaaacgccattctgtatgaatgtgttcagactataatgggtattgaagctactagtggtttacgtgtgctggcaatcaatattttgggtagattcttgtctaaccgtgacaacaatataagatatgttgctcttaacatgcttatgagggccattacagttgatgcactagcagtgcagagacacagaacaacaatattagagtgtgtaaaggatgccgatgcctccattcgcaaaagggctcttgaacttgtttatttgttagtcaatgatacaaatgtaaagcctttgactaaagagctcatcgattacttaaacatagcggatccagattttataggagatctcacagtaaatatatgctctatagttgaaaagttttctcaagagaagttatggtaccttgaccagatgttcaatgttttatctctggctggaaatcatgtgaaggatgacatatgtcatgcccttattgttgtactaagtaatacatcagagcttcaaggatattcagtgaggtcattgtataaggccttacaagaatatggtaaacagggaagtttagtaagagtagctgtttggtgcattggtgaatatggtgaaatgctggtgaacaatgttggcatgctggatggggaggagccaattaaggtaacagaatcagatgctgtggatgctgtagaggtcgctcttaaccgctactcagcagatatgacaactggagcaatgtgtctggttgctcttctgaaactctcctcacgatttcctttgacatcagagaggataaaacaaatagttgcccagaataaagggaatgttgtccttgaactacagcaaagatcaattgaattcacttccattatacaaagacatcagtctatcagatcgtccttgcttgaacgcatgcctgtattagatgaagctagttatctggtgaagcgggctactgctacacaatcaactatttcagcagataaaattgctccaacagtcactcctggaagccttaagcttccgaatggtgtagcaaaacccacctcagctcctttagctgatttgcttgatttcagttctgatggtgccccagcttccaccgttgcttctactacaacacctaatgattttttgcaagatcttctgggtattggtggagttagttcatcaacgacaggtgtaacttcaaccgcaagcacagatattcttatggatcttctgtccattggatcatctccatcacagaatggcacccccgtaacagacttccgtcatcctggacaagagtctaaacctgttcctggtgtacctgaagctgttgacctcctcggtagtttgtcaccagccgagtctaaacccacaccagttgtacctaaggacatggatctgctcgacggtttgtcatcaaatacatctatttctgttcatccaattgagactggatccggctagtggcaacactgttccagctaatggaagtggttcagtcacacaagggctcaacatcaccaataaccaacagggacagaaaccgcttgcaatgcggatccggatgtcttataaagtgaatggcgaggacagattggaacaaggccaagtcagcaattttccttctggactataggccgtttctgtatactatgacgtgtcggggacaggcatatagaacgaagccttgttttaccctctacctcattttttaattattctggggatttgtcggggtgcttagagaaaatgttttttccggcggttagttttcctgtactaagtatattgtatattattccagcagcgatgtgatcttcaaattcatcgtgatgtattcgacaccacgctaaaggatggtctgagcaaactttcttcagctcctcaatcattgtaaaactagcttctgtttttcttgtacactagagagtagagactggtagcatattctgtagcatattctgccagtaccgttgcacttctgatttgcggccgtgcaaattatgggatgccgaacgcgcggatttctatcgtaatgcgcaaactttcaactgccttttaatttttaaaccgctggtctgtacatcgagcaggtcggtcaggtgcaggcgctggtgctcgtcaagcttggacagcgctgctgagtgctgagtaacctcttacaacaattgcaccatatgaacttataacaagtacagtacattgaaccacgacaattactctagttgaccataattgagatcgaataagcagggtcaggcattatggtttctgtctacaagtttatctttgtaccttgcatcacaaccttccagtggaaaactgcaatgcaaaggacttctgcagcgcataatttgctttgcttatcttatcctgctctcatctgcaataaagaaaatgacggtttctcaaatgatgaattgaagcttacaagatataaacatggaaaatagtaatatgcccccaaacttttcaa

SEQ ID NO: 44629 - DNA, 1814 bp, Zea Mays
aatagaattgaaagttcaaccattctctttttctttctcccgattacagccgaaaaacacacgtctcaagccgtcgctccacacccacaccgatgattgatctaatctacccatccatccatggatcgatctgtcatgcatcaattaataggtcgggacaaggcaacaagggagggccactgacaggcaggcaggcaggcctgtagcccccgcagcgagaggcggtgacaggtaggccggccggccggccggtgcatacatgatgcatgcgggagtgggacccaccaatcagacccatgaggctcgtccccggcctctccagtcccctcccccctctctgcagatctgggcatctgatctcactcgccttctcgctcacgtcatggatggacggtgccactgccacggtggaccggacgtgagagagagagagaaagccagccagcctgctactagctgctggctgctgccagcgccaggaataataatggaatacggaggatttcactgcaagcaagcaaagcgcagtggctgctccagcaaggaatccagtaaaaattccctggaatctcaaggctgcagagtgcaggcatggcgacacgagggagggaacgccagcccatgcatgccttctacggcccccgaaactgcaccccacacacacacacactactttctgtttgtcttcctactagctagcacttgctactacatgtcccttttcgaggtatatatatttttattttacagcaaaatgtttgtacttccggtctgggtgacaagatgcagcagcatgcatatgcatccatccatctcctccgccagaccgtacaacacacctcgagacatgtagatagtccaagaaccaggactgttcagtggtaagaggaagaagaagccatcatgtcagtgttgcttgcttgcccagcgttacacggcacacagagtcacagacacaacgcatgcagcagcgatggcaaacgcaagcacaacaggtactactgttccagagagagagagaggagagggaaagtgagcactagtagtctactagtactgtagtagtagtagctaggtcatcgcctgtgccggcagtctagaggtgagagagagatcgaccaggtactgggtggggtggggtggggtgggtcagtgggtgggtgtgatttgaggcctcatgcatgcatgcatattctgctgcaggagcaagcagcgccatcttttttctccctttacacaaccaaaagatctaccagattgcacgcttccagaaaaacatcgccccacagtctacgacagaacgacaggccaaatcgcactgctctttttattcgttcctggaaaatgcccatcgccctttcagagaataaaagcatgcaaaaaaataaaaaaaaatatatatctgcgctaactgtgcacgcaatgatgagaaaaaaaaatggatatcgcttaaaaaacatgcagctcaattattaaagcatgaccagccggaagaaactaacggaccctggctaaatattactatactctatctatctatttttttaaaaaaaaacgtatgcagaacattgcagagatagtgacaatgagctctaaattttatattataaaatttaagtatcgaatcagattaagatcgaaacataattctaaaatttatttagttttctatcattttgtgaaagcaatttggatcatgatttattaccaccgctagtcaagtgcggcaaggattaagaaacaaaggtatgtgtatactgccacttggagttcagaaaaaccacaatttcagacactggtaattaacaacaacc

SEQ ID NO: 44630 - DNA, 1976 bp, Zea Mays
aaattattcaaagctgtggttgaaagctgtggttttgcccagctgctagcaacccagcaggtgaaggagaatggcgggaggtggcacgggcatcaggaaatacatgggggctcttaaggacaccacaacagtcagcatagcaaaagtaaacagcgattacaaggagctggacattgctattgtgaaggccacaaaccatgtcgagaatccaacaaaggagaaatacgtgagagatatcttttaccatctttcacccggaaggcctcgggcagatgtcgcctactgcatccgcgcccttggtagacgtctttcaaagacacgcaattgggcggttgctatgaagacattaattgtcatacaccgtgctcttcgggaagttgatcctgctttccgtgaagagcttattagttatggaagatctagctcccatatgctctatctgtcatactttaaggacgattctagcgcagaagcttgggattactctgcttgggtgcgcaattatgctttatatttggaggagaaacttgaatcattccgtgtactgaactatgatgttgaaaaggatccgttgcaaattcgggatcttgatacaaatggattgctcgatcagttgccagctttacagcagcttcttttccgactacttggttgccagccacaaggggcgtcatcttataacgtcataattcagcatgcactttcaatggttgctctagagagtgttaggatccaaacagccatcaatgacgggatactcaatcttgttgacaagttctttgagatgcagagagatgacgcaataagggcactgggcatgtatagaagagcaatcgagcaggcagaacaactttcagaattttatgaagtgtgtaaaagtatacatattgggcggggtgagagattcctaaaaatcgaacagccgcctgcatccttcttggcgactatggaggaatatgtgagcaatgctccccttgcttcaacagttcaaagaaatcaggctgtactggccatagaggacagcaaaaaatcagaagttgaagaatcacaaccaacgctgcctcctccccactctccagctcaagaatctgggcctgagccagttcaacaagtcccacctgcagctgatccaacagatttactgggaatcaatgaaccaacccctgccacatctgaaatagatcaaaagaatgcgggggccttggccatggttccacaggataatgcgccaaaagcacctgcttctactaccagttctggaagtgtggagactagctgggagctggccttggtcactgcacccagttcaaatgggactgctgtcactccaagcaaattggccggtgggctggacttgcttacactcgacagcttgtacaacgaggcgcaccgaagagcgcagcagaacgcaagctacaacccttgggagaccaatccagcgtcaggcccagtgatgcagcagcaaatgtacgacccgttctacgcctccaatcaccccgtggccgcagcccgcaacgtccagatggctgccatggagcagcagcagcaacaacaacatgccttcgtgctccagcagcagcagcagcagcagatgattgtgatgatgatggcacagcagcagcagcagcaagcttcttccaatccgttgtatacggccgccgccgcccacacgtatggtgcaggggtgcagctccacgcgggcaacgcgtactctggagctgggatgatgtaagcgttgcacagaacctgctgtctggttctgaccggcatcttccgttctttcttgttttttctcattattttcttgcatttttttttacattgtaagaactgtgttagggctagaactagaaatctgatatagcatcaatatgagcacattcttgatgttcatgaccaataatggtcgatgcgatgatggctttgaactgaagcactaaaatagtatcgatccttgcaaatttaggacttgtttg

SEQ ID NO: 44631 - DNA, 1920 bp, Zea Mays
ctcgtgttcaaaattattcaaagctgtggttgaaagctgtggttttgcccagctgctagcaacccagcaggtgaaggagaatggcgggaggtggcacgggcatcaggaaatacatgggggctcttaaggacaccacaacagtcagcatagcaaaagtaaacagcgattacaaggagctggacattgctattgtgaaggccacaaaccatgtcgagaatccaacaaaggagaaatacgtgagagatatcttttaccatctttcacccggaaggcctcgggcagatgtcgcctactgcatccgcgcccttggtagacgtctttcaaagacacgcaattgggcggttgctatgaagacattaattgtcatacaccgtgctcttcgggaagttgatcctgctttccgtgaagagcttattagttatggaagatctagctcccatatgctctatctgtcatactttaaggacgattctagcgcagaagcttgggattactctgcttgggtgcgcaattatgctttatatttggaggagaaacttgaatcattccgtgtactgaactatgatgttgaaaaggatccgttgcaaattcgggatcttgatacaaatggattgctcgatcagttgccagctttacagcagcttcttttccgactacttggttgccagccacaaggggcgtcatcttataacgtcataattcagcatgcactttcaatgttctttgagatgcagagagatgacgcaataagggcactgggcatgtatagaagagcaatcgagcaggcagaacaactttcagaattttatgaagtgtgtaaaagtatacatattgggcggggtgagagattcctaaaaatcgaacagccgcctgcatccttcttggcgactatggaggaatatgtgagcaatgctccccttgcttcaacagttcaaagaaatcaggctgtactggccatagaggacagcaaaaaatcagaagttgaagaatcacaaccaacgctgcctcctccccactctccagctcaagaatctgggcctgagccagttcaacaagtcccacctgcagctgatccaacagatttactgggaatcaatgaaccaacccctgccacatctgaaatagatcaaaagaatgcgggggccttggccatggttccacaggataatgcgccaaaagcacctgcttctactaccagttctggaagtgtggagactagctgggagctggccttggtcactgcacccagttcaaatgggactgctgtcactccaagcaaattggccggtgggctggacttgcttacactcgacagcttgtacaacgaggcgcaccgaagagcgcagcagaacgcaagctacaacccttgggagaccaatccagcgtcaggcccagtgatgcagcagcaaatgtacgacccgttctacgcctccaatcaccccgtggccgcagcccgcaacgtccagatggctgccatggagcagcagcagcaacaacaacatgccttcgtgctccagcagcagcagcagcagcagatgattgtgatgatgatggcacagcagcagcagcagcaagcttcttccaatccgttgtatacggccgccgccgcccacacgtatggtgcaggggtgcagctccacgcgggcaacgcgtactctggagctgggatgatgtaagcgttgcacagaacctgctgtctggttctgaccggcatcttccgttctttcttgttttttctcattattttcttgcatttttttttacattgtaagaactgtgttagggctagaactagaaatctgatatagcatcaatatgagcacattcttgatgttcatgaccaataatggtcgatgcgatgatggctttgaactgaagcactaaaatagtatcgatccttgcaaatttaggacttgtttg

SEQ ID NO: 44632 - DNA, 1940 bp, Zea Mays
agcatttcttctgttggagaccgtttatctgttccgaagccccagctgctagcaacccagcaggtgaaggagaatggcgggaggtggcacgggcatcaggaaatacatgggggctcttaaggacaccacaacagtcagcatagcaaaagtaaacagcgattacaaggagctggacattgctattgtgaaggccacaaaccatgtcgagaatccaacaaaggagaaatacgtgagagatatcttttaccatctttcacccggaaggcctcgggcagatgtcgcctactgcatccgcgcccttggtagacgtctttcaaagacacgcaattgggcggttgctatgaagacattaattgtcatacaccgtgctcttcgggaagttgatcctgctttccgtgaagagcttattagttatggaagatctagctcccatatgctctatctgtcatactttaaggacgattctagcgcagaagcttgggattactctgcttgggtgcgcaattatgctttatatttggaggagaaacttgaatcattccgtgtactgaactatgatgttgaaaaggatccgttgttgccagctttacagcagcttcttttccgactacttggttgccagccacaaggggcgtcatcttataacgtcataattcagcatgcactttcaatggttgctctagagagtgttaggatccaaacagccatcaatgacgggatactcaatcttgttgacaagttctttgagatgcagagagatgacgcaataagggcactgggcatgtatagaagagcaatcgagcaggcagaacaactttcagaattttatgaagtgtgtaaaagtatacatattgggcggggtgagagattcctaaaaatcgaacagccgcctgcatccttcttggcgactatggaggaatatgtgagcaatgctccccttgcttcaacagttcaaagaaatcaggctgtactggccatagaggacagcaaaaaatcagaagttgaagaatcacaaccaacgctgcctcctccccactctccagctcaagaatctgggcctgagccagttcaacaagtcccacctgcagctgatccaacagatttactgggaatcaatgaaccaacccctgccacatctgaaatagatcaaaagaatgcgggggccttggccatggttccacaggataatgcgccaaaagcacctgcttctactaccagttctggaagtgtggagactagctgggagctggccttggtcactgcacccagttcaaatgggactgctgtcactccaagcaaattggccggtgggctggacttgcttacactcgacagcttgtacaacgaggcgcaccgaagagcgcagcagaacgcaagctacaacccttgggagaccaatccagcgtcaggcccagtgatgcagcagcaaatgtacgacccgttctacgcctccaatcaccccgtggccgcagcccgcaacgtccagatggctgccatggagcagcagcagcaacaacaacatgccttcgtgctccagcagcagcagcagcagcagatgattgtgatgatgatggcacagcagcagcagcagcaagcttcttccaatccgttgtatacggccgccgccgcccacacgtatggtgcaggggtgcagctccacgcgggcaacgcgtactctggagctgggatgatgtaagcgttgcacagaacctgctgtctggttctgaccggcatcttccgttctttcttgttttttctcattattttcttgcatttttttttacattgtaagaactgtgttagggctagaactagaaatctgatatagcatcaatatgagcacattcttgatgttcatgaccaataatggtcgatgcgatgatggctttgaactgaagcactaaaatagtatcgatccttgcaaatttaggacttgtttg

SEQ ID NO: 44633 - DNA, 1985 bp, Zea Mays
ttttttagcatttcttctgttggagaccgtttatctgttccgaagccccagctgctagcaacccagcaggtgaaggagaatggcgggaggtggcacgggcatcaggaaatacatgggggctcttaaggacaccacaacagtcagcatagcaaaagtaaacagcgattacaaggagctggacattgctattgtgaaggccacaaaccatgtcgagaatccaacaaaggagaaatacgtgagagatatcttttaccatctttcacccggaaggcctcgggcagatgtcgcctactgcatccgcgcccttggtagacgtctttcaaagacacgcaattgggcggttgctatgaagacattaattgtcatacaccgtgctcttcgggaagttgatcctgctttccgtgaagagcttattagttatggaagatctagctcccatatgctctatctgtcatactttaaggacgattctagcgcagaagcttgggattactctgcttgggtgcgcaattatgctttatatttggaggagaaacttgaatcattccgtgtactgaactatgatgttgaaaaggatccgttgcaaattcgggatcttgatacaaatggattgctcgatcagttgccagctttacagcagcttcttttccgactacttggttgccagccacaaggggcgtcatcttataacgtcataattcagcatgcactttcaatggttgctctagagagtgttaggatccaaacagccatcaatgacgggatactcaatcttgttgacaagttctttgagatgcagagagatgacgcaataagggcactgggcatgtatagaagagcaatcgagcaggcagaacaactttcagaattttatgaagtgtgtaaaagtatacatattgggcggggtgagagattcctaaaaatcgaacagccgcctgcatccttcttggcgactatggaggaatatgtgagcaatgctccccttgcttcaacagttcaaagaaatcaggctgtactggccatagaggacagcaaaaaatcagaagttgaagaatcacaaccaacgctgcctcctccccactctccagctcaagaatctgggcctgagccagttcaacaagtcccacctgcagctgatccaacagatttactgggaatcaatgaaccaacccctgccacatctgaaatagatcaaaagaatgcgggggccttggccatggttccacaggataatgcgccaaaagcacctgcttctactaccagttctggaagtgtggagactagctgggagctggccttggtcactgcacccagttcaaatgggactgctgtcactccaagcaaattggccggtgggctggacttgcttacactcgacagcttgtacaacgaggcgcaccgaagagcgcagcagaacgcaagctacaacccttgggagaccaatccagcgtcaggcccagtgatgcagcagcaaatgtacgacccgttctacgcctccaatcaccccgtggccgcagcccgcaacgtccagatggctgccatggagcagcagcagcaacaacaacatgccttcgtgctccagcagcagcagcagcagcagatgattgtgatgatgatggcacagcagcagcagcagcaagcttcttccaatccgttgtatacggccgccgccgcccacacgtatggtgcaggggtgcagctccacgcgggcaacgcgtactctggagctgggatgatgtaagcgttgcacagaacctgctgtctggttctgaccggcatcttccgttctttcttgttttttctcattattttcttgcatttttttttacattgtaagaactgtgttagggctagaactagaaatctgatatagcatcaatatgagcacattcttgatgttcatgaccaataatggtcgatgcgatgatggctttgaactgaagcactaaaatagtatcgatccttgcaaatttaggacttgtttg

SEQ ID NO: 44634 - DNA, 2116 bp, Zea Mays
gtcaaaatctggtcatccagaaaactaccagtggtcacctgaagaaaattagacagctcgcaccagctccaacaccgtttgtttcttcggttggtaatccaccaactgatcaggtttcgaactgtgttccctttcgttttttagcatttcttctgttggagaccgtttatctgttccgaagcctgctagcaacccagcaggtgaaggagaatggcgggaggtggcacgggcatcaggaaatacatgggggctcttaaggacaccacaacagtcagcatagcaaaagtaaacagcgattacaaggagctggacattgctattgtgaaggccacaaaccatgtcgagaatccaacaaaggagaaatacgtgagagatatcttttaccatctttcacccggaaggcctcgggcagatgtcgcctactgcatccgcgcccttggtagacgtctttcaaagacacgcaattgggcggttgctatgaagacattaattgtcatacaccgtgctcttcgggaagttgatcctgctttccgtgaagagcttattagttatggaagatctagctcccatatgctctatctgtcatactttaaggacgattctagcgcagaagcttgggattactctgcttgggtgcgcaattatgctttatatttggaggagaaacttgaatcattccgtgtactgaactatgatgttgaaaaggatccgttgcaaattcgggatcttgatacaaatggattgctcgatcagttgccagctttacagcagcttcttttccgactacttggttgccagccacaaggggcgtcatcttataacgtcataattcagcatgcactttcaatggttgctctagagagtgttaggatccaaacagccatcaatgacgggatactcaatcttgttgacaagttctttgagatgcagagagatgacgcaataagggcactgggcatgtatagaagagcaatcgagcaggcagaacaactttcagaattttatgaagtgtgtaaaagtatacatattgggcggggtgagagattcctaaaaatcgaacagccgcctgcatccttcttggcgactatggaggaatatgtgagcaatgctccccttgcttcaacagttcaaagaaatcaggctgtactggccatagaggacagcaaaaaatcagaagttgaagaatcacaaccaacgctgcctcctccccactctccagctcaagaatctgggcctgagccagttcaacaagtcccacctgcagctgatccaacagatttactgggaatcaatgaaccaacccctgccacatctgaaatagatcaaaagaatgcgggggccttggccatggttccacaggataatgcgccaaaagcacctgcttctactaccagttctggaagtgtggagactagctgggagctggccttggtcactgcacccagttcaaatgggactgctgtcactccaagcaaattggccggtgggctggacttgcttacactcgacagcttgtacaacgaggcgcaccgaagagcgcagcagaacgcaagctacaacccttgggagaccaatccagcgtcaggcccagtgatgcagcagcaaatgtacgacccgttctacgcctccaatcaccccgtggccgcagcccgcaacgtccagatggctgccatggagcagcagcagcaacaacaacatgccttcgtgctccagcagcagcagcagcagcagatgattgtgatgatgatggcacagcagcagcagcagcaagcttcttccaatccgttgtatacggccgccgccgcccacacgtatggtgcaggggtgcagctccacgcgggcaacgcgtactctggagctgggatgatgtaagcgttgcacagaacctgctgtctggttctgaccggcatcttccgttctttcttgttttttctcattattttcttgcatttttttttacattgtaagaactgtgttagggctagaactagaaatctgatatagcatcaatatgagcacattcttgatgttcatgaccaataatggtcgatgcgatgatggctttgaactgaagcactaaaatagtatcgatccttgcaaatttaggacttgtttg

SEQ ID NO: 44635 - DNA, 2129 bp, Zea Mays
acacgcctccttccttccttcctagcccttccgtcctgtccagactccagactccctccacaccagtagggactagggaggacgccgccactgcgacctgccggcagacgtctgccccctgcttccggcatccggactcccctgcgccgcagttacgttacgccggcgatctcctcggctcaacccggggcctttctctctgcgccccgccaggtgaaggagaatggcgggaggtggcacgggcatcaggaaatacatgggggctcttaaggacaccacaacagtcagcatagcaaaagtaaacagcgattacaaggagctggacattgctattgtgaaggccacaaaccatgtcgagaatccaacaaaggagaaatacgtgagagatatcttttaccatctttcacccggaaggcctcgggcagatgtcgcctactgcatccgcgcccttggtagacgtctttcaaagacacgcaattgggcggttgctatgaagacattaattgtcatacaccgtgctcttcgggaagttgatcctgctttccgtgaagagcttattagttatggaagatctagctcccatatgctctatctgtcatactttaaggacgattctagcgcagaagcttgggattactctgcttgggtgcgcaattatgctttatatttggaggagaaacttgaatcattccgtgtactgaactatgatgttgaaaaggatccgttgcaaattcgggatcttgatacaaatggattgctcgatcagttgccagctttacagcagcttcttttccgactacttggttgccagccacaaggggcgtcatcttataacgtcataattcagcatgcactttcaatggttgctctagagagtgttaggatccaaacagccatcaatgacgggatactcaatcttgttgacaagttctttgagatgcagagagatgacgcaataagggcactgggcatgtatagaagagcaatcgagcaggcagaacaactttcagaattttatgaagtgtgtaaaagtatacatattgggcggggtgagagattcctaaaaatcgaacagccgcctgcatccttcttggcgactatggaggaatatgtgagcaatgctccccttgcttcaacagttcaaagaaatcaggctgtactggccatagaggacagcaaaaaatcagaagttgaagaatcacaaccaacgctgcctcctccccactctccagctcaagaatctgggcctgagccagttcaacaagtcccacctgcagctgatccaacagatttactgggaatcaatgaaccaacccctgccacatctgaaatagatcaaaagaatgcgggggccttggccatggttccacaggataatgcgccaaaagcacctgcttctactaccagttctggaagtgtggagactagctgggagctggccttggtcactgcacccagttcaaatgggactgctgtcactccaagcaaattggccggtgggctggacttgcttacactcgacagcttgtacaacgaggcgcaccgaagagcgcagcagaacgcaagctacaacccttgggagaccaatccagcgtcaggcccagtgatgcagcagcaaatgtacgacccgttctacgcctccaatcaccccgtggccgcagcccgcaacgtccagatggctgccatggagcagcagcagcaacaacaacatgccttcgtgctccagcagcagcagcagcagcagatgattgtgatgatgatggcacagcagcagcagcagcaagcttcttccaatccgttgtatacggccgccgccgcccacacgtatggtgcaggggtgcagctccacgcgggcaacgcgtactctggagctgggatgatgtaagcgttgcacagaacctgctgtctggttctgaccggcatcttccgttctttcttgttttttctcattattttcttgcatttttttttacattgtaagaactgtgttagggctagaactagaaatctgatatagcatcaatatgagcacattcttgatgttcatgaccaataatggtcgatgcgatgatggctttgaactgaagcactaaaatagtatcgatccttgcaaatttaggacttgtttg

SEQ ID NO: 44636 - DNA, 2090 bp, Zea Mays
acacgcctccttccttccttcctagcccttccgtcctgtccagactccagactccctccacaccagtagggactagggaggacgccgccactgcgacctgccggcagacgtctgccccctgcttccggcatccggactcccctgcgccgcacccagctgctagcaacccagcaggtgaaggagaatggcgggaggtggcacgggcatcaggaaatacatgggggctcttaaggacaccacaacagtcagcatagcaaaagtaaacagcgattacaaggagctggacattgctattgtgaaggccacaaaccatgtcgagaatccaacaaaggagaaatacgtgagagatatcttttaccatctttcacccggaaggcctcgggcagatgtcgcctactgcatccgcgcccttggtagacgtctttcaaagacacgcaattgggcggttgctatgaagacattaattgtcatacaccgtgctcttcgggaagttgatcctgctttccgtgaagagcttattagttatggaagatctagctcccatatgctctatctgtcatactttaaggacgattctagcgcagaagcttgggattactctgcttgggtgcgcaattatgctttatatttggaggagaaacttgaatcattccgtgtactgaactatgatgttgaaaaggatccgttgcaaattcgggatcttgatacaaatggattgctcgatcagttgccagctttacagcagcttcttttccgactacttggttgccagccacaaggggcgtcatcttataacgtcataattcagcatgcactttcaatggttgctctagagagtgttaggatccaaacagccatcaatgacgggatactcaatcttgttgacaagttctttgagatgcagagagatgacgcaataagggcactgggcatgtatagaagagcaatcgagcaggcagaacaactttcagaattttatgaagtgtgtaaaagtatacatattgggcggggtgagagattcctaaaaatcgaacagccgcctgcatccttcttggcgactatggaggaatatgtgagcaatgctccccttgcttcaacagttcaaagaaatcaggctgtactggccatagaggacagcaaaaaatcagaagttgaagaatcacaaccaacgctgcctcctccccactctccagctcaagaatctgggcctgagccagttcaacaagtcccacctgcagctgatccaacagatttactgggaatcaatgaaccaacccctgccacatctgaaatagatcaaaagaatgcgggggccttggccatggttccacaggataatgcgccaaaagcacctgcttctactaccagttctggaagtgtggagactagctgggagctggccttggtcactgcacccagttcaaatgggactgctgtcactccaagcaaattggccggtgggctggacttgcttacactcgacagcttgtacaacgaggcgcaccgaagagcgcagcagaacgcaagctacaacccttgggagaccaatccagcgtcaggcccagtgatgcagcagcaaatgtacgacccgttctacgcctccaatcaccccgtggccgcagcccgcaacgtccagatggctgccatggagcagcagcagcaacaacaacatgccttcgtgctccagcagcagcagcagcagcagatgattgtgatgatgatggcacagcagcagcagcagcaagcttcttccaatccgttgtatacggccgccgccgcccacacgtatggtgcaggggtgcagctccacgcgggcaacgcgtactctggagctgggatgatgtaagcgttgcacagaacctgctgtctggttctgaccggcatcttccgttctttcttgttttttctcattattttcttgcatttttttttacattgtaagaactgtgttagggctagaactagaaatctgatatagcatcaatatgagcacattcttgatgttcatgaccaataatggtcgatgcgatgatggctttgaactgaagcactaaaatagtatcgatccttgcaaatttaggacttgtttg

SEQ ID NO: 44637 - DNA, 2086 bp, Zea Mays
acacgcctccttccttccttcctagcccttccgtcctgtccagactccagactccctccacaccagtagggactagggaggacgccgccactgcgacctgccggcagacgtctgccccctgcttccggcatccggactcccctgcgccgcagttacgttacgccggcgatctcctcggctcaacccggggcctttctctctgcgccccgccagcccagctgctagcaacccagcaggtgaaggagaatggcgggaggtggcacgggcatcaggaaatacatgggggctcttaaggacaccacaacagtcagcatagcaaaagtaaacagcgattacaaggagctggacattgctattgtgaaggccacaaaccatgtcgagaatccaacaaaggagaaatacgtgagagatatcttttaccatctttcacccggaaggcctcgggcagatgtcgcctactgcatccgcgcccttggtagacgtctttcaaagacacgcaattgggcggttgctatgaagacattaattgtcatacaccgtgctcttcgggaagttgatcctgctttccgtgaagagcttattagttatggaagatctagctcccatatgctctatctgtcatactttaaggacgattctagcgcagaagcttgggattactctgcttgggtgcgcaattatgctttatatttggaggagaaacttgaatcattccgtgtactgaactatgatgttgaaaaggatccgttgcaaattcgggatcttgatacaaatggattgctcgatcagttgccagctttacagcagcttcttttccgactacttggttgccagccacaaggggcgtcatcttataacgtcataattcagcatgcactttcaatgttctttgagatgcagagagatgacgcaataagggcactgggcatgtatagaagagcaatcgagcaggcagaacaactttcagaattttatgaagtgtgtaaaagtatacatattgggcggggtgagagattcctaaaaatcgaacagccgcctgcatccttcttggcgactatggaggaatatgtgagcaatgctccccttgcttcaacagttcaaagaaatcaggctgtactggccatagaggacagcaaaaaatcagaagttgaagaatcacaaccaacgctgcctcctccccactctccagctcaagaatctgggcctgagccagttcaacaagtcccacctgcagctgatccaacagatttactgggaatcaatgaaccaacccctgccacatctgaaatagatcaaaagaatgcgggggccttggccatggttccacaggataatgcgccaaaagcacctgcttctactaccagttctggaagtgtggagactagctgggagctggccttggtcactgcacccagttcaaatgggactgctgtcactccaagcaaattggccggtgggctggacttgcttacactcgacagcttgtacaacgaggcgcaccgaagagcgcagcagaacgcaagctacaacccttgggagaccaatccagcgtcaggcccagtgatgcagcagcaaatgtacgacccgttctacgcctccaatcaccccgtggccgcagcccgcaacgtccagatggctgccatggagcagcagcagcaacaacaacatgccttcgtgctccagcagcagcagcagcagcagatgattgtgatgatgatggcacagcagcagcagcagcaagcttcttccaatccgttgtatacggccgccgccgcccacacgtatggtgcaggggtgcagctccacgcgggcaacgcgtactctggagctgggatgatgtaagcgttgcacagaacctgctgtctggttctgaccggcatcttccgttctttcttgttttttctcattattttcttgcatttttttttacattgtaagaactgtgttagggctagaactagaaatctgatatagcatcaatatgagcacattcttgatgttcatgaccaataatggtcgatgcgatgatggctttgaactgaagcactaaaatagtatcgatccttgcaaatttaggacttgtttg

SEQ ID NO: 44638 - DNA, 2126 bp, Zea Mays
acacgcctccttccttccttcctagcccttccgtcctgtccagactccagactccctccacaccagtagggactagggaggacgccgccactgcgacctgccggcagacgtctgccccctgcttccggcatccggactcccctgcgccgcagttacgttacgccggcgatctcctcggctcaacccggggcctttctctctgcgccccgccagcccagctgctagcaacccagcaggtgaaggagaatggcgggaggtggcacgggcatcaggaaatacatgggggctcttaaggacaccacaacagtcagcatagcaaaagtaaacagcgattacaaggagctggacattgctattgtgaaggccacaaaccatgtcgagaatccaacaaaggagaaatacgtgagagatatcttttaccatctttcacccggaaggcctcgggcagatgtcgcctactgcatccgcgcccttggtagacgtctttcaaagacacgcaattgggcggttgctatgaagacattaattgtcatacaccgtgctcttcgggaagttgatcctgctttccgtgaagagcttattagttatggaagatctagctcccatatgctctatctgtcatactttaaggacgattctagcgcagaagcttgggattactctgcttgggtgcgcaattatgctttatatttggaggagaaacttgaatcattccgtgtactgaactatgatgttgaaaaggatccgttgcaaattcgggatcttgatacaaatggattgctcgatcagttgccagctttacagcagcttcttttccgactacttggttgccagccacaaggggcgtcatcttataacgtcataattcagcatgcactttcaatggttgctctagagagtgttaggatccaaacagccatcaatgacgggatactcaatcttgttgacaagttctttgagatgcagagagatgacgcaataagggcactgggcatgtatagaagagcaatcgagcaggcagaacaactttcagaattttatgaagtgtgtaaaagtatacatattgggcgggccgcctgcatccttcttggcgactatggaggaatatgtgagcaatgctccccttgcttcaacagttcaaagaaatcaggctgtactggccatagaggacagcaaaaaatcagaagttgaagaatcacaaccaacgctgcctcctccccactctccagctcaagaatctgggcctgagccagttcaacaagtcccacctgcagctgatccaacagatttactgggaatcaatgaaccaacccctgccacatctgaaatagatcaaaagaatgcgggggccttggccatggttccacaggataatgcgccaaaagcacctgcttctactaccagttctggaagtgtggagactagctgggagctggccttggtcactgcacccagttcaaatgggactgctgtcactccaagcaaattggccggtgggctggacttgcttacactcgacagcttgtacaacgaggcgcaccgaagagcgcagcagaacgcaagctacaacccttgggagaccaatccagcgtcaggcccagtgatgcagcagcaaatgtacgacccgttctacgcctccaatcaccccgtggccgcagcccgcaacgtccagatggctgccatggagcagcagcagcaacaacaacatgccttcgtgctccagcagcagcagcagcagcagatgattgtgatgatgatggcacagcagcagcagcagcaagcttcttccaatccgttgtatacggccgccgccgcccacacgtatggtgcaggggtgcagctccacgcgggcaacgcgtactctggagctgggatgatgtaagcgttgcacagaacctgctgtctggttctgaccggcatcttccgttctttcttgttttttctcattattttcttgcatttttttttacattgtaagaactgtgttagggctagaactagaaatctgatatagcatcaatatgagcacattcttgatgttcatgaccaataatggtcgatgcgatgatggctttgaactgaagcactaaaatagtatcgatccttgcaaatttaggacttgtttg

SEQ ID NO: 44639 - DNA, 2520 bp, Zea Mays
aatatcttggcaattcactcattgatgtgataggcaaatgttttttagttttagattggcttggccttcccattgagccgaaggacctgggttcgatgcaacctctctgtaaaatggagggttctcagtatggactccgtcctgatagataatggatccaaaaatggattctggaattgagagaagtcgatacaactccattgatgaagcaatagaagatggtgttgccccaatcccacttagcttggacaggacacttgatgttcaacgctctattgatgtcatggatcatcttttctcatgtgaggcaacatggcacaaggggcacactctagctcagactgtatttacatgtatctaccttatgagaatggaaagaacttcatcgcatgctgtactaaatagcttttgcaggattttgcgtgctacttgtaatgctgtcatttctgctgtttctactgcccgaactcatgaggaagaggatctctttactatgtcctttggtctgcctttgagagatgaaggtgatgataagtgcctgtcaattctaaactcagtcgaagagataatatctcgtcaattacgtgcatgtaaagcccaggcgttgtccaagaaaaaaacactagaaggtcttgaatcccttcaagataatcctgatctggaggaggattactgcagagctctgttatgcagattacgttttcgtaagcatttctaccatgttattatgtgcatgaggaaacctcatggaagaggattggagttggcccggaagcatgttgcttcatgcttgacagagcttaatttgatgcataagtctcggaagtttctcaagtcccagtccagcactatggtacagcaaagtgatggaaactgcaccactgcatctggttgtcagcctgttggctttgatgttagcttaaacagcagacttttgagtcccacaccgccacgtgcagtaaaagttcttagctggagcaatgcaatcaggtactttgagaggcttctgcatgatcttgatgtcatctgcgctttgtcgctcaatccggtgcttgataatgtgcttcactttattgtccagttccaaaaaacagtgccagatttggttcctagagcatttcttcagactttgttggtccaagatggtaaactttatggggaatacttcttttctgatgtcatttcaagggctttatcactaccggacattataggagataaggagtttcagatgaatgagtttgtggtgcagctaggtcagttggttatcaacctgataaaaattctttgtacaaacactgcatggcaacggcgcaagcttgggaagagtttgcaggattggagtactatttccatacagttggagcttgcactgaaaagagagtttggtgaaactagaaatgtcttgcagaatgagaatatgtgcatgagagtatcaaagcaacttcttatttggactcaggaacatgcatactgggttgcttttcggtttctcacattgggttttgaacttgacctatattctccgggcgaatacagtatggtgtactggtacatgtatgtggtgctcacaaagctaatagaaaagatgcagttacgagttctggccagtagtgaaacctcacgaagaaaggggaaaaagaagaaggatcatttgaaggattcagctcgggatatggcattttcgtcgtcttgtttattgcctcaatgctatcttttgctatcagagggactctcgatgatgctagctgtcctcagaaacgaaagtaggtcattccaattaccaagtatcttcaacactgaacaagagagattcatgcagcactttgatcttcttctgaaagctcgagtccctgagcacatttccttctacagtttcaaggaatcatcttcccgggcaggcatgtcggatttggtgaagtacaacttcttcaaggaaattcagaagatagtgccctcactacggggcagctttgcaagtgaaccagaaaaactcgctgaggtccgtcggatagagcaggtggctgagcacaacaggatagccctaaatattatcagccaagttggagctggcgatccgtctctgagggtctcgtttgagtttacacaccaccctcacttcgcagtggcagttgtgaagagatcatgattcaagtttggcatcgccaattctttacccttctcaatcttgatagtgatagcggatgattcttgttcacgtgttgctcacgtgtttattggttctccagagcgcaagcaacaccatgtgttttaggctgtacacaaacaccattagcaattttgtaggcaagataagaaaaaaaaaacatatgctggggaaaaaagtcctttcccctggcattattttgtaagcaaatttttttagctcactttgttatgcgaaacatgattatacagatgtgtaatttgagtcgtaattcgttactggtatgacaaggacgacaattttctcttgtttggcattttctattttgcggtgataactgactagtattttcc

SEQ ID NO: 44640 - DNA, 2506 bp, Zea Mays
ccttgtgaaaagcaatatcttggcaattcactcattgatgtgataggcaaatgttttttagttttagattggcttggccttcccattgagccgaaggacctgggttcgatgcaacctctctgtaaaatggagggataatggatccaaaaatggattctggaattgagagaagtcgatacaactccattgatgaagcaatagaagatggtgttgccccaatcccacttagcttggacaggacacttgatgttcaacgctctattgatgtcatggatcatcttttctcatgtgaggcaacatggcacaaggggcacactctagctcagactgtatttacatgtatctaccttatgagaatggaaagaacttcatcgcatgctgtactaaatagcttttgcaggattttgcgtgctacttgtaatgctgtcatttctgctgtttctactgcccgaactcatgaggaagaggatctctttactatgtcctttggtctgcctttgagagatgaaggtgatgataagtgcctgtcaattctaaactcagtcgaagagataatatctcgtcaattacgtgcatgtaaagcccaggcgttgtccaagaaaaaaacactagaaggtcttgaatcccttcaagataatcctgatctggaggaggattactgcagagctctgttatgcagattacgttttcgtaagcatttctaccatgttattatgtgcatgaggaaacctcatggaagaggattggagttggcccggaagcatgttgcttcatgcttgacagagcttaatttgatgcataagtctcggaagtttctcaagtcccagtccagcactatggtacagcaaagtgatggaaactgcaccactgcatctggttgtcagcctgttggctttgatgttagcttaaacagcagacttttgagtcccacaccgccacgtgcagtaaaagttcttagctggagcaatgcaatcaggtactttgagaggcttctgcatgatcttgatgtcatctgcgctttgtcgctcaatccggtgcttgataatgtgcttcactttattgtccagttccaaaaaacagtgccagatttggttcctagagcatttcttcagactttgttggtccaagatggtaaactttatggggaatacttcttttctgatgtcatttcaagggctttatcactaccggacattataggagataaggagtttcagatgaatgagtttgtggtgcagctaggtcagttggttatcaacctgataaaaattctttgtacaaacactgcatggcaacggcgcaagcttgggaagagtttgcaggattggagtactatttccatacagttggagcttgcactgaaaagagagtttggtgaaactagaaatgtcttgcagaatgagaatatgtgcatgagagtatcaaagcaacttcttatttggactcaggaacatgcatactgggttgcttttcggtttctcacattgggttttgaacttgacctatattctccgggcgaatacagtatggtgtactggtacatgtatgtggtgctcacaaagctaatagaaaagatgcagttacgagttctggccagtagtgaaacctcacgaagaaaggggaaaaagaagaaggatcatttgaaggattcagctcgggatatggcattttcgtcgtcttgtttattgcctcaatgctatcttttgctatcagagggactctcgatgatgctagctgtcctcagaaacgaaagtaggtcattccaattaccaagtatcttcaacactgaacaagagagattcatgcagcactttgatcttcttctgaaagctcgagtccctgagcacatttccttctacagtttcaaggaatcatcttcccgggcaggcatgtcggatttggtgaagtacaacttcttcaaggaaattcagaagatagtgccctcactacggggcagctttgcaagtgaaccagaaaaactcgctgaggtccgtcggatagagcaggtggctgagcacaacaggatagccctaaatattatcagccaagttggagctggcgatccgtctctgagggtctcgtttgagtttacacaccaccctcacttcgcagtggcagttgtgaagagatcatgattcaagtttggcatcgccaattctttacccttctcaatcttgatagtgatagcggatgattcttgttcacgtgttgctcacgtgtttattggttctccagagcgcaagcaacaccatgtgttttaggctgtacacaaacaccattagcaattttgtaggcaagataagaaaaaaaaaacatatgctggggaaaaaagtcctttcccctggcattattttgtaagcaaatttttttagctcactttgttatgcgaaacatgattatacagatgtgtaatttgagtcgtaattcgttactggtatgacaaggacgacaattttctcttgtttggcattttctattttgcggtgataactgactagtattttcc

SEQ ID NO: 44641 - DNA, 2466 bp, Zea Mays
ccacactacatcccctgataatggatccaaaaatggattctggaattgagagaagtcgatacaactccattgatgaagcaatagaagatggtgttgccccaatcccacttagcttggacaggacacttgatgttcaacgctctattgatgtcatggatcatcttttctcatgtgaggtacttaagtcctttgttgcatgtaatatgtgcaaccttttcaatttgactaaaccatgtattttaatgattcatttcccaggcaacatggcacaaggggcacactctagctcagactgtatttacatgtatctaccttatgagaatggaaagaacttcatcgcatgctgtactaaatagcttttgcaggattttgcgtgctacttgtaatgctgtcatttctgctgtttctactgcccgaactcatgaggaagaggatctctttactatgtcctttggtctgcctttgagagatgaaggtgatgataagtgcctgtcaattctaaactcagtcgaagagataatatctcgtcaattacgtgcatgtaaagcccaggcgttgtccaagaaaaaaacactagaaggtcttgaatcccttcaagataatcctgatctggaggaggattactgcagagctctgttatgcagattacgttttccatttctaccatgttattatgtgcatgaggaaacctcatggaagaggattggagttggcccggaagcatgttgcttcatgcttgacagagcttaatttgatgcataagtctcggaagtttctcaagtcccagtccagcactatggtacagcaaagtgatggaaactgcaccactgcatctggttgtcagcctgttggctttgatgttagcttaaacagcagacttttgagtcccacaccgccacgtgcagtaaaagttcttagctggagcaatgcaatcaggtactttgagaggcttctgcatgatcttgatgtcatctgcgctttgtcgctcaatccggtgcttgataatgtgcttcactttattgtccagttccaaaaaacagtgccagatttggttcctagagcatttcttcagactttgttggtccaagatggtaaactttatggggaatacttcttttctgatgtcatttcaagggctttatcactaccggacattataggagataaggagtttcagatgaatgagtttgtggtgcagctaggtcagttggttatcaacctgataaaaattctttgtacaaacactgcatggcaacggcgcaagcttgggaagagtttgcaggattggagtactatttccatacagttggagcttgcactgaaaagagagtttggtgaaactagaaatgtcttgcagaatgagaatatgtgcatgagagtatcaaagcaacttcttatttggactcaggaacatgcatactgggttgcttttcggtttctcacattgggttttgaacttgacctatattctccgggcgaatacagtatggtgtactggtacatgtatgtggtgctcacaaagctaatagaaaagatgcagttacgagttctggccagtagtgaaacctcacgaagaaaggggaaaaagaagaaggatcatttgaaggattcagctcgggatatggcattttcgtcgtcttgtttattgcctcaatgctatcttttgctatcagagggactctcgatgatgctagctgtcctcagaaacgaaagtaggtcattccaattaccaagtatcttcaacactgaacaagagagattcatgcagcactttgatcttcttctgaaagctcgagtccctgagcacatttccttctacagtttcaaggaatcatcttcccgggcaggcatgtcggatttggtgaagtacaacttcttcaaggaaattcagaagatagtgccctcactacggggcagctttgcaagtgaaccagaaaaactcgctgaggtccgtcggatagagcaggtggctgagcacaacaggatagccctaaatattatcagccaagttggagctggcgatccgtctctgagggtctcgtttgagtttacacaccaccctcacttcgcagtggcagttgtgaagagatcatgattcaagtttggcatcgccaattctttacccttctcaatcttgatagtgatagcggatgattcttgttcacgtgttgctcacgtgtttattggttctccagagcgcaagcaacaccatgtgttttaggctgtacacaaacaccattagcaattttgtaggcaagataagaaaaaaaaaacatatgctggggaaaaaagtcctttcccctggcattattttgtaagcaaatttttttagctcactttgttatgcgaaacatgattatacagatgtgtaatttgagtcgtaattcgttactggtatgacaaggacgacaattttctcttgtttggcattttctattttgcggtgataactgactagtattttcc

SEQ ID NO: 44642 - DNA, 2704 bp, Zea Mays
gtcaccacgcaaccagtaaaaacattcccccaatcccgaacccctccgccgccgccgccgccgccgccgccgtggccaaggagcaagaaagggacacggcctatcccttggtcgcggcgccagatctcgccgctgctcgcctctcatccatggaggcgagatcctcgtcgtccgcggccgcagtgccgccgcccctctccataccttcgtccagcgaccagtgcgtctgggctgacgcctcgccgctcctcgccgccgcgtgccgtgagatctcgaggatggggaacttgtacatggagaaaactttagtctatttgctgcaatgtctgcattggaaataatggatccaaaaatggattctggaattgagagaagtcgatacaactccattgatgaagcaatagaagatggtgttgccccaatcccacttagcttggacaggacacttgatgttcaacgctctattgatgtcatggatcatcttttctcatgcaacatggcacaaggggcacactctagctcagactgtatttacatgtatctaccttatgagaatggaaagaacttcatcgcatgctgtactaaatagcttttgcaggattttgcgtgctacttgtaatgctgtcatttctgctgtttctactgcccgaactcatgaggaagaggatctctttactatgtcctttggtctgcctttgagagatgaaggtgatgataagtgcctgtcaattctaaactcagtcgaagagataatatctcgtcaattacgtgcatgtaaagcccaggcgttgtccaagaaaaaaacactagaaggtcttgaatcccttcaagataatcctgatctggaggaggattactgcagagctctgttatgcagattacgttttcgtaagcatttctaccatgttattatgtgcatgaggaaacctcatggaagaggattggagttggcccggaagcatgttgcttcatgcttgacagagcttaatttgatgcataagtctcggaagtttctcaagtcccagtccagcactatggtacagcaaagtgatggaaactgcaccactgcatctggttgtcagcctgttggctttgatgttagcttaaacagcagacttttgagtcccacaccgccacgtgcagtaaaagttcttagctggagcaatgcaatcaggtactttgagaggcttctgcatgatcttgatgtcatctgcgctttgtcgctcaatccggtgcttgataatgtgcttcactttattgtccagttccaaaaaacagtgccagatttggttcctagagcatttcttcagactttgttggtccaagatggtaaactttatggggaatacttcttttctgatgtcatttcaagggctttatcactaccggacattataggagataaggagtttcagatgaatgagtttgtggtgcagctaggtcagttggttatcaacctgataaaaattctttgtacaaacactgcatggcaacggcgcaagcttgggaagagtttgcaggattggagtactatttccatacagttggagcttgcactgaaaagagagtttggtgaaactagaaatgtcttgcagaatgagaatatgtgcatgagagtatcaaagcaacttcttatttggactcaggaacatgcatactgggttgcttttcggtttctcacattgggttttgaacttgacctatattctccgggcgaatacagtatggtgtactggtacatgtatgtggtgctcacaaagctaatagaaaagatgcagttacgagttctggccagtagtgaaacctcacgaagaaaggggaaaaagaagaaggatcatttgaaggattcagctcgggatatggcattttcgtcgtcttgtttattgcctcaatgctatcttttgctatcagagggactctcgatgatgctagctgtcctcagaaacgaaagtaggtcattccaattaccaagtatcttcaacactgaacaagagagattcatgcagcactttgatcttcttctgaaagctcgagtccctgagcacatttccttctacagtttcaaggaatcatcttcccgggcaggcatgtcggatttggtgaagtacaacttcttcaaggaaattcagaagatagtgccctcactacggggcagctttgcaagtgaaccagaaaaactcgctgaggtccgtcggatagagcaggtggctgagcacaacaggatagccctaaatattatcagccaagttggagctggcgatccgtctctgagggtctcgtttgagtttacacaccaccctcacttcgcagtggcagttgtgaagagatcatgattcaagtttggcatcgccaattctttacccttctcaatcttgatagtgatagcggatgattcttgttcacgtgttgctcacgtgtttattggttctccagagcgcaagcaacaccatgtgttttaggctgtacacaaacaccattagcaattttgtaggcaagataagaaaaaaaaaacatatgctggggaaaaaagtcctttcccctggcattattttgtaagcaaatttttttagctcactttgttatgcgaaacatgattatacagatgtgtaatttgagtcgtaattcgttactggtatgacaaggacgacaattttctcttgtttggcattttctattttgcggtgataactgactagtattttcc

SEQ ID NO: 44643 - DNA, 2704 bp, Zea Mays
gtcaccacgcaaccagtaaaaacattcccccaatcccgaacccctccgccgccgccgccgccgccgccgccgtggccaaggagcaagaaagggacacggcctatcccttggtcgcggcgccagatctcgccgctgctcgcctctcatccatggaggcgagatcctcgtcgtccgcggccgcagtgccgccgcccctctccataccttcgtccagcgaccagtgcgtctgggctgacgcctcgccgctcctcgccgccgcgtgccgtgagatctcgaggatggggaacttgtacatggagaaaactttagtctatttgctgcaatgtctgcattggaaataatggatccaaaaatggattctggaattgagagaagtcgatacaactccattgatgaagcaatagaagatggtgttgccccaatcccacttagcttggacaggacacttgatgttcaacgctctattgatgtcatggatcatcttttctcatgtgaggcaacatggcacaaggggcacactctagctcagactgtatttacatgtatctaccttatgagaatggaaagaacttcatcgcatgctgtactaaatagcttttgcaggattttgcgtgctacttgtaatgctgtcatttctgctgtttctactgcccgaactcatgaggaagaggatctctttactatgtcctttggtctgcctttgagagatgaaggtgatgataagtgcctgtcaattctaaactcagtcgaagagataatatctcgtcaattacgtgcatgtaaagcccaggcgttgtccaagaaaaaaacactagaaggtcttgaatcccttcaagataatcctgatctggaggaggattactgcagagctctgttatgcagattacgttttccatttctaccatgttattatgtgcatgaggaaacctcatggaagaggattggagttggcccggaagcatgttgcttcatgcttgacagagcttaatttgatgcataagtctcggaagtttctcaagtcccagtccagcactatggtacagcaaagtgatggaaactgcaccactgcatctggttgtcagcctgttggctttgatgttagcttaaacagcagacttttgagtcccacaccgccacgtgcagtaaaagttcttagctggagcaatgcaatcaggtactttgagaggcttctgcatgatcttgatgtcatctgcgctttgtcgctcaatccggtgcttgataatgtgcttcactttattgtccagttccaaaaaacagtgccagatttggttcctagagcatttcttcagactttgttggtccaagatggtaaactttatggggaatacttcttttctgatgtcatttcaagggctttatcactaccggacattataggagataaggagtttcagatgaatgagtttgtggtgcagctaggtcagttggttatcaacctgataaaaattctttgtacaaacactgcatggcaacggcgcaagcttgggaagagtttgcaggattggagtactatttccatacagttggagcttgcactgaaaagagagtttggtgaaactagaaatgtcttgcagaatgagaatatgtgcatgagagtatcaaagcaacttcttatttggactcaggaacatgcatactgggttgcttttcggtttctcacattgggttttgaacttgacctatattctccgggcgaatacagtatggtgtactggtacatgtatgtggtgctcacaaagctaatagaaaagatgcagttacgagttctggccagtagtgaaacctcacgaagaaaggggaaaaagaagaaggatcatttgaaggattcagctcgggatatggcattttcgtcgtcttgtttattgcctcaatgctatcttttgctatcagagggactctcgatgatgctagctgtcctcagaaacgaaagtaggtcattccaattaccaagtatcttcaacactgaacaagagagattcatgcagcactttgatcttcttctgaaagctcgagtccctgagcacatttccttctacagtttcaaggaatcatcttcccgggcaggcatgtcggatttggtgaagtacaacttcttcaaggaaattcagaagatagtgccctcactacggggcagctttgcaagtgaaccagaaaaactcgctgaggtccgtcggatagagcaggtggctgagcacaacaggatagccctaaatattatcagccaagttggagctggcgatccgtctctgagggtctcgtttgagtttacacaccaccctcacttcgcagtggcagttgtgaagagatcatgattcaagtttggcatcgccaattctttacccttctcaatcttgatagtgatagcggatgattcttgttcacgtgttgctcacgtgtttattggttctccagagcgcaagcaacaccatgtgttttaggctgtacacaaacaccattagcaattttgtaggcaagataagaaaaaaaaaacatatgctggggaaaaaagtcctttcccctggcattattttgtaagcaaatttttttagctcactttgttatgcgaaacatgattatacagatgtgtaatttgagtcgtaattcgttactggtatgacaaggacgacaattttctcttgtttggcattttctattttgcggtgataactgactagtattttcc

SEQ ID NO: 44644 - DNA, 2699 bp, Zea Mays
gtcaccacgcaaccagtaaaaacattcccccaatcccgaacccctccgccgccgccgccgccgccgccgccgtggccaaggagcaagaaagggacacggcctatcccttggtcgcggcgccagatctcgccgctgctcgcctctcatccatggaggcgagatcctcgtcgtccgcggccgcagtgccgccgcccctctccataccttcgtccagcgaccagtgcgtctgggctgacgcctcgccgctcctcgccgccgcgtgccgtgatctcgaggatggggaacttgtacatggagaaaactttagtctatttgctgcaatgtctgcattggaaataatggatccaaaaatggattctggaattgagagaagtcgatacaactccattgatgaagcaatagaagatggtgttgccccaatcccacttagcttggacaggacacttgatgttcaacgctctattgatgtcatggatcatcttttctcatgtgaggcaacatggcacaaggggcacactctagctcagactgtatttacatgtatctaccttatgagaatggaaagaacttcatcgcatgctgtactaaatagcttttgcaggattttgcgtgctacttgtaatgctgtcatttctgctgtttctactgcccgaactcatgaggaagaggatctctttactatgtcctttggtctgcctttgagagatgaaggtgatgataagtgcctgtcaattctaaactcagtcgaagagataatatctcgtcaattacgtgcatgtaaagcccaggcgttgtccaagaaaaaaacactagaaggtcttgaatcccttcaagataatcctgatctggaggaggattactgcagagctctgttatgcagattacgttttcgtaagcatttctaccatgttattatgtgcatgaggaaacctcatggaagaggattggagttggcccggaagcatgttgcttcatgcttgacagagcttaatttgatgcataagtctcggaagtttctcaagtcccagtccagcactatggtacagcaaagtgatggaaactgcaccactgcatctggttgtcagcctgttggctttgatgttagcttaaacagcagacttttgagtcccacaccgccacgtgcagtaaaagttcttagctggagcaatgtactttgagaggcttctgcatgatcttgatgtcatctgcgctttgtcgctcaatccggtgcttgataatgtgcttcactttattgtccagttccaaaaaacagtgccagatttggttcctagagcatttcttcagactttgttggtccaagatggtaaactttatggggaatacttcttttctgatgtcatttcaagggctttatcactaccggacattataggagataaggagtttcagatgaatgagtttgtggtgcagctaggtcagttggttatcaacctgataaaaattctttgtacaaacactgcatggcaacggcgcaagcttgggaagagtttgcaggattggagtactatttccatacagttggagcttgcactgaaaagagagtttggtgaaactagaaatgtcttgcagaatgagaatatgtgcatgagagtatcaaagcaacttcttatttggactcaggaacatgcatactgggttgcttttcggtttctcacattgggttttgaacttgacctatattctccgggcgaatacagtatggtgtactggtacatgtatgtggtgctcacaaagctaatagaaaagatgcagttacgagttctggccagtagtgaaacctcacgaagaaaggggaaaaagaagaaggatcatttgaaggattcagctcgggatatggcattttcgtcgtcttgtttattgcctcaatgctatcttttgctatcagagggactctcgatgatgctagctgtcctcagaaacgaaagtaggtcattccaattaccaagtatcttcaacactgaacaagagagattcatgcagcactttgatcttcttctgaaagctcgagtccctgagcacatttccttctacagtttcaaggaatcatcttcccgggcaggcatgtcggatttggtgaagtacaacttcttcaaggaaattcagaagatagtgccctcactacggggcagctttgcaagtgaaccagaaaaactcgctgaggtccgtcggatagagcaggtggctgagcacaacaggatagccctaaatattatcagccaagttggagctggcgatccgtctctgagggtctcgtttgagtttacacaccaccctcacttcgcagtggcagttgtgaagagatcatgattcaagtttggcatcgccaattctttacccttctcaatcttgatagtgatagcggatgattcttgttcacgtgttgctcacgtgtttattggttctccagagcgcaagcaacaccatgtgttttaggctgtacacaaacaccattagcaattttgtaggcaagataagaaaaaaaaaacatatgctggggaaaaaagtcctttcccctggcattattttgtaagcaaatttttttagctcactttgttatgcgaaacatgattatacagatgtgtaatttgagtcgtaattcgttactggtatgacaaggacgacaattttctcttgtttggcattttctattttgcggtgataactgactagtattttcc

SEQ ID NO: 44645 - DNA, 2709 bp, Zea Mays
gtcaccacgcaaccagtaaaaacattcccccaatcccgaacccctccgccgccgccgccgccgccgccgccgtggccaaggagcaagaaagggacacggcctatcccttggtcgcggcgccagatctcgccgctgctcgcctctcatccatggaggcgagatcctcgtcgtccgcggccgcagtgccgccgcccctctccataccttcgtccagcgaccagtgcgtctgggctgacgcctcgccgctcctcgccgccgcgtgccgtgagatctcgaggatggggaacttgtacatggagaaaactttagtctatttgctgcaatgtctgcattggaaataatggatccaaaaatggattctggaattgagagaagtcgatacaactccattgatgaagcaatagaagatggtgttgccccaatcccacttagcttggacaggacacttgatgttcaacgctctattgatgtcatggatcatcttttctcatgtgaggcaacatggcacaaggggcacactctagctcagactgtatttacatgtatctaccttatgagaatggaaagaacttcatcgcatgctgtactaaatagcttttgcaggattttgcgtgctacttgtaatgctgtcatttctgctgtttctactgcccgaactcatgaggaagaggatctctttactatgtcctttggtctgcctttgagagatgaaggtgatgataagtgcctgtcaattctaaactcagtcgaagagataatatctcgtcaattacgtgcatgtaaagcccaggcgttgtccaagaaaaaaacactagaaggtcttgaatcccttcaagataatcctgatctggaggaggattactgcagagctctgttatgcagattacgttttcgtaagcatttctaccatgttattatgtgcatgaggaaacctcatggaagaggattggagttggcccggaagcatgttgcttcatgcttgacagagcttaatttgatgcataagtctcggaagtttctcaagtcccagtccagcactatggtacagcaaagtgatggaaactgcaccactgcatctggttgtcagcctgttggctttgatgttagcttaaacagcagacttttgagtcccacaccgccacgtgcagtaaaagttcttagctggagcaatgcaatcaggtactttgagaggcttctgcatgatcttgatgtcatctgcgctttgtcgctcaatccggtgcttgataatgtgcttcactttattgtccagttccaaaaaacagtgccagatttggttcctagagcatttcttcagactttgttggtccaagatggtaaactttatggggaatacttcttttctgatgtcatttcaagggctttatcactaccggacattataggagataaggagtttcagatgaatgagtttgtggtgcagctaggtcagttggttatcaacctgataaaaattctttgtacaaacactgcatggcaacggcgcaagcttgggaagagtttgcaggattggagtactatttccatacagttggagcttgcactgaaaagagagtttggtgaaactagaaatgtcttgcagaatgagaatatgtgcatgagagtatcaaagcaacttcttatttggactcaggaacatgcatactgggttgcttttcggtttctcacattgggttttgaacttgacctatattctccgggcgaatacagtatggtgtactggtacatgtatgtggtgctcacaaagctaatagaaaagatgcagttacgagttctggccagtagtgaaacctcacgaagaaaggggaaaaagaagaaggatcatttgaaggattcagctcgggatatggcattttcgtcgtcttgtttattgcctcaatgctatcttttgctatcagagggactctcgatgatgctagctgtcctcagaaacgaaagtaggtcattccaattaccaagtatcttcaacactgaacaagagagattcatgcagcactttgatcttcttctgaaagctcgagtccctgagcacatttccttctacagtttcaaggaatcatcttcccgggcaggcatgtcggatttggtgaagtacaacttcttcaaggaaattcagaagatagtgccctcactacggggcagctttgcaagtgaaccagaaaaactcgctgaggtccgtcggatagagcaggtggctgagcacaacaggatagccctaaatattatcagccaagttggagctggcgatccgtctctgagggtctcgtttgagtttacacaccaccctcacttcgcagtggcagttgtgaagagatcatgattcaagtttggcatcgccaattctttacccttctcaatcttgatagtgatagcggatgattcttgttcacgtgttgctcacgtgtttattggttctccagagcgcaagcaacaccatgtgttttaggctgtacacaaacaccattagcaattttgtaggcaagataagaaaaaaaaaacatatgctggggaaaaaagtcctttcccctggcattattttgtaagcaaatttttttagctcactttgttatgcgaaacatgattatacagatgtgtaatttgagtcgtaattcgttactggtatgacaaggacgacaattttctcttgtttggcattttctattttgcggtgataactgactagtattttcc

SEQ ID NO: 44646 - DNA, 2559 bp, Zea Mays
cctggttcctcgtcctcctagtcaccacgcaaccagtaaaaacattcccccaatcccgaacccctccgccgccgccgccgccgccgccgccgtggccaaggagcaagaaagggacacggcctatcccttggtcgcggcgccagatctcgccgctgctcgcctctcatccatggaggcgagatcctcgtcgtccgcggccgcagtgccgccgcccctctccataccttcgtccagcgaccagtgcgtctgggctgacgcctcgccgctcctcgccgccgcgtgccgtgatctcgaggatggggaacttgtacatggagaaaactttagtctatttgctgcaatgtctgcattggaaataatggatccaaaaatggattctggaattgagagaagtcgatacaactccattgatgaagcaatagaagatggtgttgccccaatcccacttagcttggacaggacacttgatgttcaacgctctattgatgtcatggatcatcttttctcatgtgaggaagaggatctctttactatgtcctttggtctgcctttgagagatgaaggtgatgataagtgcctgtcaattctaaactcagtcgaagagataatatctcgtcaattacgtgcatgtaaagcccaggcgttgtccaagaaaaaaacactagaaggtcttgaatcccttcaagataatcctgatctggaggaggattactgcagagctctgttatgcagattacgttttcgtaagcatttctaccatgttattatgtgcatgaggaaacctcatggaagaggattggagttggcccggaagcatgttgcttcatgcttgacagagcttaatttgatgcataagtctcggaagtttctcaagtcccagtccagcactatggtacagcaaagtgatggaaactgcaccactgcatctggttgtcagcctgttggctttgatgttagcttaaacagcagacttttgagtcccacaccgccacgtgcagtaaaagttcttagctggagcaatgcaatcaggtactttgagaggcttctgcatgatcttgatgtcatctgcgctttgtcgctcaatccggtgcttgataatgtgcttcactttattgtccagttccaaaaaacagtgccagatttggttcctagagcatttcttcagactttgttggtccaagatggtaaactttatggggaatacttcttttctgatgtcatttcaagggctttatcactaccggacattataggagataaggagtttcagatgaatgagtttgtggtgcagctaggtcagttggttatcaacctgataaaaattctttgtacaaacactgcatggcaacggcgcaagcttgggaagagtttgcaggattggagtactatttccatacagttggagcttgcactgaaaagagagtttggtgaaactagaaatgtcttgcagaatgagaatatgtgcatgagagtatcaaagcaacttcttatttggactcaggaacatgcatactgggttgcttttcggtttctcacattgggttttgaacttgacctatattctccgggcgaatacagtatggtgtactggtacatgtatgtggtgctcacaaagctaatagaaaagatgcagttacgagttctggccagtagtgaaacctcacgaagaaaggggaaaaagaagaaggatcatttgaaggattcagctcgggatatggcattttcgtcgtcttgtttattgcctcaatgctatcttttgctatcagagggactctcgatgatgctagctgtcctcagaaacgaaagtaggtcattccaattaccaagtatcttcaacactgaacaagagagattcatgcagcactttgatcttcttctgaaagctcgagtccctgagcacatttccttctacagtttcaaggaatcatcttcccgggcaggcatgtcggatttggtgaagtacaacttcttcaaggaaattcagaagatagtgccctcactacggggcagctttgcaagtgaaccagaaaaactcgctgaggtccgtcggatagagcaggtggctgagcacaacaggatagccctaaatattatcagccaagttggagctggcgatccgtctctgagggtctcgtttgagtttacacaccaccctcacttcgcagtggcagttgtgaagagatcatgattcaagtttggcatcgccaattctttacccttctcaatcttgatagtgatagcggatgattcttgttcacgtgttgctcacgtgtttattggttctccagagcgcaagcaacaccatgtgttttaggctgtacacaaacaccattagcaattttgtaggcaagataagaaaaaaaaaacatatgctggggaaaaaagtcctttcccctggcattattttgtaagcaaatttttttagctcactttgttatgcgaaacatgattatacagatgtgtaatttgagtcgtaattcgttactggtatgacaaggacgacaattttctcttgtttggcattttctattttgcggtgataactgactagtattttcc

SEQ ID NO: 44647 - DNA, 2395 bp, Zea Mays
cctggttcctcgtcctcctagtcaccacgcaaccagtaaaaacattcccccaatcccgaacccctccgccgccgccgccgccgccgccgccgtggccaaggagcaagaaagggacacggcctatcccttggtcgcggcgccagatctcgccgctgctcgcctctcatccatggaggcgagatcctcgtcgtccgcggccgcagtgccgccgcccctctccataccttcgtccagcgaccagtgcgtctgggctgacgcctcgccgctcctcgccgccgcgtgccgtgatctcgaggatggggaacttgtacatggagaaaactttagtctatttgctgcaatgtctgcattggaagaagaggatctctttactatgtcctttggtctgcctttgagagatgaaggtgatgataagtgcctgtcaattctaaactcagtcgaagagataatatctcgtcaattacgtgcatgtaaagcccaggcgttgtccaagaaaaaaacactagaaggtcttgaatcccttcaagataatcctgatctggaggaggattactgcagagctctgttatgcagattacgttttccatttctaccatgttattatgtgcatgaggaaacctcatggaagaggattggagttggcccggaagcatgttgcttcatgcttgacagagcttaatttgatgcataagtctcggaagtttctcaagtcccagtccagcactatggtacagcaaagtgatggaaactgcaccactgcatctggttgtcagcctgttggctttgatgttagcttaaacagcagacttttgagtcccacaccgccacgtgcagtaaaagttcttagctggagcaatgcaatcaggtactttgagaggcttctgcatgatcttgatgtcatctgcgctttgtcgctcaatccggtgcttgataatgtgcttcactttattgtccagttccaaaaaacagtgccagatttggttcctagagcatttcttcagactttgttggtccaagatggtaaactttatggggaatacttcttttctgatgtcatttcaagggctttatcactaccggacattataggagataaggagtttcagatgaatgagtttgtggtgcagctaggtcagttggttatcaacctgataaaaattctttgtacaaacactgcatggcaacggcgcaagcttgggaagagtttgcaggattggagtactatttccatacagttggagcttgcactgaaaagagagtttggtgaaactagaaatgtcttgcagaatgagaatatgtgcatgagagtatcaaagcaacttcttatttggactcaggaacatgcatactgggttgcttttcggtttctcacattgggttttgaacttgacctatattctccgggcgaatacagtatggtgtactggtacatgtatgtggtgctcacaaagctaatagaaaagatgcagttacgagttctggccagtagtgaaacctcacgaagaaaggggaaaaagaagaaggatcatttgaaggattcagctcgggatatggcattttcgtcgtcttgtttattgcctcaatgctatcttttgctatcagagggactctcgatgatgctagctgtcctcagaaacgaaagtaggtcattccaattaccaagtatcttcaacactgaacaagagagattcatgcagcactttgatcttcttctgaaagctcgagtccctgagcacatttccttctacagtttcaaggaatcatcttcccgggcaggcatgtcggatttggtgaagtacaacttcttcaaggaaattcagaagatagtgccctcactacggggcagctttgcaagtgaaccagaaaaactcgctgaggtccgtcggatagagcaggtggctgagcacaacaggatagccctaaatattatcagccaagttggagctggcgatccgtctctgagggtctcgtttgagtttacacaccaccctcacttcgcagtggcagttgtgaagagatcatgattcaagtttggcatcgccaattctttacccttctcaatcttgatagtgatagcggatgattcttgttcacgtgttgctcacgtgtttattggttctccagagcgcaagcaacaccatgtgttttaggctgtacacaaacaccattagcaattttgtaggcaagataagaaaaaaaaaacatatgctggggaaaaaagtcctttcccctggcattattttgtaagcaaatttttttagctcactttgttatgcgaaacatgattatacagatgtgtaatttgagtcgtaattcgttactggtatgacaaggacgacaattttctcttgtttggcattttctattttgcggtgataactgactagtattttcc

SEQ ID NO: 44648 - DNA, 2717 bp, Zea Mays
cctggttcctcgtcctcctagtcaccacgcaaccagtaaaaacattcccccaatcccgaacccctccgccgccgccgccgccgccgccgccgtggccaaggagcaagaaagggacacggcctatcccttggtcgcggcgccagatctcgccgctgctcgcctctcatccatggaggcgagatcctcgtcgtccgcggccgcagtgccgccgcccctctccataccttcgtccagcgaccagtgcgtctgggctgacgcctcgccgctcctcgccgccgcgtgccgtgatctcgaggatggggaacttgtacatggagaaaactttagtctatttgctgcaatgtctgcattggaaataatggatccaaaaatggattctggaattgagagaagtcgatacaactccattgatgaagcaatagaagatggtgttgccccaatcccacttagcttggacaggacacttgatgttcaacgctctattgatgtcatggatcatcttttctcatgcaacatggcacaaggggcacactctagctcagactgtatttacatgtatctaccttatgagaatggaaagaacttcatcgcatgctgtactaaatagcttttgcaggattttgcgtgctacttgtaatgctgtcatttctgctgtttctactgcccgaactcatgaggaagaggatctctttactatgtcctttggtctgcctttgagagatgaaggtgatgataagtgcctgtcaattctaaactcagtcgaagagataatatctcgtcaattacgtgcatgtaaagcccaggcgttgtccaagaaaaaaacactagaaggtcttgaatcccttcaagataatcctgatctggaggaggattactgcagagctctgttatgcagattacgttttccatttctaccatgttattatgtgcatgaggaaacctcatggaagaggattggagttggcccggaagcatgttgcttcatgcttgacagagcttaatttgatgcataagtctcggaagtttctcaagtcccagtccagcactatggtacagcaaagtgatggaaactgcaccactgcatctggttgtcagcctgttggctttgatgttagcttaaacagcagacttttgagtcccacaccgccacgtgcagtaaaagttcttagctggagcaatgcaatcaggtactttgagaggcttctgcatgatcttgatgtcatctgcgctttgtcgctcaatccggtgcttgataatgtgcttcactttattgtccagttccaaaaaacagtgccagatttggttcctagagcatttcttcagactttgttggtccaagatggtaaactttatggggaatacttcttttctgatgtcatttcaagggctttatcactaccggacattataggagataaggagtttcagatgaatgagtttgtggtgcagctaggtcagttggttatcaacctgataaaaattctttgtacaaacactgcatggcaacggcgcaagcttgggaagagtttgcaggattggagtactatttccatacagttggagcttgcactgaaaagagagtttggtgaaactagaaatgtcttgcagaatgagaatatgtgcatgagagtatcaaagcaacttcttatttggactcaggaacatgcatactgggttgcttttcggtttctcacattgggttttgaacttgacctatattctccgggcgaatacagtatggtgtactggtacatgtatgtggtgctcacaaagctaatagaaaagatgcagttacgagttctggccagtagtgaaacctcacgaagaaaggggaaaaagaagaaggatcatttgaaggattcagctcgggatatggcattttcgtcgtcttgtttattgcctcaatgctatcttttgctatcagagggactctcgatgatgctagctgtcctcagaaacgaaagtaggtcattccaattaccaagtatcttcaacactgaacaagagagattcatgcagcactttgatcttcttctgaaagctcgagtccctgagcacatttccttctacagtttcaaggaatcatcttcccgggcaggcatgtcggatttggtgaagtacaacttcttcaaggaaattcagaagatagtgccctcactacggggcagctttgcaagtgaaccagaaaaactcgctgaggtccgtcggatagagcaggtggctgagcacaacaggatagccctaaatattatcagccaagttggagctggcgatccgtctctgagggtctcgtttgagtttacacaccaccctcacttcgcagtggcagttgtgaagagatcatgattcaagtttggcatcgccaattctttacccttctcaatcttgatagtgatagcggatgattcttgttcacgtgttgctcacgtgtttattggttctccagagcgcaagcaacaccatgtgttttaggctgtacacaaacaccattagcaattttgtaggcaagataagaaaaaaaaaacatatgctggggaaaaaagtcctttcccctggcattattttgtaagcaaatttttttagctcactttgttatgcgaaacatgattatacagatgtgtaatttgagtcgtaattcgttactggtatgacaaggacgacaattttctcttgtttggcattttctattttgcggtgataactgactagtattttcc

SEQ ID NO: 44649 - DNA, 2512 bp, Zea Mays
cctggttcctcgtcctcctagtcaccacgcaaccagtaaaaacattcccccaatcccgaacccctccgccgccgccgccgccgccgccgccgtggccaaggagcaagaaagggacacggcctatcccttggtcgcggcgccagatctcgccgctgctcgcctctcatccatggaggcgagatcctcgtcgtccgcggccgcagtgccgccgcccctctccataccttcgtccagcgaccagtgcgtctgggctgacgcctcgccgctcctcgccgccgcgtgccgtgatctcgaggatggggaacttgtacatggagaaaactttagtctatttgctgcaatgtctgcattggaaataatggatccaaaaatggattctggaattgagagaagtcgatacaactccattgatgaagcaatagaagatggtgttgccccaatcccacttagcttggacaggacacttgatgttcaacgctctattgatgtcatggatcatcttttctcatgcaacatggcacaaggggcacactctagctcagactgtatttacatgtatctaccttatgagaatggaaagaacttcatcgcatgctgtactaaatagcttttgcaggattttgcgtgctacttgtaatgctgtcatttctgctgtttctactgcccgaactcatgaggaagaggatctctttactatgtcctttggtctgcctttgagagatgaaggtgatgataagtgcctgtcaattctaaactcagtcgaagagataatatctcgtcaattacgtgcatgtaaagcccaggcgttgtccaagaaaaaaacactagaaggtcttgaatcccttcaagataatcctgatctggaggaggattactgcagagctctgttatgcagattacgttttccatttctaccatgttattatgtgcatgaggaaacctcatggaagaggattggagttggcccggaagcatgttgcttcatgcttgacagagcttaatttgatgcataagtctcggaagtttctcaagtcccagtccagcactatggtacagcaaagtgatggaaactgcaccactgcatctggttgtcagcctgttggctttgatgttagcttaaacagcagacttttgagtcccacaccgccacgtgcagtaaaagttcttagctggagcaatgcaatcaggtactttgagaggcttctgcatgatcttgatgtcatctgcgctttgtcgctcaatccggtgcttgataatgtgcttcactttattgtccagttccaaaaaacagtgccagatttggttcctagagcatttcttcagactttgttggtccaagatggtaaactttatggggaatacttcttttctgatgtcatttcaagggctttatcactaccggacattataggagataaggagtttcagatgaatgagtttgtggtgcagctaggtcagttggttatcaacctgataaaaattctttgtacaaacactgcatggcaacggcgcaagcttgggaagagtttgcaggattggagtactatttccatacagttggagcttgcactgaaaagagagtttggtgaaactagaaatgtcttgcagaatgagcacgaagaaaggggaaaaagaagaaggatcatttgaaggattcagctcgggatatggcattttcgtcgtcttgtttattgcctcaatgctatcttttgctatcagagggactctcgatgatgctagctgtcctcagaaacgaaagtaggtcattccaattaccaagtatcttcaacactgaacaagagagattcatgcagcactttgatcttcttctgaaagctcgagtccctgagcacatttccttctacagtttcaaggaatcatcttcccgggcaggcatgtcggatttggtgaagtacaacttcttcaaggaaattcagaagatagtgccctcactacggggcagctttgcaagtgaaccagaaaaactcgctgaggtccgtcggatagagcaggtggctgagcacaacaggatagccctaaatattatcagccaagttggagctggcgatccgtctctgagggtctcgtttgagtttacacaccaccctcacttcgcagtggcagttgtgaagagatcatgattcaagtttggcatcgccaattctttacccttctcaatcttgatagtgatagcggatgattcttgttcacgtgttgctcacgtgtttattggttctccagagcgcaagcaacaccatgtgttttaggctgtacacaaacaccattagcaattttgtaggcaagataagaaaaaaaaaacatatgctggggaaaaaagtcctttcccctggcattattttgtaagcaaatttttttagctcactttgttatgcgaaacatgattatacagatgtgtaatttgagtcgtaattcgttactggtatgacaaggacgacaattttctcttgtttggcattttctattttgcggtgataactgactagtattttcc

SEQ ID NO: 44650 - DNA, 2615 bp, Zea Mays
cctggttcctcgtcctcctagtcaccacgcaaccagtaaaaacattcccccaatcccgaacccctccgccgccgccgccgccgccgccgccgtggccaaggagcaagaaagggacacggcctatcccttggtcgcggcgccagatctcgccgctgctcgcctctcatccatggaggcgagatcctcgtcgtccgcggccgcagtgccgccgcccctctccataccttcgtccagcgaccagtgcgtctgggctgacgcctcgccgctcctcgccgccgcgtgccgtgatctcgaggatggggaacttgtacatggagaaaactttagtctatttgctgcaatgtctgcattggaaataatggatccaaaaatggattctggaattgagagaagtcgatacaactccattgatgaagcaatagaagatggtgttgccccaatcccacttagcttggacaggacacttgatgttcaacgctctattgatgtcatggatcatcttttctcatgattttgcgtgctacttgtaatgctgtcatttctgctgtttctactgcccgaactcatgaggaagaggatctctttactatgtcctttggtctgcctttgagagatgaaggtgatgataagtgcctgtcaattctaaactcagtcgaagagataatatctcgtcaattacgtgcatgtaaagcccaggcgttgtccaagaaaaaaacactagaaggtcttgaatcccttcaagataatcctgatctggaggaggattactgcagagctctgttatgcagattacgttttcgtaagcatttctaccatgttattatgtgcatgaggaaacctcatggaagaggattggagttggcccggaagcatgttgcttcatgcttgacagagcttaatttgatgcataagtctcggaagtttctcaagtcccagtccagcactatggtacagcaaagtgatggaaactgcaccactgcatctggttgtcagcctgttggctttgatgttagcttaaacagcagacttttgagtcccacaccgccacgtgcagtaaaagttcttagctggagcaatgcaatcaggtactttgagaggcttctgcatgatcttgatgtcatctgcgctttgtcgctcaatccggtgcttgataatgtgcttcactttattgtccagttccaaaaaacagtgccagatttggttcctagagcatttcttcagactttgttggtccaagatggtaaactttatggggaatacttcttttctgatgtcatttcaagggctttatcactaccggacattataggagataaggagtttcagatgaatgagtttgtggtgcagctaggtcagttggttatcaacctgataaaaattctttgtacaaacactgcatggcaacggcgcaagcttgggaagagtttgcaggattggagtactatttccatacagttggagcttgcactgaaaagagagtttggtgaaactagaaatgtcttgcagaatgagaatatgtgcatgagagtatcaaagcaacttcttatttggactcaggaacatgcatactgggttgcttttcggtttctcacattgggttttgaacttgacctatattctccgggcgaatacagtatggtgtactggtacatgtatgtggtgctcacaaagctaatagaaaagatgcagttacgagttctggccagtagtgaaacctcacgaagaaaggggaaaaagaagaaggatcatttgaaggattcagctcgggatatggcattttcgtcgtcttgtttattgcctcaatgctatcttttgctatcagagggactctcgatgatgctagctgtcctcagaaacgaaagtaggtcattccaattaccaagtatcttcaacactgaacaagagagattcatgcagcactttgatcttcttctgaaagctcgagtccctgagcacatttccttctacagtttcaaggaatcatcttcccgggcaggcatgtcggatttggtgaagtacaacttcttcaaggaaattcagaagatagtgccctcactacggggcagctttgcaagtgaaccagaaaaactcgctgaggtccgtcggatagagcaggtggctgagcacaacaggatagccctaaatattatcagccaagttggagctggcgatccgtctctgagggtctcgtttgagtttacacaccaccctcacttcgcagtggcagttgtgaagagatcatgattcaagtttggcatcgccaattctttacccttctcaatcttgatagtgatagcggatgattcttgttcacgtgttgctcacgtgtttattggttctccagagcgcaagcaacaccatgtgttttaggctgtacacaaacaccattagcaattttgtaggcaagataagaaaaaaaaaacatatgctggggaaaaaagtcctttcccctggcattattttgtaagcaaatttttttagctcactttgttatgcgaaacatgattatacagatgtgtaatttgagtcgtaattcgttactggtatgacaaggacgacaattttctcttgtttggcattttctattttgcggtgataactgactagtattttcc

SEQ ID NO: 44651 - DNA, 2722 bp, Zea Mays
cctggttcctcgtcctcctagtcaccacgcaaccagtaaaaacattcccccaatcccgaacccctccgccgccgccgccgccgccgccgccgtggccaaggagcaagaaagggacacggcctatcccttggtcgcggcgccagatctcgccgctgctcgcctctcatccatggaggcgagatcctcgtcgtccgcggccgcagtgccgccgcccctctccataccttcgtccagcgaccagtgcgtctgggctgacgcctcgccgctcctcgccgccgcgtgccgtgatctcgaggatggggaacttgtacatggagaaaactttagtctatttgctgcaatgtctgcattggaaataatggatccaaaaatggattctggaattgagagaagtcgatacaactccattgatgaagcaatagaagatggtgttgccccaatcccacttagcttggacaggacacttgatgttcaacgctctattgatgtcatggatcatcttttctcatgcaacatggcacaaggggcacactctagctcagactgtatttacatgtatctaccttatgagaatggaaagaacttcatcgcatgctgtactaaatagcttttgcaggattttgcgtgctacttgtaatgctgtcatttctgctgtttctactgcccgaactcatgaggaagaggatctctttactatgtcctttggtctgcctttgagagatgaaggtgatgataagtgcctgtcaattctaaactcagtcgaagagataatatctcgtcaattacgtgcatgtaaagcccaggcgttgtccaagaaaaaaacactagaaggtcttgaatcccttcaagataatcctgatctggaggaggattactgcagagctctgttatgcagattacgttttcgtaagcatttctaccatgttattatgtgcatgaggaaacctcatggaagaggattggagttggcccggaagcatgttgcttcatgcttgacagagcttaatttgatgcataagtctcggaagtttctcaagtcccagtccagcactatggtacagcaaagtgatggaaactgcaccactgcatctggttgtcagcctgttggctttgatgttagcttaaacagcagacttttgagtcccacaccgccacgtgcagtaaaagttcttagctggagcaatgcaatcaggtactttgagaggcttctgcatgatcttgatgtcatctgcgctttgtcgctcaatccggtgcttgataatgtgcttcactttattgtccagttccaaaaaacagtgccagatttggttcctagagcatttcttcagactttgttggtccaagatggtaaactttatggggaatacttcttttctgatgtcatttcaagggctttatcactaccggacattataggagataaggagtttcagatgaatgagtttgtggtgcagctaggtcagttggttatcaacctgataaaaattctttgtacaaacactgcatggcaacggcgcaagcttgggaagagtttgcaggattggagtactatttccatacagttggagcttgcactgaaaagagagtttggtgaaactagaaatgtcttgcagaatgagaatatgtgcatgagagtatcaaagcaacttcttatttggactcaggaacatgcatactgggttgcttttcggtttctcacattgggttttgaacttgacctatattctccgggcgaatacagtatggtgtactggtacatgtatgtggtgctcacaaagctaatagaaaagatgcagttacgagttctggccagtagtgaaacctcacgaagaaaggggaaaaagaagaaggatcatttgaaggattcagctcgggatatggcattttcgtcgtcttgtttattgcctcaatgctatcttttgctatcagagggactctcgatgatgctagctgtcctcagaaacgaaagtaggtcattccaattaccaagtatcttcaacactgaacaagagagattcatgcagcactttgatcttcttctgaaagctcgagtccctgagcacatttccttctacagtttcaaggaatcatcttcccgggcaggcatgtcggatttggtgaagtacaacttcttcaaggaaattcagaagatagtgccctcactacggggcagctttgcaagtgaaccagaaaaactcgctgaggtccgtcggatagagcaggtggctgagcacaacaggatagccctaaatattatcagccaagttggagctggcgatccgtctctgagggtctcgtttgagtttacacaccaccctcacttcgcagtggcagttgtgaagagatcatgattcaagtttggcatcgccaattctttacccttctcaatcttgatagtgatagcggatgattcttgttcacgtgttgctcacgtgtttattggttctccagagcgcaagcaacaccatgtgttttaggctgtacacaaacaccattagcaattttgtaggcaagataagaaaaaaaaaacatatgctggggaaaaaagtcctttcccctggcattattttgtaagcaaatttttttagctcactttgttatgcgaaacatgattatacagatgtgtaatttgagtcgtaattcgttactggtatgacaaggacgacaattttctcttgtttggcattttctattttgcggtgataactgactagtattttcc

SEQ ID NO: 44652 - DNA, 2744 bp, Zea Mays
gccagcggctggttggctgtgccctggttcctcgtcctcctagtcaccacgcaaccagtaaaaacattcccccaatcccgaacccctccgccgccgccgccgccgccgccgccgtggccaaggagcaagaaagggacacggcctatcccttggtcgcggcgccagatctcgccgctgctcgcctctcatccatggaggcgagatcctcgtcgtccgcggccgcagtgccgccgcccctctccataccttcgtccagcgaccagtgcgtctgggctgacgcctcgccgctcctcgccgccgcgtgccgtgatctcgaggatggggaacttgtacatggagaaaactttagtctatttgctgcaatgtctgcattggaaataatggatccaaaaatggattctggaattgagagaagtcgatacaactccattgatgaagcaatagaagatggtgttgccccaatcccacttagcttggacaggacacttgatgttcaacgctctattgatgtcatggatcatcttttctcatgtgaggcaacatggcacaaggggcacactctagctcagactgtatttacatgtatctaccttatgagaatggaaagaacttcatcgcatgctgtactaaatagcttttgcaggattttgcgtgctacttgtaatgctgtcatttctgctgtttctactgcccgaactcatgaggaagaggatctctttactatgtcctttggtctgcctttgagagatgaaggtgatgataagtgcctgtcaattctaaactcagtcgaagagataatatctcgtcaattacgtgcatgtaaagcccaggcgttgtccaagaaaaaaacactagaaggtcttgaatcccttcaagataatcctgatctggaggaggattactgcagagctctgttatgcagattacgttttccatttctaccatgttattatgtgcatgaggaaacctcatggaagaggattggagttggcccggaagcatgttgcttcatgcttgacagagcttaatttgatgcataagtctcggaagtttctcaagtcccagtccagcactatggtacagcaaagtgatggaaactgcaccactgcatctggttgtcagcctgttggctttgatgttagcttaaacagcagacttttgagtcccacaccgccacgtgcagtaaaagttcttagctggagcaatgcaatcaggtactttgagaggcttctgcatgatcttgatgtcatctgcgctttgtcgctcaatccggtgcttgataatgtgcttcactttattgtccagttccaaaaaacagtgccagatttggttcctagagcatttcttcagactttgttggtccaagatggtaaactttatggggaatacttcttttctgatgtcatttcaagggctttatcactaccggacattataggagataaggagtttcagatgaatgagtttgtggtgcagctaggtcagttggttatcaacctgataaaaattctttgtacaaacactgcatggcaacggcgcaagcttgggaagagtttgcaggattggagtactatttccatacagttggagcttgcactgaaaagagagtttggtgaaactagaaatgtcttgcagaatgagaatatgtgcatgagagtatcaaagcaacttcttatttggactcaggaacatgcatactgggttgcttttcggtttctcacattgggttttgaacttgacctatattctccgggcgaatacagtatggtgtactggtacatgtatgtggtgctcacaaagctaatagaaaagatgcagttacgagttctggccagtagtgaaacctcacgaagaaaggggaaaaagaagaaggatcatttgaaggattcagctcgggatatggcattttcgtcgtcttgtttattgcctcaatgctatcttttgctatcagagggactctcgatgatgctagctgtcctcagaaacgaaagtaggtcattccaattaccaagtatcttcaacactgaacaagagagattcatgcagcactttgatcttcttctgaaagctcgagtccctgagcacatttccttctacagtttcaaggaatcatcttcccgggcaggcatgtcggatttggtgaagtacaacttcttcaaggaaattcagaagatagtgccctcactacggggcagctttgcaagtgaaccagaaaaactcgctgaggtccgtcggatagagcaggtggctgagcacaacaggatagccctaaatattatcagccaagttggagctggcgatccgtctctgagggtctcgtttgagtttacacaccaccctcacttcgcagtggcagttgtgaagagatcatgattcaagtttggcatcgccaattctttacccttctcaatcttgatagtgatagcggatgattcttgttcacgtgttgctcacgtgtttattggttctccagagcgcaagcaacaccatgtgttttaggctgtacacaaacaccattagcaattttgtaggcaagataagaaaaaaaaaacatatgctggggaaaaaagtcctttcccctggcattattttgtaagcaaatttttttagctcactttgttatgcgaaacatgattatacagatgtgtaatttgagtcgtaattcgttactggtatgacaaggacgacaattttctcttgtttggcattttctattttgcggtgataactgactagtattttcc

SEQ ID NO: 44653 - DNA, 2749 bp, Zea Mays
gccagcggctggttggctgtgccctggttcctcgtcctcctagtcaccacgcaaccagtaaaaacattcccccaatcccgaacccctccgccgccgccgccgccgccgccgccgtggccaaggagcaagaaagggacacggcctatcccttggtcgcggcgccagatctcgccgctgctcgcctctcatccatggaggcgagatcctcgtcgtccgcggccgcagtgccgccgcccctctccataccttcgtccagcgaccagtgcgtctgggctgacgcctcgccgctcctcgccgccgcgtgccgtgatctcgaggatggggaacttgtacatggagaaaactttagtctatttgctgcaatgtctgcattggaaataatggatccaaaaatggattctggaattgagagaagtcgatacaactccattgatgaagcaatagaagatggtgttgccccaatcccacttagcttggacaggacacttgatgttcaacgctctattgatgtcatggatcatcttttctcatgtgaggcaacatggcacaaggggcacactctagctcagactgtatttacatgtatctaccttatgagaatggaaagaacttcatcgcatgctgtactaaatagcttttgcaggattttgcgtgctacttgtaatgctgtcatttctgctgtttctactgcccgaactcatgaggaagaggatctctttactatgtcctttggtctgcctttgagagatgaaggtgatgataagtgcctgtcaattctaaactcagtcgaagagataatatctcgtcaattacgtgcatgtaaagcccaggcgttgtccaagaaaaaaacactagaaggtcttgaatcccttcaagataatcctgatctggaggaggattactgcagagctctgttatgcagattacgttttcgtaagcatttctaccatgttattatgtgcatgaggaaacctcatggaagaggattggagttggcccggaagcatgttgcttcatgcttgacagagcttaatttgatgcataagtctcggaagtttctcaagtcccagtccagcactatggtacagcaaagtgatggaaactgcaccactgcatctggttgtcagcctgttggctttgatgttagcttaaacagcagacttttgagtcccacaccgccacgtgcagtaaaagttcttagctggagcaatgcaatcaggtactttgagaggcttctgcatgatcttgatgtcatctgcgctttgtcgctcaatccggtgcttgataatgtgcttcactttattgtccagttccaaaaaacagtgccagatttggttcctagagcatttcttcagactttgttggtccaagatggtaaactttatggggaatacttcttttctgatgtcatttcaagggctttatcactaccggacattataggagataaggagtttcagatgaatgagtttgtggtgcagctaggtcagttggttatcaacctgataaaaattctttgtacaaacactgcatggcaacggcgcaagcttgggaagagtttgcaggattggagtactatttccatacagttggagcttgcactgaaaagagagtttggtgaaactagaaatgtcttgcagaatgagaatatgtgcatgagagtatcaaagcaacttcttatttggactcaggaacatgcatactgggttgcttttcggtttctcacattgggttttgaacttgacctatattctccgggcgaatacagtatggtgtactggtacatgtatgtggtgctcacaaagctaatagaaaagatgcagttacgagttctggccagtagtgaaacctcacgaagaaaggggaaaaagaagaaggatcatttgaaggattcagctcgggatatggcattttcgtcgtcttgtttattgcctcaatgctatcttttgctatcagagggactctcgatgatgctagctgtcctcagaaacgaaagtaggtcattccaattaccaagtatcttcaacactgaacaagagagattcatgcagcactttgatcttcttctgaaagctcgagtccctgagcacatttccttctacagtttcaaggaatcatcttcccgggcaggcatgtcggatttggtgaagtacaacttcttcaaggaaattcagaagatagtgccctcactacggggcagctttgcaagtgaaccagaaaaactcgctgaggtccgtcggatagagcaggtggctgagcacaacaggatagccctaaatattatcagccaagttggagctggcgatccgtctctgagggtctcgtttgagtttacacaccaccctcacttcgcagtggcagttgtgaagagatcatgattcaagtttggcatcgccaattctttacccttctcaatcttgatagtgatagcggatgattcttgttcacgtgttgctcacgtgtttattggttctccagagcgcaagcaacaccatgtgttttaggctgtacacaaacaccattagcaattttgtaggcaagataagaaaaaaaaaacatatgctggggaaaaaagtcctttcccctggcattattttgtaagcaaatttttttagctcactttgttatgcgaaacatgattatacagatgtgtaatttgagtcgtaattcgttactggtatgacaaggacgacaattttctcttgtttggcattttctattttgcggtgataactgactagtattttcc

SEQ ID NO: 44654 - DNA, 3056 bp, Zea Mays
agtcggcactctcatctccactctcccccaaaaccctataggctatagcggcagggagaaagtgagcacccacctcaacccgcccgccgccatggcgctccgccgcatcacaccgcggaggagacccgttctccccgtcccccgtgccttctcctcgagtccgccgtttcctccacccccgcctccggcgaacgaccccgaccccgacgccgcccaacccccatcctcttctccgccccctaattccggcgcgccgcggaacccggagtcctcgttcttccaggacatcaaagatcgcctccgttcgtctcccacgtctccgtctccgcgccggatcccgacgaccctgccccgccccgaccctgcgcgcggcgctccttcttcgggaccgcccattggagacatccgccggatgctccagaacttccgcttaaccggctcaaccagcgacgcgccctccacctccgctcccggatccaacccctccttcatggacctgctcaagaaccacttggaccagggtgccaacgcccggcaggcggagctcggcttcaatgccatcggagagagcctcaagcgcccccgtccgccgaagccttttataaccccttcgtcgagaaacatcttctgccgggagctagagaggacctcgaaggctttaggtgcgcggcaggaagagaatggctctgccattgagcttaaggggagctacagctacgaagagcttgggaagagactaggggagctgcggccggcgggtgcaggtaaagacggtaaggagtggttctcgctcaaggagctgcaggggcgtatcgccaagctcgcggagcaggagagccagcttgccgggccgttttcggaaatgcggcggggcattaggaacctgcagaaacaaggaaaaccgggtcggcctgtaaacatccaagcactgctgaaccctgtcggtcagccgacgccagactacatgagtgggcctccgcaggtggaattgttagagaagtacttccatccagatcatatgtcatccgaagagaagatgaaattggagctccaaagggtgagggacgaattcaagatgtccgagaatgactgtggttctgcacgagttcaaattgcccagctgactctgaaaatcaagcatctgtcaactgttctacacaagaaggtcttgaatcccttcaagataatcctgatctggaggaggattactgcagagctctgttatgcagattacgttttcgtaagcatttctaccatgttattatgtgcatgaggaaacctcatggaagaggattggagttggcccggaagcatgttgcttcatgcttgacagagcttaatttgatgcataagtctcggaagtttctcaagtcccagtccagcactatggtacagcaaagtgatggaaactgcaccactgcatctggttgtcagcctgttggctttgatgttagcttaaacagcagacttttgagtcccacaccgccacgtgcagtaaaagttcttagctggagcaatgcaatcaggtactttgagaggcttctgcatgatcttgatgtcatctgcgctttgtcgctcaatccggtgcttgataatgtgcttcactttattgtccagttccaaaaaacagtgccagatttggttcctagagcatttcttcagactttgttggtccaagatggtaaactttatggggaatacttcttttctgatgtcatttcaagggctttatcactaccggacattataggagataaggagtttcagatgaatgagtttgtggtgcagctaggtcagttggttatcaacctgataaaaattctttgtacaaacactgcatggcaacggcgcaagcttgggaagagtttgcaggattggagtactatttccatacagttggagcttgcactgaaaagagagtttggtgaaactagaaatgtcttgcagaatgagaatatgtgcatgagagtatcaaagcaacttcttatttggactcaggaacatgcatactgggttgcttttcggtttctcacattgggttttgaacttgacctatattctccgggcgaatacagtatggtgtactggtacatgtatgtggtgctcacaaagctaatagaaaagatgcagttacgagttctggccagtagtgaaacctcacgaagaaaggggaaaaagaagaaggatcatttgaaggattcagctcgggatatggcattttcgtcgtcttgtttattgcctcaatgctatcttttgctatcagagggactctcgatgatgctagctgtcctcagaaacgaaagtaggtcattccaattaccaagtatcttcaacactgaacaagagagattcatgcagcactttgatcttcttctgaaagctcgagtccctgagcacatttccttctacagtttcaaggaatcatcttcccgggcaggcatgtcggatttggtgaagtacaacttcttcaaggaaattcagaagatagtgccctcactacggggcagctttgcaagtgaaccagaaaaactcgctgaggtccgtcggatagagcaggtggctgagcacaacaggatagccctaaatattatcagccaagttggagctggcgatccgtctctgagggtctcgtttgagtttacacaccaccctcacttcgcagtggcagttgtgaagagatcatgattcaagtttggcatcgccaattctttacccttctcaatcttgatagtgatagcggatgattcttgttcacgtgttgctcacgtgtttattggttctccagagcgcaagcaacaccatgtgttttaggctgtacacaaacaccattagcaattttgtaggcaagataagaaaaaaaaaacatatgctggggaaaaaagtcctttcccctggcattattttgtaagcaaatttttttagctcactttgttatgcgaaacatgattatacagatgtgtaatttgagtcgtaattcgttactggtatgacaaggacgacaattttctcttgtttggcattttctattttgcggtgataactgactagtattttcc

SEQ ID NO: 44655 - DNA, 1869 bp, Zea Mays
agtcggcactctcatctccactctcccccaaaaccctataggctatagcggcagggagaaagtgagcacccacctcaacccgcccgccgccatggcgctccgccgcatcacaccgcggaggagacccgttctccccgtcccccgtgccttctcctcgagtccgccgtttcctccacccccgcctccggcgaacgaccccgaccccgacgccgcccaacccccatcctcttctccgccccctaattccggcgcgccgcggaacccggagtcctcgttcttccaggacatcaaagatcgcctccgttcgtctcccacgtctccgtctccgcgccggatcccgacgaccctgccccgccccgaccctgcgcgcggcgctccttcttcgggaccgcccattggagacatccgccggatgctccagaacttccgcttaaccggctcaaccagcgacgcgccctccacctccgctcccggatccaacccctccttcatggacctgctcaagaaccacttggaccagggtgccaacgcccggcaggcggagctcggcttcaatgccatcggagagagcctcaagcgcccccgtccgccgaagccttttataaccccttcgtcgagaaacatcttctgccgggagctagagaggacctcgaaggctttaggtgcgcggcaggaagagaatggctctgccattgagcttaaggggagctacagctacgaagagcttgggaagagactaggggagctgcggccggcgggtgcaggtaaagacggtaaggagtggttctcgctcaaggagctgcaggggcgtatcgccaagctcgcggagcaggagagccagcttgccgggccgttttcggaaatgcggcggggcattaggaacctgcagaaacaaggaaaaccgggtcggcctgtaaacatccaagcactgctgaaccctgtcggtcagccgacgccagactacatgagtgggcctccgcaggtggaattgttagagaagatcatatgtcatccgaagagaagatgaaattggagctccaaagggtgagggacgaattcaagatgtccgagaatgactgtggttctgcacgagttcaaattgcccagctgactctgaaaatcaagcatctgtcaactgttctacacaagaaggataaacattctagaaaggggcttcaggagatggtccaaaggaggaagaaatacctgaaatacttgcgaaggacggactgggactcttactgtcttgttctgtcaaagctggggcttcgcgatgtgcccgagtacaaagctcctgactacaagagcaaagcaaccaccaaggccaaatctaagaagagcaagagcaagggcaagaagaggaaggtgaaggcataaaagtagcgaacaaatatgccctgtttttggtcttgaattgcatgctcagaaaatgaatcgagaagacgctcaggcctgagatggcttgatccaatcttgcaatgctgttttttttgcatggtcagaaaataaatcgagaagacgctcaggccccaattggctcgatccaatcttgtaatgttgttttcgaagctgtttgtaataaccatttcactgattcggtccagccttcaaacaatcgccttttagttctccccctcaatttgcgagaacggatgtggagtaaccgacactagtactataccgttgcattatcaccagtttgtaactttaccagaattcttgtttgtccttgacgtaatttggacaaatttcttgtacaaaaaatacatgaaccatatgtcaggcttgctagcttagcacgaatacgatactgtgtttggccgtatcgtgaagatcggagcggcaagacgtgttagatttggaaaaaaa

SEQ ID NO: 44656 - DNA, 1881 bp, Zea Mays
agtcggcactctcatctccactctcccccaaaaccctataggctatagcggcagggagaaagtgagcacccacctcaacccgcccgccgccatggcgctccgccgcatcacaccgcggaggagacccgttctccccgtcccccgtgccttctcctcgagtccgccgtttcctccacccccgcctccggcgaacgaccccgaccccgacgccgcccaacccccatcctcttctccgccccctaattccggcgcgccgcggaacccggagtcctcgttcttccaggacatcaaagatcgcctccgttcgtctcccacgtctccgtctccgcgccggatcccgacgaccctgccccgccccgaccctgcgcgcggcgctccttcttcgggaccgcccattggagacatccgccggatgctccagaacttccgcttaaccggctcaaccagcgacgcgccctccacctccgctcccggatccaacccctccttcatggacctgctcaagaaccacttggaccagggtgccaacgcccggcaggcggagctcggcttcaatgccatcggagagagcctcaagcgcccccgtccgccgaagccttttataaccccttcgtcgagaaacatcttctgccgggagctagagaggacctcgaaggctttaggtgcgcggcaggaagagaatggctctgccattgagcttaaggggagctacagctacgaagagcttgggaagagactaggggagctgcggccggcgggtgcaggtaaagacggtaaggagtggttctcgctcaaggagctgcaggggcgtatcgccaagctcgcggagcaggagagccagcttgccgggccgttttcggaaatgcggcggggcattaggaacctgcagaaacaaggaaaaccgggtcggcctgtaaacatccaagcactgctgaaccctgtcggtcagccgacgccagactacatgagtgggcctccgcaggtggaattgttagagaagtacttccatccagatcatatgtcatccgaagagaagatgaaattggagctccaaagggtgagggacgaattcaagatgtccgagaatgactgtggttctgcacgagttcaattgcccagctgactctgaaaatcaagcatctgtcaactgttctacacaagaaggataaacattctagaaaggggcttcaggagatggtccaaaggaggaagaaatacctgaaatacttgcgaaggacggactgggactcttactgtcttgttctgtcaaagctggggcttcgcgatgtgcccgagtacaaagctcctgactacaagagcaaagcaaccaccaaggccaaatctaagaagagcaagagcaagggcaagaagaggaaggtgaaggcataaaagtagcgaacaaatatgccctgtttttggtcttgaattgcatgctcagaaaatgaatcgagaagacgctcaggcctgagatggcttgatccaatcttgcaatgctgttttttttgcatggtcagaaaataaatcgagaagacgctcaggccccaattggctcgatccaatcttgtaatgttgttttcgaagctgtttgtaataaccatttcactgattcggtccagccttcaaacaatcgccttttagttctccccctcaatttgcgagaacggatgtggagtaaccgacactagtactataccgttgcattatcaccagtttgtaactttaccagaattcttgtttgtccttgacgtaatttggacaaatttcttgtacaaaaaatacatgaaccatatgtcaggcttgctagcttagcacgaatacgatactgtgtttggccgtatcgtgaagatcggagcggcaagacgtgttagatttggaaaaaaa

SEQ ID NO: 44657 - DNA, 1888 bp, Zea Mays
cgctggtcagcactcagcagtcggcactctcatctccactctcccccaaaaccctataggctatagcggcagggagaaagtgagcacccacctcaacccgcccgccgccatggcgctccgccgcatcacaccgcggaggagacccgttctccccgtcccccgtgccttctcctcgagtccgccgtttcctccacccccgcctccggcgaacgaccccgaccccgacgccgcccaacccccatcctcttctccgccccctaattccggcgcgccgcggaacccggagtcctcgttcttccaggacatcaaagatcgcctccgttcgtctcccacgtctccgtctccgcgccggatcccgacgaccctgccccgccccgaccctgcgcgcggcgctccttcttcgggaccgcccattggagacatccgccggatgctccagaacttccgcttaaccggctcaaccagcgacgcgccctccacctccgctcccggatccaacccctccttcatggacctgctcaagaaccacttggaccagggtgccaacgcccggcaggcggagctcggcttcaatgccatcggagagagcctcaagcgcccccgtccgccgaagccttttataaccccttcgtcgagaaacatcttctgccgggagctagagaggacctcgaaggctttaggtgcgcggcaggaagagaatggctctgccattgagcttaaggggagctacagctacgaagagcttgggaagagactaggggagctgcggccggcgggtgcaggtaaagacggtaaggagtggttctcgctcaaggagctgcaggggcgtatcgccaagctcgcggagcaggagagccagcttgccgggccgttttcggaaatgcggcggggcattaggaacctgcagaaacaaggaaaaccgggtcggcctgtaaacatccaagcactgctgaaccctgtcggtcagccgacgccagactacatgagtgggcctccgcaggtggaattgttagagaaggatcatatgtcatccgaagagaagatgaaattggagctccaaagggtgagggacgaattcaagatgtccgagaatgactgtggttctgcacgagttcaaattgcccagctgactctgaaaatcaagcatctgtcaactgttctacacaagaaggataaacattctagaaaggggcttcaggagatggtccaaaggaggaagaaatacctgaaatacttgcgaaggacggactgggactcttactgtcttgttctgtcaaagctggggcttcgcgatgtgcccgagtacaaagctcctgactacaagagcaaagcaaccaccaaggccaaatctaagaagagcaagagcaagggcaagaagaggaaggtgaaggcataaaagtagcgaacaaatatgccctgtttttggtcttgaattgcatgctcagaaaatgaatcgagaagacgctcaggcctgagatggcttgatccaatcttgcaatgctgttttttttgcatggtcagaaaataaatcgagaagacgctcaggccccaattggctcgatccaatcttgtaatgttgttttcgaagctgtttgtaataaccatttcactgattcggtccagccttcaaacaatcgccttttagttctccccctcaatttgcgagaacggatgtggagtaaccgacactagtactataccgttgcattatcaccagtttgtaactttaccagaattcttgtttgtccttgacgtaatttggacaaatttcttgtacaaaaaatacatgaaccatatgtcaggcttgctagcttagcacgaatacgatactgtgtttggccgtatcgtgaagatcggagcggcaagacgtgttagatttggaaaaaaa

SEQ ID NO: 44658 - DNA, 534 bp, Zea Mays
caaagctctgccaggacaaacggtaggttgctccgtatggttgatgggttgaacttcaaggatttcgttgcgtttctttctacattcagtgcaaaagccagccttcgtcagaagatcgagtttatattcaaggtttatgacatcgatggcaagggaaaaattaccttcaaggatctgctagaggttttacgggacctaacagggtcattcatgtccgaggaacaaagagagcaagtggtaactgaagttctggaagaagcagggtacacgagggattacgcattctcgcttgaagattttatccagatcatcgaccatcctggccttaagatggaggtggaagtgccaatcgactagtgaaatgtggaaaacaagcttccggttttgtctgcagaacatggttagtgtcgtgtagcagggcaatatgaccgttcactttcgtcatcttctttgtttccggtccacttgcctaaacttttgtaacctttgttgacttggccttttcgaatatatcaaaaacaaaacaaattttgc

SEQ ID NO: 44659 - DNA, 671 bp, Zea Mays
agaaactctgccaaacatggcctcatccacatcagtcgcactatctgggtctgggcaaagcttggttgggtttcctctgtatctgctgccttgctgaagaacagcgtcagttgtgcttgccataacaacttgaccgataggatacacggctacaacactagaggttgctccgtatggttgatgggttgaacttcaaggatttcgttgcgtttctttctacattcagtgcaaaagccagccttcgtcagaagatcgagtttatattcaaggtttatgacatcgatggcaagggaaaaattaccttcaaggatctgctagaggttttacgggacctaacagggtcattcatgtccgaggaacaaagagagcaagtggtaactgaagttctggaagaagcagggtacacgagggattacgcattctcgcttgaagattttatccagatcatcgaccatcctggccttaagatggaggtggaagtgccaatcgactagtgaaatgtggaaaacaagcttccggttttgtctgcagaacatggttagtgtcgtgtagcagggcaatatgaccgttcactttcgtcatcttctttgtttccggtccacttgcctaaacttttgtaacctttgttgacttggccttttcgaatatatcaaaaacaaaacaaattttgc

SEQ ID NO: 44660 - DNA, 792 bp, Zea Mays
gtgactgtcgtcccgtgccctcgcgtccctttcccttcttcccatccacgccagccaagttcaccgccgcgctcttcggcggcaactactgttggatcgtagggcgaaggaaggaaggaaggggagccatgggaaacgcgtcgtccatgctgacccatctcgcagcaggagatcgtgtcgctgtacgagcgcttctgccagttggaccgcagcgccaagggcttcatctccgaggacgagttcctctccatccccgagttctccctcaacccgctctccaagaggttgctccgtatggttgatgggttgaacttcaaggatttcgttgcgtttctttctacattcagtgcaaaagccagccttcgtcagaagatcgagtttatattcaaggtttatgacatcgatggcaagggaaaaattaccttcaaggatctgctagaggttttacgggacctaacagggtcattcatgtccgaggaacaaagagagcaagtggtaactgaagttctggaagaagcagggtacacgagggattacgcattctcgcttgaagattttatccagatcatcgaccatcctggccttaagatggaggtggaagtgccaatcgactagtgaaatgtggaaaacaagcttccggttttgtctgcagaacatggttagtgtcgtgtagcagggcaatatgaccgttcactttcgtcatcttctttgtttccggtccacttgcctaaacttttgtaacctttgttgacttggccttttcgaatatatcaaaaacaaaacaaattttgc

SEQ ID NO: 44661 - DNA, 736 bp, Zea Mays
gtgactgtcgtcccgtgccctcgcgtccctttcccttcttcccatccacgccagccaagttcaccgccgcgctcttcggcggcaactactgttggatcgtagggcgaaggaaggaaggaaggggagccatgggaaacgcgtcgtccatgctgacccagtacgacatcgaggaggtgcaggagcactgcagctacctcttctcgcagcaggagatcgtgtcgctgtacgagcgcttctgccagttggaccgcagcgccaagggcttcatctccgaggacgagttcctctccatccccgagttctccctcaacccgctctccaagttatattcaaggtttatgacatcgatggcaagggaaaaattaccttcaaggatctgctagaggttttacgggacctaacagggtcattcatgtccgaggaacaaagagagcaagtggtaactgaagttctggaagaagcagggtacacgagggattacgcattctcgcttgaagattttatccagatcatcgaccatcctggccttaagatggaggtggaagtgccaatcgactagtgaaatgtggaaaacaagcttccggttttgtctgcagaacatggttagtgtcgtgtagcagggcaatatgaccgttcactttcgtcatcttctttgtttccggtccacttgcctaaacttttgtaacctttgttgacttggccttttcgaatatatcaaaaacaaaacaaattttgc

SEQ ID NO: 44662 - DNA, 1836 bp, Zea Mays
tgtcctatcatattgccacagctgtttgctcctttgccaagtttatatacgagatgttataacctttttggctggaaggacaattgggtgttttctttatcatttgcccctctctagaaattgttacatgtagccttagctttcctgtccaataatgatttgcctcctgtcacttagctttaccagatcggacttctgattccacgtcgcgtgctagcaacaaccagctagctgtatcactacttaactactgcgtgctatctgtggtggcaacaaatggagagggtttgtgagaacaacttcgtcccgttcatccggtcaggggagtggtctgatattggaggtcgcgattacatggaagatgcccatgtgtgcatctctgatctggcgaagaattttggttctaactcagtggatgatgaagtcatctccttctacggggtgttcgatggccataacggcaaagacgcagcccattatgtccgtgataacttgccacgggtcattgtagaagatgctgattttcctcttgagcttgaaaaggtagtgaagaggtcatttgtgcagactgatagtaagtttgcagagaaattctctcatcacaagggactctgttctggaacgacggcacttacagcaatgatttttggaaggtcccttctggtggccaatgccggtgactgcagagcggtgctatcgcggcgtggcaccgccattgaaatgtccaaggaccacaggccctgctgcatgaacgagagaaagcgcgtggagtcactgggtggctacgtggacgacggctacctaaacggccagctggccgtcaccagagcgctgggcgactggcacctggaggtcatgaaagggacgggccgggcaggagggggaggggcagggggagggcccctgagcgcggagccggagctgaagatggtcacgctgagcaaggacgacgagttcctgatcatcggcagcgacggcgtgtgggactccttctcgagccagaacgccgtgtgacttggcgcggcggcgcctccaggaccacaacgacccgcggctgtgctgcagggaggtcgtggacgaggcgctgcggcggggcgccagggacaacctgacggcggtgctggtcgcgttccaccgggacgcgcctcccagggcccaggggggccgagcgagcaggagtacgggcagcagggtcgcgccgagcatatcggccgaggggcttcacagcctccgagtgctcctggacgaaggccagtgaggcagtgagtgactgcgcggcgccattgccacgttgctgagtgagtgctgactgtaaagtagcggatttggacacagtgaggcccgtggggctgcgcggcgccagtgaggcccgtggaaaccaccagcagccaggtcagcagcatccagtgctcaaaagaatttggacacagtgaacctggatggacccatccatgcaagccaagcgaacggacaagatctggtcggttgatttcacgtcgtaccatccgatctgccataaggacatgtacagtggtgtttaatgtagagtctcttaaggtgtttaagagggttatttgcaaaaaaaaaattttagaaccgtctctccgtgaagagacgcttctggctcgtaaaccaagtagcaacagacgcctcacttcccactgtacgaatttgtcgtctgttctatcgatctgatgctatacaaatacatttaattctgtatttattaatagactatgtttatagacactccattgtacaatagagtctcttagttgtctcctgtgattggagaaccgttttggtgtctctccactgtacatgccctaagtattc

SEQ ID NO: 44663 - DNA, 2030 bp, Zea Mays
ataatacccccccgtctcccttgtgttcttttcgttcgttcccctcgccctcctccctccctccccgtcgattctttcacaacaccaccaggcaccagcggaccagcagcaagcaatcgcgcttaatcactcgcccccgttacaaatccgagatattcccaaatatcttctcttgccctcccccaccgcctccgcctcggattccatcgccgcccttttccttccttctccccttgcccgcccgcccgcccgtccaggactgtccttggcgtttcttacgcagctcgtccttcgcgcttctttgccggccgttagagagaaagagagagagtgagacaggatcactcggtagtcgggatcgcgcggcgccaccgtaccccgcccgggacatgtgcgtggaggggctagacgacgcagcagggacgctcgccttcggagaccacgagaacgacaggcgcgacggtgccgcgatggagagggtttgtgagaacaacttcgtcccgttcatccggtcaggggagtggtctgatattggaggtcgcgattacatggaagatgcccatgtgtgcatctctgatctggcgaagaattttggttctaactcagtggatgatgaagtcatctccttctacggggtgttcgatggccataacggcaaagacgcagcccattatgtccgtgataacttgccacgggtcattgtagaagatgctgattttcctcttgagcttgaaaaggtagtgaagaggtcatttgtgcagactgatagtaagtttgcagagaaattctctcatcacaagggactctgttctggaacgacggcacttacagcaatgatttttggaaggtcccttctggtggccaatgccggtgactgcagagcggtgctatcgcggcgtggcaccgccattgaaatgtccaaggaccacaggccctgctgcatgaacgagagaaagcgcgtggagtcactgggtggctacgtggacgacggctacctaaacggccagctggccgtcaccagagcgctgggcgactggcacctggaggtcatgaaagggacgggccgggcaggagggggaggggcagggggagggcccctgagcgcggagccggagctgaagatggtcacgctgagcaaggacgacgagttcctgatcatcggcagcgacggcgtgtgggactccttctcgagccagaacgccgtgtgacttggcgcggcggcgcctccaggaccacaacgacccgcggctgtgctgcagggaggtcgtggacgaggcgctgcggcggggcgccagggacaacctgacggcggtgctggtcgcgttccaccgggacgcgcctcccagggcccaggggggccgagcgagcaggagtacgggcagcagggtcgcgccgagcatatcggccgaggggcttcacagcctccgagtgctcctggacgaaggccagtgaggcagtgagtgactgcgcggcgccattgccacgttgctgagtgagtgctgactgtaaagtagcggatttggacacagtgaggcccgtggggctgcgcggcgccagtgaggcccgtggaaaccaccagcagccaggtcagcagcatccagtgctcaaaagaatttggacacagtgaacctggatggacccatccatgcaagccaagcgaacggacaagatctggtcggttgatttcacgtcgtaccatccgatctgccataaggacatgtacagtggtgtttaatgtagagtctcttaaggtgtttaagagggttatttgcaaaaaaaaaattttagaaccgtctctccgtgaagagacgcttctggctcgtaaaccaagtagcaacagacgcctcacttcccactgtacgaatttgtcgtctgttctatcgatctgatgctatacaaatacatttaattctgtatttattaatagactatgtttatagacactccattgtacaatagagtctcttagttgtctcctgtgattggagaaccgttttggtgtctctccactgtacatgccctaagtattc

SEQ ID NO: 44664 - DNA, 313 bp, Zea Mays
gtttttcaggttgtaattttgttctgttgtggatggtgctaagtgccggtgggctcggccttcttctataagtatatcccgtctttagtttctctattgaggattgtcacttaagttaacatgtattttaaaacttataaatattttatacattttaaattgtaattctatttaatcattttcttttgtaatcactccgataattgtataatgtaaacttattgtaacatgtaatcattttgcaataaagaatttatttccgctgcaaatgttggtgtgtgatttgtgtttacttaatcttgcgatcttggcg

SEQ ID NO: 44665 - DNA, 1242 bp, Zea Mays
ctgtccagcgccctcccttctcgccgttcctatccccctgtcatggagttcgtcgtcagtccgagctcgcccatcctttgctcggtttcaacttggtcgtgcctgcagaccgcctcctttcctgcagcagattgtgtttatgtgcctatgtgtgttgaggagcgaaatccgtggaatctgggtgaagaagaaacatagcacgtccgtcgcttactagctgctgggtgaaaggattgaatcggctgtcgtggtcgtttagtgccgatcgagtcaactttagtcatgattcgctaattgatcacgtgatgtggacgacaagagccgagttgatcccaaaatgatgctggtgaacgaacctgaagcttggatgatctggtcaagtaccaggacgagagatgctccctaatcggatgtcatctaacaacactaacttagtgttatctcaggcaagccccggtgcatttgccacctccttactgtttttaaacttttatcacttatatgatgcattaggtggtaggagttgaatgattaaacctttgttgcataactttcttgaaatattgattaccatccttgatacctgttttaaaaagctagatgtgcttagtatgctcatagactaagaacaaaatgttttgatctatgaatcatgtttttataaagaaaagaggctagagtgatgaaggtatcaaaggccttgatgacttcatcatttcagtagggtacctctggcaggtaccaggttttcagaaataacttaatatgagaccaaactttgagcaggaaaggtcgcccgtctgtgtcgcttaaggaccgttccgattgttggcctgctgatctaggaccctttaactggccacatgcctcgtcatgggtaagcttagcctcgactggaccaataccagaaagaccggcccgcaatgggagtggagagatggcgagagtatcgtgtatccacctggcaagaggctggatggtggggtactgagctctcggttggcggggacccgttctggtcttgagaaacctggtggcgagttgacatatgcaagggttaagtgctacatatgtcgtgtggttggagatccccagctgggtattaatcgattcgaatcgccgaacttctcggatatgaagactggatcttcgaccctcatcatagataacaagtgaaactaaagatgctaaaatgaatttagtgtaggataagtgaatgctctagattagtaaatctaaatt

SEQ ID NO: 44666 - DNA, 1434 bp, Zea Mays
  misc_feature (1)..(2): n is a, c, g, or t
nnctgtccagcgccctcccttctcgccgttcctatccccctgtcatggagttcgtcgtcagtccgagctcgcccatcctttgctcggtttcaacttggtcgtgcctgcagaccgcctcctttcctgcagcaggtcagcgcctctctgtttttcccacggttgcgcacttatctgtagcagcccctcgctgccggacatcctccggtaatcccgcaccatatcccgcaccatccgcacccgtatggtgtttgataaaatgtccaagtggagtaccgtgtcatggacaaccctattagcgtcgtgggatgtttggtattttgtgcagcccatccacgacaccatcgaccctcggagcgaaatccgtggaatctgggtgaagaagaaacatagcacgtccgtcgcttactagctgctgggtgaaaggattgaatcggctgtcgtggtcgtttagtgccgatcgagtcaactttagtcatgattcgctaattgatcacgtgatgtggacgacaagagccgagttgatcccaaaatgatgctggtgaacgaacctgaagcttggatgatctggtcaagtaccaggacgagagatgctccctaatcggatgtcatctaacaacactaacttagtgttatctcaggcaagccccggtgcatttgccacctccttactgtttttaaacttttatcacttatatgatgcattaggtggtaggagttgaatgattaaacctttgttgcataactttcttgaaatattgattaccatccttgatacctgttttaaaaagctagatgtgcttagtatgctcatagactaagaacaaaatgttttgatctatgaatcatgtttttataaagaaaagaggctagagtgatgaaggtatcaaaggccttgatgacttcatcatttcagtagggtacctctggcaggtaccaggttttcagaaataacttaatatgagaccaaactttgagcaggaaaggtcgcccgtctgtgtcgcttaaggaccgttccgattgttggcctgctgatctaggaccctttaactggccacatgcctcgtcatgggtaagcttagcctcgactggaccaataccagaaagaccggcccgcaatgggagtggagagatggcgagagtatcgtgtatccacctggcaagaggctggatggtggggtactgagctctcggttggcggggacccgttctggtcttgagaaacctggtggcgagttgacatatgcaagggttaagtgctacatatgtcgtgtggttggagatccccagctgggtattaatcgattcgaatcgccgaacttctcggatatgaagactggatcttcgaccctcatcatagataacaagtgaaactaaagatgctaaaatgaatttagtgtaggataagtgaatgctctagattagtaaatctaaatt

SEQ ID NO: 44667 - DNA, 2204 bp, Zea Mays
caacagtcgcggcggctggctgcacctgcacgccaagaaaaatctgctgctttggtttccccagctcggcagctccgtctggtcgtgaattcctgacgcggacgcggtctcctcgcgggacgagcctaccctccctccagcaccagcagccaacaaactcctccgccggcggcgcgagatccggctaccacccaccgcggccgcaggtcaggggcttctatcgttctttgccatgccttccccctcctcctaccacccccaccaccgcgcccgcctccgctcgcgcgctgcgccgctcctcatcgtcgtcgtcctcgccgtcgtcgccgtcaccgagctcctccgcagccgcacgggcctccccgcgcccgcgcgccgggccggctctgccaccgccaccgcctccccctcctcccttgccagcaccaaccaaagcgtggcgcaacgcaagatcctgctcgacccggccttcacgccgcggctgccgcggcagagccagctgtcgctctccctctccgcgcgcaacgcgttgccgccccgcaacagggaccgcttcccgaccctccccgtgggccacctcaaggtcgtgctctacgtgcacaaccggccccgctacctccgcctcgtcgtcgatagcctctcccgcgtcgagggcatcggcgaggcgctgctcatcgtcagccacgacggctacttcccggagatggacaggatcgtgcagggcatcggcttctgccaggtgaagcaggtcttcgcgccctactcgccgcacctcttccctgacgccttccccggcgccagccccggggactgccagagcaaggacagggccaaggagaaggggtgccagggcgacccggaccagtacggcaaccaccgagctcccagaatcgtgtccctcaagcaccactggtggtggatgatgaacaccgtgtgggatgggatggaggagaccagggacttcgatggacacatcctcttcatcgaggaggaccactacatcttccccaatgcgtaccggaatgctcagctgcttgtggatttgaagccgaagaagtgcccccagtgctacgctatcaatttggccccgtccgatgtcaagtcgagaggcgaaggttgggagagcttggttgccgagaagatgggtaacattggctatgccttcaatagaacagtgtggaggaagatccatgccaaggctaagcagttttgcgcgtttgacgagtacaattgggatataaccatgtgggcgacggtgtacccgtcgttcggagctcctgtttacagtctcaggggatctaggagaagcgctgcgcatttcggcaaatgcggtctgcaccaaggccagggttcgagcaatgtctgcgtggataatggttcaggagctgtggaattggaggatgccgataaggtccctaatatcaaagctgattggccagtccgcgtcattcagaggcaggaggggtatcaagctggtttcaaaggatggggtggttggggtgaccggcgtgatcgtgagctatgtttgagttttgcatacatgtaccatgttaaagatccatcgtcatcgtaactaggcacacggttttttggcataagtagagccgctgttgtaatattgtttggcatgtgccctttgatccatacacggtttgtgctataaatagctactgtagttgcccatcgtcaaagtttttctagagtggttagtgtttttggttgatagacattggtgctagatttgggatcagccttcctaaacagtaccatttacttcagctcaatgatatgaataatgtttgtttgcaggacatatggctaagaatctgccacattatgtttgcttgaggtattaatttatccaggtgtttaatgctggagtacagttagaagatccctaatcaatttcttctcatttcagtcgtgtagcaagtgttgggcgaagtacaaagatgattattggccaacaaaaacatggagcttccgtgtgttgcagtttgctacacttgcctaacagtatttattaactgtagttagcatatatgtttatactcacctgttgctgccaagaataatactaaagttttctaataagtttcagtgatagaatccatgaagcacattgtctgaatttatagggcttggtgccacaatgaaactgtgataaaccagctttcttctttttctgaatgagttagtttgcg

SEQ ID NO: 44668 - DNA, 710 bp, Zea Mays
cggtgatctgctcatacagaaaagtcgttaaaacggaaaacatggaaactcgttaaagcggaacagtaaacagagtaccactgcaaaaaaaaaaaagcagggcagtaggcaacagtcgcggcggctggctgcacctgcacgccaagaaaaatctgctgctttggtttccccagctcggcagctccgtctggtcgtgaattcctgacgcggacgcggtctcctcgcgggacgagcctaccctccctccagcaccagcagccaacaaactcctccgccggcggcgcgagatccggctaccacccaccgcggccgcaggacatatggctaagaatctgccacattatgtttgcttgaggtattaatttatccaggtgtttaatgctggagtacagttagaagatccctaatcaatttcttctcatttcagtcgtgtagcaagtgttgggcgaagtacaaagatgattattggccaacaaaaacatggagcttccgtgtgttgcagtttgctacacttgcctaacagtatttattaactgtagttagcatatatgtttatactcacctgttgctgccaagaataatactaaagttttctaataagtttcagtgatagaatccatgaagcacattgtctgaatttatagggcttggtgccacaatgaaactgtgataaaccagctttcttctttttctgaatgagttagtttgcg

SEQ ID NO: 44669 - DNA, 972 bp, Zea Mays
gaggtaccaatacctaccccctccttatctgtcctgcttcgctccccttctcgagcctttcgttcaatttcccccaaatcggaccaaaccctaggagccgtagatttcgatttgaatcggaaacctggcatggcaatgccagatctcacagccaccgtgatcccaaagctaggcgaggccgacgacgagtcggtggagatccgggaggtgtgggccgacaacatggaggaggagttcgcgctgatccgcgacatcgtcgacgagtacccattcgtcgcgatggacacggagttcccgggcatcgtctgccggcccgttggcgccttccgctctcccgccgactacaactacgccaccctcaaggccaacgtggacatgctgcacctcatccagctcggccttaccttctccgggccgcgcggcgagctaccggtcctcggtgctggccgccgccgctgcgtctggcagttcaacttccgcgagttcgacgacgcgcgcgacatcttcgcgtccgactccatcgagctgctccgtcgcagcggcatcgacctccgcctcaacgccgagcgcggggtcgatgctcgccgcttcgccgagctcctcatgtcttccggcgtcgtgctcaatgactccgtatactgggttaccttccacgcaggatacgacttcgggtacctactgaagatcctcacttgcaattgcctcccagacacacaagccgggttctttaaacttatgaagatatatttcccgactgtgtatgacatcaagcatctcatgaagttctgcaacagcctgcacggtggactgaacaagcttgctgagctacttgatgtggagcgtgttggggagtcccatcaagctgggtccgatagcttggtcacgtcctgtgcattctggaagctcaaggattcattcttcacgggctcaacagagaaatatgcagaaataggattctgaatgcatcttgag

SEQ ID NO: 44670 - DNA, 765 bp, Zea Mays
cctttctccccttccctttctccatctcctctctctcgatccctccccgtctccgcgctccaagaaggtcgcttgccagttgccacaggccccactcatgcagccgagcggccgcgaaatgcagggcggcggcggaggcggcgggcaggacgacttcttggaccagatgctgtccacgctgccgcccgcgtggcccgacctcggctacggcaagtcgtcgccctgggagctccccgcggggcccgacgccgccgccgccgccgccgccgcgttcgacgagaccgcgctcctcgcctcgcgcctccgccaccaccagatcggcggcgtcgatgagaagcccctcatgctccacctcagcgacctgcacggcgtcgccgccggcggcggcgacgacgcgggtttcatgccgctgccgctcttcaccgaccgcgccgccttcaagtcccccaatgccgccggagccgaccaggcgctgtacaacgggttcggagccgctgggatgcatgccgccgccgtgcaccagccgccgttcgggcagctccggagggagaggatagcggagaggatgaaggcgttgcaggagctggtccctaacgccaacaagaccgacaaggcatcgatgcttgatgagattattgactacgtgaagttcctccagctccaagtcaaggttctcagcatgagcagacttggtggagctgcagccgtcggccctctcgtcgccagcatggcatcagagtataaacgaagagcaatacattggtg

SEQ ID NO: 44671 - DNA, 1210 bp, Zea Mays
cctttctccccttccctttctccatctcctctctctcgatccctccccgtctccgcgctccaagaaggtcgcttgccagttgccacaggccccactcatgcagccgagcggccgcgaaatgcagggcggcggcggaggcggcgggcaggacgacttcttggaccagatgctgtccacgctgccgcccgcgtggcccgacctcggctacggcaagtcgtcgccctgggagctccccgcggggcccgacgccgccgccgccgccgccgccgcgttcgacgagaccgcgctcctcgcctcgcgcctccgccaccaccagatcggcggcgtcgatgagaagcccctcatgctccacctcagcgacctgcacggcgtcgccgccggcggcggcgacgacgcgggtttcatgccgctgccgctcttcaccgaccgcgccgccttcaagtcccccaatgccgccggagccgaccaggcgctgtacaacgggttcggagccgctgggatgcatgccgccgccgtgcaccagccgccgttcgggcagctccggagggagaggatagcggagaggatgaaggcgttgcaggagctggtccctaacgccaacaagaccgacaaggcatcgatgcttgatgagattattgactacgtgaagttcctccagctccaagtcaaggttctcagcatgagcagacttggtggagctgcagccgtcggccctctcgtcgccagcatggcatcagagggcgacgacagagccggaaacggcacaagcgacgacggcggcgatggtgccaccaacggtgataacggtggtggcggcagcagcctgcgggtgacggagcaacaggtggccaggctgatggaggaggacatgggcactgccatgcagtacctgcagggcaaggggctgtgcctgatgccgatctccttggcctcggccatctcctcctccacgtcgtcgtcgccgccgccgtccctcctgccccgcccctccgtgggctcagtggaaggcgctagaggtcccttgcacgacgacagtggtggtgccggtggcgacgatggttctaggaccatcaacttttcttctctgctaaatttgtcgcgaagctgtcgtgtctgctctttgttaggtgaggaggaatcgaaattattggtccaaagggatcatattcatatcacataccagcccgagtacacattttatggaatgaga

SEQ ID NO: 44672 - DNA, 1387 bp, Zea Mays
cctttctccccttccctttctccatctcctctctctcgatccctccccgtctccgcgctccaagaaggtcgcttgccagttgccacaggccccactcatgcagccgagcggccgcgaaatgcagggcggcggcggaggcggcgggcaggacgacttcttggaccagatgctgtccacgctgccgcccgcgtggcccgacctcggctacggcaagtcgtcgccctgggagctccccgcggggcccgacgccgccgccgccgccgccgccgcgttcgacgagaccgcgctcctcgcctcgcgcctccgccaccaccagatcggcggcgtcgatgagaagcccctcatgctccacctcagcgacctgcacggcgtcgccgccggcggcggcgacgacgcgggtttcatgccgctgccgctcttcaccgaccgcgccgccttcaagtcccccaatgccgccggagccgaccaggcgctgtacaacgggttcggagccgctgggatgcatgccgccgccgtgcaccagccgccgttcgggcagagcggcgggtcaatgccggcggcgcagagcttcgggggaggcgcggacgcgggcggtggcgcgccggcaccggccgccggagcggcgtcgggcggaggcggggccgcgccgccgcggcagcagcggccgcgggccaagagggggcaggccactgaccctcacagcatcgccgaacgtctccggagggagaggatagcggagaggatgaaggcgttgcaggagctggtccctaacgccaacaagaccgacaaggcatcgatgcttgatgagattattgactacgtgaagttcctccagctccaagtcaaggttctcagcatgagcagacttggtggagctgcagccgtcggccctctcgtcgccagcatggcatcagagggcgacgacagagccggaaacggcacaagcgacgacggcggcgatggtgccaccaacggtgataacggtggtggcggcagcagcctgcgggtgacggagcaacaggtggccaggctgatggaggaggacatgggcactgccatgcagtacctgcagggcaaggggctgtgcctgatgccgatctccttggcctcggccatctcctcctccacgtcgtcgtcgccgccgccgtccctcctgccccgcccctccgtgggctcagtggaaggcgctagaggtcccttgcacgacgacagtggtggtgccggtggcgacgatggttctaggaccatcaacttttcttctctgctaaatttgtcgcgaagctgtcgtgtctgctctttgttaggtgaggaggaatcgaaattattggtccaaagggatcatattcatatcacataccagcccgagtacacattttatggaatgaga

SEQ ID NO: 44673 - DNA, 988 bp, Zea Mays
cctttctccccttccctttctccatctcctctctctcgatccctccccgtctccgcgctccaagaaggtcgcttgccagttgccacaggccccactcatgcagccgagcggccgcgaaatgcagggcggcggcggaggcggcgggcaggacgacttcttggaccagatgctgtccacgctgccgcccgcgtggcccgacctcggctacggcaagtcgtcgccctgggagctccccgcggggcccgacgccgccgccgccgccgccgccgcgttcgacgagaccgcgctcctcgcctcgcgcctccgccaccaccagatcggcggcgtcgatgagaagcccctcatgctccacctcagcgacctgcacggcgtcgccgccggcggcggcgacgacgcgggtttcatgccgctgccgctcttcaccgaccgcgccgccttcaagtcccccaatgccgccggagccgaccaggcgctgtacaacgggttcggagccgctgggatgcatgccgccgccgtgcaccagccgccgttcgggcagagcggcgggtcaatgccggcggcgcagagcttcgggggaggcgcggacgcgggcggtggcgcgccggcaccggccgccggagcggcgtcgggcggaggcggggccgcgccgccgcggcagcagcggccgcgggccaagagggggcaggccactgaccctcacagcatcgccgaacgtctccggagggagaggatagcggagaggatgaaggcgttgcaggagctggtccctaacgccaacaagaccgacaaggcatcgatgcttgatgagattattgactacgtgaagttcctccagctccaagtcaaggttctcagcatgagcagacttggtggagctgcagccgtcggccctctcgtcgccagcatggcatcagagaggcaccaaagacccagactgatacagctaaaacttcgtgggccaaatatgatgctgaacccatacttttga

SEQ ID NO: 44674 - DNA, 2567 bp, Zea Mays
caactgcatctggttgcatttcagacagtaaacttgatgacactggtgctctagtaaaaaacatatatgttactgagaaacttattgtgtcaacggaatacggtggtgatggttacgatccaggaagaacagattctagtgacatagctactagtgcagtctcatcatcccttgcatctcaagagccatcactgagacctgttactgatgatgataagaatgcatcagagaatgttgttgtaaaccaaaaaggtaacagaacattgacggtgaaggttccatctcgaggagcttctccaacaaggcgacttgcatccgatggcactgatactatatctaaaagcatggattttgctgaggaagataagaaacccatgacagttccatcacgtggaatgtcaccaagaagaacggcgagatctgaaagtgctaatataatgtcaaaaattatggattttgctgatgaatgtaatggaccagtatcttcaatggttccttcacgagtgttttctacaagaagagtactaggaccagatggtgttaatgccatgtcaagaagcatggatctaactgataagaccagacagcaaatatctttaactgtgcaaccatccagagtttcaccaaggaaaacgcctcttgcttataacagaagaaaaggccctgaaattttatcaggtgatgttgagagccctggttctgctgatggaaatgaaggtcaagaggagaatgccagttcaagtccagatggaccttcaaataattcagaaaaatctacacctccaaagcagttagctaggggatcatcatcaccatcacgtgttttaatacgcccttcatcaccatccaatgcttcgtcgtcaccatcatttgcctctaggagattaccaagcccatcaaggactagaccctcaacacctgtctcaccatgtagttctgccagatctgattcaggctcttcaattcttagctacattgttgatgctacaagagggaagaagagcccagctcacatggaatatgtccatcagttgcgcctcctgcataataggaacttacaatggcgttttaccaattcttatgttgatgaaatgctgtcaattcagaaattaagcgccgagactatgttgtacagtgtatgggatgctaactcaaggatgtgcgacaatatggttatgaagaggagctatgtacaaagactaaggcaagaggtcaaattgggaatagtgttgaaggagcaaatggattaccttgatcactgggcagcgctgcaaacagagcattcttcttctttatccagcgcaaccgaagctattaaagcaagcacattgcgtcttccagtttctggaggggctaaggctgatgtacttactgttaagaatgctgtcagttcagcagttgacattatgcaagcgatggggtcatccatttgccatttgctatcaaagttacaggcttcacactctctggttacggaactttcagctgttgctgctaaggaaagtatcttactcaatgagtacagagaactcttggcaacagcagcagcactacaggtccaggagtccagcctaaggacacagctcatacaacagacagagtgagcaggttaaggtcctgtatgtatttctgactaggaagattagaggtaaacaccattcattagtttcagtgactgtgcggtgcatatgtgtatctttgatgccgttttttttctctctcctttttttgtacttagtaggtagcccatatttctttgcatttctactcccccatgttcttttgtgttcgaacaacttacatggaagagaagggaagcaacacgaaatcatggatttccatgacaaaggtgccagtgtggtcttttattgcatcctagaccaatgcaatgcgcccaaaaactgaaagctttgttgtaagctgtaaaccttagcagttatgtgtccttaagtgtaatgcctttagatgtatctttcttagatccgccatctccttagaactagaggctccagttaacaggttactcactatcattgctggtttcaaatctaagcaaagggggcgaccagaatcttctaaccgacacttcagagtagacaacagtcatccaatactgacctattcaaatttgttaccgccggtactcagagagtgaaccattaccatttatgttatattttatgcggtagaatgagactggctggtttaggcctcaggacaccattgtgaactgtttaggctgatgggaagctcctattaattctcggtcatcttttagcttcggctatgtattttactgtattgatcgtaccctttggtgcagtcaccattctgtcaggagctctactttgagggatctcatctgtcctttttccctctacctggctcaatcacacaatgaaatggtcaaatggaaatgcacgtacaagttttttttttctcagaccttattattattattattattattattattattattattattattattattattattattattattattaagggaaggagcacgtgtaattgtcggttggtgacacgctgacactccaagc

SEQ ID NO: 44675 - DNA, 1837 bp, Zea Mays
ctctctctctctctctaccaccatctctggcagcttggcttcgccattacttggcttgcaggagctgcccgtggagttcccgtgaggtggagaccaaagccatgactgactcgctcggccctacccgcaccagaaagcgacgcttcgattcctttgcataaatgggagaaaggagaggaggaattcgagaaaatcaccgcctcccttcctttgttcatcgtctgccttttctttttctcctcttcatctactgaatttgccggggtcctcgatctgggcgggacacggggtagactggtgctggcttcgtggcggagttatttgagtttgtaacaatctcgtcgcgcggcttcgccactatattactccgcagctgcgcatcgccaatttgactatgttgtacagtgtatgggatgctaactcaaggatgtgcgacaatatggttatgaagaggagctatgtacaaagactaaggcaagaggtcaaattgggaatagtgttgaaggagcaaatggattaccttgatcactgggcagcgctgcaaacagagcattcttcttctttatccagcgcaaccgaagctattaaagcaagcacattgcgtcttccagtttctggaggggctaaggctgatgtacttactgttaagaatgctgtcagttcagcagttgacattatgcaagcgatggggtcatccatttgccatttgctatcaaagttacaggcttcacactctctggttacggaactttcagctgttgctgctaaggaaagtatcttactcaatgagtacagagaactcttggcaacagcagcagcactacaggtccaggagtccagcctaaggacacagctcatacaacagacagagtgagcaggttaaggtcctgtatgtatttctgactaggaagattagaggtaaacaccattcattagtttcagtgactgtgcggtgcatatgtgtatctttgatgccgttttttttctctctcctttttttgtacttagtaggtagcccatatttctttgcatttctactcccccatgttcttttgtgttcgaacaacttacatggaagagaagggaagcaacacgaaatcatggatttccatgacaaaggtgccagtgtggtcttttattgcatcctagaccaatgcaatgcgcccaaaaactgaaagctttgttgtaagctgtaaaccttagcagttatgtgtccttaagtgtaatgcctttagatgtatctttcttagatccgccatctccttagaactagaggctccagttaacaggttactcactatcattgctggtttcaaatctaagcaaagggggcgaccagaatcttctaaccgacacttcagagtagacaacagtcatccaatactgacctattcaaatttgttaccgccggtactcagagagtgaaccattaccatttatgttatattttatgcggtagaatgagactggctggtttaggcctcaggacaccattgtgaactgtttaggctgatgggaagctcctattaattctcggtcatcttttagcttcggctatgtattttactgtattgatcgtaccctttggtgcagtcaccattctgtcaggagctctactttgagggatctcatctgtcctttttccctctacctggctcaatcacacaatgaaatggtcaaatggaaatgcacgtacaagttttttttttctcagaccttattattattattattattattattattattattattattattattattattattattattattattaagggaaggagcacgtgtaattgtcggttggtgacacgctgacactccaagc

SEQ ID NO: 44676 - DNA, 830 bp, Zea Mays
gaaaaagttggtccctctccctcccagttgcattagtttatgctccactacagtagcagactatgttgtacagtgtatgggatgctaactcaaggatgtgcgacaatatggttatgaagaggagctatgtacaaagactaaggcaagaggtcaaattgggaatagtgttgaaggagcaaatggattaccttgatcactgggcagcgctgcaaacagagcattcttcttctttatccagcgcaaccgaagctattaaagcaagcacattgcgtcttccagtttctggaggggctaaggctgatgtacttactgttaagaatgctgtcagttcagcagttgacattatgcaagcgatggggtcatccatttgccatttgctatcaaagttacaggcttcacactctctggttacggaactttcagctgttgctgctaaggaaagtatcttactcaatgagtacagagaactcttggcaacagcagcagcactacaggtccaggagtccagcctaaggacacagctcatacaacagacagagtgagcaggttaaggtcctgtatgtatttctgactaggaagattagagtcaccattctgtcaggagctctactttgagggatctcatctgtcctttttccctctacctggctcaatcacacaatgaaatggtcaaatggaaatgcacgtacaagttttttttttctcagaccttattattattattattattattattattattattattattattattattattattattattattattaagggaaggagcacgtgtaattgtcggttggtgacacgctgacactccaagc

SEQ ID NO: 44677 - DNA, 535 bp, Zea Mays
aaaaagttggtccctctccctcccagttgcattagtttatgctccactacagtagcagactatgttgtacagtgtatgggatgctaactcaaggatgtgcgacaatatggttatgaagaggagctatgtacaaagactaaggcaagaggtcaaattgggaatagtgttgaaggagcaaatggattaccttgatcactgggcagcgctgcaaacagagcattcttcttctttatccagcgcaaccgaagctattaaagcaagcacattgcgtcttccagtttctggaggggctaaggctgatgtacttactgttaagaatgctgtcagttcagcagttgacattatgcaagcgatggggtcatccatttgccatttgctatcaaagttacaggcttcacactctctggttacggaactttcagctgttgctgctaaggaaagtatcttactcaatgagtacagagaactcttggcaacagcagcagcactacagccctactacaaaatgagttcgatgcgtcaagctgcaatcaca

SEQ ID NO: 44678 - DNA, 687 bp, Zea Mays
cagggaaccgcgagctctgccgtgacaaattctctctcctcgtgctccctagtccctccgacccccccccccccccccccccccctctccctccgcactccgcagcgcttcctccggtcttctctggccggatccctgcccccaaaatcggattgggggagggctcgttgcgttcgaccagacggcgtgcggcggttctccggcgccgagactatgttgtacagtgtatgggatgctaactcaaggatgtgcgacaatatggttatgaagaggagctatgtacaaagactaaggcaagaggtcaaattgggaatagtgttgaaggagcaaatggattaccttgatcactgggcagcgctgcaaacagagcattcttcttctttatccagcgcaaccgaagctattaaagcaagcacattgcgtcttccagtttctggaggggctaaggctgatgtacttactgttaagaatgctgtcagttcagcagttgacattatgcaagcgatggggtcatccatttgccatttgctatcaaagttacaggcttcacactctctggttacggaactttcagctgttgctgctaaggaaagtatcttactcaatgagtacagagaactcttggcaacagcagcagcactacagccctactacaaaatgagttcgatgcgtcaagctgcaatcaca

SEQ ID NO: 44679 - DNA, 1445 bp, Zea Mays
atggttctcctcacaagcatgtcaagccaatgccgcagccgccgccgcagccgccacctcccgaggacttgccctttgatgtgcttgatggacctagcccattgggtctgcgactaagaaaaagtcgatctctggtggaccttattcaatgtaagctttttcaggataaatctgcccatgaacagtttgatgggcacaacaatgtttctgatacacccatgaagaaagaggttagatctggggctccaacagctggtgaacggatgaaagcttcaaattttcctgcaaatgttttgagaattggtagttgggagtacatttctcactacgaaggtgatttggtcgcaaagtgctactttgcaaagcataagcttgtttgggaggtcctacataatggtctcaagagtaagatagaaattcagtggtcggacattattgctttgaaggcaacctgcccagagaatgaacaagaaggggtcttagatctagtgttggctcgcccgccacttttcttcaaagaaactgatcctcagccaaggaaacatacactatggcaggctgcatcagattttactgatggacaggcaagctccaaaaggagacacatcttgcggtgcccctcgagtttgttaagcaggaattttgaaaagctcattcaatgtgatcaacgtctacgtgaattgagccagcagccagctgccatattgcaaaacccaggttttgaacctaagcgatctatttttcaaaatccaaatgaatcgaaggactgccttgatattggtggcttgaagtttgaacataaagctactttgcccaagttcactgctcccctctcaacacgtgtcttttcatcactgtccaataatgttggacgaccaataaacataggatttggtgctggacattttgggggcaatgttcctgaagaatcaaagaattgcaatcaatggaatcaattgatagtgcctggattggaggcactgcaaggtgatgaaaggagtgcaggtggtcctcctttgacaactaacgatgcaatttccaaaaaagcctgggaagatcttgttcaacaccttttcagcgacacaccgagtctgccagccttagatgataataatttgacgtcaagggttgactccctttactcgttgcttgagaaagacacagctccacccgccatgcgcgaccctgaatgcagtagtgatggtggggacatcggcgcaatccaagtggattctgatggctttaaggggaggctcgacccatcgcctccaggaatttccagaaacgattctctcgatgagctgcttctgaacctccccaaaatagcttctattccacagttcttgttcaacaggacagaagattctgatgaataaagcgcgcagtcaacttgtggtcttcaaccctaggactaaagcagcaaattgtgaatatgagcaatgagt

SEQ ID NO: 44680 - DNA, 2032 bp, Zea Mays
ctcaaagatactaaaagggcaggtgtagaggtgaacgggagaccagtagtctagaattctcaccaggtcctgccttgatgaaaataaggcttttctatcgaccgcagattctgctgtgcaattactcacagaagccaccaaaccagtttcaggatggaaggggattgagtatcgagcagcatttcctctacataagcctcccggtgctaacttctatcctcctgacatggacaaagcggagtttgaactttggaagagtaaactgacagataaagaacaaaatgatgccactgggtttttcaccgtcataaaacgacatgactctctgtcttcatcgtcattaacacaatcagatggatcggatcagaccaagactaaagatgatctttttattgttccatactccaaggagtatagaccattcctagagaaagcagctgagcttcttgagaaagcatcagcgtgctctgattctccaagcctcaagaatttgctgagaaccaaggcgaatgctttcctttcaaatgattactatgaatccgatatagcttggatggaattggactccaacttagatctcacaattggcccatatgaaacatatgaagatagcctttttagttataaggcaacttttgaagcatttgtcggaatacgtgatgacacagcaacttctcaagttaaactctttggtgatcagctccaggatttggagaaaaaccttccaatggacaatattttcaaatcagatagtatatctgctgctcctattcgtgtgatcaatcttctctacaatgctggggatgtgaagggtccacaaaccattgctttcaatttgcccaatgatgaaaggattgtgaatgaacgaggaacttccatggttatgctcaaaaacatttcagaagccaagttcaagcatatcttaaagcctatagctgatgcctgcatcagagaggaacaaaaggaatatgttgatttcgagccatattatacacatatagtctgtcatgaatgctgccatggaattggacctcattctatcacccttccaagtggtaaaaaaacaacagttagaagggaacttcaagaattccattcagcattggaggaggcaaaagctgatatagttggtctctgggcactgaatttccttattaagaagggattgcttcctaagagcctgtcacaatctatgtatgtctctttcctggctggctgcttccggtcaatccgctttgggctggaagaagctcacggaaaaggacaagctctgcagtttaactggttgtatgagaaaggggcttttgtgttgcagtctgacggaaaattctcagttgattttacaatggttgaggatgctgtagaaagcctgagcagggagatactgacaatacaggcaaagggcgataagccttctgcccaatctcttctccagtcccgtgcaacattgacacaaccattgagaatggcattggagaggatagagcacatgcaggtacctgttgacatagccccggtattcagcacggcaaacaagctatttgcagacatttaactatttgggctcagaatcgttgtgctttagtaccgcccacaatacctggacgaaaccaggaattgctcaagaataaggcggcactaggaattgctcaagaataaggaagcgccccatgttaagcaaagctgataaaaccatggcgatatgtgagtgacctttttatcggaaggaaaattgtttgcatgcttatgtattgacctcaatttttacgtattggagtgatttgatgtgaaatttaaccaaattccacgtccagtacatggccatccaaacatggcctaaagtggtgtttgatcagtgagaattggaataaacccagctttgcctgaacagttgcgaagtactgagttacatcaatgcatattttgtaacaccaaaaaaagatgtattatcctaatggatgattgaacgaaggcattgtatatcgatccccaatggcccaatctttatgcacattctggcttgatcagatct

SEQ ID NO: 44681 - DNA, 1993 bp, Zea Mays
cacaatattcaatgatattttgttcatgtcctgccttgatgaaaataaggcttttctatcgaccgcagattctgctgtgcaattactcacagaagccaccaaaccagtttcaggatggaaggggattgagtatcgagcagcatttcctctacataagcctcccggtgctaacttctatcctcctgacatggacaaagcggagtttgaactttggaagagtaaactgacagataaagaacaaaatgatgccactgggtttttcaccgtcataaaacgacatgactctctgtcttcatcgtcattaacacaatcagatggatcggatcagaccaagactaaagatgatctttttattgttccatactccaaggagtatagaccattcctagagaaagcagctgagcttcttgagaaagcatcagcgtgctctgattctccaagcctcaagaatttgctgagaaccaaggcgaatgctttcctttcaaatgattactatgaatccgatatagcttggatggaattggactccaacttagatctcacaattggcccatatgaaacatatgaagatagcctttttagttataaggcaacttttgaagcatttgtcggaatacgtgatgacacagcaacttctcaagttaaactctttggtgatcagctccaggatttggagaaaaaccttccaatggacaatattttcaaatcagatagtatatctgctgctcctattcgtgtgatcaatcttctctacaatgctggggatgtgaagggtccacaaaccattgctttcaatttgcccaatgatgaaaggattgtgaatgaacgaggaacttccatggttatgctcaaaaacatttcagaagccaagttcaagcatatcttaaagcctatagctgatgcctgcatcagagaggaacaaaaggaatatgttgatttcgagccatattatacacatatagtctgtcatgaatgctgccatggaattggacctcattctatcacccttccaagtggtaaaaaaacaacagttagaagggaacttcaagaattccattcagcattggaggaggcaaaagctgatatagttggtctctgggcactgaatttccttattaagaagggattgcttcctaagagcctgtcacaatctatgtatgtctctttcctggctggctgcttccggtcaatccgctttgggctggaagaagctcacggaaaaggacaagctctgcagtttaactggttgtatgagaaaggggcttttgtgttgcagtctgacggaaaattctcagttgattttacaatggttgaggatgctgtagaaagcctgagcagggagatactgacaatacaggcaaagggcgataagccttctgcccaatctcttctccagtcccgtgcaacattgacacaaccattgagaatggcattggagaggatagagcacatgcaggtacctgttgacatagccccggtattcagcacggcaaacaagctatttgcagacatttaactatttgggctcagaatcgttgtgctttagtaccgcccacaatacctggacgaaaccaggaattgctcaagaataaggcggcactaggaattgctcaagaataaggaagcgccccatgttaagcaaagctgataaaaccatggcgatatgtgagtgacctttttatcggaaggaaaattgtttgcatgcttatgtattgacctcaatttttacgtattggagtgatttgatgtgaaatttaaccaaattccacgtccagtacatggccatccaaacatggcctaaagtggtgtttgatcagtgagaattggaataaacccagctttgcctgaacagttgcgaagtactgagttacatcaatgcatattttgtaacaccaaaaaaagatgtattatcctaatggatgattgaacgaaggcattgtatatcgatccccaatggcccaatctttatgcacattctggcttgatcagatct

SEQ ID NO: 44682 - DNA, 2824 bp, Zea Mays
tctacgtacccgattgcccaacgcttcgctttctcgctgactcgctcccactcccagacgaccggccgccagcgccgccgcgttgatggccgccgcaccggaggagcgcctcgacgtcctcaacgccgctggggacaagatcggcgtctccaagcccaggtcggaggtgcacagggacggcgactatcaccgggcggtgcacgtgtggatctacagcgagagcaccggggagctgctgctgcagcgccgcgctgactgcaaggactcgtggcctggacagtgggacatctccagcgccggtcacatctccgccggcgaatcctcgctcttctcggcacagagggagcttgaggaagaactaggcatcaaccttccagtcgatgctttcgagcttatatttgtatttcttcaggaatgcgttatcaacaatgggacatacacaaacaatgagtacaatgatgtttaccttgtgactactttaactccaattccacttgaggcattcactctccaagaaagtgaagtatctgcagttaggtatatgcgttgtgatgagtacaaaagctgccttgcaaaagaaagtagagaatatgttccttatgatgtgaacgggcaatatggtcaactgtttagcattattgaagaaaggtacaaagagaatacagagtcacagagtttaactttgcaaaagcaaatgaaccgttatgttcccatccatttggaaccagatttgactagtctctctgaaggagacagggaggccttgggatatatccttaaagccgcaatagttattgatgacatattctatgaacaggtatggaatagtaacaaaatgcttagagactggctgaaaggacattctgaattctcaccattcgataaattgaagtgggcatattattctattaataagagtacctggtcctgccttgatgaaaataaggcttttctatcgaccgcagattctgctgtgcaattactcacagaagccaccaaaccagtttcaggatggaaggggattgagtatcgagcagcatttcctctacataagcctcccggtgctaacttctatcctcctgacatggacaaagcggagtttgaactttggaagagtaaactgacagataaagaacaaaatgatgccactgggtttttcaccgtcataaaacgacatgactctctgtcttcatcgtcattaacacaatcagatggatcggatcagaccaagactaaagatgatctttttattgttccatactccaaggagtatagaccattcctagagaaagcagctgagcttcttgagaaagcatcagcgtgctctgattctccaagcctcaagaatttgctgagaaccaaggcgaatgctttcctttcaaatgattactatgaatccgatatagcttggatggaattggcaacttttgaagcatttgtcggaatacgtgatgacacagcaacttctcaagttaaactctttggtgatcagctccaggatttggagaaaaaccttccaatggacaatattttcaaatcagatagtatatctgctgctcctattcgtgtgatcaatcttctctacaatgctggggatgtgaagggtccacaaaccattgctttcaatttgcccaatgatgaaaggattgtgaatgaacgaggaacttccatggttatgctcaaaaacatttcagaagccaagttcaagcatatcttaaagcctatagctgatgcctgcatcagagaggaacaaaaggaatatgttgatttcgagccatattatacacatatagtctgtcatgaatgctgccatggaattggacctcattctatcacccttccaagtggtaaaaaaacaacagttagaagggaacttcaagaattccattcagcattggaggaggcaaaagctgatatagttggtctctgggcactgaatttccttattaagaagggattgcttcctaagagcctgtcacaatctatgtatgtctctttcctggctggctgcttccggtcaatccgctttgggctggaagaagctcacggaaaaggacaagctctgcagtttaactggttgtatgagaaaggggcttttgtgttgcagtctgacggaaaattctcagttgattttacaatggttgaggatgctgtagaaagcctgagcagggagatactgacaatacaggcaaagggcgataagccttctgcccaatctcttctccagtcccgtgcaacattgacacaaccattgagaatggcattggagaggatagagcacatgcaggtacctgttgacatagccccggtattcagcacggcaaacaagctatttgcagacatttaactatttgggctcagaatcgttgtgctttagtaccgcccacaatacctggacgaaaccaggaattgctcaagaataaggcggcactaggaattgctcaagaataaggaagcgccccatgttaagcaaagctgataaaaccatggcgatatgtgagtgacctttttatcggaaggaaaattgtttgcatgcttatgtattgacctcaatttttacgtattggagtgatttgatgtgaaatttaaccaaattccacgtccagtacatggccatccaaacatggcctaaagtggtgtttgatcagtgagaattggaataaacccagctttgcctgaacagttgcgaagtactgagttacatcaatgcatattttgtaacaccaaaaaaagatgtattatcctaatggatgattgaacgaaggcattgtatatcgatccccaatggcccaatctttatgcacattctggcttgatcagatct

SEQ ID NO: 44683 - DNA, 2867 bp, Zea Mays
tctacgtacccgattgcccaacgcttcgctttctcgctgactcgctcccactcccagacgaccggccgccagcgccgccgcgttgatggccgccgcaccggaggagcgcctcgacgtcctcaacgccgctggggacaagatcggcgtctccaagcccaggtcggaggtgcacagggacggcgactatcaccgggcggtgcacgtgtggatctacagcgagagcaccggggagctgctgctgcagcgccgcgctgactgcaaggactcgtggcctggacagtgggacatctccagcgccggtcacatctccgccggcgaatcctcgctcttctcggcacagagggagcttgaggaagaactaggcatcaaccttccagtcgatgctttcgagcttatatttgtatttcttcaggaatgcgttatcaacaatgggacatacacaaacaatgagtacaatgatgtttaccttgtgactactttaactccaattccacttgaggcattcactctccaagaaagtgaagtatctgcagttaggtatatgcgttgtgatgagtacaaaagctgccttgcaaaagaaagtagagaatatgttccttatgatgtgaacgggcaatatggtcaactgtttagcattattgaagaaaggtacaaagagaatacagagtcacagagtttaactttgcaaaagcaaatgaaccgttatgttcccatccatttggaaccagatttgactagtctctctgaaggagacagggaggccttgggatatatccttaaagccgcaatagttattgatgacatattctatgaacaggtatggaatagtaacaaaatgcttagagactggctgaaaggacattctgaattctcaccattcgataaattgaagtgggcatattattctattaataagagtacctggtcctgccttgatgaaaataaggcttttctatcgaccgcagattctgctgtgcaattactcacagaagccaccaaaccagtttcaggatggaaggggattgagtatcgagcagcatttcctctacataagcctcccggtgctaacttctatcctcctgacatggacaaagcggagtttgaactttggaagagtaaactgacagataaagaacaaaatgatgccactgggtttttcaccgtcataaaacgacatgactctctgtcttcatcgtcattaacacaatcagatggatcggatcagaccaagactaaagatgatctttttattgttccatactccaaggagtatagaccattcctagagaaagcagctgagcttcttgagaaagcatcagcgtgctctgattctccaagcctcaagaatttgctgagaaccaaggcgaatgctttcctttcaaatgattactatgaatccgatatagcttggatggaattggactccaacttagatctcacaattggcccatatgaaacatatgaagatagcctttttagttataaggcaacttttgaagcatttgtcggaatacgtgatgacacagcaacttctcaagttaaactctttggtgatcagctccaggatttggagaaaaaccttccaatggacaatattttcaaatcagatagtatatctgctgctcctattcgtgtgatcaatcttctctacaatgctggggatgtgaagggtccacaaaccattgctttcaatttgcccaatgatgaaaggattgtgaatgaacgaggaacttccatggttatgctcaaaaacatttcagaagccaagttcaagcatatcttaaagcctatagctgatgcctgcatcagagaggaacaaaaggaatatgttgatttcgagccatattatacacatatagtctgtcatgaatgctgccatggaattggacctcattctatcacccttccaagtggaacttcaagaattccattcagcattggaggaggcaaaagctgatatagttggtctctgggcactgaatttccttattaagaagggattgcttcctaagagcctgtcacaatctatgtatgtctctttcctggctggctgcttccggtcaatccgctttgggctggaagaagctcacggaaaaggacaagctctgcagtttaactggttgtatgagaaaggggcttttgtgttgcagtctgacggaaaattctcagttgattttacaatggttgaggatgctgtagaaagcctgagcagggagatactgacaatacaggcaaagggcgataagccttctgcccaatctcttctccagtcccgtgcaacattgacacaaccattgagaatggcattggagaggatagagcacatgcaggtacctgttgacatagccccggtattcagcacggcaaacaagctatttgcagacatttaactatttgggctcagaatcgttgtgctttagtaccgcccacaatacctggacgaaaccaggaattgctcaagaataaggcggcactaggaattgctcaagaataaggaagcgccccatgttaagcaaagctgataaaaccatggcgatatgtgagtgacctttttatcggaaggaaaattgtttgcatgcttatgtattgacctcaatttttacgtattggagtgatttgatgtgaaatttaaccaaattccacgtccagtacatggccatccaaacatggcctaaagtggtgtttgatcagtgagaattggaataaacccagctttgcctgaacagttgcgaagtactgagttacatcaatgcatattttgtaacaccaaaaaaagatgtattatcctaatggatgattgaacgaaggcattgtatatcgatccccaatggcccaatctttatgcacattctggcttgatcagatct

SEQ ID NO: 44684 - DNA, 2916 bp, Zea Mays
tctacgtacccgattgcccaacgcttcgctttctcgctgactcgctcccactcccagacgaccggccgccagcgccgccgcgttgatggccgccgcaccggaggagcgcctcgacgtcctcaacgccgctggggacaagatcggcgtctccaagcccaggtcggaggtgcacagggacggcgactatcaccgggcggtgcacgtgtggatctacagcgagagcaccggggagctgctgctgcagcgccgcgctgactgcaaggactcgtggcctggacagtgggacatctccagcgccggtcacatctccgccggcgaatcctcgctcttctcggcacatactaccatttaatatgaatcatcaggagggagcttgaggaagaactaggcatcaaccttccagtcgatgctttcgagcttatatttgtatttcttcaggaatgcgttatcaacaatgggacatacacaaacaatgagtacaatgatgtttaccttgtgactactttaactccaattccacttgaggcattcactctccaagaaagtgaagtatctgcagttaggtatatgcgttgtgatgagtacaaaagctgccttgcaaaagaaagtagagaatatgttccttatgatgtgaacgggcaatatggtcaactgtttagcattattgaagaaaggtacaaagagaatacagagtcacagagtttaactttgcaaaagcaaatgaaccgttatgttcccatccatttggaaccagatttgactagtctctctgaaggagacagggaggccttgggatatatccttaaagccgcaatagttattgatgacatattctatgaacaggtatggaatagtaacaaaatgcttagagactggctgaaaggacattctgaattctcaccattcgataaattgaagtgggcatattattctattaataagagtacctggtcctgccttgatgaaaataaggcttttctatcgaccgcagattctgctgtgcaattactcacagaagccaccaaaccagtttcaggatggaaggggattgagtatcgagcagcatttcctctacataagcctcccggtgctaacttctatcctcctgacatggacaaagcggagtttgaactttggaagagtaaactgacagataaagaacaaaatgatgccactgggtttttcaccgtcataaaacgacatgactctctgtcttcatcgtcattaacacaatcagatggatcggatcagaccaagactaaagatgatctttttattgttccatactccaaggagtatagaccattcctagagaaagcagctgagcttcttgagaaagcatcagcgtgctctgattctccaagcctcaagaatttgctgagaaccaaggcgaatgctttcctttcaaatgattactatgaatccgatatagcttggatggaattggactccaacttagatctcacaattggcccatatgaaacatatgaagatagcctttttagttataaggcaacttttgaagcatttgtcggaatacgtgatgacacagcaacttctcaagttaaactctttggtgatcagctccaggatttggagaaaaaccttccaatggacaatattttcaaatcagatagtatatctgctgctcctattcgtgtgatcaatcttctctacaatgctggggatgtgaagggtccacaaaccattgctttcaatttgcccaatgatgaaaggattgtgaatgaacgaggaacttccatggttatgctcaaaaacatttcagaagccaagttcaagcatatcttaaagcctatagctgatgcctgcatcagagaggaacaaaaggaatatgttgatttcgagccatattatacacatatagtctgtcatgaatgctgccatggaattggacctcattctatcacccttccaagtggtaaaaaaacaacagttagaagggaacttcaagaattccattcagcattggaggaggcaaaagctgatatagttggtctctgggcactgaatttccttattaagaagggattgcttcctaagagcctgtcacaatctatgtatgtctctttcctggctggctgcttccggtcaatccgctttgggctggaagaagctcacggaaaaggacaagctctgcagtttaactggttgtatgagaaaggggcttttgtgttgcagtctgacggaaaattctcagttgattttacaatggttgaggatgctgtagaaagcctgagcagggagatactgacaatacaggcaaagggcgataagccttctgcccaatctcttctccagtcccgtgcaacattgacacaaccattgagaatggcattggagaggatagagcacatgcaggtacctgttgacatagccccggtattcagcacggcaaacaagctatttgcagacatttaactatttgggctcagaatcgttgtgctttagtaccgcccacaatacctggacgaaaccaggaattgctcaagaataaggcggcactaggaattgctcaagaataaggaagcgccccatgttaagcaaagctgataaaaccatggcgatatgtgagtgacctttttatcggaaggaaaattgtttgcatgcttatgtattgacctcaatttttacgtattggagtgatttgatgtgaaatttaaccaaattccacgtccagtacatggccatccaaacatggcctaaagtggtgtttgatcagtgagaattggaataaacccagctttgcctgaacagttgcgaagtactgagttacatcaatgcatattttgtaacaccaaaaaaagatgtattatcctaatggatgattgaacgaaggcattgtatatcgatccccaatggcccaatctttatgcacattctggcttgatcagatct

SEQ ID NO: 44685 - DNA, 2850 bp, Zea Mays
taaaagtttatagacgaaacaagtttgatgtgcattttacttttaaaaactcgttttgaactgtctatctacgtacccgattgcccaacgcttcgctttctcgctgactcgctcccactcccagacgaccggccgccagcgccgccgcgttgatggccgccgcaccggaggagcgcctcgacgtcctcaacgccgctggggacaagatcggcgtctccaagcccaggtcggaggtgcacagggacggcgactatcaccgggcggtgcacgtgtggatctacagcgagagcaccggggagctgctgctgcagcgccgcgctgactgcaaggactcgtggcctggacagtgggacatctccagcgccggtcacatctccgccggcgaatcctcgctcttctcggcacagagggagcttgaggaagaactaggcatcaaccttccagtcgatgctttcgagcttatatttgtatttcttcaggaatgcgttatcaacaatgggacatacacaaacaatgagtacaatgatgtttaccttgtgactactttaactccaattccacttgaggcattcactctccaagaaagtgaagtatctgcagttaggtatatgcgttgtgatgagtacaaaagctgccttgcaaaagaaagtagagaatatgttccttatgatgtgaacgggcaatatggtcaactgtttagcattattgaagaaaggtacaaagagaatacagagtcacagagtttaactttgcaaaagcaaatgaaccgttatgttcccatccatttggaaccagatttgactagtctctctgaaggagacagggaggccttgggatatatccttaaagccgcaatagttattgatgacatattctatgaacaggtcctgccttgatgaaaataaggcttttctatcgaccgcagattctgctgtgcaattactcacagaagccaccaaaccagtttcaggatggaaggggattgagtatcgagcagcatttcctctacataagcctcccggtgctaacttctatcctcctgacatggacaaagcggagtttgaactttggaagagtaaactgacagataaagaacaaaatgatgccactgggtttttcaccgtcataaaacgacatgactctctgtcttcatcgtcattaacacaatcagatggatcggatcagaccaagactaaagatgatctttttattgttccatactccaaggagtatagaccattcctagagaaagcagctgagcttcttgagaaagcatcagcgtgctctgattctccaagcctcaagaatttgctgagaaccaaggcgaatgctttcctttcaaatgattactatgaatccgatatagcttggatggaattggactccaacttagatctcacaattggcccatatgaaacatatgaagatagcctttttagttataaggcaacttttgaagcatttgtcggaatacgtgatgacacagcaacttctcaagttaaactctttggtgatcagctccaggatttggagaaaaaccttccaatggacaatattttcaaatcagatagtatatctgctgctcctattcgtgtgatcaatcttctctacaatgctggggatgtgaagggtccacaaaccattgctttcaatttgcccaatgatgaaaggattgtgaatgaacgaggaacttccatggttatgctcaaaaacatttcagaagccaagttcaagcatatcttaaagcctatagctgatgcctgcatcagagaggaacaaaaggaatatgttgatttcgagccatattatacacatatagtctgtcatgaatgctgccatggaattggacctcattctatcacccttccaagtggtaaaaaaacaacagttagaagggaacttcaagaattccattcagcattggaggaggcaaaagctgatatagttggtctctgggcactgaatttccttattaagaagggattgcttcctaagagcctgtcacaatctatgtatgtctctttcctggctggctgcttccggtcaatccgctttgggctggaagaagctcacggaaaaggacaagctctgcagtttaactggttgtatgagaaaggggcttttgtgttgcagtctgacggaaaattctcagttgattttacaatggttgaggatgctgtagaaagcctgagcagggagatactgacaatacaggcaaagggcgataagccttctgcccaatctcttctccagtcccgtgcaacattgacacaaccattgagaatggcattggagaggatagagcacatgcaggtacctgttgacatagccccggtattcagcacggcaaacaagctatttgcagacatttaactatttgggctcagaatcgttgtgctttagtaccgcccacaatacctggacgaaaccaggaattgctcaagaataaggcggcactaggaattgctcaagaataaggaagcgccccatgttaagcaaagctgataaaaccatggcgatatgtgagtgacctttttatcggaaggaaaattgtttgcatgcttatgtattgacctcaatttttacgtattggagtgatttgatgtgaaatttaaccaaattccacgtccagtacatggccatccaaacatggcctaaagtggtgtttgatcagtgagaattggaataaacccagctttgcctgaacagttgcgaagtactgagttacatcaatgcatattttgtaacaccaaaaaaagatgtattatcctaatggatgattgaacgaaggcattgtatatcgatccccaatggcccaatctttatgcacattctggcttgatcagatct

SEQ ID NO: 44686 - DNA, 1685 bp, Zea Mays
ctataatggaaatattttatatgttattgtttcatatttttttccgtatatgcatcctacttattggtttgtaacaaagttgaactgcaaagggtaaaacagacaatcgccacagaccaccaactctcagaagacaagaatcaatttacttgccaaacggttttaaaaatgattctgattttctaggagaatcaggaggatcagctcctcatgaggatcaggatctggagctaaagaagcaggagttggagctttgccaaacgggcccttaataactgcgttctcatggaccattgtcatctttacttcctggtctttattaagcctgcaatttttcattttttgtaaaaggcgtcatcctagcccaacaaaagatatgcttgagccattactccggccccctttggcagggccgcagggctcctaacggcttcggctctggcttctctagcttcttggtttctctagagaagccagagccgttttgtaattcatttggtaaaacagcttctcacgaggagacggtggcagagactgtaatttcgtgaaacattattgtgtgccggatagaaggagccggtagaagtttgttttctcgtgcttcggctcctaatagcaaaacggccctggctctttgatggctctccgtgaggagccgtttttttaataccgtttggtacggcttcacgaagagccagaaaaagagccaccgagagagccctgctaaagggggcctccatatcgcctcttccggtggcctaattctgaatgtgtcatcctcaaaggcattattaggtgaatcacttgataaaccaaaggttatattgtttgtgtattattttgcttttttgatacttcattatagatgataatatactcttatgctgactctttattactacataacatgcacaacaatgactcatgtttgaacaagcttgttatgatattggataccagatgcatggcacaggtgagggaaatgaagtccccattctaatttactgattccaatgaatccatataacttcccctgttgcgacacacagacaatttatttatgcagtggagacttaccttttttctgagtactaccattacgagcttgcaggcttttctttacatgattagatactctgatgcatgaaaataatctctttgatgggttgtttgtaattgtgaatctgaagccattcaagtcctgtatttaggcattttcttcacatgcccttctagctcataggccttcaggattattgtggttcagaacctaatctaacctttctttttgttgcctgcggcagcatgagcatgagtggtctgttgcaaaagttactgtgattttctaagcgatgaaattattagcttacaggtcaggagggtatatgctgacaacttttgcatgtaaaatacacggtgcgatgcgactgatttatatgttgtatggacatgtaaagctactaaaaaagttgtggagagttattggttgtgccgtactgaacagcacaagaaaaacttctaaacatgttcttcattacgaacttatggtacctaagaaatgcctatgtcaagctgtcaggaaaagtaccatagatattatactttcttgccttatcagccttagcatagatattatactttgttaccttgtcaagcttgagacgatgacattatcttttgtatag

SEQ ID NO: 44687 - DNA, 775 bp, Zea Mays
cagggctgcgcagcgaggccggccaaaaggacattcggcgccgtgggcccgccgccctccagctgagcagggaaggcatcggcgagggaggcggtggaggaggatcttctctcacgtcaaaaagagagcagggaaagcataaattaaaggcaggaggagaagagaagggggaaggcgcagggctttccagccgcacaaaggaagaggcttcagaaagaagaaagcttcggtcttctgacggagagggagagcaaggcatccagtgagcgtgcctgtgggctcgcgataaatagcggcggcttgaagccgagggagagcatcaggtgctcttgccaccacagcccgccgttgtgagagctagcgttggaggtggcgatggcggcattgcaagagcagcaggaggaggaccgcgacgagggcgagggcgggaaagacgacgacgaggagtcagaggatgatggggtcaggagggtatatgctgacaacttttgcatgtaaaatacacggtgcgatgcgactgatttatatgttgtatggacatgtaaagctactaaaaaagttgtggagagttattggttgtgccgtactgaacagcacaagaaaaacttctaaacatgttcttcattacgaacttatggtacctaagaaatgcctatgtcaagctgtcaggaaaagtaccatagatattatactttcttgccttatcagccttagcatagatattatactttgttaccttgtcaagcttgagacgatgacattatcttttgtatag

SEQ ID NO: 44688 - DNA, 1773 bp, Zea Mays
cagggctgcgcagcgaggccggccaaaaggacattcggcgccgtgggcccgccgccctccagctgagcagggaaggcatcggcgagggaggcggtggaggaggatcttctctcacgtcaaaaagagagcagggaaagcataaattaaaggcaggaggagaagagaagggggaaggcgcagggctttccagccgcacaaaggaagaggcttcagaaagaagaaagcttcggtcttctgacggagagggagagcaaggcatccagtgagcgtgcctgtgggctcgcgataaatagcggcggcttgaagccgagggagagcatcaggtgctcttgccaccacagcccgccgttgtgagagctagcgttggaggtggcgatggcggcattgcaagagcagcaggaggaggaccgcgacgagggcgagggcgggaaagacgacgacgaggagtcagaggatgatgggatgcaaagctccaagcgcaaggagacggggggatggagcaaacggagaaagcggccgaccgcgtgctcccagccgtttccttcttcttccatgccgcgcgctccctcggcgcggggagagatcatcggtgggccgcttgtttgctcagcttcccttgccattcccacccaaccgcctcgacccgccctagctgcgtgcggtggcgtgacggcggacgccgacgccgggctagctccacctccacgtcgtctcgggtggccctggcagccacgcccacgctggtgatcactctgggacgaacgcagaggggattttgtttttgttttgttctttcttttacgcactttgcggagtgcggagagcaggagcaatggtgacttgaatgaggggctgggccaggttcaaaccgtggcctgccatgatgggccggggctgtcgacctgcaccctggagtagcatgatttcgttggacggatcaaatcatatccagtctgattggatgtctgcgtgcctgcgtatagatagatgcatgctaatagtattaaaataacttattttataactactcatacaacatgtgactttcacatatggagcttgttcggctgccattttcatccagctgcagctgcaaacaaacactgttcctacagcagcaagcagcaggcggctgcagcagctgccactgtagaaactagcagccgaacaagccgccactgtagaaactagcagccgaacaagccgatggtgtcccaatgttatatggccgtgtcatattaaatcaatgttcctctgaaggaaacacagacaatatatgtccaaagcctaaggatatgtgaaaatctacacttatatgtcagggattataagttagaagccttgtggacaaaaaaaaaggttctgagctaggtgattaggtccaagacaccatgtctaggaagaaggatgttcatgatttgaaatctaaatttacttcgtttagcagaaaaaaacattttattttcacttctaaggccgtatatttcccttttctgctcatgtattgcaaacagtttacaatatcctactttgcatagtaggcgttctaccagactagatggtgctgcctgagaacacaccattgtaataacatcattccggtctgattattgccagttatctgaacgtttcttctgctaatctatcaatgtctgttatcatgcaaatcaatctttagggcccgtttggcacagctccagctcctgattctaagcgaggatctggaggagccgtgccaaacgggtatttttttaaactgattcttgtgtgcag

SEQ ID NO: 44689 - DNA, 1136 bp, Zea Mays
aaaacctgtccttttaataagacttccatgcgagatagctttgaagcctgcagctgtgtttatgaaggttcagttagataacagtaccacttacagctctaaacagcaaactagcatccacaaccttgacaagtgtaatggagggcatttgcatgtatcagatgaaacatcttctgaagctgctcctaagacacataaatcagcagaggaccatgatgatagatccaaacctccacttataagaggtcgatttagagttatacctgggcatgttgactcaaaggctcaaccacctggcctacagaagtgtcacagcatgcagacaatttctcgccttccatcattaagtataccctcttccgcagaagttgcatcaaccattattggtggctccttctacatgcagctatatagtattctacagacaaatatgcttcagagggaccaaatacttaacgcgatgaagcaggtgagtggttgtgctatggcttcaccaggcgtaccttctatggcttcaccgtgtatcccttccacaagtcgctcgacatctccatcaggtgtaccatcagttgacagatccatgctggaagctgcacaagaaagggagaaagagctgctgaatgaggtcttggagctgcaatggcggttattgtgcacacaagatgaggttcaaaagcttaaagcaaaggcagcgcagatctgatgctgaagctgttaagggagcattaagggcgcgtcatgataagatgatctgttcattcggttttcaaatggctatttagcataggagagagatacaaaattaaggattggtgtatatttaaaaaggtgctagtgatgctcgagtgtccaatcctgtctaagcaggacattaatttcgtacaatctgtgtgtttgtgtttatgggtggcatggcgctgtgtttttgttggagcgcaattcccaggttgggacttgggaaagatagcttaacatgcctatgggttttaatctttccttttgttgttgcatgactttttggttattctcattctacgtagattggatgaggttgaaagaaactaggaatacttttttatttgctagagatttaaatccgcttaatcccgtctaattcacatgaattgagattaaaa

SEQ ID NO: 44690 - DNA, 1147 bp, Zea Mays
caaaacctgtccttttaataagacttccatgcgagatagctttgaagcctgcagctgtgtttatgaaggttcagttagataacagtaccacttacagctctaaacagcaaactagcatccacaaccttgacaagtgtaatggagggcatttgcatgtatcagatgaaacatcttctgaagctgctcctaagacacataaatcagcagaggaccatgatgatagatccaaacctccacttataagaggtcgatttagagttatacctgggcatgttgactcaaaggctcaaccacctggcctacagaagtgtcacagcatgcagacaatttctcgccttccatcattaagtataccctcttccgcagaagttgcatcaaccattattggtggctccttctacatgcagctatatagtattctacagacaaatatgcttcagagggaccaaatacttaacgcgatgaagcaggtgagtggttgtgctatggcttcaccaggcgtaccttctatggcttcaccgtgtatcccttccacaagtcgctcgacatctccatcaggtgtaccatcagttgacagatccatgctggaagctgcacaagaaagggagaaagagctgctgaatgaggtcttggagctgcaatggcgagtgctgcaggttattgtgcacacaagatgaggttcaaaagcttaaagcaaaggcagcgcagatctgatgctgaagctgttaagggagcattaagggcgcgtcatgataagatgatctgttcattcggttttcaaatggctatttagcataggagagagatacaaaattaaggattggtgtatatttaaaaaggtgctagtgatgctcgagtgtccaatcctgtctaagcaggacattaatttcgtacaatctgtgtgtttgtgtttatgggtggcatggcgctgtgtttttgttggagcgcaattcccaggttgggacttgggaaagatagcttaacatgcctatgggttttaatctttccttttgttgttgcatgactttttggttattctcattctacgtagattggatgaggttgaaagaaactaggaatacttttttatttgctagagatttaaatccgcttaatcccgtctaattcacatgaattgagattaaaa

SEQ ID NO: 44691 - DNA, 3768 bp, Zea Mays
agcctacacgcccccgcctcctgccctcctctgtccacatcctcgcctctccccactagttcgctcgcgtgatggtggtgcgggagcagcggaacaagggttcgtcgtcggccaccctgtgacaccccgcccccgcccccgcggcggaacctgcaaacccggaggccggagctccgacttcgtcggccatcgaccgcgtctgatcggcgctgggacctgccgtccggacgaaatcggtcagcatggcggggcccaatgagaaggcggcggcgggaggcgggggtggcgagaggcgcaagtacccgatccacatggaggactacgagctgtacgaggagatcgggcagggcgtcagcgccatcgtgtaccgcgcactctgcaagccactcgacgagatcgtcgccgtcaaggtggtcgacttcgagcgcaccaacagcgacctgaacaacatcgttcgtgaagctcagacaatgattttgatagaccatcctaacgttgtcaaggcgcattgttcatttgcaaaagaccaaacgttatgggtggttatgccgtatatggctggggggtcctgtcttcacataatgaaatcagtgcatcctactggattcgaggaacccatcatcgcgactatacttcgtgaagtcctgaaaggtttagagtatcttcaccatcatggctctatacatcgagatgtgaaggcaggaaatattctagtcgattctcggggtggaattaaacttggggactttggagtctctgcttgcctttttgattctggtgatagacagagggccaggaatacttttgtgggaacaccttgctggatggcgcccgaggttatggagcaactacatggatatgatttcagagcagacatatggtcctttggaattactgcacttgaacttgctcatggtcatgctcctttctctaagtaccctcccatgaaggtcttgctcatgacacttcagaatgctcctccaggtcttgactatgaaagagataagaaattcacgaggaacttcaagcaaatggttgctatgtgtttggtaaaagacccttcaaagaggccttcggcaaaaaagttgttgaagcaaccatttttcaagcaagctcgttccactgattttattgcacgaaagcttttagaaggattgcctggccttggtgttagatatcaagctttgaaggaaaaggatcaacatttaatggctcaaaagaaaatgtctgatggaaagaaagaagaaatctcgcaggatgaatacaaaaggggtatcagcagctggacctttgacatggatgacctgagatctcaagcttcattggtactcatataaatttccatcaacgatgttcacaccatgcaattccattttacaggatcaagcaccagaagggtcacacttgttgagagatttctcaacgaagtatgatgctgacattgaaaatgatatgacaaccaaagataagtcagccgtttcatctcctgatcagcctgctagcttagtgaggaatgcttctatgcgtgggatgcccataaacggttctttcaggaaagacaactctacagaaagcttcgatttggaatgtcaagagaaacatctggacattgttccgactagctcatcccctgaaaggaagttttcttttagttcttgctcatcaaatgggctccttttgtccaaagagaggttcgttctcatttacaggctaaataaagcatgcaacctagtctcaagcagtagcatgaccaaagtcagaagcaaaagcgcaaaacctgtccttttaataagacttccatgcgagatagctttgaagcctgcagctgtgtttatgaaggttcagttagataacagtaccacttacaggttgatgttttctaaagtgacttagcttgggtttacaataatgcacatgttccggcagcagtgttttctgtttgtgaacaattttcctactcaaaatcaagttgccaaagtatatatttctttccatcccattatatatttacataaattcactggcttgaataaacaagttagaagtaggttgtttttatatttatgacaacataattaatatgtaagctacactactataccaaaaaggagattacataaaagcagaaggaaacttacagacggctctttcgatttaccacattagcatttctgtcctctccattctttttaatatttttgcacctacttagtgttgttctagaagctatgttcttttttttagagcgcgggagagctatgttttattgatcatagagagaaaaggaggcccccaaacaacccatgcgtatcatagggggccaagtatgagaggtggaaacacacacacaaaagactaacttattaaaacaaaaataatctgacccgacctccacccaaggaactaattagttccacctatgcccaggccttggagcctcttagctcctgccaggcaccacaggttgtgctcatctcttatagaattcatgatcaagttaactgagggagagagagcgtaaataacacatgcattcctatgcttccggatacttcatgcccctatttttttcaaaaaaaaagaagtgatgaagttcttaagcacttgttttttcaaaaaagaaaccttttgtctatccttatctctttcaaaaatgtatgtgagaagtgcataatttatcttatctatcttttcaaagcaatatgcaactaagatccaatcctttcagctctaaacagcaaactagcatccacaaccttgacaagtgtaatggagggcatttgcatgtatcagatgaaacatcttctgaagctgctcctaagacacataaatcagcagaggaccatgatgatagatccaaacctccacttataagaggtcgatttagagttatacctgggcatgttgactcaaaggctcaaccacctggcctacagaagtgtcacagcatgcagacaatttctcgccttccatcattaagtataccctcttccgcagaagttgcatcaaccattattggtggctccttctacatgcagctatatagtattctacagacaaatatgcttcagagggaccaaatacttaacgcgatgaagcaggtgagtggttgtgctatggcttcaccaggcgtaccttctatggcttcaccgtgtatcccttccacaagtcgctcgacatctccatcaggtgtaccatcagttgacagatccatgctggaagctgcacaagaaagggagaaagagctgctgaatgaggtcttggagctgcaatggcggttattgtgcacacaagatgaggttcaaaagcttaaagcaaaggcagcgcagatctgatgctgaagctgttaagggagcattaagggcgcgtcatgataagatgatctgttcattcggttttcaaatggctatttagcataggagagagatacaaaattaaggattggtgtatatttaaaaaggtgctagtgatgctcgagtgtccaatcctgtctaagcaggacattaatttcgtacaatctgtgtgtttgtgtttatgggtggcatggcgctgtgtttttgttggagcgcaattcccaggttgggacttgggaaagatagcttaacatgcctatgggttttaatctttccttttgttgttgcatgactttttggttattctcattctacgtagattggatgaggttgaaagaaactaggaatacttttttatttgctagagatttaaatccgcttaatcccgtctaattcacatgaattgagattaaaa

SEQ ID NO: 44692 - DNA, 2760 bp, Zea Mays
agcctacacgcccccgcctcctgccctcctctgtccacatcctcgcctctccccactagttcgctcgcgtgatggtggtgcgggagcagcggaacaagggttcgtcgtcggccaccctgtgacaccccgcccccgcccccgcggcggaacctgcaaacccggaggccggagctccgacttcgtcggccatcgaccgcgtctgatcggcgctgggacctgccgtccggacgaaatcggtcagcatggcggggcccaatgagaaggcggcggcgggaggcgggggtggcgagaggcgcaagtacccgatccacatggaggactacgagctgtacgaggagatcgggcagggcgtcagcgccatcgtgtaccgcgcactctgcaagccactcgacgagatcgtcgccgtcaaggtggtcgacttcgagcgcaccaacagcgacctgaacaacatcgttcgtgaagctcagacaatgattttgatagaccatcctaacgttgtcaaggcgcattgttcatttgcaaaagaccaaacgttatgggtggttatgccgtatatggctggggggtcctgtcttcacataatgaaatcagtgcatcctactggattcgaggaacccatcatcgcgactatacttcgtgaagtcctgaaaggtttagagtatcttcaccatcatggctctatacatcgagatgtgaaggcaggaaatattctagtcgattctcggggtggaattaaacttggggactttggagtctctgcttgcctttttgattctggtgatagacagagggccaggaatacttttgtgggaacaccttgctggatggcgcccgaggttatggagcaactacatggatatgatttcagagcagacatatggtcctttggaattactgcacttgaacttgctcatggtcatgctcctttctctaagtaccctcccatgaaggtcttgctcatgacacttcagaatgctcctccaggtcttgactatgaaagagataagaaattcacgaggaacttcaagcaaatggttgctatgtgtttggtaaaagacccttcaaagaggccttcggcaaaaaagttgttgaagcaaccatttttcaagcaagctcgttccactgattttattgcacgaaagcttttagaaggattgcctggccttggtgttagatatcaagctttgaaggtacagtggttttaagttctactttatgactaactattcatcgtgaaattagcacagaaaggttcgccatgatgcaggaaaaggatcaacatttaatggctcaaaagaaaatgtctgatggaaagaaagaagaaatctcgcaggatgaatacaaaaggggtatcagcagctggacctttgacatggatgacctgagatctcaagcttcattggatcaagcaccagaagggtcacacttgttgagagatttctcaacgaagtatgatgctgacattttggtaggaaaatgatatgacaaccaaagataagtcagccgtttcatctcctgatcagcctgctagcttagtgaggaatgcttctatgcgtgggatgcccataaacggttctttcaggaaagacaactctacagaaagcttcgatttggaatgtcaagagaaacatctggacattgttccgactagctcatcccctgaaaggaagttttcttttagttcttgctcatcaaatgggctccttttgtccaaagagagctctaaacagcaaactagcatccacaaccttgacaagtgtaatggagggcatttgcatgtatcagatgaaacatcttctgaagctgctcctaagacacataaatcagcagaggaccatgatgatagatccaaacctccacttataagaggtcgatttagagttatacctgggcatgttgactcaaaggctcaaccacctggcctacagaagtgtcacagcatgcagacaatttctcgccttccatcattaagtataccctcttccgcagaagttgcatcaaccattattggtggctccttctacatgcagctatatagtattctacagacaaatatgcttcagagggaccaaatacttaacgcgatgaagcaggtgagtggttgtgctatggcttcaccaggcgtaccttctatggcttcaccgtgtatcccttccacaagtcgctcgacatctccatcaggtgtaccatcagttgacagatccatgctggaagctgcacaagaaagggagaaagagctgctgaatgaggtcttggagctgcaatggcggttattgtgcacacaagatgaggttcaaaagcttaaagcaaaggcagcgcagatctgatgctgaagctgttaagggagcattaagggcgcgtcatgataagatgatctgttcattcggttttcaaatggctatttagcataggagagagatacaaaattaaggattggtgtatatttaaaaaggtgctagtgatgctcgagtgtccaatcctgtctaagcaggacattaatttcgtacaatctgtgtgtttgtgtttatgggtggcatggcgctgtgtttttgttggagcgcaattcccaggttgggacttgggaaagatagcttaacatgcctatgggttttaatctttccttttgttgttgcatgactttttggttattctcattctacgtagattggatgaggttgaaagaaactaggaatacttttttatttgctagagatttaaatccgcttaatcccgtctaattcacatgaattgagattaaaa

SEQ ID NO: 44693 - DNA, 3025 bp, Zea Mays
agcctacacgcccccgcctcctgccctcctctgtccacatcctcgcctctccccactagttcgctcgcgtgatggtggtgcgggagcagcggaacaagggttcgtcgtcggccaccctgtgacaccccgcccccgcccccgcggcggaacctgcaaacccggaggccggagctccgacttcgtcggccatcgaccgcgtctgatcggcgctgggacctgccgtccggacgaaatcggtcagcatggcggggcccaatgagaaggcggcggcgggaggcgggggtggcgagaggcgcaagtacccgatccacatggaggactacgagctgtacgaggagatcgggcagggcgtcagcgccatcgtgtaccgcgcactctgcaagccactcgacgagatcgtcgccgtcaaggtggtcgacttcgagcgcaccaacagcgacctgaacaacatcgttcgtgaagctcagacaatgattttgatagaccatcctaacgttgtcaaggcgcattgttcatttgcaaaagaccaaacgttatgggtggttatgccgtatatggctggggggtcctgtcttcacataatgaaatcagtgcatcctactggattcgaggaacccatcatcgcgactatacttcgtgaagtcctgaaaggtttagagtatcttcaccatcatggctctatacatcgagatgtgaaggcaggaaatattctagtcgattctcggggtggaattaaacttggggactttggagtctctgcttgcctttttgattctggtgatagacagagggccaggaatacttttgtgggaacaccttgctggatggcgcccgaggttatggagcaactacatggatatgatttcagagcagacatatggtcctttggaattactgcacttgaacttgctcatggtcatgctcctttctctaagtaccctcccatgaaggtcttgctcatgacacttcagaatgctcctccaggtcttgactatgaaagagataagaaattcacgaggaacttcaagcaaatggttgctatgtgtttggtaaaagacccttcaaagaggccttcggcaaaaaagttgttgaagcaaccatttttcaagcaagctcgttccactgattttattgcacgaaagcttttagaaggattgcctggccttggtgttagatatcaagctttgaaggtacagtggttttaagttctactttatgactaactattcatcgtgaaattagcacagaaaggttcgccatgatgcaggaaaaggatcaacatttaatggctcaaaagaaaatgtctgatggaaagaaagaagaaatctcgcaggatgaatacaaaaggggtatcagcagctggacctttgacatggatgacctgagatctcaagcttcattgaatgtgaagacagtaccttatgcaaagattcagatatatctttctatgacttggacagtttacaggatcaagcaccagaagggtcacacttgttgagagatttctcaacgaagtatgatgctgacattgaaaatgatatgacaaccaaagataagtcagccgtttcatctcctgatcagcctgctagcttagtgaggaatgcttctatgcgtgggatgcccataaacggttctttcaggaaagacaactctacagaaagcttcgatttggaatgtcaagagaaacatctggacattgttccgactagctcatcccctgaaaggaagttttcttttagttcttgctcatcaaatgggctccttttgtccaaagagagctctaaacagcaaactagcatccacaaccttgacaagtgtaatggagggcatttgcatgtatcagatgaaacatcttctgaagctgctcctaagacacataaatcagcagaggaccatgatgatagatccaaacctccacttataagaggtcgatttagagttatacctgggcatgttgactcaaaggctcaaccacctggcctacagaagtgtcacagcatgcaggttatacgctccacttttactactttttttggtaaaatcaggagtagaataaaatgtcattcttgttttgttaccaaagcacagtgtaaaagacagtcacagttttttttaaaaaaaaataagatagccaaaaaatcatgtttgtactattttatcttttcactgtttgatgtttttaactaagcataccattttgtgaatacacagacaatttctcgccttccatcattaagtataccctcttccgcagaagttgcatcaaccattattggtggctccttctacatgcagctatatagtattctacagacaaatatgcttcagagggaccaaatacttaacgcgatgaagcaggtgagtggttgtgctatggcttcaccaggcgtaccttctatggcttcaccgtgtatcccttccacaagtcgctcgacatctccatcaggtgtaccatcagttgacagatccatgctggaagctgcacaagaaagggagaaagagctgctgaatgaggtcttggagctgcaatggcggttattgtgcacacaagatgaggttcaaaagcttaaagcaaaggcagcgcagatctgatgctgaagctgttaagggagcattaagggcgcgtcatgataagatgatctgttcattcggttttcaaatggctatttagcataggagagagatacaaaattaaggattggtgtatatttaaaaaggtgctagtgatgctcgagtgtccaatcctgtctaagcaggacattaatttcgtacaatctgtgtgtttgtgtttatgggtggcatggcgctgtgtttttgttggagcgcaattcccaggttgggacttgggaaagatagcttaacatgcctatgggttttaatctttccttttgttgttgcatgactttttggttattctcattctacgtagattggatgaggttgaaagaaactaggaatacttttttatttgctagagatttaaatccgcttaatcccgtctaattcacatgaattgagattaaaa

SEQ ID NO: 44694 - DNA, 2794 bp, Zea Mays
tgtcactacagcctacacgcccccgcctcctgccctcctctgtccacatcctcgcctctccccactagttcgctcgcgtgatggtggtgcgggagcagcggaacaagggttcgtcgtcggccaccctgtgacaccccgcccccgcccccgcggcggaacctgcaaacccggaggccggagctccgacttcgtcggccatcgaccgcgtctgatcggcgctgggacctgccgtccggacgaaatcggtcagcatggcggggcccaatgagaaggcggcggcgggaggcgggggtggcgagaggcgcaagtacccgatccacatggaggactacgagctgtacgaggagatcgggcagggcgtcagcgccatcgtgtaccgcgcactctgcaagccactcgacgagatcgtcgccgtcaaggtggtcgacttcgagcgcaccaacagcgacctgaacaacatcgttcgtgaagctcagacaatgattttgatagaccatcctaacgttgtcaaggcgcattgttcatttgcaaaagaccaaacgttatgggtggttatgccgtatatggctggggggtcctgtcttcacataatgaaatcagtgcatcctactggattcgaggaacccatcatcgcgactatacttcgtgaagtcctgaaaggtttagagtatcttcaccatcatggctctatacatcgagatgtgaaggcaggaaatattctagtcgattctcggggtggaattaaacttggggactttggagtctctgcttgcctttttgattctggtgatagacagagggccaggaatacttttgtgggaacaccttgctggatggcgcccgaggttatggagcaactacatggatatgatttcagagcagacatatggtcctttggaattactgcacttgaacttgctcatggtcatgctcctttctctaagtaccctcccatgaaggtcttgctcatgacacttcagaatgctcctccaggtcttgactatgaaagagataagaaattcacgaggaacttcaagcaaatggttgctatgtgtttggtaaaagacccttcaaagaggccttcggcaaaaaagttgttgaagcaaccatttttcaagcaagctcgttccactgattttattgcacgaaagcttttagaaggattgcctggccttggtgttagatatcaagctttgaaggtacagtggttttaagttctactttatgactaactattcatcgtgaaattagcacagaaaggttcgccatgatgcaggaaaaggatcaacatttaatggctcaaaagaaaatgtctgatggaaagaaagaagaaatctcgcaggatgaatacaaaaggggtatcagcagctggacctttgacatggatgacctgagatctcaagcttcattggtactcatataaatttccatcaacgatgttcacaccatgcaattccatgtaattgacctttttccagggcacagaatgtgaagacagtaccttatgcaaagattcagatatatctttctatgacttggacagtttacaggatcaagcaccagaagggtcacacttgttgagagatttctcaacgaagtatgatgctgacattgaaaatgatatgacaaccaaagataagtcagccgtttcatctcctgatcagcctgctagcttagtgagttctcactgtcaggaatgcttctatgcgtgggatgcccataaacggttctttcaggaaagacaactctacagaaagcttcgatttggaatgtcaagagaaacatctggacattgttccgactagctcatcccctgaaaggaagttttcttttagttcttgctcatcaaatgggctccttttgtccaaagagagctctaaacagcaaactagcatccacaaccttgacaagtgtaatggagggcatttgcatgtatcagatgaaacatcttctgaagctgctcctaagacacataaatcagcagaggaccatgatgatagatccaaacctccacttataagaggtcgatttagagttatacctgggcatgttgactcaaaggctcaaccacctggcctacagaagtgtcacagcatgcaggaccaaatacttaacgcgatgaagcaggtgagtggttgtgctatggcttcaccaggcgtaccttctatggcttcaccgtgtatcccttccacaagtcgctcgacatctccatcaggtgtaccatcagttgacagatccatgctggaagctgcacaagaaagggagaaagagctgctgaatgaggtcttggagctgcaatggcggttattgtgcacacaagatgaggttcaaaagcttaaagcaaaggcagcgcagatctgatgctgaagctgttaagggagcattaagggcgcgtcatgataagatgatctgttcattcggttttcaaatggctatttagcataggagagagatacaaaattaaggattggtgtatatttaaaaaggtgctagtgatgctcgagtgtccaatcctgtctaagcaggacattaatttcgtacaatctgtgtgtttgtgtttatgggtggcatggcgctgtgtttttgttggagcgcaattcccaggttgggacttgggaaagatagcttaacatgcctatgggttttaatctttccttttgttgttgcatgactttttggttattctcattctacgtagattggatgaggttgaaagaaactaggaatacttttttatttgctagagatttaaatccgcttaatcccgtctaattcacatgaattgagattaaaa

SEQ ID NO: 44695 - DNA, 2843 bp, Zea Mays
cgcaacgcacggcctgtcactacagcctacacgcccccgcctcctgccctcctctgtccacatcctcgcctctccccactagttcgctcgcgtgatggtggtgcgggagcagcggaacaagggttcgtcgtcggccaccctgtgacaccccgcccccgcccccgcggcggaacctgcaaacccggaggccggagctccgacttcgtcggccatcgaccgcgtctgatcggcgctgggacctgccgtccggacgaaatcggtcagcatggcggggcccaatgagaaggcggcggcgggaggcgggggtggcgagaggcgcaagtacccgatccacatggaggactacgagctgtacgaggagatcgggcagggcgtcagcgccatcgtgtaccgcgcactctgcaagccactcgacgagatcgtcgccgtcaaggtggtcgacttcgagcgcaccaacagcgacctgaacaacatcgttcgtgaagctcagacaatgattttgatagaccatcctaacgttgtcaaggcgcattgttcatttgcaaaagaccaaacgttatgggtggttatgccgtatatggctggggggtcctgtcttcacataatgaaatcagtgcatcctactggattcgaggaacccatcatcgcgactatacttcgtgaagtcctgaaaggtttagagtatcttcaccatcatggctctatacatcgagatgtgaaggcaggaaatattctagtcgattctcggggtggaattaaacttggggactttggagtctctgcttgcctttttgattctggtgatagacagagggccaggaatacttttgtgggaacaccttgctggatggcgcccgaggttatggagcaactacatggatatgatttcagacatatggtcctttggaattactgcacttgaacttgctcatggtcatgctcctttctctaagtaccctcccatgaaggtcttgctcatgacacttcagaatgctcctccaggtcttgactatgaaagagataagaaattcacgaggaacttcaagcaaatggttgctatgtgtttggtaaaagacccttcaaagaggccttcggcaaaaaagttgttgaagcaaccatttttcaagcaagctcgttccactgattttattgcacgaaagcttttagaaggattgcctggccttggtgttagatatcaagctttgaaggtacagtggttttaagttctactttatgactaactattcatcgtgaaattagcacagaaaggttcgccatgatgcaggaaaaggatcaacatttaatggctcaaaagaaaatgtctgatggaaagaaagaagaaatctcgcaggatgaatacaaaaggggtatcagcagctggacctttgacatggatgacctgagatctcaagcttcattgggcacagaatgtgaagacagtaccttatgcaaagattcagatatatctttctatgacttggacagtttacaggatcaagcaccagaagggtcacacttgttgagagatttctcaacgaagtatgatgctgacattgaaaatgatatgacaaccaaagataagtcagccgtttcatctcctgatcagcctgctagcttagtgaggaatgcttctatgcgtgggatgcccataaacggttctttcaggaaagacaactctacagaaagcttcgatttggaatgtcaagagaaacatctggacattgttccgactagctcatcccctgaaaggaagttttcttttagttcttgctcatcaaatgggctccttttgtccaaagagagctctaaacagcaaactagcatccacaaccttgacaagtgtaatggagggcatttgcatgtatcagatgaaacatcttctgaagctgctcctaagacacataaatcagcagaggaccatgatgatagatccaaacctccacttataagaggtcgatttagagttatacctgggcatgttgactcaaaggctcaaccacctggcctacagaagtgtcacagcatgcagacaatttctcgccttccatcattaagtataccctcttccgcagaagttgcatcaaccattattggtggctccttctacatgcagctatatagtattctacagacaaatatgcttcagagggaccaaatacttaacgcgatgaagcaggtgagtggttgtgctatggcttcaccaggcgtaccttctatggcttcaccgtgtatcccttccacaagtcgctcgacatctccatcaggtgtaccatcagttgacagatccatgctggaagctgcacaagaaagggagaaagagctgctgaatgaggtcttggagctgcaatggcggttattgtgcacacaagatgaggttcaaaagcttaaagcaaaggcagcgcagatctgatgctgaagctgttaagggagcattaagggcgcgtcatgataagatgatctgttcattcggttttcaaatggctatttagcataggagagagatacaaaattaaggattggtgtatatttaaaaaggtgctagtgatgctcgagtgtccaatcctgtctaagcaggacattaatttcgtacaatctgtgtgtttgtgtttatgggtggcatggcgctgtgtttttgttggagcgcaattcccaggttgggacttgggaaagatagcttaacatgcctatgggttttaatctttccttttgttgttgcatgactttttggttattctcattctacgtagattggatgaggttgaaagaaactaggaatacttttttatttgctagagatttaaatccgcttaatcccgtctaattcacatgaattgagattaaaa

SEQ ID NO: 44696 - DNA, 2787 bp, Zea Mays
ctcctcctccgcaacgcacggcctgtcactacagcctacacgcccccgcctcctgccctcctctgtccacatcctcgcctctccccactagttcgctcgcgtgatggtggtgcgggagcagcggaacaagggttcgtcgtcggccaccctgtgacaccccgcccccgcccccgcggcggaacctgcaaacccggaggccggagctccgacttcgtcggccatcgaccgcgtctgatcggcgctgggacctgccgtccggacgaaatcggtcagcatggcggggcccaatgagaaggcggcggcgggaggcgggggtggcgagaggcgcaagtacccgatccacatggaggactacgagctgtacgaggagatcgggcagggcgtcagcgccatcgtgtaccgcgcactctgcaagccactcgacgagatcgtcgccgtcaaggtggtcgacttcgagcgcaccaacagcgacctgaacaacatcgttcgtgaagctcagacaatgattttgatagaccatcctaacgttgtcaaggcgcattgttcatttgcaaaagaccaaacgttatgggtggttatgccgtatatggctggggggtcctgtcttcacataatgaaatcagtgcatcctactggattcgaggaacccatcatcgcgactatacttcgtgaagtcctgaaaggtttagagtatcttcaccatcatggctctatacatcgagatgtgaaggcaggaaatattctagtcgattctcggggtggaattaaacttggggactttggagtctctgcttgcctttttgattctggtgatagacagagggccaggaatacttttgtgggaacaccttgctggatggcgcccgaggttatggagcaactacatggatatgatttcagagcagacatatggtcctttggaattactgcacttgaacttgctcatggtcatgctcctttctctaagtaccctcccatgaaggtcttgctcatgacacttcagaatgctcctccaggtcttgactatgaaagagataagaaattcacgaggaacttcaagcaaatggttgctatgtgtttggtaaaagacccttcaaagaggccttcggcaaaaaagttgttgaagcaaccatttttcaagcaagctcgttccactgattttattgcacgaaagcttttagaaggattgcctggccttggtgttagatatcaagctttgaaggaaaaggatcaacatttaatggctcaaaagaaaatgtctgatggaaagaaagaagaaatctcgcaggatgaatacaaaaggggtatcagcagctggacctttgacatggatgacctgagatctcaagcttcattgggcacagaatgtgaagacagtaccttatgcaaagattcagatatatctttctatgacttggacagtttacaggatcaagcaccagaagggtcacacttgttgagagatttctcaacgaagtatgatgctgacattttggtaggaaaatgatatgacaaccaaagataagtcagccgtttcatctcctgatcagcctgctagcttagtgaggaatgcttctatgcgtgggatgcccataaacggttctttcaggaaagacaactctacagaaagcttcgatttggaatgtcaagagaaacatctggacattgttccgactagctcatcccctgaaaggaagttttcttttagttcttgctcatcaaatgggctccttttgtccaaagagagctctaaacagcaaactagcatccacaaccttgacaagtgtaatggagggcatttgcatgtatcagatgaaacatcttctgaagctgctcctaagacacataaatcagcagaggaccatgatgatagatccaaacctccacttataagaggtcgatttagagttatacctgggcatgttgactcaaaggctcaaccacctggcctacagaagtgtcacagcatgcagacaatttctcgccttccatcattaagtataccctcttccgcagaagttgcatcaaccattattggtggctccttctacatgcagctatatagtattctacagacaaatatgcttcagagggaccaaatacttaacgcgatgaagcaggtgagtggttgtgctatggcttcaccaggcgtaccttctatggcttcaccgtgtatcccttccacaagtcgctcgacatctccatcaggtgtaccatcagttgacagatccatgctggaagctgcacaagaaagggagaaagagctgctgaatgaggtcttggagctgcaatggcggttattgtgcacacaagatgaggttcaaaagcttaaagcaaaggcagcgcagatctgatgctgaagctgttaagggagcattaagggcgcgtcatgataagatgatctgttcattcggttttcaaatggctatttagcataggagagagatacaaaattaaggattggtgtatatttaaaaaggtgctagtgatgctcgagtgtccaatcctgtctaagcaggacattaatttcgtacaatctgtgtgtttgtgtttatgggtggcatggcgctgtgtttttgttggagcgcaattcccaggttgggacttgggaaagatagcttaacatgcctatgggttttaatctttccttttgttgttgcatgactttttggttattctcattctacgtagattggatgaggttgaaagaaactaggaatacttttttatttgctagagatttaaatccgcttaatcccgtctaattcacatgaattgagattaaaa

SEQ ID NO: 44697 - DNA, 2861 bp, Zea Mays
ctttctcctcctccgcaacgcacggcctgtcactacagcctacacgcccccgcctcctgccctcctctgtccacatcctcgcctctccccactagttcgctcgcgtgatggtggtgcgggagcagcggaacaagggttcgtcgtcggccaccctgtgacaccccgcccccgcccccgcggcggaacctgcaaacccggaggccggagctccgacttcgtcggccatcgaccgcgtctgatcggcgctgggacctgccgtccggacgaaatcggtcagcatggcggggcccaatgagaaggcggcggcgggaggcgggggtggcgagaggcgcaagtacccgatccacatggaggactacgagctgtacgaggagatcgggcagggcgtcagcgccatcgtgtaccgcgcactctgcaagccactcgacgagatcgtcgccgtcaaggtggtcgacttcgagcgcaccaacagcgacctgaacaacatcgttcgtgaagctcagacaatgattttgatagaccatcctaacgttgtcaaggcgcattgttcatttgcaaaagaccaaacgttatgggtggttatgccgtatatggctggggggtcctgtcttcacataatgaaatcagtgcatcctactggattcgaggaacccatcatcgcgactatacttcgtgaagtcctgaaaggtttagagtatcttcaccatcatggctctatacatcgagatgtgaaggcaggaaatattctagtcgattctcggggtggaattaaacttggggactttggagtctctgcttgcctttttgattctggtgatagacagagggccaggaatacttttgtgggaacaccttgctggatggcgcccgaggttatggagcaactacatggatatgatttcagagcagacatatggtcctttggaattactgcacttgaacttgctcatggtcatgctcctttctctaagtaccctcccatgaaggtcttgctcatgacacttcagaatgctcctccaggtcttgactatgaaagagataagaaattcacgaggaacttcaagcaaatggttgctatgtgtttggtaaaagacccttcaaagaggccttcggcaaaaaagttgttgaagcaaccatttttcaagcaagctcgttccactgattttattgcacgaaagcttttagaaggattgcctggccttggtgttagatatcaagctttgaaggtacagtggttttaagttctactttatgactaactattcatcgtgaaattagcacagaaaggttcgccatgatgcaggaaaaggatcaacatttaatggctcaaaagaaaatgtctgatggaaagaaagaagaaatctcgcaggatgaatacaaaaggggtatcagcagctggacctttgacatggatgacctgagatctcaagcttcattgaatgtgaagacagtaccttatgcaaagattcagatatatctttctatgacttggacagtttacaggatcaagcaccagaagggtcacacttgttgagagatttctcaacgaagtatgatgctgacattttggtaggaaaatgatatgacaaccaaagataagtcagccgtttcatctcctgatcagcctgctagcttagtgaggaatgcttctatgcgtgggatgcccataaacggttctttcaggaaagacaactctacagaaagcttcgatttggaatgtcaagagaaacatctggacattgttccgactagctcatcccctgaaaggaagttttcttttagttcttgctcatcaaatgggctccttttgtccaaagagagctctaaacagcaaactagcatccacaaccttgacaagtgtaatggagggcatttgcatgtatcagatgaaacatcttctgaagctgctcctaagacacataaatcagcagaggaccatgatgatagatccaaacctccacttataagaggtcgatttagagttatacctgggcatgttgactcaaaggctcaaccacctggcctacagaagtgtcacagcatgcagacaatttctcgccttccatcattaagtataccctcttccgcagaagttgcatcaaccattattggtggctccttctacatgcagctatatagtattctacagacaaatatgcttcagagggaccaaatacttaacgcgatgaagcaggtgagtggttgtgctatggcttcaccaggcgtaccttctatggcttcaccgtgtatcccttccacaagtcgctcgacatctccatcaggtgtaccatcagttgacagatccatgctggaagctgcacaagaaagggagaaagagctgctgaatgaggtcttggagctgcaatggcggttattgtgcacacaagatgaggttcaaaagcttaaagcaaaggcagcgcagatctgatgctgaagctgttaagggagcattaagggcgcgtcatgataagatgatctgttcattcggttttcaaatggctatttagcataggagagagatacaaaattaaggattggtgtatatttaaaaaggtgctagtgatgctcgagtgtccaatcctgtctaagcaggacattaatttcgtacaatctgtgtgtttgtgtttatgggtggcatggcgctgtgtttttgttggagcgcaattcccaggttgggacttgggaaagatagcttaacatgcctatgggttttaatctttccttttgttgttgcatgactttttggttattctcattctacgtagattggatgaggttgaaagaaactaggaatacttttttatttgctagagatttaaatccgcttaatcccgtctaattcacatgaattgagattaaaa

SEQ ID NO: 44698 - DNA, 2861 bp, Zea Mays
tttcctttctcctcctccgcaacgcacggcctgtcactacagcctacacgcccccgcctcctgccctcctctgtccacatcctcgcctctccccactagttcgctcgcgtgatggtggtgcgggagcagcggaacaagggttcgtcgtcggccaccctgtgacaccccgcccccgcccccgcggcggaacctgcaaacccggaggccggagctccgacttcgtcggccatcgaccgcgtctgatcggcgctgggacctgccgtccggacgaaatcggtcagcatggcggggcccaatgagaaggcggcggcgggaggcgggggtggcgagaggcgcaagtacccgatccacatggaggactacgagctgtacgaggagatcgggcagggcgtcagcgccatcgtgtaccgcgcactctgcaagccactcgacgagatcgtcgccgtcaaggtggtcgacttcgagcgcaccaacagcgacctgaacaacatcgttcgtgaagctcagacaatgattttgatagaccatcctaacgttgtcaaggcgcattgttcatttgcaaaagaccaaacgttatgggtggttatgccgtatatggctggggggtcctgtcttcacataatgaaatcagtgcatcctactggattcgaggaacccatcatcgcgactatacttcgtgaagtcctgaaaggtttagagtatcttcaccatcatggctctatacatcgagatgtgaaggaaatattctagtcgattctcggggtggaattaaacttggggactttggagtctctgcttgcctttttgattctggtgatagacagagggccaggaatacttttgtgggaacaccttgctggatggcgcccgaggttatggagcaactacatggatatgatttcagagcagacatatggtcctttggaattactgcacttgaacttgctcatggtcatgctcctttctctaagtaccctcccatgaaggtcttgctcatgacacttcagaatgctcctccaggtcttgactatgaaagagataagaaattcacgaggaacttcaagcaaatggttgctatgtgtttggtaaaagacccttcaaagaggccttcggcaaaaaagttgttgaagcaaccatttttcaagcaagctcgttccactgattttattgcacgaaagcttttagaaggattgcctggccttggtgttagatatcaagctttgaaggtacagtggttttaagttctactttatgactaactattcatcgtgaaattagcacagaaaggttcgccatgatgcaggaaaaggatcaacatttaatggctcaaaagaaaatgtctgatggaaagaaagaagaaatctcgcaggatgaatacaaaaggggtatcagcagctggacctttgacatggatgacctgagatctcaagcttcattgggcacagaatgtgaagacagtaccttatgcaaagattcagatatatctttctatgacttggacagtttacaggatcaagcaccagaagggtcacacttgttgagagatttctcaacgaagtatgatgctgacattgaaaatgatatgacaaccaaagataagtcagccgtttcatctcctgatcagcctgctagcttagtgaggaatgcttctatgcgtgggatgcccataaacggttctttcaggaaagacaactctacagaaagcttcgatttggaatgtcaagagaaacatctggacattgttccgactagctcatcccctgaaaggaagttttcttttagttcttgctcatcaaatgggctccttttgtccaaagagagctctaaacagcaaactagcatccacaaccttgacaagtgtaatggagggcatttgcatgtatcagatgaaacatcttctgaagctgctcctaagacacataaatcagcagaggaccatgatgatagatccaaacctccacttataagaggtcgatttagagttatacctgggcatgttgactcaaaggctcaaccacctggcctacagaagtgtcacagcatgcagacaatttctcgccttccatcattaagtataccctcttccgcagaagttgcatcaaccattattggtggctccttctacatgcagctatatagtattctacagacaaatatgcttcagagggaccaaatacttaacgcgatgaagcaggtgagtggttgtgctatggcttcaccaggcgtaccttctatggcttcaccgtgtatcccttccacaagtcgctcgacatctccatcaggtgtaccatcagttgacagatccatgctggaagctgcacaagaaagggagaaagagctgctgaatgaggtcttggagctgcaatggcggttattgtgcacacaagatgaggttcaaaagcttaaagcaaaggcagcgcagatctgatgctgaagctgttaagggagcattaagggcgcgtcatgataagatgatctgttcattcggttttcaaatggctatttagcataggagagagatacaaaattaaggattggtgtatatttaaaaaggtgctagtgatgctcgagtgtccaatcctgtctaagcaggacattaatttcgtacaatctgtgtgtttgtgtttatgggtggcatggcgctgtgtttttgttggagcgcaattcccaggttgggacttgggaaagatagcttaacatgcctatgggttttaatctttccttttgttgttgcatgactttttggttattctcattctacgtagattggatgaggttgaaagaaactaggaatacttttttatttgctagagatttaaatccgcttaatcccgtctaattcacatgaattgagattaaaa

SEQ ID NO: 44699 - DNA, 3917 bp, Zea Mays
cttcctcttctccattttcctttctcctcctccgcaacgcacggcctgtcactacagcctacacgcccccgcctcctgccctcctctgtccacatcctcgcctctccccactagttcgctcgcgtgatggtggtgcgggagcagcggaacaagggttcgtcgtcggccaccctgtgacaccccgcccccgcccccgcggcggaacctgcaaacccggaggccggagctccgacttcgtcggccatcgaccgcgtctgatcggcgctgggacctgccgtccggacgaaatcggtcagcatggcggggcccaatgagaaggcggcggcgggaggcgggggtggcgagaggcgcaagtacccgatccacatggaggactacgagctgtacgaggagatcgggcagggcgtcagcgccatcgtgtaccgcgcactctgcaagccactcgacgagatcgtcgccgtcaaggtggtcgacttcgagcgcaccaacagcgacctgaacaacatcgttcgtgaagctcagacaatgattttgatagaccatcctaacgttgtcaaggcgcattgttcatttgcaaaagaccaaacgttatgggtggttatgccgtatatggctggggggtcctgtcttcacataatgaaatcagtgcatcctactggattcgaggaacccatcatcgcgactatacttcgtgaagtcctgaaaggtttagagtatcttcaccatcatggctctatacatcgagatgtgaaggcaggaaatattctagtcgattctcggggtggaattaaacttggggactttggagtctctgcttgcctttttgattctggtgatagacagagggccaggaatacttttgtgggaacaccttgctggatggcgcccgaggttatggagcaactacatggatatgatttcagagcagacatatggtcctttggaattactgcacttgaacttgctcatggtcatgctcctttctctaagtaccctcccatgaaggtcttgctcatgacacttcagaatgctcctccaggtcttgactatgaaagagataagaaattcacgaggaacttcaagcaaatggttgctatgtgtttggtaaaagacccttcaaagaggccttcggcaaaaaagttgttgaagcaaccatttttcaagcaagctcgttccactgattttattgcacgaaagcttttagaaggattgcctggccttggtgttagatatcaagctttgaaggtacagtggttttaagttctactttatgactaactattcatcgtgaaattagcacagaaaggttcgccatgatgcaggaaaaggatcaacatttaatggctcaaaagaaaatgtctgatggaaagaaagaagaaatctcgcaggatgaatacaaaaggggtatcagcagctggacctttgacatggatgacctgagatctcaagcttcattgggcacagaatgtgaagacagtaccttatgcaaagattcagatatatctttctatgacttggacagtttacaggatcaagcaccagaagggtcacacttgttgagagatttctcaacgaagtatgatgctgacattgaaaatgatatgacaaccaaagataagtcagccgtttcatctcctgatcagcctgctagcttagtgaggaatgcttctatgcgtgggatgcccataaacggttctttcaggaaagacaactctacagaaagcttcgatttggaatgtcaagagaaacatctggacattgttccgactagctcatcccctgaaaggaagttttcttttagttcttgctcatcaaatgggctccttttgtccaaagagaggttcgttctcatttacaggctaaataaagcatgcaacctagtctcaagcagtagcatgaccaaagtcagaagcaaaagcgcaaaacctgtccttttaataagacttccatgcgagatagctttgaagcctgcagctgtgtttatgaaggttcagttagataacagtaccacttacaggttgatgttttctaaagtgacttagcttgggtttacaataatgcacatgttccggcagcagtgttttctgtttgtgaacaattttcctactcaaaatcaagttgccaaagtatatatttctttccatcccattatatatttacataaattcactggcttgaataaacaagttagaagtaggttgtttttatatttatgacaacataattaatatgtaagctacactactataccaaaaaggagattacataaaagcagaaggaaacttacagacggctctttcgatttaccacattagcatttctgtcctctccattctttttaatatttttgcacctacttagtgttgttctagaagctatgttcttttttttagagcgcgggagagctatgttttattgatcatagagagaaaaggaggcccccaaacaacccatgcgtatcatagggggccaagtatgagaggtggaaacacacacacaaaagactaacttattaaaacaaaaataatctgacccgacctccacccaaggaactaattagttccacctatgcccaggccttggagcctcttagctcctgccaggcaccacaggttgtgctcatctcttatagaattcatgatcaagttaactgagggagagagagcgtaaataacacatgcattcctatgcttccggatacttcatgcccctatttttttcaaaaaaaaagaagtgatgaagttcttaagcacttgttttttcaaaaaagaaaccttttgtctatccttatctctttcaaaaatgtatgtgagaagtgcataatttatcttatctatcttttcaaagcaatatgcaactaagatccaatcctttcagctctaaacagcaaactagcatccacaaccttgacaagtgtaatggagggcatttgcatgtatcagatgaaacatcttctgaagctgctcctaagacacataaatcagcagaggaccatgatgatagatccaaacctccacttataagaggtcgatttagagttatacctgggcatgttgactcaaaggctcaaccacctggcctacagaagtgtcacagcatgcagacaatttctcgccttccatcattaagtataccctcttccgcagaagttgcatcaaccattattggtggctccttctacatgcagctatatagtattctacagacaaatatgcttcagagggaccaaatacttaacgcgatgaagcaggtgagtggttgtgctatggcttcaccaggcgtaccttctatggcttcaccgtgtatcccttccacaagtcgctcgacatctccatcaggtgtaccatcagttgacagatccatgctggaagctgcacaagaaagggagaaagagctgctgaatgaggtcttggagctgcaatggcggttattgtgcacacaagatgaggttcaaaagcttaaagcaaaggcagcgcagatctgatgctgaagctgttaagggagcattaagggcgcgtcatgataagatgatctgttcattcggttttcaaatggctatttagcataggagagagatacaaaattaaggattggtgtatatttaaaaaggtgctagtgatgctcgagtgtccaatcctgtctaagcaggacattaatttcgtacaatctgtgtgtttgtgtttatgggtggcatggcgctgtgtttttgttggagcgcaattcccaggttgggacttgggaaagatagcttaacatgcctatgggttttaatctttccttttgttgttgcatgactttttggttattctcattctacgtagattggatgaggttgaaagaaactaggaatacttttttatttgctagagatttaaatccgcttaatcccgtctaattcacatgaattgagattaaaa

SEQ ID NO: 44700 - DNA, 2257 bp, Zea Mays
agcctacacgcccccgcctcctgccctcctctgtccacatcctcgcctctccccactagttcgctcgcgtgatggtggtgcgggagcagcggaacaagggttcgtcgtcggccaccctgtgacaccccgcccccgcccccgcggcggaacctgcaaacccggaggccggagctccgacttcgtcggccatcgaccgcgtctgatcggcgctgggacctgccgtccggacgaaatcggtcagcatggcggggcccaatgagaaggcggcggcgggaggcgggggtggcgagaggcgcaagtacccgatccacatggaggactacgagctgtacgaggagatcgggcagggcgtcagcgccatcgtgtaccgcgcactctgcaagccactcgacgagatcgtcgccgtcaaggtggtcgacttcgagcgcaccaacagcgacctgaacaacatcgttcgtgaagctcagacaatgattttgatagaccatcctaacgttgtcaaggcgcattgttcatttgcaaaagaccaaacgttatgggtggttatgccgtatatggctggggggtcctgtcttcacataatgaaatcagtgcatcctactggattcgaggaacccatcatcgcgactatacttcgtgaagtcctgaaaggtttagagtatcttcaccatcatggctctatacatcgagatgtgaaggcaggaaatattctagtcgattctcggggtggaattaaacttggggactttggagtctctgcttgcctttttgattctggtgatagacagagggccaggaatacttttgtgggaacaccttgctggatggcgcccgaggttatggagcaactacatggatatgatttcagagcagacatatggtcctttggaattactgcacttgaacttgctcatggtcatgctcctttctctaagtaccctcccatgaaggtcttgctcatgacacttcagaatgctcctccaggtcttgactatgaaagagataagaaattcacgaggaacttcaagcaaatggttgctatgtgtttggtaaaagacccttcaaagaggccttcggcaaaaaagttgttgaagcaaccatttttcaagcaagctcgttccactgattttattgcacgaaagcttttagaaggattgcctggccttggtgttagatatcaagctttgaaggaaaaggatcaacatttaatggctcaaaagaaaatgtctgatggaaagaaagaagaaatctcgcaggatgaatacaaaaggggtatcagcagctggacctttgacatggatgacctgagatctcaagcttcattgaatgtgaagacagtaccttatgcaaagattcagatatatctttctatgacttggacagtttacaggatcaagcaccagaagggtcacacttgttgagagatttctcaacgaagtatgatgctgacattgaaaatgatatgacaaccaaagataagtcagccgtttcatctcctgatcagcctgctagcttagtgaggaatgcttctatgcgtgggatgcccataaacggttctttcaggaaagacaactctacagaaagcttcgatttggaatgtcaagagaaacatctggacattgttccgactagctcatcccctgaaaggaagttttcttttagttcttgctcatcaaatgggctccttttgtccaaagagagctctaaacagcaaactagcatccacaaccttgacaagtgtaatggagggcatttgcatgtatcagatgaaacatcttctgaagctgctcctaagacacataaatcagcagaggaccatgatgatagatccaaacctccacttataagaggtcgatttagagttatacctgggcatgttgactcaaaggctcaaccacctggcctacagaagtgtcacagcatgcagacaatttctcgccttccatcattaagtataccctcttccgcagaagttgcatcaaccattattggtggctccttctacatgcagctatatagtattctacagacaaatatgcttcagagggaccaaatacttaacgcgatgaagcaggtgagtggttgtgctatggcttcaccaggcgtaccttctatggcttcaccgtgtatcccttccacaagtcgctcgacatctccatcaggtgtaccatcagttgacagatccatgctggaagctgcacaagaaagggagaaagagctgctgaatgaggtcttggagctgcaatggcgagtgctg

SEQ ID NO: 44701 - DNA, 2853 bp, Zea Mays
ggatagcaaccgttttcttttcattcacatctgattaaacttggaggcaaatttgattttcttttaccacgtctccagatcgacaatctgaacatggaagcttctaaaccgggaaaagactcatctcccagacgagacgactgacaacaaatcacattaacgtccacgcgcaaaaacgccaataaatgggatgagcctggatcacaaaatttttagcgcgtccggccgttcgcccagcgcccatccatctcatcccagcgcgtccgaccaccaaaataggcgccgcccgccgcccggacccgatcgcctcccaatcccgggccgccgtgcgcccgtccgccgcggccacctccctggcctcctcgtcacctgcggcggcaccctctgcgccgccaccgcgttcacgcgctcccgtcgctgtcggccccgctcccctatttatatccccgccccgtcgctgtcggcaggcgcgcatcaagctcctgccccccctttcctcttcatcctctcctccctcgcggcgcgcacgctctccgccctcccaagtcccaaggaaacctatccaccattccggcggtcgatacatccatccgtccagggagagcaaggaataatcaaccaatcggccagcgaatcagtcgaagggaggaggagagccggagtccgaccagcgcggcgcgggttggtggtcccttgcgtctccggctctgccccgcggcgccgtcttttgtggttcttgcgttgcgtcgaggaagcagaatccgcgacgaggagaaggagggagaggcgttcatcgggttgcgctgcgtctgtcgcacggcaagacggcggcgttgaagatgcgggtgctggaggaggacctcttcccctccaccccgggcaaggtgaagatcgagcgggcgggcgccatgaaccggcagctccaccgctgcttcgcgtccaccagcaccatgttcctgtgggcgctgttcctcgtcgccatgacggcgtcctacctcagcttccagtccttcgtcgacacctcctccaagtacttcgccgcctcctggggcggcctgcactgggagaggcagatccgcgcgtccgccgtgccgaggcggccccccgggtcagccgccggggccgggatgtcggtgctcgtcacgggcgccgcgggcttcgtgggcacccactgctccctcgccctccgcaggcgcggcgacggcgtggtcggcgtcgacaacttcaacgcctactacgacccgtcgctgaagaaggcgcgcagggcgctgctcgcctcccacggggtgttcgtcgtcgagggcgacatcaacgacggccgcctcctggccaagctcttcgatgtcgtgcccttcacccacgtgctccacctcgccgcgcaggccggcgtgcgctacgccatggagaacccggcgtcgtacgtgcactccaacgtcgccggcctcgtcacgctcctcgaggcctgcaaggacgccgacccgcagccggccatcgtctgggcctcctcctcctccgtctacggcctcaacgacaaggtccccttctcggagcgcgaccgcaccgaccagccggcctcactctacgcggccaccaagaaggccggcgaggagatcacgcacacgtacaaccacatctacggactctccatcaccggcctccgcttcttcaccgtgtacgggccctggggccgccccgacatggcctacttctccttcacccgcaacatccttcaggggaagcccatcacggtttaccgcggcaaggaccacgtggacctggcccgcgacttcacctacatcgacgatattgtcaagggctgcctcgcctccctggaaacggccggcaagagcaccggcaccggcggcaagaagcgcgggccggcgccctacaggatcttcaacctcggcaacacctctcccgttacggtgcccaacctggtgtccatcctggagaagcacctccgcgtcaaggccaagaagaacgtggtcgagatgcccggcaacggcgacgtgcccttcacgcacgccaacatctccctagccagggagcagctcgggtacaaacccaccaccaacctggacgtcggcctcaagaagtttgtcaagtggtacctgtcctattacggctacaccaggggaggatccaagaactcgcgacattgatccgatgttcgtcgaagaaaaatccttcgcttggtgtggagagactgtcagagtaaccgccggagacgagggagaagaaatcggcggtccggtccggtccggtcgtggcagtcctcgtgcaaatagcccgcggcaacgtgggcctcgccgtcgtggataagataagcggcctgcgactgccagcgtggtggcgtgaggtacctcgaaccgcgcgaagtggtcgccagctggctcccgcctcgctcggtccctctgcactgccggtgggccatctgcagctttgttgctccgtgggacccatatgtctgttgagtctgaatggagatgggtcatgttcatgcctgtggggttcataccccacgtaatggtagctcacatgggtggggccgtcagacgcggttgcgtgggccttcgtctctgagctgccatagaggatagtacgaactgcaattcttttatatatcaaactggatgcgaatgtgcattgtgcttgatcaggattctattcctagcgtggctccagatgccgccactgcgtgcatagtacgaagtagttttacatttcgtcttttattttaaaattcacaccgtaaacagtgtgtttaactatacgagtaaactgatggatatgtctacactgttgacaatattgttttagagcgtatttgattctaggactaagattgagctc

SEQ ID NO: 44702 - DNA, 2434 bp, Zea Mays
caagaaaggaacaacatgaaagtgatctccatgttggaaacctaaaaacaagggagagaaaaaaaaaactcgcatcgcgtccttggttcctcgcattagccacccactggattttcttgccaacgagcttcgactacaccaacgccgcttcgtcccagtgcttgctaatcatcggctcctcttaattgcagcaaccaccacgcttcgtgttttcagatcaaagaagtgggggaacaacacagatttggagcggcacgccagcaatacggaccgggggtgacctgaggcgtggagatttttggccgctgcctgcatctccacgtcgcggtcccaatcaagatcattatttctttctccttccttgtccccgcccaaatcgcaaggcttcgttgcgaatcgcccttggcgtggccccaggattcgacgccccagcgccctcgctggaatcgtgggcgctgtggaggaggactcgaggcggccgtcgcgcttgtctcgtctctcatcaatctcactctctctctggtctctctctttttttaactgcggggattcgccctgatttagaggagcgagttgctggtctcggcgccgtctagctcgtcccggaccgacgatttggggcagggcaggtccaaagggcgctgtgccgtgtgggcctcctcttgggcatccatggggttcctcagccttgtgggcaactcctttgggtgctctgcttccggtgagcgtcttgtctcagctgcccgcgacggcgacctgcaggaggcacgcgcactcctccaatacaaccctcgccttgcccggtactccacgttcggcggccggaactcaccgctgcactatgccgcggcgcaaggccaccatgagattgtctctctgttgcttgaatccggtgttgagatcaaccttaggaattacagggggcagactgctttgatgcaagcatgccaatatggccactgggaggttgttcagacactgatactcttcaatgcaaatgtgcacaggacagattatctgaacggtggaactgctctccattttgctgcactgcatggtcatgcccgatgcctccgtcttgtgcttgcagattatgttccaagcgtaccgaatttctgcaccctggtgaatcataagtcatctgaagaagattcaactgctgattttgatcatgatgctttggtcaagatggtgaatcagaaggcggatggaggcttaaccccacttcatatggcagcattaaacgggcatgtagagtgcgtgcaattgttgctggacttaggggcatctgtttctgaggtcactattgaggatggaacaactatagacttaataggggccggtagcaccccacttcactatgctgcttgtggtggaaatgctgtctgttgtcagctcctaattgctcgaggggcttgcattgctgtgcaaaatgctagcggatggacccctttaatggtggctcgttcctggcaaagaaattcagttgaagaaatcttaagtagagaaccagagggtcggatacacactcttccttcaccttatctctgtcttccactcatgagtatcatgaacattgccagggagtgtggatggaggtatctaaaccagtcacctgtttgtatcgacccttgtgctgtctgcttagaagggagctgttccgttgctgcagaaggttgcaaacatgaattctgcacaagatgtgctctatacctttgctcaactagctacacgtcagcgagcccagcgggtgcaataccatgccctctctgcagacatccgatcatctcgttcaacaccctccccggcacgagcccgataagagagttgccgaggaacagcctctcgctgtcgttctgcacggcgtgcccagccgtgagctccgactcttccgccccggtcggcgcccatccgtgccgctccgagttccagtgcgtccgcctgccgccgatgggctcgtcctccttccgctcgctgagctgccagaggataccagcgatgaagctgcacccatcgttctgcatgggttccatggacacgaacccctgcctcataaggtgctcgaggttcgggtctggccttgggcggtcggcttcccagagagagggggctaccagaagagcttggcctgtgacgttcagccccattgctgccaccggcagctgaattggcggttttgtgccccccgtttttttgaggtcgggttttgtttgccaattttttggttggtttgatctaatgttcaccgttgtgatcgatatggtatgaactcgctggttccaactccttgttgattcggagtacttatatatgtctgatcagaagcagcacgtaactgcttactaccttggtatgtaaataaccccgtggtgtttgttgtatgtttctgggaggcaatgaaatgcaaattgaaggaatcagttttttcagtgca

SEQ ID NO: 44703 - DNA, 2918 bp, Zea Mays
aaacaatcagtcagtcacaagaaaggaacaacatgaaagtgatctccatgttggaaacctaaaaacaagggagagaaaaaaaaaactcgcatcgcgtccttggttcctcgcattagccacccactggattttcttgccaacgagcttcgactacaccaacgccgcttcgtcccagtgcttgctaatcatcggctcctcttaattgcagcaaccaccacgcttcgtgttttcagatcaaagaagtgggggaacaacacagatttggagcggcacgccagcaatacggaccgggggtgacctgaggcgtggagatttttggccgctgcctgcatctccacgtcgcggtcccaatcaagatcattatttctttctccttccttgtccccgcccaaatcgcaaggcttcgttgcgaatcgcccttggcgtggccccaggattcgacgccccagcgccctcgctggaatcgtgggcgctgtggaggaggactcgaggcggccgtcgcgcttgtctcgtctctcatcaatctcactctctctctggtctctctctttttttaactgcggggattcgccctgatttagaggagcgagttgctggtctcggcgccgtctagctcgtcccggaccgacgatttggggcagggcaggtccaaaggcagcagcatcatggaagattgagaaaatttggaggcatctactacaaggttttcctgtgtgccctcaagacagggcgctgtgccgtgtgggcctcctcttgggcatccatggggttcctcagccttgtgggcaactcctttgggtgctctgcttccggtgagcgtcttgtctcagctgcccgcgacggcgacctgcaggaggcacgcgcactcctccaatacaaccctcgccttgcccggtactccacgttcggcggccggaactcaccgctgcactatgccgcggcgcaaggccaccatgagattgtctctctgttgcttgaatccggtgttgagatcaaccttaggaattacagggggcagactgctttgatgcaagcatgccaatatggccactgggaggttgttcagacactgatactcttcaatgcaaatgtgcacaggacagattatctgaacggtggaactgctctccattttgctgcactgcatggtcatgcccgatgcctccgtcttgtgcttgcagattatgttccaagcgtaccgaatttctgcaccctggtgaatcataagtcatctgaagaagattcaactgctgattttgatcatgatgctttggtcaagatggtgaatcagaaggcggatggaggcttaaccccacttcatatggcagcattaaacgggcatgtagagtgcgtgcaattgttgctggacttaggggcatctgtttctgaggtcactattgaggatggaacaactatagacttaataggggccggtagcaccccacttcactatgctgcttgtggtggaaatgctgtctgttgtcagctcctaattgctcgaggggcttgcattgctgtgcaaaatgctagcggatggacccctttaatggtggctcgttcctggcaaagaaattcagttgaagaaatcttaagtagagaaccagagggtcggatacacactcttccttcaccttatctctgtcttccactcatgagtatcatgaacattgccaggtgaccatgtctctaatttagttatgcagctatgtgccattagttccctggtcttgtcgcctgcatggcttaaatagtaatttactggttactgctcattgtttcttataggttgccatgtgatcgcagctatgtgccattagttccctggtcttgtcgcctgcatggcttaaatagtaatttactggttactgctcattgtttcttataggttgccatgtgatcttgttcatctgtatactccctatagttgcctaattatgaacgctttcccttaaattgttttcctgaccatgtagtatgagttccaacacttgtcagcctatcatagtggtccattttgcattgcttgtctagaaaacatctaatgaattgtgtcatttcgttctctagggagtgtggatggaggtatctaaaccagtcacctgtttgtatcgacccttgtgctgtctgcttagaagggagctgttccgttgctgcagaaggttgcaaacatgaattctgcacaagatgtgctctatacctttgctcaactagctacacgtcagcgagcccagcgggtgcaataccatgccctctctgcagacatccgatcatctcgttcaacaccctccccggcacgagcccgataagagagttgccgaggaacagcctctcgctgtcgttctgcacggcgtgcccagccgtgagctccgactcttccgccccggtcggcgcccatccgtgccgctccgagttccagtgcgtccgcctgccgccgatgggctcgtcctccttccgctcgctgagctgccagaggataccagcgatgaagctgcacccatcgttctgcatgggttccatggacacgaacccctgcctcataaggtgctcgaggttcgggtctggccttgggcggtcggcttcccagagagagggggctaccagaagagcttggcctgtgacgttcagccccattgctgccaccggcagctgaattggcggttttgtgccccccgtttttttgaggtcgggttttgtttgccaattttttggttggtttgatctaatgttcaccgttgtgatcgatatggtatgaactcgctggttccaactccttgttgattcggagtacttatatatgtctgatcagaagcagcacgtaactgcttactaccttggtatgtaaataaccccgtggtgtttgttgtatgtttctgggaggcaatgaaatgcaaattgaaggaatcagttttttcagtgca

SEQ ID NO: 44704 - DNA, 2458 bp, Zea Mays
aaacaatcagtcagtcacaagaaaggaacaacatgaaagtgatctccatgttggaaacctaaaaacaagggagagaaaaaaaaaactcgcatcgcgtccttggttcctcgcattagccacccactggattttcttgccaacgagcttcgactacaccaacgccgcttcgtcccagtgcttgctaatcatcggctcctcttaattgcagcaaccaccacgcttcgtgttttcagatcaaagaagtgggggaacaacacagatttggagcggcacgccagcaatacggaccgggggtgacctgaggcgtggagatttttggccgctgcctgcatctccacgtcgcggtcccaatcaagatcattatttctttctccttccttgtccccgcccaaatcgcaaggcttcgttgcgaatcgcccttggcgtggccccaggattcgacgccccagcgccctcgctggaatcgtgggcgctgtggaggaggactcgaggcggccgtcgcgcttgtctcgtctctcatcaatctcactctctctctggtctctctctttttttaactgcggggattcgccctgatttagaggagcgagttgctggtctcggcgccgtctagctcgtcccggaccgacgatttggggcagggcaggtccaaaggcagcagcatcatggaagattgagaaaatttggaggcatctactacaaggttttcctgtgtgccctcaagacagggcgctgtgccgtgtgggcctcctcttgggcatccatggggttcctcagccttgtgggcaactcctttgggtgctctgcttccggtgagcgtcttgtctcagctgcccgcgacggcgacctgcaggaggcacgcgcactcctccaatacaaccctcgccttgcccggtactccacgttcggcggccggaactcaccgctgcactatgccgcggcgcaaggccaccatgagattgtctctctgttgcttgaatccggtgttgagatcaaccttaggaattacagggggcagactgctttgatgcaagcatgccaatatggccactgggaggttgttcagacactgatactcttcaatgcaaatgtgcacaggacagattatctgaacggtggaactgctctccattttgctgcactgcatggtcatgcccgatgcctccgtcttgtgcttgcagattatgttccaagcgtaccgaatttctgcaccctggtgaatcataagtcatctgaagaagattcaactgctgattttgatcatgatgctttggtcaagatggtgaatcagaaggcggatggaggcttaaccccacttcatatggcagcattaaacgggcatgtagagtgcgtgcaattgttgctggacttaggggcatctgtttctgaggtcactattgaggatggaacaactatagacttaataggggccggtagcaccccacttcactatgctgcttgtggtggaaatgctgtctgttgtcagctcctaattgctcgaggggcttgcattgctgtgcaaaatgctagcggatggacccctttaatggtggctcgttcctggcaaagaaattcagttgaagaaatcttaagtagagaaccagaggggagtgtggatggaggtatctaaaccagtcacctgtttgtatcgacccttgtgctgtctgcttagaagggagctgttccgttgctgcagaaggttgcaaacatgaattctgcacaagatgtgctctatacctttgctcaactagctacacgtcagcgagcccagcgggtgcaataccatgccctctctgcagacatccgatcatctcgttcaacaccctccccggcacgagcccgataagagagttgccgaggaacagcctctcgctgtcgttctgcacggcgtgcccagccgtgagctccgactcttccgccccggtcggcgcccatccgtgccgctccgagttccagtgcgtccgcctgccgccgatgggctcgtcctccttccgctcgctgagctgccagaggataccagcgatgaagctgcacccatcgttctgcatgggttccatggacacgaacccctgcctcataaggtgctcgaggttcgggtctggccttgggcggtcggcttcccagagagagggggctaccagaagagcttggcctgtgacgttcagccccattgctgccaccggcagctgaattggcggttttgtgccccccgtttttttgaggtcgggttttgtttgccaattttttggttggtttgatctaatgttcaccgttgtgatcgatatggtatgaactcgctggttccaactccttgttgattcggagtacttatatatgtctgatcagaagcagcacgtaactgcttactaccttggtatgtaaataaccccgtggtgtttgttgtatgtttctgggaggcaatgaaatgcaaattgaaggaatcagttttttcagtgca

SEQ ID NO: 44705 - DNA, 2611 bp, Zea Mays
aatttttttccaaacaatcagtcagtcacaagaaaggaacaacatgaaagtgatctccatgttggaaacctaaaaacaagggagagaaaaaaaaaactcgcatcgcgtccttggttcctcgcattagccacccactggattttcttgccaacgagcttcgactacaccaacgccgcttcgtcccagtgcttgctaatcatcggctcctcttaattgcagcaaccaccacgcttcgtgttttcagatcaaagaagtgggggaacaacacagatttggagcggcacgccagcaatacggaccgggggtgacctgaggcgtggagatttttggccgctgcctgcatctccacgtcgcggtcccaatcaagatcattatttctttctccttccttgtccccgcccaaatcgcaaggcttcgttgcgaatcgcccttggcgtggccccaggattcgacgccccagcgccctcgctggaatcgtgggcgctgtggaggaggactcgaggcggccgtcgcgcttgtctcgtctctcatcaatctcactctctctctggtctctctctttttttaactgcggggattcgccctgatttagaggagcgagttgctggtctcggcgccgtctagctcgtcccggaccgacgatttggggcagggcaggtccaaagcttgagagatcatccacttccgcatgcctcagttgggcctgtctcgtgatcttcctgtaatgcggtttgcggcaggcagcagcatcatggaagattgagaaaatttggaggcatctactacaaggttttcctgtgtgccctcaagacagggcgctgtgccgtgtgggcctcctcttgggcatccatggggttcctcagccttgtgggcaactcctttgggtgctctgcttccggtgagcgtcttgtctcagctgcccgcgacggcgacctgcaggaggcacgcgcactcctccaatacaaccctcgccttgcccggtactccacgttcggcggccggaactcaccgctgcactatgccgcggcgcaaggccaccatgagattgtctctctgttgcttgaatccggtgttgagatcaaccttaggaattacagggggcagactgctttgatgcaagcatgccaatatggccactgggaggttgttcagacactgatactcttcaatgcaaatgtgcacaggacagattatctgaacggtggaactgctctccattttgctgcactgcatggtcatgcccgatgcctccgtcttgtgcttgcagattatgttccaagcgtaccgaatttctgcaccctggtgaatcataagtcatctgaagaagattcaactgctgattttgatcatgatgctttggtcaagatggtgaatcagaaggcggatggaggcttaaccccacttcatatggcagcattaaacgggcatgtagagtgcgtgcaattgttgctggacttaggggcatctgtttctgaggtcactattgaggatggaacaactatagacttaataggggccggtagcaccccacttcactatgctgcttgtggtggaaatgctgtctgttgtcagctcctaattgctcgaggggcttgcattgctgtgcaaaatgctagcggatggacccctttaatggtggctcgttcctggcaaagaaattcagttgaagaaatcttaagtagagaaccagagggtcggatacacactcttccttcaccttatctctgtcttccactcatgagtatcatgaacattgccagggagtgtggatggaggtatctaaaccagtcacctgtttgtatcgacccttgtgctgtctgcttagaagggagctgttccgttgctgcagaaggttgcaaacatgaattctgcacaagatgtgctctatacctttgctcaactagctacacgtcagcgagcccagcgggtgcaataccatgccctctctgcagacatccgatcatctcgttcaacaccctccccggcacgagcccgataagagagttgccgaggaacagcctctcgctgtcgttctgcacggcgtgcccagccgtgagctccgactcttccgccccggtcggcgcccatccgtgccgctccgagttccagtgcgtccgcctgccgccgatgggctcgtcctccttccgctcgctgagctgccagaggataccagcgatgaagctgcacccatcgttctgcatgggttccatggacacgaacccctgcctcataaggtgctcgaggttcgggtctggccttgggcggtcggcttcccagagagagggggctaccagaagagcttggcctgtgacgttcagccccattgctgccaccggcagctgaattggcggttttgtgccccccgtttttttgaggtcgggttttgtttgccaattttttggttggtttgatctaatgttcaccgttgtgatcgatatggtatgaactcgctggttccaactccttgttgattcggagtacttatatatgtctgatcagaagcagcacgtaactgcttactaccttggtatgtaaataaccccgtggtgtttgttgtatgtttctgggaggcaatgaaatgcaaattgaaggaatcagttttttcagtgca

SEQ ID NO: 44706 - DNA, 2859 bp, Zea Mays
aatttttttccaaacaatcagtcagtcacaagaaaggaacaacatgaaagtgatctccatgttggaaacctaaaaacaagggagagaaaaaaaaaactcgcatcgcgtccttggttcctcgcattagccacccactggattttcttgccaacgagcttcgactacaccaacgccgcttcgtcccagtgcttgctaatcatcggctcctcttaattgcagcaaccaccacgcttcgtgttttcagatcaaagaagtgggggaacaacacagatttggagcggcacgccagcaatacggaccgggggtgacctgaggcgtggagatttttggccgctgcctgcatctccacgtcgcggtcccaatcaagatcattatttctttctccttccttgtccccgcccaaatcgcaaggcttcgttgcgaatcgcccttggcgtggccccaggattcgacgccccagcgccctcgctggaatcgtgggcgctgtggaggaggactcgaggcggccgtcgcgcttgtctcgtctctcatcaatctcactctctctctggtctctctctttttttaactgcggggattcgccctgatttagaggagcgagttgctggtctcggcgccgtctagctcgtcccggaccgacgatttggggcagggcaggtccaaagacagggcgctgtgccgtgtgggcctcctcttgggcatccatggggttcctcagccttgtgggcaactcctttgggtgctctgcttccggtgagcgtcttgtctcagctgcccgcgacggcgacctgcaggaggcacgcgcactcctccaatacaaccctcgccttgcccggtactccacgttcggcggccggaactcaccgctgcactatgccgcggcgcaaggccaccatgagattgtctctctgttgcttgaatccggtgttgagatcaaccttaggaattacagggggcagactgctttgatgcaagcatgccaatatggccactgggaggttgttcagacactgatactcttcaatgcaaatgtgcacaggacagattatctgaacggtggaactgctctccattttgctgcactgcatggtcatgcccgatgcctccgtcttgtgcttgcagattatgttccaagcgtaccgaatttctgcaccctggtgaatcataagtcatctgaagaagattcaactgctgattttgatcatgatgctttggtcaagatggtgaatcagaaggcggatggaggcttaaccccacttcatatggcagcattaaacgggcatgtagagtgcgtgcaattgttgctggacttaggggcatctgtttctgaggtcactattgaggatggaacaactatagacttaataggggccggtagcaccccacttcactatgctgcttgtggtggaaatgctgtctgttgtcagctcctaattgctcgaggggcttgcattgctgtgcaaaatgctagcggatggacccctttaatggtggctcgttcctggcaaagaaattcagttgaagaaatcttaagtagagaaccagagggtcggatacacactcttccttcaccttatctctgtcttccactcatgagtatcatgaacattgccaggtgaccatgtctctaatttagttatgcagctatgtgccattagttccctggtcttgtcgcctgcatggcttaaatagtaatttactggttactgctcattgtttcttataggttgccatgtgatcgcagctatgtgccattagttccctggtcttgtcgcctgcatggcttaaatagtaatttactggttactgctcattgtttcttataggttgccatgtgatcttgttcatctgtatactccctatagttgcctaattatgaacgctttcccttaaattgttttcctgaccatgtagtatgagttccaacacttgtcagcctatcatagtggtccattttgcattgcttgtctagaaaacatctaatgaattgtgtcatttcgttctctagggagtgtggatggaggtatctaaaccagtcacctgtttgtatcgacccttgtgctgtctgcttagaagggagctgttccgttgctgcagaaggttgcaaacatgaattctgcacaagatgtgctctatacctttgctcaactagctacacgtcagcgagcccagcgggtgcaataccatgccctctctgcagacatccgatcatctcgttcaacaccctccccggcacgagcccgataagagagttgccgaggaacagcctctcgctgtcgttctgcacggcgtgcccagccgtgagctccgactcttccgccccggtcggcgcccatccgtgccgctccgagttccagtgcgtccgcctgccgccgatgggctcgtcctccttccgctcgctgagctgccagaggataccagcgatgaagctgcacccatcgttctgcatgggttccatggacacgaacccctgcctcataaggtgctcgaggttcgggtctggccttgggcggtcggcttcccagagagagggggctaccagaagagcttggcctgtgacgttcagccccattgctgccaccggcagctgaattggcggttttgtgccccccgtttttttgaggtcgggttttgtttgccaattttttggttggtttgatctaatgttcaccgttgtgatcgatatggtatgaactcgctggttccaactccttgttgattcggagtacttatatatgtctgatcagaagcagcacgtaactgcttactaccttggtatgtaaataaccccgtggtgtttgttgtatgtttctgggaggcaatgaaatgcaaattgaaggaatcagttttttcagtgca

SEQ ID NO: 44707 - DNA, 2619 bp, Zea Mays
catctatcatcttattatctggaggcctacataaataaaagaaaaacaaattataaagatgttaagttacaaattttgatttatttttttgggtatatggatggtgagtgtgagagactctaaagaagcgcgtttgcatatgggggtgttgataatttttttccaaacaatcagtcagtcacaagaaaggaacaacatgaaagtgatctccatgttggaaacctaaaaacaagggagagaaaaaaaaaactcgcatcgcgtccttggttcctcgcattagccacccactggattttcttgccaacgagcttcgactacaccaacgccgcttcgtcccagtgcttgctaatcatcggctcctcttaattgcagcaaccaccacgcttcgtgttttcagatcaaagaagtgggggaacaacacagatttggagcggcacgccagcaatacggaccgggggtgacctgaggcgtggagatttttggccgctgcctgcatctccacgtcgcggtcccaatcaagatcattatttctttctccttccttgtccccgcccaaatcgcaaggcttcgttgcgaatcgcccttggcgtggccccaggattcgacgccccagcgccctcgctggaatcgtgggcgctgtggaggaggactcgaggcggccgtcgcgcttgtctcgtctctcatcaatctcactctctctctggtctctctctttttttaactgcggggattcgccctgatttagaggagcgagttgctggtctcggcgccgtctagctcgtcccggaccgacgatttggggcagggcaggtccaaagacagggcgctgtgccgtgtgggcctcctcttgggcatccatggggttcctcagccttgtgggcaactcctttgggtgctctgcttccggtgagcgtcttgtctcagctgcccgcgacggcgacctgcaggaggcacgcgcactcctccaatacaaccctcgccttgcccggtactccacgttcggcggccggaactcaccgctgcactatgccgcggcgcaaggccaccatgagattgtctctctgttgcttgaatccggtgttgagatcaaccttaggaattacagggggcagactgctttgatgcaagcatgccaatatggccactgggaggttgttcagacactgatactcttcaatgcaaatgtgcacaggacagattatctgaacggtggaactgctctccattttgctgcactgcatggtcatgcccgatgcctccgtcttgtgcttgcagattatgttccaagcgtaccgaatttctgcaccctggtgaatcataagtcatctgaagaagattcaactgctgattttgatcatgatgctttggtcaagatggtgaatcagaaggcggatggaggcttaaccccacttcatatggcagcattaaacgggcatgtagagtgcgtgcaattgttgctggacttaggggcatctgtttctgaggtcactattgaggatggaacaactatagacttaataggggccggtagcaccccacttcactatgctgcttgtggtggaaatgctgtctgttgtcagctcctaattgctcgaggggcttgcattgctgtgcaaaatgctagcggatggacccctttaatggtggctcgttcctggcaaagaaattcagttgaagaaatcttaagtagagaaccagagggtcggatacacactcttccttcaccttatctctgtcttccactcatgagtatcatgaacattgccagggagtgtggatggaggtatctaaaccagtcacctgtttgtatcgacccttgtgctgtctgcttagaagggagctgttccgttgctgcagaaggttgcaaacatgaattctgcacaagatgtgctctatacctttgctcaactagctacacgtcagcgagcccagcgggtgcaataccatgccctctctgcagacatccgatcatctcgttcaacaccctccccggcacgagcccgataagagagttgccgaggaacagcctctcgctgtcgttctgcacggcgtgcccagccgtgagctccgactcttccgccccggtcggcgcccatccgtgccgctccgagttccagtgcgtccgcctgccgccgatgggctcgtcctccttccgctcgctgagctgccagaggataccagcgatgaagctgcacccatcgttctgcatgggttccatggacacgaacccctgcctcataaggtgctcgaggttcgggtctggccttgggcggtcggcttcccagagagagggggctaccagaagagcttggcctgtgacgttcagccccattgctgccaccggcagctgaattggcggttttgtgccccccgtttttttgaggtcgggttttgtttgccaattttttggttggtttgatctaatgttcaccgttgtgatcgatatggtatgaactcgctggttccaactccttgttgattcggagtacttatatatgtctgatcagaagcagcacgtaactgcttactaccttggtatgtaaataaccccgtggtgtttgttgtatgtttctgggaggcaatgaaatgcaaattgaaggaatcagttttttcagtgca

SEQ ID NO: 44708 - DNA, 630 bp, Zea Mays
cttttcttgagaggtcttaacgtgtctctttcaactgacgacccttcacgaactcacccgacaaaggaaccactggttgaagaatacggatggatcccccaccgttggggttcataaaggtaaatgtcattcaatgcagcaattgcaaagaagacaactcaatcaacgtcaaagctagtggcaagagacgaggcctgctggtggcaaaagaatcgaaggagaatatgggcttatggagcatgcagtgttgcagggacagtgtcgccgacgcagcagaggaaggaagctgccatcgggctcggcctgcagaggcggcaagaaagcccactgtcacagcggttttcgacggcccggcccatatattgctcctcccaatctgccctacctgaacctgaaagtgatgatcctgtttcaaataccatctgacgatgacccgaaccaaaaactattagggtgtttggtttaaggaatgagctagtccatcatcttctcactactcactatttttgtttggtttgtggaatggaatgagttgatccatcaccacatcattcctcatagttaattagttagttctaatatgaggaatatggtcatcccaccaaatttgaggaatgaacccatgatgca

SEQ ID NO: 44709 - DNA, 2861 bp, Zea Mays
ctgaaaccgctctaattatagtcaacagaggtcagggaacaagagtagaagtctaaaagagatgccccccgaaatcctcctctgatcgccttccctccccgagaccttcgaggggatgaatcgctagcgtcaggatcgtagaaatatagcctagaacatatactacacataggaggtcaaaatccaccaatccatatagtgctctgcgtgcattagaagcggcagaagcacaatgggcaggtacagcgacgggaaggacagcggcgagaccggcggcggcagctacccgctggtggcggtgtgcatcgacaaggacaagaacagccagaacgccctcaagtacgccaccgagacgctcgcccacaggggccagaccatcgtcctcgtgcacgtcaacaccaaaggcacctcgggtggggtggcggacgccgccgggtacaagcagccgacggacccgcagatgaaggacctcttcctcccattccgctgcttctgcacgcgcaaagacatccactgcaaggacgtggtgctggacgaccacgacgtggccaagtccgtcgtcgagttcgccgcgcacggcgccgtagagaagctcgtcgtcggcgctagcgctaggggcggcttcgtcaggttcaaggcggaaatctgcaacaccatctccaagtccgcgcccgacttctgcaccgtgtacgtcgtctccaagggcggcaaggtgacgtcggtgcggcaggccgtccggcaggcgccggcagtgtcgccgctccggaccatgatccatgggcccaagccggaaccagagccggtgcacgcgcagaaatggacgcctccgcctccgcctccagcggttcaagacaaccacatcatgtcgccgttcgcgaggacgacggggcacagcgccgggtcggcgcggaaggcgttcccggacttctcgctgccggagtcgtcggacatatcgttcatcgggtccgccccccgcaggagcacggagcggtacccgccgcggctgtccagcgggtcggacggcgtggaccagcagcagcagcacagcttcgaggcgtcgcgcacgcccagccggtggggcgactcgttcggcaacgacagcacgtcgcactcccagaccagcacctcctcctggtgctcgcagcctccggacgagatggaggcggagatgaagcggctgcggctggagctgaagcagaccatggacatgtacagcacggcgtgcaaggaggcgctgagcgcgaagcagaaggcgctggagctgcagcgctggaagatggacgaggagcagcggtcgcaggagacgcggctgacggaggagtcggccatggcgctcatcgagcaggagaaggccaaggcgagggcggccatcgaggcggccgaggcgtcgcagcggctggcggacctggaggcgcagaagcggatcagcgcggagatgaaggcgctcaaggaggccgaggagcggctccggtccatggccgccggggcgcgcgagtcggcggtccggtaccgcaggtacaccatcgaggagatcgagatcggcaccgaccgcttcaacgaggcccgcaaggtgggcgagggcgggtacggccccgtgtacaagggccacctggaccacacgccggtggccatcaaggtgctccgccccgacgcggcgcaggggcggtcgcagttccagcaggaggtggaggtgctgagctgcatccgccaccccaacatggtgctcctcctgggcgcctgccccgagtacggctgcctcgtgtacgagtacatggccaacggcagcctggacgactgcctgttccaccgcggcggcggcgggccggtgctcccgtggcagcaccggttccgcatcgcggcggagatcgcgacgggcctcctgttcctgcaccaggccaagccggagccgctggtgcaccgcgacctcaagccgggcaacatcctcctggaccgcaactacgtgagcaagatcagcgacgtcgggctggcgcgcctggtgccggcgtcggtggcggacaacgtgacgcagtgccacatgacgtcggcggcgggcaccttctgctacatcgacccggagtaccagcagacgggcatgctgggggtgaagtcggacgtgtactcgctgggcgtgatgctgctgcagctggtcacggcgcgttcccccatggggctgacgcaccacgtcgggcgcgccctggagcgcggcaccttcgccgacctcctcgacccggccgtccacgactggccaatggacgaggcgcaccgcttcgccgaggtctccctccgctgctgcgagctccggcgcaaggaccgccccgacctcgccaccgtcgtgctccccgagctcaaccgcctgcgcgcgctcggcgaggacagcatggactcctgcacgaccatgagcggccgcggcggcatgcacagctcctcctccgccttccacggcaacccctattcgcagccacgacacgacgcggcgagcgacccgacgcggccgcaccacgtctcgaacgcgagccagtcagccatggctccatggaggtccaactacaactgagagatcgcgagcgcatctgagacaccagcccgtcgccgccatggagcagtgcatgcagcaacggtctcttggtctgctgaatggactgcgagtgctgttaaccaatgcagagctggcagaagcagagcgtgccatggcaatgccaatggtgcagtgcatagtttgttgtggcagtaaagttgtgaccgtgcagtgtgtagtttcttcaaaccaaaacaagaaagaaagaaaaaaaaagaacatgtgaatttgtgtaaacgcagactgaagaatgtcaaagaccaaagatcggtactgacggttcctc

SEQ ID NO: 44710 - DNA, 3802 bp, Zea Mays
atggcgccctctgccgctgccccaggcatctctgaggctgagggggcaccacgcatggccaagttcctctgcagctttggaggtagtatccttccccgaccacttgatggctgtcttcgatatgttggtggcgagacaaggattgtcatattgccgcgtgacatatcatatgccgacctagctgcacggatgagagatctctacaaggatgctgataccatcaaataccagcaacctgatgaggatctggatgcgctggtctcggtcgtgaatcacgatgatgtggtgaacatgatggaggagtatgacaaagtcactgccacaggggaggcgttcactcggctcaggatcttcttattttctcagcaattggatgacaatgctgcatcagtggctgtgcattacaatgtagacgagcgggaaacagagagaaggtatgtagatgcgctcaacagccttggtgatgttaggtcaccttcctcccctgtatctgtggagcagctttttggcatcggaggcaatgattcaggaattcctgattttgctggcttgagacatttgaatgtccctcgtccatcacatggtcagaggtatggagagatggattctccttggagccctgcttatgtctcaccaagccagtacagagtgcatgacccgagggattttccaatttcaccgtcatctgcaaggttccaagtaggagcggaggattttgatgacaggattcctgacgactttgtaaggcagtcaccaaaatatcattattatgaggctcaatcaccatcacatatggataatttagtctggcttccacctggtgctgtaattcagcaaaatgcaggtttccctggtgatttgagcaagcacaataaatttttggatgggaacagtggatgtgatcactgtggttcactattccacaagggtcagggttcggtgactgatcctatctatatgaatcctcgttggactcggccagtccaacaacattttgaccaaccaagcatgattaatgattatcccggtcaccatgctaattcttgtccagattactgccgccctggtgagcattatgcgggaggtcaagatgttagattggaaaatggtgtttatgttaaagagcaaaatggtggtcatactcccatgctttataatgagtcacgtcctcacgatagagtctggtatgcgcataccaaccaaagtcatcagcggtatgaggatccaaggctgcattatcctactaatgatagagtgatcgagccatacattgtcgatgctagctctgtaaattccgcatttgcaccaaacaaagtatatgaaatgcattcagcatctcttggtcattctagttctagccatgaaagtcctcactattttcatggtagcagtgagctcataaatgacgcatatcacaaccaacaagttggaggcagtgggtcatatgtgcagccagcagggtctgaagaatcccctggtcagcattacaaccacttttcggcctatggtgcagattccttttatcaaatgcaacaaaatttgccacccattcaatctttgaggaggagagcgaacagtcctgttcacactgcctcaccatatgattccccacacctgccaataccaaatgggagcattaacatgaattctgttagaaatacaggtgatgcgagtcccaggatagcaggtcttattggatatgatcgaatgccaaacccatttactccgcccaatggcagcatactatatagagttggtgggcatgatgttcctgcagctatggagaacactagtgcttttggtcctaggtctaatccaactgctgctcagtatgttcagccttttattgctcctgaatcaatccagcatcaacctggagttcccttgagggaggtttatcctgaaagagcataccctgaacccatgccgtcatcatatgctgatggcaaagtagctgtttctgcattgcccctcaccgaccaattattcaggttggatataaacacaatgaagaaacttgaaggacaagatgatgggaactctactcgaaatgtgaatgaaacaactcttttgcatgctgtggatgaaccaagtaccttaccccaccatgttggatctgtacatgaagtcgatcctaagcaggagaagctaaccgaaaaagaaagcaggcaaaagcaacatgaagctggggctacagcactgcaggaatgtgaggatatttcagaggatatgttgaatttccttcctgaattaattgcctctgttaaaaaggtaacactggaagatgctgctgagacacaaatagcccaatcagatgctaatgctgctgtttcacctgttcctgatgatgacgataatggaaagaagctggatgaggcaacagctggtaatacaaatgcaaatcaggaccttgatttgcaaggaagccttgatcggcagaagagtttcaagattgagtctacaactgctgaagctgaagctttgtcgaaaggactacagactataaaaaatgatgatttagaggaaattagagagctgggttcaggtacttatggggcggtctatcatggtaaatggaggggatgcgatgttgctattaaaagaataaaagcaagttgctttgctggaagaccatctgaaagagagcgtttgatcacggatttctggaaagaagctctgatcctaagctcacttcatcatccaaatgtggttgcattttatggtgtagttcgtgatggtccagatggaagcttagcaactgttactgagtttatggttaatgggtctctcaaacagttcctgaggaaaaaagacaggacaatagatcgccggaagagagtaatattagccatggatgctgcatttggcatggaatatttgcacgggaagaatatagtccattttgacctgaagtgtgagaatctactggtgaacatgagggatccacagcgaccaatctgcaagatcggtgatctcgggctatcaaaggttaaacagcatactttggtatctggtggtgttagaggaaccttaccgtggatggcaccagagcttctgagtgggaaaaacaatatggtgtcagagaagattgacgtctattcgtttggaattgtcatgtgggagctgcttactggggaagagccatactctgatatgcgtgctgctgaaattattggggccattgtaaacgattccttacgccctcaaatcccttcatggtgtgatcctgagtggaagggattgatggaaagctgttggtccagtgatccagcggagagaccgtccttcactgatatatctcaaaggttgaggaaaatggccgctgcaatgaatgtgaagtgaaggttcggaagccatatttgtcttgtaagtgttcccacatccagtataagtgattacaagaggaaggattttccttagtcctggagtaacccggctgtcatttgccttgtgtcgaaaataagtatgctataaagcgttctgtcttgatgggaactgttgggctgtaattgtaaataagttttgacttgcttcatcttgctgtgcaaagtagtaattaataggcacgatcaaagctgggcacagttatcttttccccccatacaaaagtgtgtcctaggactaggaggagagatggatcgaacacgactagagctgtacatagtatactgtttgctctgtatataatcatcacttcctatttgaatgctcataagtttgcacagtcccttgtggtcttcctgttgagtcctaatcgaccagggtgattggtgaagccactgtctatccgaagagaccattg

SEQ ID NO: 44711 - DNA, 4519 bp, Zea Mays
tttggtcccatatacttgctatttttatttccaattttgcagtatattcaacgtatatataaggatagaaaaaatttgaggtggggccacgacccactttgcccccctgcccatgacagcagatgacttttgcattttttttgggatccttcattattggtggtccttgtttttttgtggaaaatcgccggagaactaggtatgcggtagccttaggatttcctaaggtgccattggatggacttgcagaataaagcactcctatatgctttgtggtaactgtgtgatttggtgacggagtttcgtgtagatcagttatctgggtgatggggatgcacacttcacctttttgctgccttccttttaatgcactaataactgttttcccccttccaacaggaagtagctaattggtgctgggcataggacttgctggatttcagtcgtctgatatactgagacttagtagtgctgatccagtgaacctatccacaccaacttgattacagtctctctgacacaactatggcgccctctgccgctgccccaggcatctctgaggctgagggggcaccacgcatggccaagttcctctgcagctttggaggtagtatccttccccgaccacttgatggctgtcttcgatatgttggtggcgagacaaggattgtcatattgccgcgtgacatatcatatgccgacctagctgcacggatgagagatctctacaaggatgctgataccatcaaataccagcaacctgatgaggatctggatgcgctggtctcggtcgtgaatcacgatgatgtggtgaacatgatggaggagtatgacaaagtcactgccacaggggaggcgttcactcggctcaggatcttcttattttctcagcaattggatgacaatgctgcatcagtggctgtgcattacaatgtagacgagcgggaaacagagagaaggtatgtagatgcgctcaacagccttggtgatgttaggtcaccttcctcccctgtatctgtggagcagctttttggcatcggaggcaatgattcaggaattcctgattttgctggcttgagacatttgaatgtccctcgtccatcacatggtcagaggtatggagagatggattctccttggagccctgcttatgtctcaccaagccagtacagagtgcatgacccgagggattttccaatttcaccgtcatctgcaaggttccaagtaggagcggaggattttgatgacaggattcctgacgactttgtaaggcagtcaccaaaatatcattattatgaggctcaatcaccatcacatatggataatttagtctggcttccacctggtgctgtaattcagcaaaatgcaggtttccctggtgatttgagcaagcacaataaatttttggatgggaacagtggatgtgatcactgtggttcactattccacaagggtcagggttcggtgactgatcctatctatatgaatcctcgttggactcggccagtccaacaacattttgaccaaccaagcatgattaatgattatcccggtcaccatgctaattcttgtccagattactgccgccctggtgagcattatgcgggaggtcaagatgttagattggaaaatggtgtttatgttaaagagcaaaatggtggtcatactcccatgctttataatgagtcacgtcctcacgatagagtctggtatgcgcataccaaccaaagtcatcagcggtatgaggatccaaggctgcattatcctactaatgatagagtgatcgagccatacattgtcgatgctagctctgtaaattccgcatttgcaccaaacaaagtatatgaaatgcattcagcatctcttggtcattctagttctagccatgaaagtcctcactattttcatggtagcagtgagctcataaatgacgcatatcacaaccaacaagttggaggcagtgggtcatatgtgcagccagcagggtctgaagaatcccctggtcagcattacaaccacttttcggcctatggtgcagattccttttatcaaatgcaacaaaatttgccacccattcaatctttgaggaggagagcgaacagtcctgttcacactgcctcaccatatgattccccacacctgccaataccaaatgggagcattaacatgaattctgttagaaatacaggtgatgcgagtcccaggatagcaggtcttattggatatgatcgaatgccaaacccatttactccgcccaatggcagcatactatatagagttggtgggcatgatgttcctgcagctatggagaacactagtgcttttggtcctaggtctaatccaactgctgctcagtatgttcagccttttattgctcctgaatcaatccagcatcaacctggagttcccttgagggaggtttatcctgaaagagcataccctgaacccatgccgtcatcatatgctgatggcaaagtagctgtttctgcattgcccctcaccgaccaattattcaggttggatataaacacaatgaagaaacttgaaggacaagatgatgggaactctactcgaaatgtgaatgaaacaactcttttgcatgctgtggatgaaccaagtaccttaccccaccatgttggatctgtacatgaagtcgatcctaagcaggagaagctaaccgaaaaagaaagcaggcaaaagcaacatgaagctggggctacagcactgcaggaatgtgaggatatttcagaggatatgttgaatttccttcctgaattaattgcctctgttaaaaaggtaacactggaagatgctgctgagacacaaatagcccaatcagatgctaatgctgctgtttcacctgttcctgatgatgacgataatggaaagaagctggatgaggcaacagctggtgtaagcaatgcttcaagttcgagcatggtaactactaaactaccaaatggtctccactctaatccttttgttttgcagaatacaaatgcaaatcaggaccttgatttgcaaggaagccttgatcggcagaagagtttcaagattgagtctacaactgctgaagctgaagctttgtcgaaaggactacagactataaaaaatgatgatttagaggaaattagagagctgggttcaggtacttatggggcggtctatcatggtaaatggaggggatgcgatgttgctattaaaagaataaaagcaagttgctttgctggaagaccatctgaaagagagcgtttgatcacggatttctggaaagaagctctgatcctaagctcacttcatcatccaaatgtggttgcattttatggtgtagttcgtgatggtccagatggaagcttagcaactgttactgagtttatggttaatgggtctctcaaacagttcctgaggaaaaaagacaggacaatagatcgccggaagagagtaatattagccatggatgctgcatttggcatggaatatttgcacgggaagaatatagtccattttgacctgaagtgtgagaatctactggtgaacatgagggatccacagcgaccaatctgcaagatcggtgatctcgggctatcaaaggttaaacagcatactttggtatctggtggtgttagaggaaccttaccgtggatggcaccagagcttctgagtgggaaaaacaatatggtgtcagagaagattgacgtctattcgtttggaattgtcatgtgggagctgcttactggggaagagccatactctgatatgcgtgctgctgaaattattgtgatccagcggagagaccgtccttcactgatatatctcaaaggttgaggaaaatggccgctgcaatgaatgtgaagtgaaggttcggaagccatatttgtcttgtaagtgttcccacatccagtataagtgattacaagaggaaggtagagttcaaacaggattgatttgagtaaatatgcccaaaatgtcttggcagcatctcagtttaccctactccaagtgataattttattatgtcatggagattccaaagcatgtttgatgcgagccagctgttgggtttatttactccttgtatgaccattagtaaaagggaaaactgacgtttctgcttacctgtttcaggattttccttagtcctggagtaacccggctgtcatttgccttgtgtcgaaaataagtatgctataaagcgttctgtcttgatgggaactgttgggctgtaattgtaaataagttttgacttgcttcatcttgctgtgcaaagtagtaattaataggcacgatcaaagctgggcacagttatcttttccccccatacaaaagtgtgtcctaggactaggaggagagatggatcgaacacgactagagctgtacatagtatactgtttgctctgtatataatcatcacttcctatttgaatgctcataagtttgcacagtcccttgtggtcttcctgttgagtcctaatcgaccagggtgattggtgaagccactgtctatccgaagagaccattg

SEQ ID NO: 44712 - DNA, 4237 bp, Zea Mays
cccggagccgcaccgcctcgacccagaccggcgccgacgagccccagcgcccaatggcggcggctttcctcgccctggaggcccgcgtgacatgatccctgtcccccgaggatgggaatatcccccctccaccctcccttctcgactcttcctcgggtctctccttctccaccgcctcgcgctccgcaattggctgctcgtgctcgcgtggccccggatcgccgccaggtccgggaacaagaacaaatgttgcaagaagacatgaaatgggaaagaccgagagagcaagagggaaagataccgtggattggttgggcggtggccggtgctgcagctcatggaacttgaatggaagtagctaattggtgctgggcataggacttgctggatttcagtcgtctgatatactgagacttagtagtgctgatccagtgaacctatccacaccaacttgattacagtctctctgacacaactatggcgccctctgccgctgccccaggcatctctgaggctgagggggcaccacgcatggccaagttcctctgcagctttggaggtagtatccttccccgaccacttgatggctgtcttcgatatgttggtggcgagacaaggattgtcatattgccgcgtgacatatcatatgccgacctagctgcacggatgagagatctctacaaggatgctgataccatcaaataccagcaacctgatgaggatctggatgcgctggtctcggtcgtgaatcacgatgatgtggtgaacatgatggaggagtatgacaaagtcactgccacaggggaggcgttcactcggctcaggatcttcttattttctcagcaattggatgacaatgctgcatcagtggctgtgcattacaatgtagacgagcgggaaacagagagaaggtatgtagatgcgctcaacagccttggtgatgttaggtcaccttcctcccctgtatctgtggagcagctttttggcatcggaggcaatgattcaggaattcctgattttgctggcttgagacatttgaatgtccctcgtccatcacatggtcagaggtatggagagatggattctccttggagccctgcttatgtctcaccaagccagtacagagtgcatgacccgagggattttccaatttcaccgtcatctgcaaggttccaagtaggagcggaggattttgatgacaggattcctgacgactttgtaaggcagtcaccaaaatatcattattatgaggctcaatcaccatcacatatggataatttagtctggcttccacctggtgctgtaattcagcaaaatgcaggtttccctggtgatttgagcaagcacaataaatttttggatgggaacagtggatgtgatcactgtggttcactattccacaagggtcagggttcggtgactgatcctatctatatgaatcctcgttggactcggccagtccaacaacattttgaccaaccaagcatgattaatgattatcccggtcaccatgctaattcttgtccagattactgccgccctggtgagcattatgcgggaggtcaagatgttagattggaaaatggtgtttatgttaaagagcaaaatggtggtcatactcccatgctttataatgagtcacgtcctcacgatagagtctggtatgcgcataccaaccaaagtcatcagcggtatgaggatccaaggctgcattatcctactaatgatagagtgatcgagccatacattgtcgatgctagctctgtaaattccgcatttgcaccaaacaaagtatatgaaatgcattcagcatctcttggtcattctagttctagccatgaaagtcctcactattttcatggtagcagtgagctcataaatgacgcatatcacaaccaacaagttggaggcagtgggtcatatgtgcagccagcagggtctgaagaatcccctggtcagcattacaaccacttttcggcctatggtgcagattccttttatcaaatgcaacaaaatttgccacccattcaatctttgaggaggagagcgaacagtcctgttcacactgcctcaccatatgattccccacacctgccaataccaaatgggagcattaacatgaattctgttagaaatacaggtgatgcgagtcccaggatagcaggtcttattggatatgatcgaatgccaaacccatttactccgcccaatggcagcatactatatagagttggtgggcatgatgttcctgcagctatggagaacactagtgcttttggtcctaggtctaatccaactgctgctcagtatgttcagccttttattgctcctgaatcaatccagcatcaacctggagttcccttgagggaggtttatcctgaaagagcataccctgaacccatgccgtcatcatatgctgatggcaaagtagctgtttctgcattgcccctcaccgaccaattattcaggttggatataaacacaatgaagaaacttgaaggacaagatgatgggaactctactcgaaatgtgaatgaaacaactcttttgcatgctgtggatgaaccaagtaccttaccccaccatgttggatctgtacatgaagtcgatcctaagcaggagaagctaaccgaaaaagaaagcaggcaaaagcaacatgaagctggggctacagcactgcaggaatgtgaggatatttcagaggatatgttgaatttccttcctgaattaattgcctctgttaaaaaggtaacactggaagatgctgctgagacacaaatagcccaatcagatgctaatgctgctgtttcacctgttcctgatgatgacgataatggaaagaagctggatgaggcaacagctggtaatacaaatgcaaatcaggaccttgatttgcaaggaagccttgatcggcagaagagtttcaagattgagtctacaactgctgaagctgaagctttgtcgaaaggactacagactataaaaaatgatgatttagaggaaattagagagctgggttcaggtacttatggggcggtctatcatggtaaatggaggggatgcgatgttgctattaaaagaataaaagcaagttgctttgctggaagaccatctgaaagagagcgtttgatcacggatttctggaaagaagctctgatcctaagctcacttcatcatccaaatgtggttgcattttatggtgtagttcgtgatggtccagatggaagcttagcaactgttactgagtttatggttaatgggtctctcaaacagttcctgaggaaaaaagacaggacaatagatcgccggaagagagtaatattagccatggatgctgcatttggcatggaatatttgcacgggaagaatatagtccattttgacctgaagtgtgagaatctactggtgaacatgagggatccacagcgaccaatctgcaagatcggtgatctcgggctatcaaaggttaaacagcatactttggtatctggtggtgttagaggaaccttaccgtggatggcaccagagcttctgagtgggaaaaacaatatggtgtcagagaagattgacgtctattcgtttggaattgtcatgtgggagctgcttactggggaagagccatactctgatatgcgtgctgctgaaattattggggccattgtaaacgattccttacgccctcaaatcccttcatggtgtgatcctgagtggaagggattgatggaaagctgttggtccagtgatccagcggagagaccgtccttcactgatatatctcaaaggttgaggaaaatggccgctgcaatgaatgtgaagtgaaggttcggaagccatatttgtcttgattttccttagtcctggagtaacccggctgtcatttgccttgtgtcgaaaataagtatgctataaagcgttctgtcttgatgggaactgttgggctgtaattgtaaataagttttgacttgcttcatcttgctgtgcaaagtagtaattaataggcacgatcaaagctgggcacagttatcttttccccccatacaaaagtgtgtcctaggactaggaggagagatggatcgaacacgactagagctgtacatagtatactgtttgctctgtatataatcatcacttcctatttgaatgctcataagtttgcacagtcccttgtggtcttcctgttgagtcctaatcgaccagggtgattggtgaagccactgtctatccgaagagaccattg

SEQ ID NO: 44713 - DNA, 4115 bp, Zea Mays
cccggagccgcaccgcctcgacccagaccggcgccgacgagccccagcgcccaatggcggcggctttcctcgccctggaggcccgcgtgacatgatccctgtcccccgaggatgggaatatcccccctccaccctcccttctcgactcttcctcgggtctctccttctccaccgcctcgcgctccgcaattggctgctcgtgctcgcgtggccccggatcgccgccagggaagtagctaattggtgctgggcataggacttgctggatttcagtcgtctgatatactgagacttagtagtgctgatccagtgaacctatccacaccaacttgattacagtctctctgacacaactatggcgccctctgccgctgccccaggcatctctgaggctgagggggcaccacgcatggccaagttcctctgcagctttggaggtagtatccttccccgaccacttgatggctgtcttcgatatgttggtggcgagacaaggattgtcatattgccgcgtgacatatcatatgccgacctagctgcacggatgagagatctctacaaggatgctgataccatcaaataccagcaacctgatgaggatctggatgcgctggtctcggtcgtgaatcacgatgatgtggtgaacatgatggaggagtatgacaaagtcactgccacaggggaggcgttcactcggctcaggatcttcttattttctcagcaattggatgacaatgctgcatcagtggctgtgcattacaatgtagacgagcgggaaacagagagaaggtatgtagatgcgctcaacagccttggtgatgttaggtcaccttcctcccctgtatctgtggagcagctttttggcatcggaggcaatgattcaggaattcctgattttgctggcttgagacatttgaatgtccctcgtccatcacatggtcagaggtatggagagatggattctccttggagccctgcttatgtctcaccaagccagtacagagtgcatgacccgagggattttccaatttcaccgtcatctgcaaggttccaagtaggagcggaggattttgatgacaggattcctgacgactttgtaaggcagtcaccaaaatatcattattatgaggctcaatcaccatcacatatggataatttagtctggcttccacctggtgctgtaattcagcaaaatgcaggtttccctggtgatttgagcaagcacaataaatttttggatgggaacagtggatgtgatcactgtggttcactattccacaagggtcagggttcggtgactgatcctatctatatgaatcctcgttggactcggccagtccaacaacattttgaccaaccaagcatgattaatgattatcccggtcaccatgctaattcttgtccagattactgccgccctggtgagcattatgcgggaggtcaagatgttagattggaaaatggtgtttatgttaaagagcaaaatggtggtcatactcccatgctttataatgagtcacgtcctcacgatagagtctggtatgcgcataccaaccaaagtcatcagcggtatgaggatccaaggctgcattatcctactaatgatagagtgatcgagccatacattgtcgatgctagctctgtaaattccgcatttgcaccaaacaaagtatatgaaatgcattcagcatctcttggtcattctagttctagccatgaaagtcctcactattttcatggtagcagtgagctcataaatgacgcatatcacaaccaacaagttggaggcagtgggtcatatgtgcagccagcagggtctgaagaatcccctggtcagcattacaaccacttttcggcctatggtgcagattccttttatcaaatgcaacaaaatttgccacccattcaatctttgaggaggagagcgaacagtcctgttcacactgcctcaccatatgattccccacacctgccaataccaaatgggagcattaacatgaattctgttagaaatacaggtgatgcgagtcccaggatagcaggtcttattggatatgatcgaatgccaaacccatttactccgcccaatggcagcatactatatagagttggtgggcatgatgttcctgcagctatggagaacactagtgcttttggtcctaggtctaatccaactgctgctcagtatgttcagccttttattgctcctgaatcaatccagcatcaacctggagttcccttgagggaggtttatcctgaaagagcataccctgaacccatgccgtcatcatatgctgatggcaaagtagctgtttctgcattgcccctcaccgaccaattattcaggttggatataaacacaatgaagaaacttgaaggacaagatgatgggaactctactcgaaatgtgaatgaaacaactcttttgcatgctgtggatgaaccaagtaccttaccccaccatgttggatctgtacatgaagtcgatcctaagcaggagaagctaaccgaaaaagaaagcaggcaaaagcaacatgaagctggggctacagcactgcaggaatgtgaggatatttcagaggatatgttgaatttccttcctgaattaattgcctctgttaaaaaggtaacactggaagatgctgctgagacacaaatagcccaatcagatgctaatgctgctgtttcacctgttcctgatgatgacgataatggaaagaagctggatgaggcaacagctggtaatacaaatgcaaatcaggaccttgatttgcaaggaagccttgatcggcagaagagtttcaagattgagtctacaactgctgaagctgaagctttgtcgaaaggactacagactataaaaaatgatgatttagaggaaattagagagctgggttcaggtacttatggggcggtctatcatggtaaatggaggggatgcgatgttgctattaaaagaataaaagcaagttgctttgctggaagaccatctgaaagagagcgtttgatcacggatttctggaaagaagctctgatcctaagctcacttcatcatccaaatgtggttgcattttatggtgtagttcgtgatggtccagatggaagcttagcaactgttactgagtttatggttaatgggtctctcaaacagttcctgaggaaaaaagacaggacaatagatcgccggaagagagtaatattagccatggatgctgcatttggcatggaatatttgcacgggaagaatatagtccattttgacctgaagtgtgagaatctactggtgaacatgagggatccacagcgaccaatctgcaagatcggtgatctcgggctatcaaaggttaaacagcatactttggtatctggtggtgttagaggaaccttaccgtggatggcaccagagcttctgagtgggaaaaacaatatggtgtcagagaagattgacgtctattcgtttggaattgtcatgtgggagctgcttactggggaagagccatactctgatatgcgtgctgctgaaattattggggccattgtaaacgattccttacgccctcaaatcccttcatggtgtgatcctgagtggaagggattgatggaaagctgttggtccagtgatccagcggagagaccgtccttcactgatatatctcaaaggttgaggaaaatggccgctgcaatgaatgtgaagtgaaggttcggaagccatatttgtcttgattttccttagtcctggagtaacccggctgtcatttgccttgtgtcgaaaataagtatgctataaagcgttctgtcttgatgggaactgttgggctgtaattgtaaataagttttgacttgcttcatcttgctgtgcaaagtagtaattaataggcacgatcaaagctgggcacagttatcttttccccccatacaaaagtgtgtcctaggactaggaggagagatggatcgaacacgactagagctgtacatagtatactgtttgctctgtatataatcatcacttcctatttgaatgctcataagtttgcacagtcccttgtggtcttcctgttgagtcctaatcgaccagggtgattggtgaagccactgtctatccgaagagaccattg

SEQ ID NO: 44714 - DNA, 4350 bp, Zea Mays
cccggagccgcaccgcctcgacccagaccggcgccgacgagccccagcgcccaatggcggcggctttcctcgccctggaggcccgcgtgacatgatccctgtcccccgaggatgggaatatcccccctccaccctcccttctcgactcttcctcgggtctctccttctccaccgcctcgcgctccgcaattggctgctcgtgctcgcgtggccccggatcgccgccaggaagtagctaattggtgctgggcataggacttgctggatttcagtcgtctgatatactgagacttagtagtgctgatccagtgaacctatccacaccaacttgattacagtctctctgacacaactatggcgccctctgccgctgccccaggcatctctgaggctgagggggcaccacgcatggccaagttcctctgcagctttggaggtagtatccttccccgaccacttgatggctgtcttcgatatgttggtggcgagacaaggattgtcatattgccgcgtgacatatcatatgccgacctagctgcacggatgagagatctctacaaggatgctgataccatcaaataccagcaacctgatgaggatctggatgcgctggtctcggtcgtgaatcacgatgatgtggtgaacatgatggaggagtatgacaaagtcactgccacaggggaggcgttcactcggctcaggatcttcttattttctcagcaattggatgacaatgctgcatcagtggctgtgcattacaatgtagacgagcgggaaacagagagaaggtatgtagatgcgctcaacagccttggtgatgttaggtcaccttcctcccctgtatctgtggagcagctttttggcatcggaggcaatgattcaggaattcctgattttgctggcttgagacatttgaatgtccctcgtccatcacatggtcagaggtatggagagatggattctccttggagccctgcttatgtctcaccaagccagtacagagtgcatgacccgagggattttccaatttcaccgtcatctgcaaggttccaagtaggagcggaggattttgatgacaggattcctgacgactttgtaaggcagtcaccaaaatatcattattatgaggctcaatcaccatcacatatggataatttagtctggcttccacctggtgctgtaattcagcaaaatgcaggtttccctggtgatttgagcaagcacaataaatttttggatgggaacagtggatgtgatcactgtggttcactattccacaagggtcagggttcggtgactgatcctatctatatgaatcctcgttggactcggccagtccaacaacattttgaccaaccaagcatgattaatgattatcccggtcaccatgctaattcttgtccagattactgccgccctggtgagcattatgcgggaggtcaagatgttagattggaaaatggtgtttatgttaaagagcaaaatggtggtcatactcccatgctttataatgagtcacgtcctcacgatagagtctggtatgcgcataccaaccaaagtcatcagcggtatgaggatccaaggctgcattatcctactaatgatagagtgatcgagccatacattgtcgatgctagctctgtaaattccgcatttgcaccaaacaaagtatatgaaatgcattcagcatctcttggtcattctagttctagccatgaaagtcctcactattttcatggtagcagtgagctcataaatgacgcatatcacaaccaacaagttggaggcagtgggtcatatgtgcagccagcagggtctgaagaatcccctggtcagcattacaaccacttttcggcctatggtgcagattccttttatcaaatgcaacaaaatttgccacccattcaatctttgaggaggagagcgaacagtcctgttcacactgcctcaccatatgattccccacacctgccaataccaaatgggagcattaacatgaattctgttagaaatacaggtgatgcgagtcccaggatagcaggtcttattggatatgatcgaatgccaaacccatttactccgcccaatggcagcatactatatagagttggtgggcatgatgttcctgcagctatggagaacactagtgcttttggtcctaggtctaatccaactgctgctcagtatgttcagccttttattgctcctgaatcaatccagcatcaacctggagttcccttgagggaggtttatcctgaaagagcataccctgaacccatgccgtcatcatatgctgatggcaaagtagctgtttctgcattgcccctcaccgaccaattattcaggttggatataaacacaatgaagaaacttgaaggacaagatgatgggaactctactcgaaatgtgaatgaaacaactcttttgcatgctgtggatgaaccaagtaccttaccccaccatgttggatctgtacatgaagtcgatcctaagcaggagaagctaaccgaaaaagaaagcaggcaaaagcaacatgaagctggggctacagcactgcaggaatgtgaggatatttcagaggatatgttgaatttccttcctgaattaattgcctctgttaaaaaggtaacactggaagatgctgctgagacacaaatagcccaatcagatgctaatgctgctgtttcacctgttcctgatgatgacgataatggaaagaagctggatgaggcaacagctggtaatacaaatgcaaatcaggaccttgatttgcaaggaagccttgatcggcagaagagtttcaagattgagtctacaactgctgaagctgaagctttgtcgaaaggactacagactataaaaaatgatgatttagaggaaattagagagctgggttcaggtacttatggggcggtctatcatggtaaatggaggggatgcgatgttgctattaaaagaataaaagcaagttgctttgctggaagaccatctgaaagagagcgtttgatcacggatttctggaaagaagctctgatcctaagctcacttcatcatccaaatgtggttgcattttatggtgtagttcgtgatggtccagatggaagcttagcaactgttactgagtttatggttaatgggtctctcaaacagttcctgaggaaaaaagacagatcgccggaagagagtaatattagccatggatgctgcatttggcatggaatatttgcacgggaagaatatagtccattttgacctgaagtgtgagaatctactggtgaacatgagggatccacagcgaccaatctgcaagatcggtgatctcgggctatcaaaggttaaacagcatactttggtatctggtggtgttagaggaaccttaccgtggatggcaccagagcttctgagtgggaaaaacaatatggtgtcagagaagattgacgtctattcgtttggaattgtcatgtgggagctgcttactggggaagagccatactctgatatgcgtgctgctgaaattattggggccattgtaaacgattccttacgccctcaaatcccttcatggtgtgatcctgagtggaagggattgatggaaagctgttggtccagtgatccagcggagagaccgtccttcactgatatatctcaaaggttgaggaaaatggccgctgcaatgaatgtgaagtgaaggttcggaagccatatttgtcttgtaagtgttcccacatccagtataagtgattacaagaggaaggtagagttcaaacaggattgatttgagtaaatatgcccaaaatgtcttggcagcatctcagtttaccctactccaagtgataattttattatgtcatggagattccaaagcatgtttgatgcgagccagctgttgggtttatttactccttgtatgaccattagtaaaagggaaaactgacgtttctgcttacctgtttcaggattttccttagtcctggagtaacccggctgtcatttgccttgtgtcgaaaataagtatgctataaagcgttctgtcttgatgggaactgttgggctgtaattgtaaataagttttgacttgcttcatcttgctgtgcaaagtagtaattaataggcacgatcaaagctgggcacagttatcttttccccccatacaaaagtgtgtcctaggactaggaggagagatggatcgaacacgactagagctgtacatagtatactgtttgctctgtatataatcatcacttcctatttgaatgctcataagtttgcacagtcccttgtggtcttcctgttgagtcctaatcgaccagggtgattggtgaagccactgtctatccgaagagaccattg

SEQ ID NO: 44715 - DNA, 4262 bp, Zea Mays
cccggagccgcaccgcctcgacccagaccggcgccgacgagccccagcgcccaatggcggcggctttcctcgccctggaggcccgcgtgacatgatccctgtcccccgaggatgggaatatcccccctccaccctcccttctcgactcttcctcgggtctctccttctccaccgcctcgcgctccgcaattggctgctcgtgctcgcgtggccccggatcgccgccaggaagtagctaattggtgctgggcataggacttgctggatttcagtcgtctgatatactgagacttagtagtgctgatccagtgaacctatccacaccaacttgattacagtctctctgacacaactatggcgccctctgccgctgccccaggcatctctgaggctgagggggcaccacgcatggccaagttcctctgcagctttggaggtagtatccttccccgaccacttgatggctgtcttcgatatgttggtggcgagacaaggattgtcatattgccgcgtgacatatcatatgccgacctagctgcacggatgagagatctctacaaggatgctgataccatcaaataccagcaacctgatgaggatctggatgcgctggtctcggtcgtgaatcacgatgatgtggtgaacatgatggaggagtatgacaaagtcactgccacaggggaggcgttcactcggctcaggatcttcttattttctcagcaattggatgacaatgctgcatcagtggctgtgcattacaatgtagacgagcgggaaacagagagaaggtatgtagatgcgctcaacagccttggtgatgttaggtcaccttcctcccctgtatctgtggagcagctttttggcatcggaggcaatgattcaggaattcctgattttgctggcttgagacatttgaatgtccctcgtccatcacatggtcagaggtatggagagatggattctccttggagccctgcttatgtctcaccaagccagtacagagtgcatgacccgagggattttccaatttcaccgtcatctgcaaggttccaagtaggagcggaggattttgatgacaggattcctgacgactttgtaaggcagtcaccaaaatatcattattatgaggctcaatcaccatcacatatggataatttagtctggcttccacctggtgctgtaattcagcaaaatgcaggtttccctggtgatttgagcaagcacaataaatttttggatgggaacagtggatgtgatcactgtggttcactattccacaagggtcagggttcggtgactgatcctatctatatgaatcctcgttggactcggccagtccaacaacattttgaccaaccaagcatgattaatgattatcccggtcaccatgctaattcttgtccagattactgccgccctggtgagcattatgcgggaggtcaagatgttagattggaaaatggtgtttatgttaaagagcaaaatggtggtcatactcccatgctttataatgagtcacgtcctcacgatagagtctggtatgcgcataccaaccaaagtcatcagcggtatgaggatccaaggctgcattatcctactaatgatagagtgatcgagccatacattgtcgatgctagctctgtaaattccgcatttgcaccaaacaaagtatatgaaatgcattcagcatctcttggtcattctagttctagccatgaaagtcctcactattttcatggtagcagtgagctcataaatgacgcatatcacaaccaacaagttggaggcagtgggtcatatgtgcagccagcagggtctgaagaatcccctggtcagcattacaaccacttttcggcctatggtgcagattccttttatcaaatgcaacaaaatttgccacccattcaatctttgaggaggagagcgaacagtcctgttcacactgcctcaccatatgattccccacacctgccaataccaaatgggagcattaacatgaattctgttagaaatacaggtgatgcgagtcccaggatagcaggtcttattggatatgatcgaatgccaaacccatttactccgcccaatggcagcatactatatagagttggtgggcatgatgttcctgcagctatggagaacactagtgcttttggtcctaggtctaatccaactgctgctcagtatgttcagccttttattgctcctgaatcaatccagcatcaacctggagttcccttgagggaggtttatcctgaaagagcataccctgaacccatgccgtcatcatatgctgatggcaaagtagctgtttctgcattgcccctcaccgaccaattattcaggttggatataaacacaatgaagaaacttgaaggacaagatgatgggaactctactcgaaatgtgaatgaaacaactcttttgcatgctgtggatgaaccaagtaccttaccccaccatgttggatctgtacatgaagtcgatcctaagcaggagaagctaaccgaaaaagaaagcaggcaaaagcaacatgaagctggggctacagcactgcaggaatgtgaggatatttcagaggatatgttgaatttccttcctgaattaattgcctctgttaaaaagctggatgaggcaacagctggtaatacaaatgcaaatcaggaccttgatttgcaaggaagccttgatcggcagaagagtttcaagattgagtctacaactgctgaagctgaagctttgtcgaaaggactacagactataaaaaatgatgatttagaggaaattagagagctgggttcaggtacttatggggcggtctatcatggtaaatggaggggatgcgatgttgctattaaaagaataaaagcaagttgctttgctggaagaccatctgaaagagagcgtttgatcacggatttctggaaagaagctctgatcctaagctcacttcatcatccaaatgtggttgcattttatggtgtagttcgtgatggtccagatggaagcttagcaactgttactgagtttatggttaatgggtctctcaaacagttcctgaggaaaaaagacaggacaatagatcgccggaagagagtaatattagccatggatgctgcatttggcatggaatatttgcacgggaagaatatagtccattttgacctgaagtgtgagaatctactggtgaacatgagggatccacagcgaccaatctgcaagatcggtgatctcgggctatcaaaggttaaacagcatactttggtatctggtggtgttagaggaaccttaccgtggatggcaccagagcttctgagtgggaaaaacaatatggtgtcagagaagattgacgtctattcgtttggaattgtcatgtgggagctgcttactggggaagagccatactctgatatgcgtgctgctgaaattattggggccattgtaaacgattccttacgccctcaaatcccttcatggtgtgatcctgagtggaagggattgatggaaagctgttggtccagtgatccagcggagagaccgtccttcactgatatatctcaaaggttgaggaaaatggccgctgcaatgaatgtgaagtgaaggttcggaagccatatttgtcttgtaagtgttcccacatccagtataagtgattacaagaggaaggtagagttcaaacaggattgatttgagtaaatatgcccaaaatgtcttggcagcatctcagtttaccctactccaagtgataattttattatgtcatggagattccaaagcatgtttgatgcgagccagctgttgggtttatttactccttgtatgaccattagtaaaagggaaaactgacgtttctgcttacctgtttcaggattttccttagtcctggagtaacccggctgtcatttgccttgtgtcgaaaataagtatgctataaagcgttctgtcttgatgggaactgttgggctgtaattgtaaataagttttgacttgcttcatcttgctgtgcaaagtagtaattaataggcacgatcaaagctgggcacagttatcttttccccccatacaaaagtgtgtcctaggactaggaggagagatggatcgaacacgactagagctgtacatagtatactgtttgctctgtatataatcatcacttcctatttgaatgctcataagtttgcacagtcccttgtggtcttcctgttgagtcctaatcgaccagggtgattggtgaagccactgtctatccgaagagaccattg

SEQ ID NO: 44716 - DNA, 4776 bp, Zea Mays
tatcgatctcgagttctctcgaccccacccgacccggagccgcaccgcctcgacccagaccggcgccgacgagccccagcgcccaatggcggcggctttcctcgccctggaggcccgcgtgacatgatccctgtcccccgaggatgggaatatcccccctccaccctcccttctcgactcttcctcgggtctctccttctccaccgcctcgcgctccgcaattggctgctcgtgctcgcgtggccccggatcgccgccaggtccgggaacaagaacaaatgttgcaagaagacatgaaatgggaaagaccgagagagcaagagggaaagataccgtggattggttgggcggtggccggtgctgcagctcatggaacttgaatggtaggccaagcagggcgacgcgttgagcgggccgagcgtgggctgttttagcagaccgtggagttggattgtgggccaggacggtggaagtgggctgctcactgcaattttggtcccatatacttgctatttttatttccaattttgcagtatattcaacgtatatataaggatagaaaaaatttgaggtggggccacgacccactttgcccccctgcccatgacagcagatgacttttgcattttttttgggatccttcattattggtggtccttgtttttttgtggaaaatcgccggagaactaggtatgcggtagccttaggatttcctaaggtgccattggatggacttgcagaataaagcactcctatatgctttgtggtaactgtgtgatttggtgacggagtttcgtgtagatcagttatctgggtgatggggatgcacacttcacctttttgctgccttccttttaatgcactaataactgttttcccccttccaacaggaagtagctaattggtgctgggcataggacttgctggatttcagtcgtctgatatactgagacttagtagtgctgatccagtgaacctatccacaccaacttgattacagtctctctgacacaactatggcgccctctgccgctgccccaggcatctctgaggctgagggggcaccacgcatggccaagttcctctgcagctttggaggtagtatccttccccgaccacttgatggctgtcttcgatatgttggtggcgagacaaggattgtcatattgccgcgtgacatatcatatgccgacctagctgcacggatgagagatctctacaaggatgctgataccatcaaataccagcaacctgatgaggatctggatgcgctggtctcggtcgtgaatcacgatgatgtggtgaacatgatggaggagtatgacaaagtcactgccacaggggaggcgttcactcggctcaggatcttcttattttctcagcaattggatgacaatgctgcatcagtggctgtgcattacaatgtagacgagcgggaaacagagagaaggtatgtagatgcgctcaacagccttggtgatgttaggtcaccttcctcccctgtatctgtggagcagctttttggcatcggaggcaatgattcaggaattcctgattttgctggcttgagacatttgaatgtccctcgtccatcacatggtcagaggtatggagagatggattctccttggagccctgcttatgtctcaccaagccagtacagagtgcatgacccgagggattttccaatttcaccgtcatctgcaaggttccaagtaggagcggaggattttgatgacaggattcctgacgactttgtaaggcagtcaccaaaatatcattattatgaggctcaatcaccatcacatatggataatttagtctggcttccacctggtgctgtaattcagcaaaatgcaggtttccctggtgatttgagcaagcacaataaatttttggatgggaacagtggatgtgatcactgtggttcactattccacaagggtcagggttcggtgactgatcctatctatatgaatcctcgttggactcggccagtccaacaacattttgaccaaccaagcatgattaatgattatcccggtcaccatgctaattcttgtccagattactgccgccctggtgagcattatgcgggaggtcaagatgttagattggaaaatggtgtttatgttaaagagcaaaatggtggtcatactcccatgctttataatgagtcacgtcctcacgatagagtctggtatgcgcataccaaccaaagtcatcagcggtatgaggatccaaggctgcattatcctactaatgatagagtgatcgagccatacattgtcgatgctagctctgtaaattccgcatttgcaccaaacaaagtatatgaaatgcattcagcatctcttggtcattctagttctagccatgaaagtcctcactattttcatggtagcagtgagctcataaatgacgcatatcacaaccaacaagttggaggcagtgggtcatatgtgcagccagcagggtctgaagaatcccctggtcagcattacaaccacttttcggcctatggtgcagattccttttatcaaatgcaacaaaatttgccacccattcaatctttgaggaggagagcgaacagtcctgttcacactgcctcaccatatgattccccacacctgccaataccaaatgggagcattaacatgaattctgttagaaatacaggtgatgcgagtcccaggatagcaggtcttattggatatgatcgaatgccaaacccatttactccgcccaatggcagcatactatatagagttggtgggcatgatgttcctgcagctatggagaacactagtgcttttggtcctaggtctaatccaactgctgctcagtatgttcagccttttattgctcctgaatcaatccagcatcaacctggagttcccttgagggaggtttatcctgaaagagcataccctgaacccatgccgtcatcatatgctgatggcaaagtagctgtttctgcattgcccctcaccgaccaattattcaggttggatataaacacaatgaagaaacttgaaggacaagatgatgggaactctactcgaaatgtgaatgaaacaactcttttgcatgctgtggatgaaccaagtaccttaccccaccatgttggatctgtacatgaagtcgatcctaagcaggagaagctaaccgaaaaagaaagcaggcaaaagcaacatgaagctggggctacagcactgcaggaatgtgaggatatttcagaggatatgttgaatttccttcctgaattaattgcctctgttaaaaaggtaacactggaagatgctgctgagacacaaatagcccaatcagatgctaatgctgctgtttcacctgttcctgatgatgacgataatggaaagaagctggatgaggcaacagctggtaatacaaatgcaaatcaggaccttgatttgcaaggaagccttgatcggcagaagagtttcaagattgagtctacaactgctgaagctgaagctttgtcgaaaggactacagactataaaaaatgatgatttagaggaaattagagagctgggttcaggtacttatggggcggtctatcatggtaaatggaggggatgcgatgttgctattaaaagaataaaagcaagttgctttgctggaagaccatctgaaagagagcgtttgatcacggatttctggaaagaagctctgatcctaagctcacttcatcatccaaatgtggttgcattttatggtgtagttcgtgatggtccagatggaagcttagcaactgttactgagtttatggttaatgggtctctcaaacagttcctgaggaaaaaagacaggacaatagatcgccggaagagagtaatattagccatggatgctgcatttggcatggaatatttgcacgggaagaatatagtccattttgacctgaagtgtgagaatctactggtgaacatgagggatccacagcgaccaatctgcaagatcggtgatctcgggctatcaaaggttaaacagcatactttggtatctggtggtgttagaggaaccttaccgtggatggcaccagagcttctgagtgggaaaaacaatatggtgtcagagaagattgacgtctattcgtttggaattgtcatgtgggagctgcttactggggaagagccatactctgatatgcgtgctgctgaaattattggggccattgtaaacgattccttacgccctcaaatcccttcatggtgtgatcctgagtggaagggattgatggaaagctgttggtccagtgatccagcggagagaccgtccttcactgatatatctcaaaggttgaggaaaatggccgctgcaatgaatgtgaagtgaaggttcggaagccatatttgtcttgattttccttagtcctggagtaacccggctgtcatttgccttgtgtcgaaaataagtatgctataaagcgttctgtcttgatgggaactgttgggctgtaattgtaaataagttttgacttgcttcatcttgctgtgcaaagtagtaattaataggcacgatcaaagctgggcacagttatcttttccccccatacaaaagtgtgtcctaggactaggaggagagatggatcgaacacgactagagctgtacatagtatactgtttgctctgtatataatcatcacttcctatttgaatgctcataagtttgcacagtcccttgtggtcttcctgttgagtcctaatcgaccagggtgattggtgaagccactgtctatccgaagagaccattg

SEQ ID NO: 44717 - DNA, 4076 bp, Zea Mays
ctgccacccttccccacctatcgatctcgagttctctcgaccccacccgacccggagccgcaccgcctcgacccagaccggcgccgacgagccccagcgcccaatggcggcggctttcctcgccctggaggcccgcgtgacatgatccctgtcccccgaggatgggaatatcccccctccaccctcccttctcgactcttcctcgggtctctccttctccaccgcctcgcgctccgcaattggctgctcgtgctcgcgtggccccggatcgccgccaggaagtagctaattggtgctgggcataggacttgctggatttcagtcgtctgatatactgagacttagtagtgctgatccagtgaacctatccacaccaacttgattacagtctctctgacacaactatggcgccctctgccgctgccccaggcatctctgaggctgagggggcaccacgcatggccaagttcctctgcagctttggaggtagtatccttccccgaccacttgatggctgtcttcgatatgttggtggcgagacaaggattgtcatattgccgcgtgacatatcatatgccgacctagctgcacggatgagagatctctacaaggatgctgataccatcaaataccagcaacctgatgaggatctggatgcgctggtctcggtcgtgaatcacgatgatgtggtgaacatgatggaggagtatgacaaagtcactgccacaggggaggcgttcactcggctcaggatcttcttattttctcagcaattggatgacaatgctgcatcagtggctgtgcattacaatgtagacgagcgggaaacagagagaaggtatgtagatgcgctcaacagccttggtgatgttaggtcaccttcctcccctgtatctgtggagcagctttttggcatcggaggcaatgattcaggaattcctgattttgctggcttgagacatttgaatgtccctcgtccatcacatggtcagaggtatggagagatggattctccttggagccctgcttatgtctcaccaagccagtacagagtgcatgacccgagggattttccaatttcaccgtcatctgcaaggttccaagtaggagcggaggattttgatgacaggattcctgacgactttgtaaggcagtcaccaaaatatcattattatgaggctcaatcaccatcacatatggataatttagtctggcttccacctggtgctgtaattcagcaaaatgcaggtttccctggtgatttgagcaagcacaataaatttttggatgggaacagtggatgtgatcactgtggttcactattccacaagggtcagggttcggtgactgatcctatctatatgaatcctcgttggactcggccagtccaacaacattttgaccaaccaagcatgattaatgattatcccggtcaccatgctaattcttgtccagattactgccgccctggtgagcattatgcgggaggtcaagatgttagattggaaaatggtgtttatgttaaagagcaaaatggtggtcatactcccatgctttataatgagtcacgtcctcacgatagagtctggtatgcgcataccaaccaaagtcatcagcggtatgaggatccaaggctgcattatcctactaatgatagagtgatcgagccatacattgtcgatgctagctctgtaaattccgcatttgcaccaaacaaagtatatgaaatgcattcagcatctcttggtcattctagttctagccatgaaagtcctcactattttcatggtagcagtgagctcataaatgacgcatatcacaaccaacaagttggaggcagtgggtcatatgtgcagccagcagggtctgaagaatcccctggtcagcattacaaccacttttcggcctatggtgcagattccttttatcaaatgcaacaaaatttgccacccattcaatctttgaggaggagagcgaacagtcctgttcacactgcctcaccatatgattccccacacctgccaataccaaatgggagcattaacatgaattctgttagaaatacaggtgatgcgagtcccaggatagcaggtcttattggatatgatcgaatgccaaacccatttactccgcccaatggcagcatactatatagagttggtgggcatgatgttcctgcagctatggagaacactagtgcttttggtcctaggtctaatccaactgctgctcagtatgttcagccttttattgctcctgaatcaatccagcatcaacctggagttcccttgagggaggtttatcctgaaagagcataccctgaacccatgccgtcatcatatgctgatggcaaagtagctgtttctgcattgcccctcaccgaccaattattcaggttggatataaacacaatgaagaaacttgaaggacaagatgatgggaactctactcgaaatgtgaatgaaacaactcttttgcatgctgtggatgaaccaagtaccttaccccaccatgttggatctgtacatgaagtcgatcctaagcaggagaagctaaccgaaaaagaaagcaggcaaaagcaacatgaagctggggctacagcactgcaggaatgtgaggatatttcagaggatatgttgaatttccttcctgaattaattgcctctgttaaaaaggtaacactggaagatgctgctgagacacaaatagcccaatcagatgctaatgctgctgtttcacctgttcctgatgatgacgataatggaaagaagctggatgaggcaacagctggtaatacaaatgcaaatcaggaccttgatttgcaaggaagccttgatcggcagaagagtttcaagattgagtctacaactgctgaagctgaagctttgtcgaaaggactacagactataaaaaatgatgatttagaggaaattagagagctgggttcaggtacttatggggcggtctatcatggtaaatggaggggatgcgatgttgctattaaaagaataaaagcaagttgctttgctggaagaccatctgaaagagagcgtttgatcacggatttctggaaagaagctctgatcctaagctcacttcatcatccaaatgtggttgcattttatggtgtagttcgtgatggtccagatggaagcttagcaactgttactgagtttatggttaatgggtctctcaaacagttcctgaggaaaaaagacaggacaatagatcgccggaagagagtaatattagccatggatgctgcatttggcatggaatatttgcacgggaagaatatagtccattttgacctgaagtgtgagaatctactggtgaacatgagggatccacagcgaccaatctgcaagatcggtgatctcgggctatcaaaggttaaacagcatactttggtatctggtggtgttagaggaaccttaccgtggatggcaccagagcttctgagtgggaaaaacaatatggtgtcagagaagattgacgtctattcgtttggaattgtcatgtgggagctgcttactggggaagagccatactctgatatgcgtgctgctgaaattattgtgatccagcggagagaccgtccttcactgatatatctcaaaggttgaggaaaatggccgctgcaatgaatgtgaagtgaaggttcggaagccatatttgtcttgattttccttagtcctggagtaacccggctgtcatttgccttgtgtcgaaaataagtatgctataaagcgttctgtcttgatgggaactgttgggctgtaattgtaaataagttttgacttgcttcatcttgctgtgcaaagtagtaattaataggcacgatcaaagctgggcacagttatcttttccccccatacaaaagtgtgtcctaggactaggaggagagatggatcgaacacgactagagctgtacatagtatactgtttgctctgtatataatcatcacttcctatttgaatgctcataagtttgcacagtcccttgtggtcttcctgttgagtcctaatcgaccagggtgattggtgaagccactgtctatccgaagagaccattg

SEQ ID NO: 44718 - DNA, 4204 bp, Zea Mays
caaaaataacagaaaggagagccgcgtgtcctcccagccactgccacccttccccacctatcgatctcgagttctctcgaccccacccgacccggagccgcaccgcctcgacccagaccggcgccgacgagccccagcgcccaatggcggcggctttcctcgccctggaggcccgcgtgacatgatccctgtcccccgaggatgggaatatcccccctccaccctcccttctcgactcttcctcgggtctctccttctccaccgcctcgcgctccgcaattggctgctcgtgctcgcgtggccccggatcgccgccaggaagtagctaattggtgctgggcataggacttgctggatttcagtcgtctgatatactgagacttagtagtgctgatccagtgaacctatccacaccaacttgattacagtctctctgacacaactatggcgccctctgccgctgccccaggcatctctgaggctgagggggcaccacgcatggccaagttcctctgcagctttggaggtagtatccttccccgaccacttgatggctgtcttcgatatgttggtggcgagacaaggattgtcatattgccgcgtgacatatcatatgccgacctagctgcacggatgagagatctctacaaggatgctgataccatcaaataccagcaacctgatgaggatctggatgcgctggtctcggtcgtgaatcacgatgatgtggtgaacatgatggaggagtatgacaaagtcactgccacaggggaggcgttcactcggctcaggatcttcttattttctcagcaattggatgacaatgctgcatcagtggctgtgcattacaatgtagacgagcgggaaacagagagaaggtatgtagatgcgctcaacagccttggtgatgttaggtcaccttcctcccctgtatctgtggagcagctttttggcatcggaggcaatgattcaggaattcctgattttgctggcttgagacatttgaatgtccctcgtccatcacatggtcagaggtatggagagatggattctccttggagccctgcttatgtctcaccaagccagtacagagtgcatgacccgagggattttccaatttcaccgtcatctgcaaggttccaagtaggagcggaggattttgatgacaggattcctgacgactttgtaaggcagtcaccaaaatatcattattatgaggctcaatcaccatcacatatggataatttagtctggcttccacctggtgctgtaattcagcaaaatgcaggtttccctggtgatttgagcaagcacaataaatttttggatgggaacagtggatgtgatcactgtggttcactattccacaagggtcagggttcggtgactgatcctatctatatgaatcctcgttggactcggccagtccaacaacattttgaccaaccaagcatgattaatgattatcccggtcaccatgctaattcttgtccagattactgccgccctggtgagcattatgcgggaggtcaagatgttagattggaaaatggtgtttatgttaaagagcaaaatggtggtcatactcccatgctttataatgagtcacgtcctcacgatagagtctggtatgcgcataccaaccaaagtcatcagcggtatgaggatccaaggctgcattatcctactaatgatagagtgatcgagccatacattgtcgatgctagctctgtaaattccgcatttgcaccaaacaaagtatatgaaatgcattcagcatctcttggtcattctagttctagccatgaaagtcctcactattttcatggtagcagtgagctcataaatgacgcatatcacaaccaacaagttggaggcagtgggtcatatgtgcagccagcagggtctgaagaatcccctggtcagcattacaaccacttttcggcctatggtgcagattccttttatcaaatgcaacaaaatttgccacccattcaatctttgaggaggagagcgaacagtcctgttcacactgcctcaccatatgattccccacacctgccaataccaaatgggagcattaacatgaattctgttagaaatacaggtgatgcgagtcccaggatagcaggtcttattggatatgatcgaatgccaaacccatttactccgcccaatggcagcatactatatagagttggtgggcatgatgttcctgcagctatggagaacactagtgcttttggtcctaggtctaatccaactgctgctcagtatgttcagccttttattgctcctgaatcaatccagcatcaacctggagttcccttgagggaggtttatcctgaaagagcataccctgaacccatgccgtcatcatatgctgatggcaaagtagctgtttctgcattgcccctcaccgaccaattattcaggttggatataaacacaatgaagaaacttgaaggacaagatgatgggaactctactcgaaatgtgaatgaaacaactcttttgcatgctgtggatgaaccaagtaccttaccccaccatgttggatctgtacatgaagtcgatcctaagcaggagaagctaaccgaaaaagaaagcaggcaaaagcaacatgaagctggggctacagcactgcaggaatgtgaggatatttcagaggatatgttgaatttccttcctgaattaattgcctctgttaaaaaggtaacactggaagatgctgctgagacacaaatagcccaatcagatgctaatgctgctgtttcacctgttcctgatgatgacgataatggaaagaagctggatgaggcaacagctggtaatacaaatgcaaatcaggaccttgatttgcaaggaagccttgatcggcagaagagtttcaagattgagtctacaactgctgaagctgaagctttgtcgaaaggactacagactataaaaaatgatgatttagaggaaattagagagctgggttcaggtacttatggggcggtctatcatggtaaatggaggggatgcgatgttgctattaaaagaataaaagcaagttgctttgctggaagaccatctgaaagagagcgtttgatcacggatttctggaaagaagctctgatcctaagctcacttcatcatccaaatgtggttgcattttatggtgtagttcgtgatggtccagatggaagcttagcaactgttactgagtttatggttaatgggtctctcaaacagttcctgaggaaaaaagacaggacaatagatcgccggaagagagtaatattagccatggatgctgcatttggcatggaatatttgcacgggaagaatatagtccattttgacctgaagtgtgagaatctactggtgaacatgagggatccacagcgaccaatctgcaagatcggtgatctcgggctatcaaaggttaaacagcatactttggtatctggtggtgttagaggaaccttaccgtggatggcaccagagcttctgagtgggaaaaacaatatggtgtcagagaagattgacgtctattcgtttggaattgtcatgtgggagctgcttactggggaagagccatactctgatatgcgtgctgctgaaattattggggccattgtaaacgattccttacgccctcaaatcccttcatggtgtgatcctgagtggaagggattgatggaaagctgttggtccagtgatccagcggagagaccgtccttcactgatatatctcaaaggttgaggaaaatggccgctgcaatgaatgtgaagtgaaggttcggaagccatatttgtcttgattttccttagtcctggagtaacccggctgtcatttgccttgtgtcgaaaataagtatgctataaagcgttctgtcttgatgggaactgttgggctgtaattgtaaataagttttgacttgcttcatcttgctgtgcaaagtagtaattaataggcacgatcaaagctgggcacagttatcttttccccccatacaaaagtgtgtcctaggactaggaggagagatggatcgaacacgactagagctgtacatagtatactgtttgctctgtatataatcatcacttcctatttgaatgctcataagtttgcacagtcccttgtggtcttcctgttgagtcctaatcgaccagggtgattggtgaagccactgtctatccgaagagaccattg

SEQ ID NO: 44719 - DNA, 4367 bp, Zea Mays
ctgacccccatttcgttccttccagatctccccgcccccgcatctcgcccgccagctaccggcgagtgggcgcgcgcccgccgccgccgcgatgtacctggcgtacgggtggccgcagtcgatccctctggacccggacgactcggaccgcgtggtcctcctccgcgtgctcggccgcctcctcctcgccgtctgtccggcttcgcttcacctctggtccgccgcccaacaccgggtccgcctagcccgctccgatcgctccccggagtccctcgccacccatggccacaacgcgcacgccgcgtggagccccgacgccaggaccgtcgccgtcctgacctcttccttctacctctacgtttacaaggttcagcactcgggaaagcaactgatcgtcggtggcaagcaggtcccggggctttgcctggctagtatatccctaatcatcaccgagaaggttcctctcgccaatggcgttgctataacgagcaatttcgtgtgtgacagcaaaagcatgctcctcggactatccaatgggcatgtgcaggtcgtgtcctggaacgctgagttctcagacagcttcaagcttggttgctatgtgtgttcatctgagaaacctactgctgccgtagatgcgttggtgtttgatcctcccagtttgcgagaaagctctaacgcaaggcctgctccttgctgcacaggcaattcttctattgtccatgttgagctgtcggtgaagctgagattgctggttgctttgtactcaggctgtcgcattgccctctgtactattggtaagaagggattaaggcagcctggcagcaccagagtggagagatggttggacactgatgatgcgatgtgtacttctgtggcttctgagcaacagattcttgctgtcgggtgcagtagaggtgttgttgaattgtatgatctagcagaaaacacacgccatatacgaaccatttcgttgtatgattgggggtattcagtggaagataccggtcctgttgcctgtatatcttggacgcctgacaattgtgctcttgcagttgggtggaaatttaggggacttactgtatggtctgtgtctggatgtcgattgatgtgtactattcgtcaaactggttcaaattctgcctcatctcctatggtgaaacctagcgctctaaaatttgagcctcttatgggaggaacatcacacattcaatgggatgataatggatataagttatttgctgtcgaagaaagcttgtcagaaagggttcttgctttctcatttgccaaatgttgcccaaacagagggctttcaggcacaacatattcccaccaggttctttatggggaagatcgaatccttttggtgcaaccggatgatgccgatgaactgaagatattgcatcttaatgttccaatttcatacatttcccagaactggccagttctacatgtggtggcaagcaatgatgggatgtacttggcagttgctggctctcacggactagtgctatatgatttgcgaaataaaaggtggcgtttttttggtgatgttacacaagagcaaaagatccaatgcaaaggcctattgtggatgagaaaaattgttattgtgtgcaactatgttgaatcgtcaaacacgtgagttttcacttctataccatctttcttgctattcctatcctgtaactgacttggccctgtttggtggagctctggtcggctttagctctggctcctccgtgtgttgaagcaaggagctgttttcttatctcttctcaaaatgagctaggagctggtgaagccactatttttggcttcactagatcagggtccgtgtactgtagcaaggagcgggaactgtttggagcagtgccaaacaggacgaaggctcacattttctggttgagcatgggagaaagctcgctacatgagagtttctcacattgaacatgatcatagaaatactagctgaactgcattttttctgttgatattttgatcttattttattaacttaggcctccagtgtctttccaattacaatatattttagtcacagacatgtatgattcttttggctcaggtatgagctcctctttttcccaagatatcatcttgattatagttctttactctaccggaaacaactgcttggaaggccaattgtcatggatgttttccaggattatatattagttacttacagtccattcgatgtacatatctaccatgtggtggtctcgggagaattatctcctgctagcaatccagttttaaagctttcaacattgcgagaactttcaatcatgagtccaaaaagcccacctgtttcaatgcgcttcattcctgaacaaaatgacaaaggagcgctgacagaagatactcatggattttctgatcttttgtcccagcaaccatcaagatgtttgatcttgcggaccaatggggagctttctgtgcttgacatggacgatggacatgaacacactctcacaaattcaattgaactcttttgggtcacctgttcgcagtttgaagagaagggtagtcttatcaaggaggtttcatggcttgattacggtcatcggggtatgcaggtgtggtacccatcacatggagcagatcgttttaagcaagaggattttttgcagttggacccggagcttgagtttgatcgtgaggtgtatcctcttggtcttcttccaaatgttggtgtggttgttggtgtttctcagagaatgtccttctcaactgcggagtttccatgctttgagccttcacctcaagcccaaacaatattgcattgtttattacgacatctccttcagagggacaagattgaagaggctttgctcttggcaaatttgtccgcagaaaaacctcatttctctcactgtttagagtggcttctgtttacagtatttgatgcagatatatcaaggccaagtgcttcaaaaaatcaggcttcacaaaaagttgattctcccaagaaatctcttcttgagaaaacttgtgacctactacggaattttcctgaatatatggatgttgtagtcagcgttgctaggaaaactgatggacgacactgggctgatctgttctctgcagctggacgatccacagagatgtttgaggaatgcttccaacagaggtggtacaggactgctgcttgctacatactggtcattgctaagctggagggccctgcagtcagtcagtattgtgcactccgtttgctacaagctacacttgatgagtctttgtatgagcttgcaggggagttggttcgcttcttactaagatctggaagagattttgagaatgccacttcagactctgagaagctatctccaagatttctaggctattttctgttccgttcaccttataagcggcaatcttctgatttgaaaagtaactcaacgaaagaacttagtccacatattgcttctgttatgaacattctagagcgccatgctagctatttgatgtctggcaaggagctttctaaactcgtcgcttttgtcaaggggactcaatttgatcttgtggaatatctacaacgagaaaggcaagggtctgctcgtctggagaattttgcttctgcactcgaactgattggacaaaagctccaaatggatacactgcaaagccgacttgatgcagagttccttctagctcatatgtgttcagtcaagtttaaggaatggatcgtggtgctagctactttgttgcggcgtacagaggttttggtggatctctttcagcatgatttgcgattgtggaaagcatatagcattactctacagtcacatgatgtattcagggaatatcttgaccttcttaatatcttggaggaacagctttcgtctgtctctgatcttacattgcagaatggaccattgtcatgaatgctggacggtgacactgattgaaaaaaacaactgaatacggcgttttagccttgagttaattaacacatacggcgggaccaggaatctgatgtaaatagattattcagggtgtttttctctttgagcaacaccccgaggtgctatggcagttttttgtacagtgatcagctaagcacctattgttgtatcattagtttgttgcagcggagttgagtctgcattcttcgccttactgtaaatatgtgctgcgcccttaacattgtaagccatataccattctgagcagcaagttcttttctctgttccatagaatcgtgtttaaagctagaagcctagaacatgtagatagtcttcacctgatgtttgtagactccgagatattattaaaactgacactatgatttcttaattgcattttttccatggcatactgatgtttttttttactttgcg

SEQ ID NO: 44720 - DNA, 3793 bp, Zea Mays
ctgacccccatttcgttccttccagatctccccgcccccgcatctcgcccgccagctaccggcgagtgggcgcgcgcccgccgccgccgcgatgtacctggcgtacgggtggccgcagtcgatccctctggacccggacgactcggaccgcgtggtcctcctccgcgtgctcggccgcctcctcctcgccgtctgtccggcttcgcttcacctctggtccgccgcccaacaccgggtccgcctagcccgctccgatcgctccccggagtccctcgccacccatggccacaacgcgcacgccgcgtggagccccgacgccaggaccgtcgccgtcctgacctcttccttctacctctacgtttacaaggttcagcactcgggaaagcaactgatcgtcggtggcaagcaggtcccggggctttgcctggctagtatatccctaatcatcaccgagaaggttcctctcgccaatggcgttgctataacgagcaatttcgtgtgtgacagcaaaagcatgctcctcggactatccaatgggcatgtgcaggtcgtgtcctggaacgctgaggcaattcttctattgtccatgttgagctgtcggtgaagctgagattgctggttgctttgtactcaggctgtcgcattgccctctgtactattggtaagaagggattaaggcagcctggcagcaccagagtggagagatggttggacactgatgatgcgatgtgtacttctgtggcttctgagcaacagattcttgctgtcgggtgcagtagaggtgttgttgaattgtatgatctagcagaaaacacacgccatatacgaaccatttcgttgtatgattgggggtattcagtggaagataccggtcctgttgcctgtatatcttggacgcctgacaattgtgctcttgcagttgggtggaaatttaggggacttactgtatggtctgtgtctggatgtcgattgatgtgtactattcgtcaaactggttcaaattctgcctcatctcctatggtgaaacctagcgctctaaaatttgagcctcttatgggaggaacatcacacattcaatgggatgataatggatataagttatttgctgtcgaagaaagcttgtcagaaagggttcttgctttctcatttgccaaatgttgcccaaacagagggctttcaggcacaacatattcccaccaggttctttatggggaagatcgaatccttttggtgcaaccggatgatgccgatgaactgaagatattgcatcttaatgttccaaactggccagttctacatgtggtggcaagcaatgatgggatgtacttggcagttgctggctctcacggactagtgctatatgatttgcgaaataaaaggtggcgtttttttggtgatgttacacaagagcaaaagatccaatgcaaaggcctattgtggatgagaaaaattgttattgtgtgcaactatgttgaatcgtcaaacacgtatgagctcctctttttcccaagatatcatcttgattatagttctttactctaccggaaacaactgcttggaaggccaattgtcatggatgttttccaggattatatattagttacttacagtccattcgatgtacatatctaccatgtggtggtctcgggagaattatctcctgctagcaatccagttttaaagctttcaacattgcgagaactttcaatcatgagtccaaaaagcccacctgtttcaatgcgcttcattcctgaacaaaatgacaaaggagcgctgacagaagatactcatggattttctgatcttttgtcccagcaaccatcaagatgtttgatcttgcggaccaatggggagctttctgtgcttgacatggacgatggacatgaacacactctcacaaattcaattgaactcttttgggtcacctgttcgcagtttgaagagaagggtagtcttatcaaggaggtttcatggcttgattacggtcatcggggtatgcaggtgtggtacccatcacatggagcagatcgttttaagcaagaggattttttgcagttggacccggagcttgagtttgatcgtgaggtgtatcctcttggtcttcttccaaatgttggtgtggttgttggtgtttctcagagaatgtccttctcaactgcggagtttccatgctttgagccttcacctcaagcccaaacaatattgcattgtttattacgacatctccttcagagggacaagattgaagaggctttgctcttggcaaatttgtccgcagaaaaacctcatttctctcactgtttagagtggcttctgtttacagtatttgatgcagatatatcaaggccaagtgcttcaaaaaatcaggcttcacaaaaagttgattctcccaagaaatctcttcttgagaaaacttgtgacctactacggaattttcctgaatatatggatgttgtagtcagcgttgctaggaaaactgatggacgacactgggctgatctgttctctgcagctggacgatccacagatatgaccaaactttcatgataggatgtttgaggaatgcttccaacagaggtggtacaggactgctgcttgctacatactggtcattgctaagctggagggccctgcagtcagtcagtattgtgcactccgtttgctacaagctacacttgatgagtctttgtatgagcttgcaggggagttggttcgcttcttactaagatctggaagagattttgagaatgccacttcagactctgagaagctatctccaagatttctaggctattttctgttccgttcaccttataagcggcaatcttctgatttgaaaagtaactcaacgaaagaacttagtccacatattgcttctgttatgaacattctagagcgccatgctagctatttgatgtctggcaaggagctttctaaactcgtcgcttttgtcaaggggactcaatttgatcttgtggaatatctacaacgagaaaggcaagggtctgctcgtctggagaattttgcttctgcactcgaactgattggacaaaagctccaaatggatacactgcaaagccgacttgatgcagagttccttctagctcatatgtgttcagtcaagtttaaggaatggatcgtggtgctagctactttgttgcggcgtacagaggttttggtggatctctttcagcatgatttgcgattgtggaaagcatatagcattactctacagtcacatgatgtattcagggaatatcttgaccttcttaatatcttggaggaacagctttcgtctgtctctgatcttacattgcagaatggaccattgtcatgaatgctggacggtgacactgattgaaaaaaacaactgaatacggcgttttagccttgagttaattaacacatacggcgggaccaggaatctgatgtaaatagattattcagggtgtttttctctttgagcaacaccccgaggtgctatggcagttttttgtacagtgatcagctaagcacctattgttgtatcattagtttgttgcagcggagttgagtctgcattcttcgccttactgtaaatatgtgctgcgcccttaacattgtaagccatataccattctgagcagcaagttcttttctctgttccatagaatcgtgtttaaagctagaagcctagaacatgtagatagtcttcacctgatgtttgtagactccgagatattattaaaactgacactatgatttcttaattgcattttttccatggcatactgatgtttttttttactttgcg

SEQ ID NO: 44721 - DNA, 3789 bp, Zea Mays
ctgacccccatttcgttccttccagatctccccgcccccgcatctcgcccgccagctaccggcgagtgggcgcgcgcccgccgccgccgcgatgtacctggcgtacgggtggccgcagtcgatccctctggacccggacgactcggaccgcgtggtcctcctccgcgtgctcggccgcctcctcctcgccgtctgtccggcttcgcttcacctctggtccgccgcccaacaccgggtccgcctagcccgctccgatcgctccccggagtccctcgccacccatggccacaacgcgcacgccgcgtggagccccgacgccaggaccgtcgccgtcctgacctcttccttctacctctacgtttacaaggttcagcactcgggaaagcaactgatcgtcggtggcaagcaggtcccggggctttgcctggctagtatatccctaatcatcaccgagaaggttcctctcgccaatggcgttgctataacgagcaatttcgtgtgtgacagcaaaagcatgctcctcggactatccaatgggcatgtgcaggtcgtgtcctggaacgctgaggcaattcttctattgtccatgttgagctgtcggtgaagctgagattgctggttgctttgtactcaggctgtcgcattgccctctgtactattggtaagaagggattaaggcagcctggcagcaccagagtggagagatggttggacactgatgatgcgatgtgtacttctgtggcttctgagcaacagattcttgctgtcgggtgcagtagaggtgttgttgaattgtatgatctagcagaaaacacacgccatatacgaaccatttcgttgtatgattgggggtattcagtggaagataccggtcctgttgcctgtatatcttggacgcctgacaattgtgctcttgcagttgggtggaaatttaggggacttactgtatggtctgtgtctggatgtcgattgatgtgtactattcgtcaaactggttcaaattctgcctcatctcctatggtgaaacctagcgctctaaaatttgagcctcttatgggaggaacatcacacattcaatgggatgataatggatataagttatttgctgtcgaagaaagcttgtcagaaagggttcttgctttctcatttgccaaatgttgcccaaacagagggctttcaggcacaacatattcccaccaggttctttatggggaagatcgaatccttttggtgcaaccggatgatgccgatgaactgaagatattgcatcttaatgttccaatttcatacatttcccagaactggccagttctacatgtggtggcaagcaatgatgggatgtacttggcagttgctggctctcacggactagtgctatatgatttgcgaaataaaaggtggcgtttttttggtgatgttacacaagagcaaaagatccaatgcaaaggcctattgtggatgagaaaaattgttattgtgtgcaactatgttgaatcgtcaaacacgtatgagctcctctttttcccaagatatcatcttgattatagttctttactctaccggaaacaactgcttggaaggccaattgtcatggatgttttccaggattatatattagttacttacagtccattcgatgtacatatctaccatgtggtggtctcgggagaattatctcctgctagcaatccagttttaaagctttcaacattgcgagaactttcaatcatgagtccaaaaagcccacctgtttcaatgcgcttcattcctgaacaaaatgacaaaggagcgctgacagaagatactcatggattttctgatcttttgtcccagcaaccatcaagatgtttgatcttgcggaccaatggggagctttctgtgcttgacatggacgatggacatgaacacactctcacaaattcaattgaactcttttgggtcacctgttcgcagtttgaagagaagggtagtcttatcaaggaggtttcatggcttgattacggtcatcggggtatgcaggtgtggtacccatcacatggagcagatcgttttaagcaagaggattttttgcagttggacccggagcttgagtttgatcgtgaggtgtatcctcttggtcttcttccaaatgttggtgtggttgttggtgtttctcagagaatgtccttctcaactgcggagtttccatgctttgagccttcacctcaagcccaaacaatattgcattgtttattacgacatctccttcagagggacaagattgaagaggctttgctcttggcaaatttgtccgcagaaaaacctcatttctctcactgtttagagtggcttctgtttacagtatttgatgcagatatatcaaggccaagtgcttcaaaaaatcaggcttcacaaaaagttgattctcccaagaaatctcttcttgagaaaacttgtgacctactacggaattttcctgaatatatggatgttgtagtcagcgttgctaggaaaactgatggacgacactgggctgatctgttctctgcagctggacgatccacagagatgtttgaggaatgcttccaacagaggtggtacaggactgctgcttgctacatactggtcattgctaagctggagggccctgcagtcagtcagtattgtgcactccgtttgctacaagctacacttgatgagtctttgtatgagcttgcaggggagttggttcgcttcttactaagatctggaagagattttgagaatgccacttcagactctgagaagctatctccaagatttctaggctattttctgttccgttcaccttataagcggcaatcttctgatttgaaaagtaactcaacgaaagaacttagtccacatattgcttctgttatgaacattctagagcgccatgctagctatttgatgtctggcaaggagctttctaaactcgtcgcttttgtcaaggggactcaatttgatcttgtggaatatctacaacgagaaaggcaagggtctgctcgtctggagaattttgcttctgcactcgaactgattggacaaaagctccaaatggatacactgcaaagccgacttgatgcagagttccttctagctcatatgtgttcagtcaagtttaaggaatggatcgtggtgctagctactttgttgcggcgtacagaggttttggtggatctctttcagcatgatttgcgattgtggaaagcatatagcattactctacagtcacatgatgtattcagggaatatcttgaccttcttaatatcttggaggaacagctttcgtctgtctctgatcttacattgcagaatggaccattgtcatgaatgctggacggtgacactgattgaaaaaaacaactgaatacggcgttttagccttgagttaattaacacatacggcgggaccaggaatctgatgtaaatagattattcagggtgtttttctctttgagcaacaccccgaggtgctatggcagttttttgtacagtgatcagctaagcacctattgttgtatcattagtttgttgcagcggagttgagtctgcattcttcgccttactgtaaatatgtgctgcgcccttaacattgtaagccatataccattctgagcagcaagttcttttctctgttccatagaatcgtgtttaaagctagaagcctagaacatgtagatagtcttcacctgatgtttgtagactccgagatattattaaaactgacactatgatttcttaattgcattttttccatggcatactgatgtttttttttactttgcg

SEQ ID NO: 44722 - DNA, 3944 bp, Zea Mays
ctgacccccatttcgttccttccagatctccccgcccccgcatctcgcccgccagctaccggcgagtgggcgcgcgcccgccgccgccgcgatgtacctggcgtacgggtggccgcagtcgatccctctggacccggacgactcggaccgcgtggtcctcctccgcgtgctcggccgcctcctcctcgccgtctgtccggcttcgcttcacctctggtccgccgcccaacaccgggtccgcctagcccgctccgatcgctccccggagtccctcgccacccatggccacaacgcgcacgccgcgtggagccccgacgccaggaccgtcgccgtcctgacctcttccttctacctctacgtttacaaggttcagcactcgggaaagcaactgatcgtcggtggcaagcaggtcccggggctttgcctggctagtatatccctaatcatcaccgagaaggttcctctcgccaatggcgttgctataacgagcaatttcgtgtgtgacagcaaaagcatgctcctcggactatccaatgggcatgtgcaggtcgtgtcctggaacgctgagttctcagacagcttcaagcttggttgctatgtgtgttcatctgagaaacctactgctgccgtagatgcgttggtgtttgatcctcccagtttgcgagaaagctctaacgcaaggcctgctccttgctgcacaggcaattcttctattgtccatgttgagctgtcggtgaagctgagattgctggttgctttgtactcaggctgtcgcattgccctctgtactattggtaagaagggattaaggcagcctggcagcaccagagtggagagatggttggacactgatgatgcgatgtgtacttctgtggcttctgagcaacagattcttgctgtcgggtgcagtagaggtgttgttgaattgtatgatctagcagaaaacacacgccatatacgaaccatttcgttgtatgattgggggtattcagtggaagataccggtcctgttgcctgtatatcttggacgcctgacaattgtgctcttgcagttgggtggaaatttaggggacttactgtatggtctgtgtctggatgtcgattgatgtgtactattcgtcaaactggttcaaattctgcctcatctcctatggtgaaacctagcgctctaaaatttgagcctcttatgggaggaacatcacacattcaatgggatgataatggatataagttatttgctgtcgaagaaagcttgtcagaaagggttcttgctttctcatttgccaaatgttgcccaaacagagggctttcaggcacaacatattcccaccaggttctttatggggaagatcgaatccttttggtgcaaccggatgatgccgatgaactgaagatattgcatcttaatgttccaatttcatacatttcccagaactggccagttctacatgtggtggcaagcaatgatgggatgtacttggcagttgctggctctcacggactagtgctatatgatttgcgaaataaaaggtggcgtttttttggtgatgttacacaagagcaaaagatccaatgcaaaggcctattgtggatgagaaaaattgttattgtgtgcaactatgttgaatcgtcaaacacgtatgagctcctctttttcccaagatatcatcttgattatagttctttactctaccggaaacaactgcttggaaggccaattgtcatggatgttttccaggattatatattagttacttacagtccattcgatgtacatatctaccatgtggtggtctcgggagaattatctcctgctagcaatccagttttaaagctttcaacattgcgagaactttcaatcatgagtccaaaaagcccacctgtttcaatgcgcttcattcctgaacaaaatgacaaaggagcgctgacagaagatactcatggattttctgatcttttgtcccagcaaccatcaagatgtttgatcttgcggaccaatggggagctttctgtgcttgacatggacgatggacatgaacacactctcacaaattcaattgaactcttttgggtcacctgttcgcagtttgaagagaagggtagtcttatcaaggaggtttcatggcttgattacggtcatcggggtatgcaggtgtggtacccatcacatggagcagatcgttttaagcaagaggattttttgcagttggacccggagcttgagtttgatcgtgaggtgtatcctcttggtcttcttccaaatgttggtgtggttgttggtgtttctcagagaatgtccttctcaactgcggagtttccatgctttgagccttcacctcaagcccaaacaatattgcattgtttattacgacatctccttcagagggacaagattgaagaggctttgctcttggcaaatttgtccgcagaaaaacctcatttctctcactgtttagagtggcttctgtttacagtatttgatgcagatatatcaaggccaagtgcttcaaaaaatcaggcttcacaaaaagttgattctcccaagaaatctcttcttgagaaaacttgtgacctactacggaattttcctgaatatatggatgttgtagtcagcgttgctaggaaaactgatggacgacactgggctgatctgttctctgcagctggacgatccacagatatgaccaaactttcatgataggatgtttgaggaatgcttccaacagaggtggtacaggactgctgcttgctacatactggtcattgctaagctggagggccctgcagtcagtcagtattgtgcactccgtttgctacaagctacacttgatgagtctttgtatgagcttgcaggggagttggttcgcttcttactaagatctggaagagattttgagaatgccacttcagactctgagaagctatctccaagatttctaggctattttctgttccgttcaccttataagcggcaatcttctgatttgaaaagtaactcaacgaaagaacttagtccacatattgcttctgttatgaacattctagagcgccatgctagctatttgatgtctggcaaggagctttctaaactcgtcgcttttgtcaaggggactcaatttgatcttgtggaatatctacaacgagaaaggcaagggtctgctcgtctggagaattttgcttctgcactcgaactgattggacaaaagctccaaatggatacactgcaaagccgacttgatgcagagttccttctagctcatatgtgttcagtcaagtttaaggaatggatcgtggtgctagctactttgttgcggcgtacagaggttttggtggatctctttcagcatgatttgcgattgtggaaagcatatagcattactctacagtcacatgatgtattcagggaatatcttgaccttcttaatatcttggaggaacagctttcgtctgtctctgatcttacattgcagaatggaccattgtcatgaatgctggacggtgacactgattgaaaaaaacaactgaatacggcgttttagccttgagttaattaacacatacggcgggaccaggaatctgatgtaaatagattattcagggtgtttttctctttgagcaacaccccgaggtgctatggcagttttttgtacagtgatcagctaagcacctattgttgtatcattagtttgttgcagcggagttgagtctgcattcttcgccttactgtaaatatgtgctgcgcccttaacattgtaagccatataccattctgagcagcaagttcttttctctgttccatagaatcgtgtttaaagctagaagcctagaacatgtagatagtcttcacctgatgtttgtagactccgagatattattaaaactgacactatgatttcttaattgcattttttccatggcatactgatgtttttttttactttgcg

SEQ ID NO: 44723 - DNA, 3795 bp, Zea Mays
ctgacccccatttcgttccttccagatctccccgcccccgcatctcgcccgccagctaccggcgagtgggcgcgcgcccgccgccgccgcgatgtacctggcgtacgggtggccgcagtcgatccctctggacccggacgactcggaccgcgtggtcctcctccgcgtgctcggccgcctcctcctcgccgtctgtccggcttcgcttcacctctggtccgccgcccaacaccgggtccgcctagcccgctccgatcgctccccggagtccctcgccacccatggccacaacgcgcacgccgcgtggagccccgacgccaggaccgtcgccgtcctgacctcttccttctacctctacgtttacaaggttcagcactcgggaaagcaactgatcgtcggtggcaagcaggtcccggggctttgcctggctagtatatccctaatcatcaccgagaaggttcctctcgccaatggcgttgctataacgagcaatttcgtgtgtgacagcaaaagcatgctcctcggactatccaatgggcatgtgcaggtcgtgtcctggaacgctgagttctcagacagcttcaagcttggttgctatgtgtgttcatctgagaaacctactgctgccgtagatgcgttggtgtttgatcctcccagtttgcgagaaagctctaacgcaaggcctgctccttgctgcacaggcaattcttctattgtccatgttgagctgtcggtgaagctgagattgctggttgctttgtactcaggctgtcgcattgccctctgtactattggtaagaagggattaaggcagcctggcagcaccagagtggagagatggttggacactgatgatgcgatgtgtacttctgtggcttctgagcaacagattcttgctgtcgggtgcagtagaggtgttgttgaattgtatgatctagcagaaaacacacgccatatacgaaccatttcgttgtatgattgggggtattcagtggaagataccggtcctgttgcctgtatatcttggacgcctgacaattgtgctcttgcagttgggtggaaatttaggggacttactgtatggtctgtgtctggatgtcgattgatgtgtactattcgtcaaactggttcaaattctgcctcatctcctatggtgaaacctagcgctctaaaatttgagcctcttatgggaggaacatcacacattcaatgggatgataatggatataagttatttgctgtcgaagaaagcttgtcagaaagggttcttgctttctcatttgccaaatgttgcccaaacagagggctttcaggcacaacatattcccaccaggttctttatggggaagatcgaatccttttggtgcaaccggatgatgccgatgaactgaagatattgcatcttaatgttccaaactggccagttctacatgtggtggcaagcaatgatgggatgtacttggcagttgctggctctcacggactagtgctatatgatttgcgaaataaaaggtggcgtttttttggtgatgttacacaagagcaaaagatccaatgcaaaggcctattgtggatgagaaaaattgttattgtgtgcaactatgttgaatcgtcaaacacgtatgagctcctctttttcccaagatatcatcttgattatagttctttactctaccggaaacaactgcttggaaggccaattgtcatggatgttttccaggattatatattagttacttacagtccattcgatgtacatatctaccatgtggtggtctcgggagaattatctcctgctagcaatccagttttaaagctttcaacattgcgagaactttcaatcatgagtccaaaaagcccacctgtttcaatgcgcttcattcctgaacaaaatgacaaaggagcgctgacagaagatactcatggattttctgatcttttgtcccagcaaccatcaagtttgaagagaagggtagtcttatcaaggaggtttcatggcttgattacggtcatcggggtatgcaggtgtggtacccatcacatggagcagatcgttttaagcaagaggattttttgcagttggacccggagcttgagtttgatcgtgaggtgtatcctcttggtcttcttccaaatgttggtgtggttgttggtgtttctcagagaatgtccttctcaactgcggagtttccatgctttgagccttcacctcaagcccaaacaatattgcattgtttattacgacatctccttcagagggacaagattgaagaggctttgctcttggcaaatttgtccgcagaaaaacctcatttctctcactgtttagagtggcttctgtttacagtatttgatgcagatatatcaaggccaagtgcttcaaaaaatcaggcttcacaaaaagttgattctcccaagaaatctcttcttgagaaaacttgtgacctactacggaattttcctgaatatatggatgttgtagtcagcgttgctaggaaaactgatggacgacactgggctgatctgttctctgcagctggacgatccacagagatgtttgaggaatgcttccaacagaggtggtacaggactgctgcttgctacatactggtcattgctaagctggagggccctgcagtcagtcagtattgtgcactccgtttgctacaagctacacttgatgagtctttgtatgagcttgcaggggagttggttcgcttcttactaagatctggaagagattttgagaatgccacttcagactctgagaagctatctccaagatttctaggctattttctgttccgttcaccttataagcggcaatcttctgatttgaaaagtaactcaacgaaagaacttagtccacatattgcttctgttatgaacattctagagcgccatgctagctatttgatgtctggcaaggagctttctaaactcgtcgcttttgtcaaggggactcaatttgatcttgtggaatatctacaacgagaaaggcaagggtctgctcgtctggagaattttgcttctgcactcgaactgattggacaaaagctccaaatggatacactgcaaagccgacttgatgcagagttccttctagctcatatgtgttcagtcaagtttaaggaatggatcgtggtgctagctactttgttgcggcgtacagaggttttggtggatctctttcagcatgatttgcgattgtggaaagcatatagcattactctacagtcacatgatgtattcagggaatatcttgaccttcttaatatcttggaggaacagctttcgtctgtctctgatcttacattgcagaatggaccattgtcatgaatgctggacggtgacactgattgaaaaaaacaactgaatacggcgttttagccttgagttaattaacacatacggcgggaccaggaatctgatgtaaatagattattcagggtgtttttctctttgagcaacaccccgaggtgctatggcagttttttgtacagtgatcagctaagcacctattgttgtatcattagtttgttgcagcggagttgagtctgcattcttcgccttactgtaaatatgtgctgcgcccttaacattgtaagccatataccattctgagcagcaagttcttttctctgttccatagaatcgtgtttaaagctagaagcctagaacatgtagatagtcttcacctgatgtttgtagactccgagatattattaaaactgacactatgatttcttaattgcattttttccatggcatactgatgtttttttttactttgcg

SEQ ID NO: 44724 - DNA, 3760 bp, Zea Mays
ctgacccccatttcgttccttccagatctccccgcccccgcatctcgcccgccagctaccggcgagtgggcgcgcgcccgccgccgccgcgatgtacctggcgtacgggtggccgcagtcgatccctctggacccggacgactcggaccgcgtggtcctcctccgcgtgctcggccgcctcctcctcgccgtctgtccggcttcgcttcacctctggtccgccgcccaacaccgggtccgcctagcccgctccgatcgctccccggagtccctcgccacccatggccacaacgcgcacgccgcgtggagccccgacgccaggaccgtcgccgtcctgacctcttccttctacctctacgtttacaaggttcagcactcgggaaagcaactgatcgtcggtggcaagcaggtcccggggctttgcctggctagtatatccctaatcatcaccgagaaggttcctctcgccaatggcgttgctataacgagcaatttcgtgtgtgacagcaaaagcatgctcctcggactatccaatgggcatgtgcaggtcgtgtcctggaacgctgagttctcagacagcttcaagcttggttgctatgtgtgttcatctgagaaacctactgctgccgtagatgcgttggtgtttgatcctcccagtttgcgagaaagctctaacgcaaggcctgctccttgctgcacaggcaattcttctattgtccatgttgagctgtcggtgaagctgagattgctggttgctttgtactcaggctgtcgcattgccctctgtactattggtaagaagggattaaggcagcctggcagcaccagagtggagagatggttggacactgatgatgcgatgtgtacttctgtggcttctgagcaacagattcttgctgtcgggtgcagtagaggtgttgttgaattgtatgatctagcagaaaacacacgccatatacgaaccatttcgttgtatgattgggggtattcagtggaagataccggtcctgttgcctgtatatcttggacgcctgacaattgtgctcttgcagttgggtggaaatttaggggacttactgtatggtctgtgtctggatgtcgattgatgtgtactattcgtcaaactggttcaaattctgcctcatctcctatggtgaaacctagcgctctaaaatttgagcctcttatgggaggaacatcacacattcaatgggatgataatggatataagttatttgctgtcgaagaaagcttgtcagaaagggttcttgctttctcatttgccaaatgttgcccaaacagagggctttcaggcacaacatattcccaccaggttctttatggggaagatcgaatccttttggtgcaaccggatgatgccgatgaactgaagatattgcatcttaatgttccaatttcatacatttcccagaactggccagttctacatgtggtggcaagcaatgatgggatgtacttggcagttgctggctctcacggactagtgctatatgatttgcgaaataaaaggtggcgtttttttggtgatgttacacaagagcaaaagatccaatgcaaaggcctattgtggatgagaaaaattgttattgtgtgcaactatgttgaatcgtcaaacacgtatgagctcctctttttcccaagatatcatcttgattatagttctttactctaccggaaacaactgcttggaaggccaattgtcatggatgttttccaggattatatattagttacttacagtccattcgatgtacatatctaccatgtggtggtctcgggagaattatctcctgctagcaatccagttttaaagctttcaacattgcgagaactttcaatcatgagtccaaaaagcccacctgtttcaatgcgcttcattcctgaacaaaatgacaaaggagcgctgacagaagatactcatggattttctgatcttttgtcccagcaaccatcaagtttgaagagaagggtagtcttatcaaggaggtttcatggcttgattacggtcatcggggtatgcaggtgtggtacccatcacatggagcagatcgttttaagcaagaggattttttgcagttggacccggagcttgagtttgatcgtgaggtgtatcctcttggtcttcttccaaatgttggtgtggttgttggtgtttctcagagaatgtccttctcaactgcggagtttccatgctttgagccttcacctcaagcccaaacaatattgcattgtttattacgacatctccttcagagggacaagattgaagaggctttgctcttggcaaatttgtccgcagaaaaacctcatttctctcactgtttagagtggcttctgtttacagtatttgatgcagatatatcaaggccaagtgcttcaaaaaatcaggcttcacaaaaagttgattctcccaagaaatctcttcttgagaaaacttgtgacctactacggaattttcctgaatatatggatgttgtagtcagcgttgctaggaaaactgatggacgacactgggctgatctgttctctgcagctggacgatccacagagatgtttgaggaatgcttccaacagaggtggtacaggactgctgcttgctacatactggtcattgctaagctggagggccctgcagtcagtcagtattgtgcactccgtttgctacaagctacacttgatgagtctttgtatgagcttgcaggggagttggttcgcttcttactaagatctggaagagattttgagaatgccacttcagactctgagaagctatctccaagatttctaggctattttctgttccgttcaccttataagcggcaatcttctgatttgaaaagagcgccatgctagctatttgatgtctggcaaggagctttctaaactcgtcgcttttgtcaaggggactcaatttgatcttgtggaatatctacaacgagaaaggcaagggtctgctcgtctggagaattttgcttctgcactcgaactgattggacaaaagctccaaatggatacactgcaaagccgacttgatgcagagttccttctagctcatatgtgttcagtcaagtttaaggaatggatcgtggtgctagctactttgttgcggcgtacagaggttttggtggatctctttcagcatgatttgcgattgtggaaagcatatagcattactctacagtcacatgatgtattcagggaatatcttgaccttcttaatatcttggaggaacagctttcgtctgtctctgatcttacattgcagaatggaccattgtcatgaatgctggacggtgacactgattgaaaaaaacaactgaatacggcgttttagccttgagttaattaacacatacggcgggaccaggaatctgatgtaaatagattattcagggtgtttttctctttgagcaacaccccgaggtgctatggcagttttttgtacagtgatcagctaagcacctattgttgtatcattagtttgttgcagcggagttgagtctgcattcttcgccttactgtaaatatgtgctgcgcccttaacattgtaagccatataccattctgagcagcaagttcttttctctgttccatagaatcgtgtttaaagctagaagcctagaacatgtagatagtcttcacctgatgtttgtagactccgagatattattaaaactgacactatgatttcttaattgcattttttccatggcatactgatgtttttttttactttgcg

SEQ ID NO: 44725 - DNA, 3506 bp, Zea Mays
ctgacccccatttcgttccttccagatctccccgcccccgcatctcgcccgccagctaccggcgagtgggcgcgcgcccgccgccgccgcgatgtacctggcgtacgggtggccgcagtcgatccctctggacccggacgactcggaccgcgtggtcctcctccgcgtgctcggccgcctcctcctcgccgtctgtccggcttcgcttcacctctggtccgccgcccaacaccgggtccgcctagcccgctccgatcgctccccggagtccctcgccacccatggccacaacgcgcacgccgcgtggagccccgacgccaggaccgtcgccgtcctgacctcttccttctacctctacgtttacaaggttcagcactcgggaaagcaactgatcgtcggtggcaagcaggtcccggggctttgcctggctagtatatccctaatcatcaccgagaaggttcctctcgccaatggcgttgctataacgagcaatttcgtgtgtgacagcaaaagcatgctcctcggactatccaatgggcatgtgcaggtcgtgtcctggaacgctgaggtattcagtggaagataccggtcctgttgcctgtatatcttggacgcctgacaattgtgctcttgcagttgggtggaaatttaggggacttactgtatggtctgtgtctggatgtcgattgatgtgtactattcgtcaaactggttcaaattctgcctcatctcctatggtgaaacctagcgctctaaaatttgagcctcttatgggaggaacatcacacattcaatgggatgataatggatataagttatttgctgtcgaagaaagcttgtcagaaagggttcttgctttctcatttgccaaatgttgcccaaacagagggctttcaggcacaacatattcccaccaggttctttatggggaagatcgaatccttttggtgcaaccggatgatgccgatgaactgaagatattgcatcttaatgttccaatttcatacatttcccagaactggccagttctacatgtggtggcaagcaatgatgggatgtacttggcagttgctggctctcacggactagtgctatatgatttgcgaaataaaaggtggcgtttttttggtgatgttacacaagagcaaaagatccaatgcaaaggcctattgtggatgagaaaaattgttattgtgtgcaactatgttgaatcgtcaaacacgtatgagctcctctttttcccaagatatcatcttgattatagttctttactctaccggaaacaactgcttggaaggccaattgtcatggatgttttccaggattatatattagttacttacagtccattcgatgtacatatctaccatgtggtggtctcgggagaattatctcctgctagcaatccagttttaaagctttcaacattgcgagaactttcaatcatgagtccaaaaagcccacctgtttcaatgcgcttcattcctgaacaaaatgacaaaggagcgctgacagaagatactcatggattttctgatcttttgtcccagcaaccatcaagatgtttgatcttgcggaccaatggggagctttctgtgcttgacatggacgatggacatgaacacactctcacaaattcaattgaactcttttgggtcacctgttcgcagtttgaagagaagggtagtcttatcaaggaggtttcatggcttgattacggtcatcggggtatgcaggtgtggtacccatcacatggagcagatcgttttaagcaagaggattttttgcagttggacccggagcttgagtttgatcgtgaggtgtatcctcttggtcttcttccaaatgttggtgtggttgttggtgtttctcagagaatgtccttctcaactgcggagtttccatgctttgagccttcacctcaagcccaaacaatattgcattgtttattacgacatctccttcagagggacaagattgaagaggctttgctcttggcaaatttgtccgcagaaaaacctcatttctctcactgtttagagtggcttctgtttacagtatttgatgcagatatatcaaggccaagtgcttcaaaaaatcaggcttcacaaaaagttgattctcccaagaaatctcttcttgagaaaacttgtgacctactacggaattttcctgaatatatggatgttgtagtcagcgttgctaggaaaactgatggacgacactgggctgatctgttctctgcagctggacgatccacagagatgtttgaggaatgcttccaacagaggtggtacaggactgctgcttgctacatactggtcattgctaagctggagggccctgcagtcagtcagtattgtgcactccgtttgctacaagctacacttgatgagtctttgtatgagcttgcaggggagttggttcgcttcttactaagatctggaagagattttgagaatgccacttcagactctgagaagctatctccaagatttctaggctattttctgttccgttcaccttataagcggcaatcttctgatttgaaaagtaactcaacgaaagaacttagtccacatattgcttctgttatgaacattctagagcgccatgctagctatttgatgtctggcaaggagctttctaaactcgtcgcttttgtcaaggggactcaatttgatcttgtggaatatctacaacgagaaaggcaagggtctgctcgtctggagaattttgcttctgcactcgaactgattggacaaaagctccaaatggatacactgcaaagccgacttgatgcagagttccttctagctcatatgtgttcagtcaagtttaaggaatggatcgtggtgctagctactttgttgcggcgtacagaggttttggtggatctctttcagcatgatttgcgattgtggaaagcatatagcattactctacagtcacatgatgtattcagggaatatcttgaccttcttaatatcttggaggaacagctttcgtctgtctctgatcttacattgcagaatggaccattgtcatgaatgctggacggtgacactgattgaaaaaaacaactgaatacggcgttttagccttgagttaattaacacatacggcgggaccaggaatctgatgtaaatagattattcagggtgtttttctctttgagcaacaccccgaggtgctatggcagttttttgtacagtgatcagctaagcacctattgttgtatcattagtttgttgcagcggagttgagtctgcattcttcgccttactgtaaatatgtgctgcgcccttaacattgtaagccatataccattctgagcagcaagttcttttctctgttccatagaatcgtgtttaaagctagaagcctagaacatgtagatagtcttcacctgatgtttgtagactccgagatattattaaaactgacactatgatttcttaattgcattttttccatggcatactgatgtttttttttactttgcg

SEQ ID NO: 44726 - DNA, 3771 bp, Zea Mays
ctgacccccatttcgttccttccagatctccccgcccccgcatctcgcccgccagctaccggcgagtgggcgcgcgcccgccgccgccgcgatgtacctggcgtacgggtggccgcagtcgatccctctggacccggacgactcggaccgcgtggtcctcctccgcgtgctcggccgcctcctcctcgccgtctgtccggcttcgcttcacctctggtccgccgcccaacaccgggtccgcctagcccgctccgatcgctccccggagtccctcgccacccatggccacaacgcgcacgccgcgtggagccccgacgccaggaccgtcgccgtcctgacctcttccttctacctctacgtttacaaggttcagcactcgggaaagcaactgatcgtcggtggcaagcaggtcccggggctttgcctggctagtatatccctaatcatcaccgagaaggttcctctcgccaatggcgttgctataacgagcaatttcgtgtgtgacagcaaaagcatgctcctcggactatccaatgggcatgtgcaggtcgtgtcctggaacgctgaggcaattcttctattgtccatgttgagctgtcggtgaagctgagattgctggttgctttgtactcaggctgtcgcattgccctctgtactattggtaagaagggattaaggcagcctggcagcaccagagtggagagatggttggacactgatgatgcgatgtgtacttctgtggcttctgagcaacagattcttgctgtcgggtgcagtagaggtgttgttgaattgtatgatctagcagaaaacacacgccatatacgaaccatttcgttgtatgattgggggtattcagtggaagataccggtcctgttgcctgtatatcttggacgcctgacaattgtgctcttgcagttgggtggaaatttaggggacttactgtatggtctgtgtctggatgtcgattgatgtgtactattcgtcaaactggttcaaattctgcctcatctcctatggtgaaacctagcgctctaaaatttgagcctcttatgggaggaacatcacacattcaatgggatgataatggatataagttatttgctgtcgaagaaagcttgtcagaaagggttcttgctttctcatttgccaaatgttgcccaaacagagggctttcaggcacaacatattcccaccaggttctttatggggaagatcgaatccttttggtgcaaccggatgatgccgatgaactgaagatattgcatcttaatgttccaaactggccagttctacatgtggtggcaagcaatgatgggatgtacttggcagttgctggctctcacggactagtgctatatgatttgcgaaataaaaggtggcgtttttttggtgatgttacacaagagcaaaagatccaatgcaaaggcctattgtggatgagaaaaattgttattgtgtgcaactatgttgaatcgtcaaacacgtatgagctcctctttttcccaagatatcatcttgattatagttctttactctaccggaaacaactgcttggaaggccaattgtcatggatgttttccaggattatatattagttacttacagtccattcgatgtacatatctaccatgtggtggtctcgggagaattatctcctgctagcaatccagttttaaagctttcaacattgcgagaactttcaatcatgagtccaaaaagcccacctgtttcaatgcgcttcattcctgaacaaaatgacaaaggagcgctgacagaagatactcatggattttctgatcttttgtcccagcaaccatcaagatgtttgatcttgcggaccaatggggagctttctgtgcttgacatggacgatggacatgaacacactctcacaaattcaattgaactcttttgggtcacctgttcgcagtttgaagagaagggtagtcttatcaaggaggtttcatggcttgattacggtcatcggggtatgcaggtgtggtacccatcacatggagcagatcgttttaagcaagaggattttttgcagttggacccggagcttgagtttgatcgtgaggtgtatcctcttggtcttcttccaaatgttggtgtggttgttggtgtttctcagagaatgtccttctcaactgcggagtttccatgctttgagccttcacctcaagcccaaacaatattgcattgtttattacgacatctccttcagagggacaagattgaagaggctttgctcttggcaaatttgtccgcagaaaaacctcatttctctcactgtttagagtggcttctgtttacagtatttgatgcagatatatcaaggccaagtgcttcaaaaaatcaggcttcacaaaaagttgattctcccaagaaatctcttcttgagaaaacttgtgacctactacggaattttcctgaatatatggatgttgtagtcagcgttgctaggaaaactgatggacgacactgggctgatctgttctctgcagctggacgatccacagagatgtttgaggaatgcttccaacagaggtggtacaggactgctgcttgctacatactggtcattgctaagctggagggccctgcagtcagtcagtattgtgcactccgtttgctacaagctacacttgatgagtctttgtatgagcttgcaggggagttggttcgcttcttactaagatctggaagagattttgagaatgccacttcagactctgagaagctatctccaagatttctaggctattttctgttccgttcaccttataagcggcaatcttctgatttgaaaagtaactcaacgaaagaacttagtccacatattgcttctgttatgaacattctagagcgccatgctagctatttgatgtctggcaaggagctttctaaactcgtcgcttttgtcaaggggactcaatttgatcttgtggaatatctacaacgagaaaggcaagggtctgctcgtctggagaattttgcttctgcactcgaactgattggacaaaagctccaaatggatacactgcaaagccgacttgatgcagagttccttctagctcatatgtgttcagtcaagtttaaggaatggatcgtggtgctagctactttgttgcggcgtacagaggttttggtggatctctttcagcatgatttgcgattgtggaaagcatatagcattactctacagtcacatgatgtattcagggaatatcttgaccttcttaatatcttggaggaacagctttcgtctgtctctgatcttacattgcagaatggaccattgtcatgaatgctggacggtgacactgattgaaaaaaacaactgaatacggcgttttagccttgagttaattaacacatacggcgggaccaggaatctgatgtaaatagattattcagggtgtttttctctttgagcaacaccccgaggtgctatggcagttttttgtacagtgatcagctaagcacctattgttgtatcattagtttgttgcagcggagttgagtctgcattcttcgccttactgtaaatatgtgctgcgcccttaacattgtaagccatataccattctgagcagcaagttcttttctctgttccatagaatcgtgtttaaagctagaagcctagaacatgtagatagtcttcacctgatgtttgtagactccgagatattattaaaactgacactatgatttcttaattgcattttttccatggcatactgatgtttttttttactttgcg

SEQ ID NO: 44727 - DNA, 3820 bp, Zea Mays
ttcacccctgacccccatttcgttccttccagatctccccgcccccgcatctcgcccgccagctaccggcgagtgggcgcgcgcccgccgccgccgcgatgtacctggcgtacgggtggccgcagtcgatccctctggacccggacgactcggaccgcgtggtcctcctccgcgtgctcggccgcctcctcctcgccgtctgtccggcttcgcttcacctctggtccgccgcccaacaccgggtccgcctagcccgctccgatcgctccccggagtccctcgccacccatggccacaacgcgcacgccgcgtggagccccgacgccaggaccgtcgccgtcctgacctcttccttctacctctacgtttacaaggttcagcactcgggaaagcaactgatcgtcggtggcaagcaggtcccggggctttgcctggctagtatatccctaatcatcaccgagaaggttcctctcgccaatggcgttgctataacgagcaatttcgtgtgtgacagcaaaagcatgctcctcggactatccaatgggcatgtgcaggtcgtgtcctggaacgctgagttctcagacagcttcaagcttggttgctatgtgtgttcatctgagaaacctactgctgccgtagatgcgttggtgtttgatcctcccagtttgcgagaaagctctaacgcaaggcctgctccttgctgcacaggcaattcttctattgtccatgttgagctgtcggtgaagctgagattgctggttgctttgtactcaggctgtcgcattgccctctgtactattggtaagaagggattaaggcagcctggcagcaccagagtggagagatggttggacactgatgatgcgatgtgtacttctgtggcttctgagcaacagattcttgctgtcgggtgcagtagaggtgttgttgaattgtatgatctagcagaaaacacacgccatatacgaaccatttcgttgtatgattgggggtattcagtggaagataccggtcctgttgcctgtatatcttggacgcctgacaattgtgctcttgcagttgggtggaaatttaggggacttactgtatggtctgtgtctggatgtcgattgatgtgtactattcgtcaaactggttcaaattctgcctcatctcctatggtgaaacctagcgctctaaaatttgagcctcttatgggaggaacatcacacattcaatgggatgataatggatataagttatttgctgtcgaagaaagcttgtcagaaagggttcttgctttctcatttgccaaatgttgcccaaacagagggctttcaggcacaacatattcccaccaggttctttatggggaagatcgaatccttttggtgcaaccggatgatgccgatgaactgaagatattgcatcttaatgttccaatttcatacatttcccagaactggccagttctacatgtggtggcaagcaatgatgggatgtacttggcagttgctggctctcacggactagtgctatatgatttgcgaaataaaaggtggcgtttttttggtgatgttacacaagagcaaaagatccaatgcaaaggcctattgtggatgagaaaaattgttattgtgtgcaactatgttgaatcgtcaaacacgtatgagctcctctttttcccaagatatcatcttgattatagttctttactctaccggaaacaactgcttggaaggccaattgtcatggatgttttccaggattatatattagttacttacagtccattcgatgtacatatctaccatgtggtggtctcgggagaattatctcctgctagcaatccagttttaaagctttcaacattgcgagaactttcaatcatgagtccaaaaagcccacctgtttcaatgcgcttcattcctgaacaaaatgacaaaggagcgctgacagaagatactcatggattttctgatcttttgtcccagcaaccatcaagtttgaagagaagggtagtcttatcaaggaggtttcatggcttgattacggtcatcggggtatgcaggtgtggtacccatcacatggagcagatcgttttaagcaagaggattttttgcagttggacccggagcttgagtttgatcgtgaggtgtatcctcttggtcttcttccaaatgttggtgtggttgttggtgtttctcagagaatgtccttctcaactgcggagtttccatgctttgagccttcacctcaagcccaaacaatattgcattgtttattacgacatctccttcagagggacaagattgaagaggctttgctcttggcaaatttgtccgcagaaaaacctcatttctctcactgtttagagtggcttctgtttacagtatttgatgcagatatatcaaggccaagtgcttcaaaaaatcaggcttcacaaaaagttgattctcccaagaaatctcttcttgagaaaacttgtgacctactacggaattttcctgaatatatggatgttgtagtcagcgttgctaggaaaactgatggacgacactgggctgatctgttctctgcagctggacgatccacagagatgtttgaggaatgcttccaacagaggtggtacaggactgctgcttgctacatactggtcattgctaagctggagggccctgcagtcagtcagtattgtgcactccgtttgctacaagctacacttgatgagtctttgtatgagcttgcaggggagttggttcgcttcttactaagatctggaagagattttgagaatgccacttcagactctgagaagctatctccaagatttctaggctattttctgttccgttcaccttataagcggcaatcttctgatttgaaaagtaactcaacgaaagaacttagtccacatattgcttctgttatgaacattctagagcgccatgctagctatttgatgtctggcaaggagctttctaaactcgtcgcttttgtcaaggggactcaatttgatcttgtggaatatctacaacgagaaaggcaagggtctgctcgtctggagaattttgcttctgcactcgaactgattggacaaaagctccaaatggatacactgcaaagccgacttgatgcagagttccttctagctcatatgtgttcagtcaagtttaaggaatggatcgtggtgctagctactttgttgcggcgtacagaggttttggtggatctctttcagcatgatttgcgattgtggaaagcatatagcattactctacagtcacatgatgtattcagggaatatcttgaccttcttaatatcttggaggaacagctttcgtctgtctctgatcttacattgcagaatggaccattgtcatgaatgctggacggtgacactgattgaaaaaaacaactgaatacggcgttttagccttgagttaattaacacatacggcgggaccaggaatctgatgtaaatagattattcagggtgtttttctctttgagcaacaccccgaggtgctatggcagttttttgtacagtgatcagctaagcacctattgttgtatcattagtttgttgcagcggagttgagtctgcattcttcgccttactgtaaatatgtgctgcgcccttaacattgtaagccatataccattctgagcagcaagttcttttctctgttccatagaatcgtgtttaaagctagaagcctagaacatgtagatagtcttcacctgatgtttgtagactccgagatattattaaaactgacactatgatttcttaattgcattttttccatggcatactgatgtttttttttactttgcg

SEQ ID NO: 44728 - DNA, 3965 bp, Zea Mays
accgttcacccctgacccccatttcgttccttccagatctccccgcccccgcatctcgcccgccagctaccggcgagtgggcgcgcgcccgccgccgccgcgatgtacctggcgtacgggtggccgcagtcgatccctctggacccggacgactcggaccgcgtggtcctcctccgcgtgctcggccgcctcctcctcgccgtctgtccggcttcgcttcacctctggtccgccgcccaacaccgggtccgcctagcccgctccgatcgctccccggagtccctcgccacccatggccacaacgcgcacgccgcgtggagccccgacgccaggaccgtcgccgtcctgacctcttccttctacctctacgtttacaaggttcagcactcgggaaagcaactgatcgtcggtggcaagcaggtcccggggctttgcctggctagtatatccctaatcatcaccgagaaggttcctctcgccaatggcgttgctataacgagcaatttcgtgtgtgacagcaaaagcatgctcctcggactatccaatgggcatgtgcaggtcgtgtcctggaacgctgaggtacatggaaatgcatgcaacttttgtttattttctcagacagcttcaagcttggttgctatgtgtgttcatctgagaaacctactgctgccgtagatgcgttggtgtttgatcctcccagtttgcgagaaagctctaacgcaaggcctgctccttgctgcacaggcaattcttctattgtccatgttgagctgtcggtgaagctgagattgctggttgctttgtactcaggctgtcgcattgccctctgtactattggtaagaagggattaaggcagcctggcagcaccagagtggagagatggttggacactgatgatgcgatgtgtacttctgtggcttctgagcaacagattcttgctgtcgggtgcagtagaggtgttgttgaattgtatgatctagcagaaaacacacgccatatacgaaccatttcgttgtatgattgggggtattcagtggaagataccggtcctgttgcctgtatatcttggacgcctgacaattgtgctcttgcagttgggtggaaatttaggggacttactgtatggtctgtgtctggatgtcgattgatgtgtactattcgtcaaactggttcaaattctgcctcatctcctatggtgaaacctagcgctctaaaatttgagcctcttatgggaggaacatcacacattcaatgggatgataatggatataagttatttgctgtcgaagaaagcttgtcagaaagggttcttgctttctcatttgccaaatgttgcccaaacagagggctttcaggcacaacatattcccaccaggttctttatggggaagatcgaatccttttggtgcaaccggatgatgccgatgaactgaagatattgcatcttaatgttccaatttcatacatttcccagaactggccagttctacatgtggtggcaagcaatgatgggatgtacttggcagttgctggctctcacggactagtgctatatgatttgcgaaataaaaggtggcgtttttttggtgatgttacacaagagcaaaagatccaatgcaaaggcctattgtggatgagaaaaattgttattgtgtgcaactatgttgaatcgtcaaacacgtatgagctcctctttttcccaagatatcatcttgattatagttctttactctaccggaaacaactgcttggaaggccaattgtcatggatgttttccaggattatatattagttacttacagtccattcgatgtacatatctaccatgtggtggtctcgggagaattatctcctgctagcaatccagttttaaagctttcaacattgcgagaactttcaatcatgagtccaaaaagcccacctgtttcaatgcgcttcattcctgaacaaaatgacaaaggagcgctgacagaagatactcatggattttctgatcttttgtcccagcaaccatcaagatgtttgatcttgcggaccaatggggagctttctgtgcttgacatggacgatggacatgaacacactctcacaaattcaattgaactcttttgggtcacctgttcgcagtttgaagagaagggtagtcttatcaaggaggtttcatggcttgattacggtcatcggggtatgcaggtgtggtacccatcacatggagcagatcgttttaagcaagaggattttttgcagttggacccggagcttgagtttgatcgtgaggtgtatcctcttggtcttcttccaaatgttggtgtggttgttggtgtttctcagagaatgtccttctcaactgcggagtttccatgctttgagccttcacctcaagcccaaacaatattgcattgtttattacgacatctccttcagagggacaagattgaagaggctttgctcttggcaaatttgtccgcagaaaaacctcatttctctcactgtttagagtggcttctgtttacagtatttgatgcagatatatcaaggccaagtgcttcaaaaaatcaggcttcacaaaaagttgattctcccaagaaatctcttcttgagaaaacttgtgacctactacggaattttcctgaatatatggatgttgtagtcagcgttgctaggaaaactgatggacgacactgggctgatctgttctctgcagctggacgatccacagagatgtttgaggaatgcttccaacagaggtggtacaggactgctgcttgctacatactggtcattgctaagctggagggccctgcagtcagtcagtattgtgcactccgtttgctacaagctacacttgatgagtctttgtatgagcttgcaggggagttggttcgcttcttactaagatctggaagagattttgagaatgccacttcagactctgagaagctatctccaagatttctaggctattttctgttccgttcaccttataagcggcaatcttctgatttgaaaagtaactcaacgaaagaacttagtccacatattgcttctgttatgaacattctagagcgccatgctagctatttgatgtctggcaaggagctttctaaactcgtcgcttttgtcaaggggactcaatttgatcttgtggaatatctacaacgagaaaggcaagggtctgctcgtctggagaattttgcttctgcactcgaactgattggacaaaagctccaaatggatacactgcaaagccgacttgatgcagagttccttctagctcatatgtgttcagtcaagtttaaggaatggatcgtggtgctagctactttgttgcggcgtacagaggttttggtggatctctttcagcatgatttgcgattgtggaaagcatatagcattactctacagtcacatgatgtattcagggaatatcttgaccttcttaatatcttggaggaacagctttcgtctgtctctgatcttacattgcagaatggaccattgtcatgaatgctggacggtgacactgattgaaaaaaacaactgaatacggcgttttagccttgagttaattaacacatacggcgggaccaggaatctgatgtaaatagattattcagggtgtttttctctttgagcaacaccccgaggtgctatggcagttttttgtacagtgatcagctaagcacctattgttgtatcattagtttgttgcagcggagttgagtctgcattcttcgccttactgtaaatatgtgctgcgcccttaacattgtaagccatataccattctgagcagcaagttcttttctctgttccatagaatcgtgtttaaagctagaagcctagaacatgtagatagtcttcacctgatgtttgtagactccgagatattattaaaactgacactatgatttcttaattgcattttttccatggcatactgatgtttttttttactttgcg

SEQ ID NO: 44729 - DNA, 3696 bp, Zea Mays
cggccaccgttcacccctgacccccatttcgttccttccagatctccccgcccccgcatctcgcccgccagctaccggcgagtgggcgcgcgcccgccgccgccgcgatgtacctggcgtacgggtggccgcagtcgatccctctggacccggacgactcggaccgcgtggtcctcctccgcgtgctcggccgcctcctcctcgccgtctgtccggcttcgcttcacctctggtccgccgcccaacaccgggtccgcctagcccgctccgatcgctccccggagtccctcgccacccatggccacaacgcgcacgccgcgtggagccccgacgccaggaccgtcgccgtcctgacctcttccttctacctctacgtttacaaggttcagcactcgggaaagcaactgatcgtcggtggcaagcaggtcccggggctttgcctggctagtatatccctaatcatcaccgagaaggttcctctcgccaatggcgttgctataacgagcaatttcgtgtgtgacagcaaaagcatgctcctcggactatccaatgggcatgtgcaggtcgtgtcctggaacgctgaggcaattcttctattgtccatgttgagctgtcggtgaagctgagattgctggttgctttgtactcaggctgtcgcattgccctctgtactattggtaagaagggattaaggcagcctggcagcaccagagtggagagatggttggacactgatgatgcgatgtgtacttctgtggcttctgagcaacagattcttgctgtcgggtgcagtagaggtgttgttgaattgtatgatctagcagaaaacacacgccatatacgaaccatttcgttgtatgattgggggtattcagtggaagataccggtcctgttgcctgtatatcttggacgcctgacaattgtgctcttgcagttgggtggaaatttaggggacttactgtatggtctgtgtctggatgtcgattgatgtgtactattcgtcaaactggttcaaattctgcctcatctcctatggtgaaacctagcgctctaaaatttgagcctcttatgggaggaacatcacacattcaatgggatgataatggatataagttatttgctgtcgaagaaagcttgtcagaaagggttcttgctttctcatttgccaaatgttgcccaaacagagggctttcaggcacaacatattcccaccaggttctttatggggaagatcgaatccttttggtgcaaccggatgatgccgatgaactgaagatattgcatcttaatgttccaatttcatacatttcccagaactggccagttctacatgtggtggcaagcaatgatgggatgtacttggcagttgctggctctcacggactagtgctatatgatttgcgaaataaaaggtggcgtttttttggtgatgttacacaagagcaaaagatccaatgcaaaggcctattgtggatgagaaaaattgttattgtgtgcaactatgttgaatcgtcaaacacgtatgagctcctctttttcccaagatatcatcttgattatagttctttactctaccggaaacaactgcttggaaggccaattgtcatggatgttttccaggattatatattagttacttacagtccattcgatgtacatatctaccatgtggtggtctcgggagaattatctcctgctagcaatccagttttaaagctttcaacattgcgagaactttcaatcatgagtccaaaaagcccacctgtttcaatgcgcttcattcctgaacaaaatgacaaaggagcgctgacagaagatactcatggattttctgatcttttgtcccagcaaccatcaagtttgaagagaagggtagtcttatcaaggaggtttcatggcttgattacggtcatcggggtatgcaggtgtggtacccatcacatggagcagatcgttttaagcaagaggattttttgcagttggacccggagcttgagtttgatcgtgaggtgtatcctcttggtcttcttccaaatgttggtgtggttgttggtgtttctcagagaatgtccttctcaactgcggagtttccatgctttgagccttcacctcaagcccaaacaatattgcattgtttattacgacatctccttcagagggacaagattgaagaggctttgctcttggcaaatttgtccgcagaaaaacctcatttctctcactgtttagagtggcttctgtttacagtatttgatgcagatatatcaaggccaagtgcttcaaaaaatcaggcttcacaaaaagttgattctcccaagaaatctcttcttgagaaaacttgtgacctactacggaattttcctgaatatatggatgttgtagtcagcgttgctaggaaaactgatggacgacactgggctgatctgttctctgcagctggacgatccacagagatgtttgaggaatgcttccaacagaggtggtacaggactgctgcttgctacatactggtcattgctaagctggagggccctgcagtcagtcagtattgtgcactccgtttgctacaagctacacttgatgagtctttgtatgagcttgcaggggagttggttcgcttcttactaagatctggaagagattttgagaatgccacttcagactctgagaagctatctccaagatttctaggctattttctgttccgttcaccttataagcggcaatcttctgatttgaaaagtaactcaacgaaagaacttagtccacatattgcttctgttatgaacattctagagcgccatgctagctatttgatgtctggcaaggagctttctaaactcgtcgcttttgtcaaggggactcaatttgatcttgtggaatatctacaacgagaaaggcaagggtctgctcgtctggagaattttgcttctgcactcgaactgattggacaaaagctccaaatggatacactgcaaagccgacttgatgcagagttccttctagctcatatgtgttcagtcaagtttaaggaatggatcgtggtgctagctactttgttgcggcgtacagaggttttggtggatctctttcagcatgatttgcgattgtggaaagcatatagcattactctacagtcacatgatgtattcagggaatatcttgaccttcttaatatcttggaggaacagctttcgtctgtctctgatcttacattgcagaatggaccattgtcatgaatgctggacggtgacactgattgaaaaaaacaactgaatacggcgttttagccttgagttaattaacacatacggcgggaccaggaatctgatgtaaatagattattcagggtgtttttctctttgagcaacaccccgaggtgctatggcagttttttgtacagtgatcagctaagcacctattgttgtatcattagtttgttgcagcggagttgagtctgcattcttcgccttactgtaaatatgtgctgcgcccttaacattgtaagccatataccattctgagcagcaagttcttttctctgttccatagaatcgtgtttaaagctagaagcctagaacatgtagatagtcttcacctgatgtttgtagactccgagatattattaaaactgacactatgatttcttaattgcattttttccatggcatactgatgtttttttttactttgcg

SEQ ID NO: 44730 - DNA, 1874 bp, Zea Mays
gtacatggaaatgcatgcaacttttgtttattttctcagacagcttcaagcttggttgctatgtgtgttcatctgagaaacctactgctgccgtagatgcgttggtgtttgatcctcccagtttgcgagaaagctctaacgcaaggcctgctccttgctgcacaggcaattcttctattgtccatgttgagctgtcggtgaagctgagattgctggttgctttgtactcaggctgtcgcattgccctctgtactattggtaagaagggattaaggcagcctggcagcaccagagtggagagatggttggacactgatgatgcgatgtgtacttctgtggcttctgagcaacagattcttgctgtcgggtgcagtagaggtgttgttgaattgtatgatctagcagaaaacacacgccatatacgaaccatttcgttgtatgattgggggtattcagtggaagataccggtcctgttgcctgtatatcttggacgcctgacaattgtgctcttgcagttgggtggaaatttaggggacttactgtatggtctgtgtctggatgtcgattgatgtgtactattcgtcaaactggttcaaattctgcctcatctcctatggtgaaacctagcgctctaaaatttgagcctcttatgggaggaacatcacacattcaatgggatgataatggatataagttatttgctgtcgaagaaagcttgtcagaaagggttcttgctttctcatttgccaaatgttgcccaaacagagggctttcaggcacaacatattcccaccaggttctttatggggaagatcgaatccttttggtgcaaccggatgatgccgatgaactgaagatattgcatcttaatgttccaatttcatacatttcccagaactggccagttctacatgtggtggcaagcaatgatgggatgtacttggcagttgctggctctcacggactagtgctatatgatttgcgaaataaaaggtggcgtttttttggtgatgttacacaagagcaaaagatccaatgcaaaggcctattgtggatgagaaaaattgttattgtgtgcaactatgttgaatcgtcaaacacgtatgagctcctctttttcccaagatatcatcttgattatagttctttactctaccggaaacaactgcttggaaggccaattgtcatggatgttttccaggattatatattagttacttacagtccattcgatgtacatatctaccatgtggtggtctcgggagaattatctcctgctagcaatccagttttaaagctttcaacattgcgagaactttcaatcatgagtccaaaaagcccacctgtttcaatgcgcttcattcctgaacaaaatgacaaaggagcgctgacagaagatactcatggattttctgatcttttgtcccagcaaccatcaagatgtttgatcttgcggaccaatggggagctttctgtgcttgacatggacgatggacatgaacacactctcacaaattcaattgaactcttttgggtcacctgttcgcagtttgaagagaagggtagtcttatcaaggaggtttcatggcttgattacggtcatcggggtatgcaggtgtggtacccatcacatggagcagatcgttttaagcaagaggattttttgcagttggacccggagcttgagtttgatcgtgaggtgtatcctcttggtcttcttccaaatgttggtgtggttgttggtgtttctcagagaatgtccttctcaactgcggagtttccatgctttgagccttcacctcaagcccaaacaatattgcattgtttattacgacatctccttcaggatgaacaaggagaaaaagtggttcag

SEQ ID NO: 44731 - DNA, 1116 bp, Zea Mays
cctgtacgcagaatgtttataaagatgaagattcatcgcatgaggaatcctcctatagcttgactgactatgtatgcttgaagatacctgatggatcattaaataaagtaaattgcatcggtgtgataaagggctctggtaactgttgtactaccctcagcatgatgtcactttcaggttttctgttgcatatacctgacggatatgagtgtgttgacctgtcactttataaggacaaccaggtagttttactactgagtgaaacgtcttgttctgatagccctggaaaatcttggatggtgatgctgcaaatagagaacttttcctttatgccactctcaggaacattccctgcaaatatttacagtttgcaaaaactggtggcactcgatctgcaattggacacagattatgggaaagttcgtagcatacctcacaccgtatctactccatttgcagttagtgcatcgagaggagtagcctgtgtcttttcatcccggaggcatgccttggtttatatccttgatgaggatgaggaagcggagggggatgaaacttccgatatggagtgattattatccgattccttcaccttcggctcagccatttcagcttcaggcttcagcattgtcttatgtcttgttgcaatggaggcagaggcccggagatatcaatatgtacggaaacgtcgtctcattttcacggcaatgcatgcccgggttcagaagctacgtcgcgtggtaacagcctaacaggttggacttcatcgtggttatttggaaagcgagcaaaattgtacacccatttctgatcgtgttgtgttatacgagtgcttgctagttgtgtaaaaaatctagaggtaacgtcaacgtgcaaaaaaaaagggtctgtcgcaaatcttgacggtcactagagctatcgcatttctaatcgtgtttgtgttatgtggattcattattttattgttcgagctgctaatgtacttggtaaaatacattgttgactgaactcgtgttgcgccttcaactcatgtttcctttcatcaaaccataggcatatctaagaacaagaaaacatgcctcatctggatctttgttctgttaaagaagcaagggg

SEQ ID NO: 44732 - DNA, 1359 bp, Zea Mays
ctagcttctgcatattatgcggggatactgcaagacatgtagaacagctagtagtttttggaggatttacagacacccaatttttggaaaagagtttggtaaatcaattcaatgaattggaagatagcttgaaggaggctttcttgatgccatttactgctatctcttcgcagatacaatgtcaaggattgcttcctttatatcctgttacatcatcagctaccttgtcatcatcctgctcgccaacatcaatatcattttataaggatgaagattcatcgcatgaggaatcctcctatagcttgactgactatgtatgcttgaagatacctgatggatcattaaataaagtaaattgcatcggtgtgataaagggctctggtaactgttgtactaccctcagcatgatgtcactttcaggttttctgttgcatatacctgacggatatgagtgtgttgacctgtcactttataaggacaaccaggtagttttactactgagtgaaacgtcttgttctgatagccctggaaaatcttggatggtgatgctgcaaatagagaacttttcctttatgccactctcaggaacattccctgcaaatatttacagtttgcaaaaactggtggcactcgatctgcaattggacacagattatgggaaagttcgtagcatacctcacaccgtatctactccatttgcagttagtgcatcgagaggagtagcctgtgtcttttcatcccggaggcatgccttggtttatatccttgatgaggatgaggaagcggagggggatgaaacttccgatatggagtgattattatccgattccttcaccttcggctcagccatttcagcttcaggcttcagcattgtcttatgtcttgttgcaatggaggcagaggcccggagatatcaatatgtacggaaacgtcgtctcattttcacggcaatgcatgcccgggttcagaagctacgtcgcgtggtaacagcctaacaggttggacttcatcgtggttatttggaaagcgagcaaaattgtacacccatttctgatcgtgttgtgttatacgagtgcttgctagttgtgtaaaaaatctagaggtaacgtcaacgtgcaaaaaaaaagggtctgtcgcaaatcttgacggtcactagagctatcgcatttctaatcgtgtttgtgttatgtggattcattattttattgttcgagctgctaatgtacttggtaaaatacattgttgactgaactcgtgttgcgccttcaactcatgtttcctttcatcaaaccataggcatatctaagaacaagaaaacatgcctcatctggatctttgttctgttaaagaagcaagggg

SEQ ID NO: 44733 - DNA, 1347 bp, Zea Mays
gctctagcttctgcatattatgcggggatactgcaagacatgtagaacagctagtagtttttggaggatttacagacacccaatttttggaaaagagtttggtaaatcaattcaatgaattggaagatagcttgaaggaggctttcttgatgccatttactgctatctcttcgcagatacaatgtcaaggattgcttcctttatatcctgttacatcatcagctaccttgtcatcatcctgctcgccaacatcaatatcattttataaggatgaagattcatcgcatgaggaatcctcctatagcttgactgactatgtatgcttgaagatacctgatggatcattaaataaagtaaattgcatcggtgtgataaagggctctggtaactgttgtactaccctcagcatgatgtcactttcaggttttctgttgcatatacctgacggatatgagtgtgttgacctgtcactttataaggacaaccaggtagttttactactgagtgaaacgtcttgttctgatagccctggaaaatcttggatggtgatgctgcaaatagagaacttttcctttatgccactctcaggaacattccctgcaaatatttacagtttgcaaaaactggtggcactcgatctgcaattggacacagattatgggaaagttcgtagcatacctcacaccgtatctactccatttgcagttagtgcatcgagaggagtagcctgtgtcttttcatcccggaggcatgccttggtttatatccttgatgaggatgaggaagcggagggggatgaaacttccgatatggagtgattattatccgattccttcaccttcggctcagccatttcagcttcaggcttcagcattgtcttatgtcttgttgcaatggaggcagaggcccggagatatcaatatgtacggaaacgtcgtctcattttcacggcaatgcatgcccgggttcagaagctacgtcgcgtggttggacttcatcgtggttatttggaaagcgagcaaaattgtacacccatttctgatcgtgttgtgttatacgagtgcttgctagttgtgtaaaaaatctagaggtaacgtcaacgtgcaaaaaaaaagggtctgtcgcaaatcttgacggtcactagagctatcgcatttctaatcgtgtttgtgttatgtggattcattattttattgttcgagctgctaatgtacttggtaaaatacattgttgactgaactcgtgttgcgccttcaactcatgtttcctttcatcaaaccataggcatatctaagaacaagaaaacatgcctcatctggatctttgttctgttaaagaagcaagggg

SEQ ID NO: 44734 - DNA, 3101 bp, Zea Mays
caggcctcaaggacttcttgcccaattatgttttcgatagaggcattttaatacttcttgaagattattgcgtatcagctatactattgtcaattgtgtttgacaggcaggaccacttgatcacatacagttggggatcttgcagccactgcttgaacatctgtgcagattctcaagacctcactcttccatgataaacttctcacaatattttattgaaatgaaacttttccaatgacgctcccttagtatcttactatcttgcatcctctgcaaagctagcttgacctgcttctagctagccacctgctgcctgcatcaaaacaaactttacaatttgacgccatcactcaacaagtactctgtaataagtaatgggaagatgctaagaactacaaaatcccacgatgttgccattgtatctttgaattgggcagaagacgatccactgtcaaaggtatgctattgcctttgcgatataagtatcatataataacacatgtgtagttacaaaaaatttcagttgatttacaaattcagcactaatcaaaattagtttaggtctctactaaaacttctcattactgattcttctgctaatttattcagtctgacaaggatgagtttttatcctatgaagaccgcaccacacgtttctttcctcctcctcctgtgatgcctaggataggtggactacgttctggagatactggtcttgcggatgagaacgaagaagctattccagaattttctagtgcttcctgtcagcgttttaacattctgtgcagtggtggcaaagatggttgtgtttgcttcagcgtttttggaatatttcctgttggaaagataaacataactaaaatcccaatcaatgttggatcctctagaaagagttaccaactccaggatgcttcagtcagcaaggtctctttatcaagaaacctccagaaatttgttattctgtgctttggaaagttggttgataccgacaacctctctgacagctgcgaaaattctggattacattgtctctacctagatacttctatcttcttcaaccgaaaaaatgagctgcatcaggtgtcccaacaagcatcaagtattcaagatatggttgaagttgtccgtgcttctgtatctttaatatccaaacaatggtcaaacgccatgagtttattccatgagaaatttagtgccttgcccaatctgatatctacacatggagtggaatctagttctgaggatgagtttcttagccttttgtttgggacacgaacaagtccagcccttcaccattttttagctagttcacttggtgaagcgggtctcaagaggatagccaaggctgttgacagtgctggaagagatattcgtggcattatcactgagcatcttcagcctgcagtggagattatttcattcagactcgcagaattaagaggcctttcaagatggcgttcacgatttcaaactatcgggttagatggaaaccttattgatggtgtaactgagagtatagggatgctagttgttcaagtggagcgcttttcaagggtggcagccactgttgtttatctgtttcaaaatttctttgcctgggttttaaagtctgttagaatattattaaatgaacctaccgaccaagttccagcagcaaacaggtctcctttgtagtgaacttgtggtgatttttcttaagtttcttcttgataaggatccaatcaaacaactacttgaagcagatgagagaattgagtgtgatatggatactgcaagacatgtagaacagctagtagtttttggaggatttacagacacccaatttttggaaaagagtttggtaaatcaattcaatgaattggaagatagcttgaaggaggctttcttgatgccatttactgctatctcttcgcagatacaatgtcaaggattgcttcctttatatcctgttacatcatcagctaccttgtcatcatcctgctcgccaacatcaatatcattttataaggatgaagattcatcgcatgaggaatcctcctatagcttgactgactatgtatgcttgaagatacctgatggatcattaaataaagtaaattgcatcggtgtgataaagggctctggtaactgttgtactaccctcagcatgatgtcactttcaggttttctgttgcatatacctgacggatatgagtgtgttgacctgtcactttataaggacaaccaggtagttttactactgagtgaaacgtcttgttctgatagccctggaaaatcttggatggtgatgctgcaaatagagaacttttcctttatgccactctcaggaacattccctgcaaatatttacagtttgcaaaaactggtggcactcgatctgcaattggacacagattatgggaaagttcgtagcatacctcacaccgtatctactccatttgcagttagtgcatcgagaggagtagcctgtgtcttttcatcccggaggcatgccttggtttatatccttgatgaggatgaggaagcggagggggatgaaacttccgatatggagtgattattatccgattccttcaccttcggctcagccatttcagcttcaggcttcagcattgtcttatgtcttgttgcaatggaggcagaggcccggagatatcaatatgtacggaaacgtcgtctcattttcacggcaatgcatgcccgggttcagaagctacgtcgcgtggtaacagcctaacaggttggacttcatcgtggttatttggaaagcgagcaaaattgtacacccatttctgatcgtgttgtgttatacgagtgcttgctagttgtgtaaaaaatctagaggtaacgtcaacgtgcaaaaaaaaagggtctgtcgcaaatcttgacggtcactagagctatcgcatttctaatcgtgtttgtgttatgtggattcattattttattgttcgagctgctaatgtacttggtaaaatacattgttgactgaactcgtgttgcgccttcaactcatgtttcctttcatcaaaccataggcatatctaagaacaagaaaacatgcctcatctggatctttgttctgttaaagaagcaagggg

SEQ ID NO: 44735 - DNA, 2810 bp, Zea Mays
cagggatgcagttgggttcggtgggaacttgttggtctgaactataaaaatggcagaatggaatccagagaaggatctgcttgctatggttactgatgactccaaggttctcctccatcgcttcaattggcaaaggctttggacaatctctccagggaagtgcatcacatcaatttgttggagccctgatggtaaaataatagcacttggcacagaagatggtttgattcttttgcatgatgtggagaatgggaagatgctaagaactacaaaatcccacgatgttgccattgtatctttgaattgggcagaagacgatccactgtcaaagtctgacaaggatgagtttttatcctatgaagaccgcaccacacgtttctttcctcctcctcctgtgatgcctaggataggtggactacgttctggagatactggtcttgcggatgagaacgaagaagctattccagaattttctagtgcttcctgtcagcgttttaacattctgtgcagtggtggcaaagatggttgtgtttgcttcagcgtttttggaatatttcctgttggaaagataaacataactaaaatcccaatcaatgttggatcctctagaaagagttaccaactccaggatgcttcagtcagcaaggtctctttatcaagaaacctccagaaatttgttattctgtgctttggaaagttggttgataccgacaacctctctgacagctgcgaaaattctggattacattgtctctacctagatacttctatcttcttcaaccgaaaaaatgagctgcatcaggtgtcccaacaagcatcaagtattcaagatatggttgaagttgtccgtgcttctgtatctttaatatccaaacaatggtcaaacgccatgagtttattccatgagaaatttagtgccttgcccaatctgatatctacacatggagtggaatctagttctgaggatgagtttcttagccttttgtttgggacacgaacaagtccagcccttcaccattttttagctagttcacttggtgaagcgggtctcaagaggatagccaaggctgttgacagtgctggaagagatattcgtggcattatcactgagcatcttcagcctgcagtggagattatttcattcagactcgcagaattaagaggcctttcaagatggcgttcacgatttcaaactatcgggttagatggaaaccttattgatggtgtaactgagagtatagggatgctagttgttcaagtggagcgcttttcaagggtggcagccactgttgtttatctgtttcaaaatttctttgcctgggttttaaagtctgttagaatattattaaatgaacctaccgaccaagttccagcagcaaacagtgaacttgtggtgatttttcttaagtttcttcttgataaggatccaatcaaacaactacttgaagcagatgagagaattgagtgtgatatggatactgcaagacatgtagaacagctagtagtttttggaggatttacagacacccaatttttggaaaagagtttggtaaatcaattcaatgaattggaagatagcttgaaggaggctttcttgatgccatttactgctatctcttcgcagatacaatgtcaaggattgcttcctttatatcctgttacatcatcagctaccttgtcatcatcctgctcgccaacatcaatatcattttataaggatgaagattcatcgcatgaggaatcctcctatagcttgactgactatgtatgcttgaagatacctgatggatcattaaataaagtaaattgcatcggtgtgataaagggctctggtaactgttgtactaccctcagcatgatgtcactttcaggttttctgttgcatatacctgacggatatgagtgtgttgacctgtcactttataaggacaaccaggtagttttactactgagtgaaacgtcttgttctgatagccctggaaaatcttggatggtgatgctgcaaatagagaacttttcctttatgccactctcaggaacattccctgcaaatatttacagtttgcaaaaactggtggcactcgatctgcaattggacacagattatgggaaagttcgtagcatacctcacaccgtatctactccatttgcagttagtgcatcgagaggagtagcctgtgtcttttcatcccggaggcatgccttggtttatatccttgatgaggatgaggaagcggagggggatgaaacttccgatatggagtgattattatccgattccttcaccttcggctcagccatttcagcttcaggcttcagcattgtcttatgtcttgttgcaatggaggcagaggcccggagatatcaatatgtacggaaacgtcgtctcattttcacggcaatgcatgcccgggttcagaagctacgtcgcgtggtaacagcctaacaggttggacttcatcgtggttatttggaaagcgagcaaaattgtacacccatttctgatcgtgttgtgttatacgagtgcttgctagttgtgtaaaaaatctagaggtaacgtcaacgtgcaaaaaaaaagggtctgtcgcaaatcttgacggtcactagagctatcgcatttctaatcgtgtttgtgttatgtggattcattattttattgttcgagctgctaatgtacttggtaaaatacattgttgactgaactcgtgttgcgccttcaactcatgtttcctttcatcaaaccataggcatatctaagaacaagaaaacatgcctcatctggatctttgttctgttaaagaagcaagggg

SEQ ID NO: 44736 - DNA, 3093 bp, Zea Mays
cccttctctacgcgtctcggtgcctcgccggctcgccgctcgcaatcgccggttcgccgtcgccatttgtccccttcccccccctcgcgaccgcccgcttcgagtgtcccccaaacaaaaaatccctcccgcctgcacggccctcgctggacgcggagcatggcggaggagcagatcgaagaggcgtccatggccgcggcggcggccacgccgttccagctccagttcgacaagcccatcccgttccagataaaaatggcagaatggaatccagagaaggatctgcttgctatggttactgatgactccaaggttctcctccatcgcttcaattggcaaaggctttggacaatctctccagggaagtgcatcacatcaatttgttggagccctgatggtaaaataatagcacttggcacagaagatggtttgattcttttgcatgatgtggagaatgggaagatgctaagaactacaaaatcccacgatgttgccattgtatctttgaattgggcagaagacgatccactgtcaaagtctgacaaggatgagtttttatcctatgaagaccgcaccacacgtttctttcctcctcctcctgtgatgcctaggataggtggactacgttctggagatactggtcttgcggatgagaacgaagaagctattccagaattttctagtgcttcctgtcagcgttttaacattctgtgcagtggtggcaaagatggttgtgtttgcttcagcgtttttggaatatttcctgttggaaagataaacataactaaaatcccaatcaatgttggatcctctagaaagagttaccaactccaggatgcttcagtcagcaaggtctctttatcaagaaacctccagaaatttgttattctgtgctttggaaagttggttgataccgacaacctctctgacagctgcgaaaattctggattacattgtctctacctagatacttctatcttcttcaaccggtgtcccaacaagcatcaagtattcaagatatggttgaagttgtccgtgcttctgtatctttaatatccaaacaatggtcaaacgccatgagtttattccatgagaaatttagtgccttgcccaatctgatatctacacatggagtggaatctagttctgaggatgagtttcttagccttttgtttgggacacgaacaagtccagcccttcaccattttttagctagttcacttggtgaagcgggtctcaagaggatagccaaggctgttgacagtgctggaagagatattcgtggcattatcactgagcatcttcagcctgcagtggagattatttcattcagactcgcagaattaagaggcctttcaagatggcgttcacgatttcaaactatcgggttagatggaaaccttattgatggtgtaactgagagtatagggatgctagttgttcaagtggagcgcttttcaagggtggcagccactgttgtttatctgtttcaaaatttctttgcctgggttttaaagtctgttagaatattattaaatgaacctaccgaccaagttccagcagcaaacaggtctcctttgtagtgaacttgtggtgatttttcttaagtttcttcttgataaggatccaatcaaacaactacttgaagcagatgagagaattgagtgtgatatttttcagggatactgcaagacatgtagaacagctagtagtttttggaggatttacagacacccaatttttggaaaagagtttggtaaatcaattcaatgaattggaagatagcttgaaggaggctttcttgatgccatttactgctatctcttcgcagatacaatgtcaaggattgcttcctttatatcctgttacatcatcagctaccttgtcatcatcctgctcgccaacatcaatatcattttataaggatgaagattcatcgcatgaggaatcctcctatagcttgactgactatgtatgcttgaagatacctgatggatcattaaataaagtaaattgcatcggtgtgataaagggctctggtaactgttgtactaccctcagcatgatgtcactttcaggttttctgttgcatatacctgacggatatgagtgtgttgacctgtcactttataaggacaaccaggtagttttactactgagtgaaacgtcttgttctgatagccctggaaaatcttggatggtgatgctgcaaatagagaacttttcctttatgccactctcaggaacattccctgcaaatatttacagtttgcaaaaactggtggcactcgatctgcaattggacacagattatgggaaagttcgtagcatacctcacaccgtatctactccatttgcagttagtgcatcgagaggagtagcctgtgtcttttcatcccggaggcatgccttggtttatatccttgatgaggatgaggaagcggagggggatgaaacttccgatatggagtgattattatccgattccttcaccttcggctcagccatttcagcttcaggcttcagcattgtcttatgtcttgttgcaatggaggcagaggcccggagatatcaatatgtacggaaacgtcgtctcattttcacggcaatgcatgcccgggttcagaagctacgtcgcgtggtaacagcctaacaggtcaccacgcacgcgcagccgcttttagagctcatgaaattgtcagtcgtcaccctgatgtgtgtaggccctgcaggttggacttcatcgtggttatttggaaagcgagcaaaattgtacacccatttctgatcgtgttgtgttatacgagtgcttgctagttgtgtaaaaaatctagaggtaacgtcaacgtgcaaaaaaaaagggtctgtcgcaaatcttgacggtcactagagctatcgcatttctaatcgtgtttgtgttatgtggattcattattttattgttcgagctgctaatgtacttggtaaaatacattgttgactgaactcgtgttgcgccttcaactcatgtttcctttcatcaaaccataggcatatctaagaacaagaaaacatgcctcatctggatctttgttctgttaaagaagcaagggg

SEQ ID NO: 44737 - DNA, 3182 bp, Zea Mays
aaaacccttctctacgcgtctcggtgcctcgccggctcgccgctcgcaatcgccggttcgccgtcgccatttgtccccttcccccccctcgcgaccgcccgcttcgagtgtcccccaaacaaaaaatccctcccgcctgcacggccctcgctggacgcggagcatggcggaggagcagatcgaagaggcgtccatggccgcggcggcggccacgccgttccagctccagttcgacaagcccatcccgttccagataaaaatggcagaatggaatccagagaaggatctgcttgctatggttactgatgactccaaggttctcctccatcgcttcaattggcaaaggctttggacaatctctccagggaagtgcatcacatcaatttgttggagccctgatggtaaaataatagcacttggcacagaagatggtttgattcttttgcatgatgtggagaatgggaagatgctaagaactacaaaatcccacgatgttgccattgtatctttgaattgggcagaagacgatccactgtcaaagtctgacaaggatgagtttttatcctatgaagaccgcaccacacgtttctttcctcctcctcctgtgatgcctaggataggtggactacgttctggagatactggtcttgcggatgagaacgaagaagctattccagaattttctagtgcttcctgtcagcgttttaacattctgtgcagtggtggcaaagatggttgtgtttgcttcagcgtttttggaatatttcctgttggaaagatactttatgcctttgaaatttcagaacataactaaaatcccaatcaatgttggatcctctagaaagagttaccaactccaggatgcttcagtcagcaaggtctctttatcaagaaacctccagaaatttgttattctgtgctttggaaagttggttgataccgacaacctctctgacagctgcgaaaattctggattacattgtctctacctagatacttctatcttcttcaaccggtgtcccaacaagcatcaagtattcaagatatggttgaagttgtccgtgcttctgtatctttaatatccaaacaatggtcaaacgccatgagtttattccatgagaaatttagtgccttgcccaatctgatatctacacatggagtggaatctagttctgaggatgagtttcttagccttttgtttgggacacgaacaagtccagcccttcaccattttttagctagttcacttggtgaagcgggtctcaagaggatagccaaggctgttgacagtgctggaagagatattcgtggcattatcactgagcatcttcagcctgcagtggagattatttcattcagactcgcagaattaagaggcctttcaagatggcgttcacgatttcaaactatcgggttagatggaaaccttattgatggtgtaactgagagtatagggatgctagttgttcaagtggagcgcttttcaagggtggcagccactgttgtttatctgtttcaaaatttctttgcctgggttttaaagtctgttagaatattattaaatgaacctaccgaccaagttccagcagcaaacaggttagtcctttccccccctgttattctcgattcacaaatcatatatcaatgttttgctattaattatcaggtctcctttgtagtgaacttgtggtgatttttcttaagtttcttcttgataaggatccaatcaaacaactacttgaagcagatgagagaattgagtgtgatatggatactgcaagacatgtagaacagctagtagtttttggaggatttacagacacccaatttttggaaaagagtttggtaaatcaattcaatgaattggaagatagcttgaaggaggctttcttgatgccatttactgctatctcttcgcagatacaatgtcaaggattgcttcctttatatcctgttacatcatcagctaccttgtcatcatcctgctcgccaacatcaatatcattttataaggatgaagattcatcgcatgaggaatcctcctatagcttgactgactatgtatgcttgaagatacctgatggatcattaaataaagtaaattgcatcggtgtgataaagggctctggtaactgttgtactaccctcagcatgatgtcactttcaggttttctgttgcatatacctgacggatatgagtgtgttgacctgtcactttataaggacaaccaggtagttttactactgagtgaaacgtcttgttctgatagccctggaaaatcttggatggtgatgctgcaaatagagaacttttcctttatgccactctcaggaacattccctgcaaatatttacagtttgcaaaaactggtggcactcgatctgcaattggacacagattatgggaaagttcgtagcatacctcacaccgtatctactccatttgcagttagtgcatcgagaggagtagcctgtgtcttttcatcccggaggcatgccttggtttatatccttgatgaggatgaggaagcggagggggatgaaacttccgatatggagtgattattatccgattccttcaccttcggctcagccatttcagcttcaggcttcagcattgtcttatgtcttgttgcaatggaggcagaggcccggagatatcaatatgtacggaaacgtcgtctcattttcacggcaatgcatgcccgggttcagaagctacgtcgcgtggtaacagcctaacaggtcaccacgcacgcgcagccgcttttagagctcatgaaattgtcagtcgtcaccctgatgtgtgtaggccctgcaggttggacttcatcgtggttatttggaaagcgagcaaaattgtacacccatttctgatcgtgttgtgttatacgagtgcttgctagttgtgtaaaaaatctagaggtaacgtcaacgtgcaaaaaaaaagggtctgtcgcaaatcttgacggtcactagagctatcgcatttctaatcgtgtttgtgttatgtggattcattattttattgttcgagctgctaatgtacttggtaaaatacattgttgactgaactcgtgttgcgccttcaactcatgtttcctttcatcaaaccataggcatatctaagaacaagaaaacatgcctcatctggatctttgttctgttaaagaagcaagggg

SEQ ID NO: 44738 - DNA, 3599 bp, Zea Mays
cgcatataggtgctgacggccttttgccccccaaaatcttgttgtccaaaacccttctctacgcgtctcggtgcctcgccggctcgccgctcgcaatcgccggttcgccgtcgccatttgtccccttcccccccctcgcgaccgcccgcttcgagtgtcccccaaacaaaaaatccctcccgcctgcacggccctcgctggacgcggagcatggcggaggagcagatcgaagaggcgtccatggccgcggcggcggccacgccgttccagctccagttcgacaagcccatcccgttccagataaaaatggcagaatggaatccagagaaggatctgcttgctatggttactgatgactccaaggttctcctccatcgcttcaattggcaaaggctttggacaatctctccagggaagtgcatcacatcaatttgttggagccctgatggtaaaataatagcacttggcacagaagatggtttgattcttttgcatgatgtggagaatgggaagatgctaagaactacaaaatcccacgatgttgccattgtatctttgaattgggcagaagacgatccactgtcaaagtctgacaaggatgagtttttatcctatgaagaccgcaccacacgtttctttcctcctcctcctgtgatgcctaggataggtggactacgttctggagatactggtcttgcggatgagaacgaagaagctattccagaattttctagtgcttcctgtcagcgttttaacattctgtgcagtggtggcaaagatggttgtgtttgcttcagcgtttttggaatatttcctgttggaaagatagtaagtaaatacagtaactcacttgtccataatttgaactcaacaaaaaatagtctgtcatgcatgctctctcctgcttcagcatttcctgttattggttctggggacctttctaccctaacagctcctctggaaatctgttctacacagaaatattttgtgaagttaatatgctcatttaaacagagcaaatagaagttgagcactagccttttaggcttggctattgttattggtggtagacccacagtacatctgttttccgcagaatcaacaaactctaggtgtcatctgtgtatctgaacatgtacaattcatcttttccatgtattgactagctgctggtgtaatatgagagaagtttcagatattttatgcatttgcatatttatttactttcctgtgtaatctcacgcgttgaacttatgggcatttcagcaacctttgccaacttttttgtgtcattttgtatttgttctttgtccagttcaatgctctatgaaccagtagctttatgcctttgaaatttcagaacataactaaaatcccaatcaatgttggatcctctagaaagagttaccaactccaggatgcttcagtcagcaaggtctctttatcaagaaacctccagaaatttgttattctgtgctttggaaagttggttgataccgacaacctctctgacagctgcgaaaattctggattacattgtctctacctagatacttctatcttcttcaaccgaaaaaatgagctgcatcaggtgtcccaacaagcatcaagtattcaagatatggttgaagttgtccgtgcttctgtatctttaatatccaaacaatggtcaaacgccatgagtttattccatgagaaatttagtgccttgcccaatctgatatctacacatggagtggaatctagttctgaggatgagtttcttagccttttgtttgggacacgaacaagtccagcccttcaccattttttagctagttcacttggtgaagcgggtctcaagaggatagccaaggctgttgacagtgctggaagagatattcgtggcattatcactgagcatcttcagcctgcagtggagattatttcattcagactcgcagaattaagaggcctttcaagatggcgttcacgatttcaaactatcgggttagatggaaaccttattgatggtgtaactgagagtatagggatgctagttgttcaagtggagcgcttttcaagggtggcagccactgttgtttatctgtttcaaaatttctttgcctgggttttaaagtctgttagaatattattaaatgaacctaccgaccaagttccagcagcaaacagtgaacttgtggtgatttttcttaagtttcttcttgataaggatccaatcaaacaactacttgaagcagatgagagaattgagtgtgatatggatactgcaagacatgtagaacagctagtagtttttggaggatttacagacacccaatttttggaaaagagtttggtaaatcaattcaatgaattggaagatagcttgaaggaggctttcttgatgccatttactgctatctcttcgcagatacaatgtcaaggattgcttcctttatatcctgttacatcatcagctaccttgtcatcatcctgctcgccaacatcaatatcattttataaggatgaagattcatcgcatgaggaatcctcctatagcttgactgactatgtatgcttgaagatacctgatggatcattaaataaagtaaattgcatcggtgtgataaagggctctggtaactgttgtactaccctcagcatgatgtcactttcaggttttctgttgcatatacctgacggatatgagtgtgttgacctgtcactttataaggacaaccaggtagttttactactgagtgaaacgtcttgttctgatagccctggaaaatcttggatggtgatgctgcaaatagagaacttttcctttatgccactctcaggaacattccctgcaaatatttacagtttgcaaaaactggtggcactcgatctgcaattggacacagattatgggaaagttcgtagcatacctcacaccgtatctactccatttgcagttagtgcatcgagaggagtagcctgtgtcttttcatcccggaggcatgccttggtttatatccttgatgaggatgaggaagcggagggggatgaaacttccgatatggagtgattattatccgattccttcaccttcggctcagccatttcagcttcaggcttcagcattgtcttatgtcttgttgcaatggaggcagaggcccggagatatcaatatgtacggaaacgtcgtctcattttcacggcaatgcatgcccgggttcagaagctacgtcgcgtggtaacagcctaacaggttggacttcatcgtggttatttggaaagcgagcaaaattgtacacccatttctgatcgtgttgtgttatacgagtgcttgctagttgtgtaaaaaatctagaggtaacgtcaacgtgcaaaaaaaaagggtctgtcgcaaatcttgacggtcactagagctatcgcatttctaatcgtgtttgtgttatgtggattcattattttattgttcgagctgctaatgtacttggtaaaatacattgttgactgaactcgtgttgcgccttcaactcatgtttcctttcatcaaaccataggcatatctaagaacaagaaaacatgcctcatctggatctttgttctgttaaagaagcaagggg

SEQ ID NO: 44739 - DNA, 3207 bp, Zea Mays
gttagaatccgatcatcataatcccgcatataggtgctgacggccttttgccccccaaaatcttgttgtccaaaacccttctctacgcgtctcggtgcctcgccggctcgccgctcgcaatcgccggttcgccgtcgccatttgtccccttcccccccctcgcgaccgcccgcttcgagtgtcccccaaacaaaaaatccctcccgcctgcacggccctcgctggacgcggagcatggcggaggagcagatcgaagaggcgtccatggccgcggcggcggccacgccgttccagctccagttcgacaagcccatcccgttccagataaaaatggcagaatggaatccagagaaggatctgcttgctatggttactgatgactccaaggttctcctccatcgcttcaattggcaaaggctttggacaatctctccagggaagtgcatcacatcaatttgttggagccctgatggtaaaataatagcacttggcacagaagatggtttgattcttttgcatgatgtggagaatgggaagatgctaagaactacaaaatcccacgatgttgccattgtatctttgaattgggcagaagacgatccactgtcaaagtctgacaaggatgagtttttatcctatgaagaccgcaccacacgtttctttcctcctcctcctgtgatgcctaggataggtggactacgttctggagatactggtcttgcggatgagaacgaagaagctattccagaattttctagtgcttcctgtcagcgttttaacattctgtgcagtggtggcaaagatggttgtgtttgcttcagcgtttttggaatatttcctgttggaaagataaacataactaaaatcccaatcaatgttggatcctctagaaagagttaccaactccaggatgcttcagtcagcaaggtctctttatcaagaaacctccagaaatttgttattctgtgctttggaaagttggttgataccgacaacctctctgacagctgcgaaaattctggattacattgtctctacctagatacttctatcttcttcaaccgaaaaaatgagctgcatcaggtgtcccaacaagcatcaagtattcaagatatggttgaagttgtccgtgcttctgtatctttaatatccaaacaatggtcaaacgccatgagtttattccatgagaaatttagtgccttgcccaatctgatatctacacatggagtggaatctagttctgaggatgagtttcttagccttttgtttgggacacgaacaagtccagcccttcaccattttttagctagttcacttggtgaagcgaggatagccaaggctgttgacagtgctggaagagatattcgtggcattatcactgagcatcttcagcctgcagtggagattatttcattcagactcgcagaattaagaggcctttcaagatggcgttcacgatttcaaactatcgggttagatggaaaccttattgatggtgtaactgagagtatagggatgctagttgttcaagtggagcgcttttcaagggtggcagccactgttgtttatctgtttcaaaatttctttgcctgggttttaaagtctgttagaatattattaaatgaacctaccgaccaagttccagcagcaaacaggtctcctttgtagtgaacttgtggtgatttttcttaagtttcttcttgataaggatccaatcaaacaactacttgaagcagatgagagaattgagtgtgatatggatactgcaagacatgtagaacagctagtagtttttggaggatttacagacacccaatttttggaaaagagtttggtaaatcaattcaatgaattggaagatagcttgaaggaggctttcttgatgccatttactgctatctcttcgcagatacaatgtcaaggattgcttcctttatatcctgttacatcatcagctaccttgtcatcatcctgctcgccaacatcaatatcattttataaggatgaagattcatcgcatgaggaatcctcctatagcttgactgactatgtatgcttgaagatacctgatggatcattaaataaagtaaattgcatcggtgtgataaagggctctggtaactgttgtactaccctcagcatgatgtcactttcaggttttctgttgcatatacctgacggatatgagtgtgttgacctgtcactttataaggacaaccaggtagttttactactgagtgaaacgtcttgttctgatagccctggaaaatcttggatggtgatgctgcaaatagagaacttttcctttatgccactctcaggaacattccctgcaaatatttacagtttgcaaaaactggtggtaacaattcttatttcccctatgtttgatctcctggcactcgatctgcaattggacacagattatgggaaagttcgtagcatacctcacaccgtatctactccatttgcagttagtgcatcgagaggagtagcctgtgtcttttcatcccggaggcatgccttggtttatatccttgatgaggatgaggaagcggagggggatgaaacttccgatatggagtgattattatccgattccttcaccttcggctcagccatttcagcttcaggcttcagcattgtcttatgtcttgttgcaatggaggcagaggcccggagatatcaatatgtacggaaacgtcgtctcattttcacggcaatgcatgcccgggttcagaagctacgtcgcgtggtaacagcctaacaggtcaccacgcacgcgcagccgcttttagagctcatgaaattgtcagtcgtcaccctgatgtgtgtaggccctgcaggttggacttcatcgtggttatttggaaagcgagcaaaattgtacacccatttctgatcgtgttgtgttatacgagtgcttgctagttgtgtaaaaaatctagaggtaacgtcaacgtgcaaaaaaaaagggtctgtcgcaaatcttgacggtcactagagctatcgcatttctaatcgtgtttgtgttatgtggattcattattttattgttcgagctgctaatgtacttggtaaaatacattgttgactgaactcgtgttgcgccttcaactcatgtttcctttcatcaaaccataggcatatctaagaacaagaaaacatgcctcatctggatctttgttctgttaaagaagcaagggg

SEQ ID NO: 44740 - DNA, 3146 bp, Zea Mays
gactctgacggttagaatccgatcatcataatcccgcatataggtgctgacggccttttgccccccaaaatcttgttgtccaaaacccttctctacgcgtctcggtgcctcgccggctcgccgctcgcaatcgccggttcgccgtcgccatttgtccccttcccccccctcgcgaccgcccgcttcgagtgtcccccaaacaaaaaatccctcccgcctgcacggccctcgctggacgcggagcatggcggaggagcagatcgaagaggcgtccatggccgcggcggcggccacgccgttccagctccagttcgacaagcccatcccgttccagataaaaatggcagaatggaatccagagaaggatctgcttgctatggttactgatgactccaaggttctcctccatcgcttcaattggcaaaggctttggacaatctctccagggaagtgcatcacatcaatttgttggagccctgatggtaaaataatagcacttggcacagaagatggtttgattcttttgcatgatgtggagaatgggaagatgctaagaactacaaaatcccacgatgttgccattgtatctttgaattgggcagaagacgatccactgtcaaagaccgcaccacacgtttctttcctcctcctcctgtgatgcctaggataggtggactacgttctggagatactggtcttgcggatgagaacgaagaagctattccagaattttctagtgcttcctgtcagcgttttaacattctgtgcagtggtggcaaagatggttgtgtttgcttcagcgtttttggaatatttcctgttggaaagataaacataactaaaatcccaatcaatgttggatcctctagaaagagttaccaactccaggatgcttcagtcagcaaggtctctttatcaagaaacctccagaaatttgttattctgtgctttggaaagttggttgataccgacaacctctctgacagctgcgaaaattctggattacattgtctctacctagatacttctatcttcttcaaccgaaaaaatgagctgcatcaggtgtcccaacaagcatcaagtattcaagatatggttgaagttgtccgtgcttctgtatctttaatatccaaacaatggtcaaacgccatgagtttattccatgagaaatttagtgccttgcccaatctgatatctacacatggagtggaatctagttctgaggatgagtttcttagccttttgtttgggacacgaacaagtccagcccttcaccattttttagctagttcacttggtgaagcgggtctcaagaggatagccaaggctgttgacagtgctggaagagatattcgtggcattatcactgagcatcttcagcctgcagtggagattatttcattcagactcgcagaattaagaggcctttcaagatggcgttcacgatttcaaactatcgggttagatggaaaccttattgatggtgtaactgagagtatagggatgctagttgttcaagtggagcgcttttcaagggtggcagccactgttgtttatctgtttcaaaatttctttgcctgggttttaaagtctgttagaatattattaaatgaacctaccgaccaagttccagcagcaaacagtgaacttgtggtgatttttcttaagtttcttcttgataaggatccaatcaaacaactacttgaagcagatgagagaattgagtgtgatatggatactgcaagacatgtagaacagctagtagtttttggaggatttacagacacccaatttttggaaaagagtttggtaaatcaattcaatgaattggaagatagcttgaaggaggctttcttgatgccatttactgctatctcttcgcagatacaatgtcaaggattgcttcctttatatcctgttacatcatcagctaccttgtcatcatcctgctcgccaacatcaatatcattttataaggatgaagattcatcgcatgaggaatcctcctatagcttgactgactatgtatgcttgaagatacctgatggatcattaaataaagtaaattgcatcggtgtgataaagggctctggtaactgttgtactaccctcagcatgatgtcactttcaggttttctgttgcatatacctgacggatatgagtgtgttgacctgtcactttataaggacaaccaggtagttttactactgagtgaaacgtcttgttctgatagccctggaaaatcttggatggtgatgctgcaaatagagaacttttcctttatgccactctcaggaacattccctgcaaatatttacagtttgcaaaaactggtggcactcgatctgcaattggacacagattatgggaaagttcgtagcatacctcacaccgtatctactccatttgcagttagtgcatcgagaggagtagcctgtgtcttttcatcccggaggcatgccttggtttatatccttgatgaggatgaggaagcggagggggatgaaacttccgatatggagtgattattatccgattccttcaccttcggctcagccatttcagcttcaggcttcagcattgtcttatgtcttgttgcaatggaggcagaggcccggagatatcaatatgtacggaaacgtcgtctcattttcacggcaatgcatgcccgggttcagaagctacgtcgcgtggtaacagcctaacaggtcaccacgcacgcgcagccgcttttagagctcatgaaattgtcagtcgtcaccctgatgtgtgtaggccctgcaggttggacttcatcgtggttatttggaaagcgagcaaaattgtacacccatttctgatcgtgttgtgttatacgagtgcttgctagttgtgtaaaaaatctagaggtaacgtcaacgtgcaaaaaaaaagggtctgtcgcaaatcttgacggtcactagagctatcgcatttctaatcgtgtttgtgttatgtggattcattattttattgttcgagctgctaatgtacttggtaaaatacattgttgactgaactcgtgttgcgccttcaactcatgtttcctttcatcaaaccataggcatatctaagaacaagaaaacatgcctcatctggatctttgttctgttaaagaagcaagggg

SEQ ID NO: 44741 - DNA, 3287 bp, Zea Mays
ttgactctgacggttagaatccgatcatcataatcccgcatataggtgctgacggccttttgccccccaaaatcttgttgtccaaaacccttctctacgcgtctcggtgcctcgccggctcgccgctcgcaatcgccggttcgccgtcgccatttgtccccttcccccccctcgcgaccgcccgcttcgagtgtcccccaaacaaaaaatccctcccgcctgcacggccctcgctggacgcggagcatggcggaggagcagatcgaagaggcgtccatggccgcggcggcggccacgccgttccagctccagttcgacaagcccatcccgttccagataaaaatggcagaatggaatccagagaaggatctgcttgctatggttactgatgactccaaggttctcctccatcgcttcaattggcaaaggctttggacaatctctccagggaagtgcatcacatcaatttgttggagccctgatggtaaaataatagcacttggcacagaagatggtttgattcttttgcatgatgtggagaatgggaagatgctaagaactacaaaatcccacgatgttgccattgtatctttgaattgggcagaagacgatccactgtcaaagtctgacaaggatgagtttttatcctatgaagaccgcaccacacgtttctttcctcctcctcctgtgatgcctaggataggtggactacgttctggagatactggtcttgcggatgagaacgaagaagctattccagaattttctagtgcttcctgtcagcgttttaacattctgtgcagtggtggcaaagatggttgtgtttgcttcagcgtttttggaatatttcctgttggaaagataaacataactaaaatcccaatcaatgttggatcctctagaaagagttaccaactccaggatgcttcagtcagcaaggtctctttatcaagaaacctccagaaatttgttattctgtgctttggaaagttggttgataccgacaacctctctgacagctgcgaaaattctggattacattgtctctacctagatacttctatcttcttcaaccgaaaaaatgagctgcatcaggtgtcccaacaagcatcaagtattcaagatatggttgaagttgtccgtgcttctgtatctttaatatccaaacaatggtcaaacgccatgagtttattccatgagaaatttagtgccttgcccaatctgatatctacacatggagtggaatctagttctgaggatgagtttcttagccttttgtttgggacacgaacaagtccagcccttcaccattttttagctagttcacttggtgaagcgggtctcaagaggatagccaaggctgttgacagtgctggaagagatattcgtggcattatcactgagcatcttcagcctgcagtggagattatttcattcagactcgcagaattaagaggcctttcaagatggcgttcacgatttcaaactatcgggttagatggaaaccttattgatggtgtaactgagagtatagggatgctagttgttcaagtggagcgcttttcaagggtggcagccactgttgtttatctgtttcaaaatttctttgcctgggttttaaagtctgttagaatattattaaatgaacctaccgaccaagttccagcagcaaacagtgaacttgtggtgatttttcttaagtttcttcttgataaggatccaatcaaacaactacttgaagcagatgagagaattgagtgtgatatggatactgcaagacatgtagaacagctagtagtttttggaggatttacagacacccaatttttggaaaagagtttggtaaatcaattcaatgaattggaagatagcttgaaggaggctttcttgatgccatttactgctatctcttcgcagatacaatgtcaaggattgcttcctttatatcctgttacatcatcagctaccttgtcatcatcctgctcgccaacatcaatatcattttataaggttcatgttctctttagtgatttcgacaagtgctcagcattacctgcatcctgtacgcagaatgtttataaagatgaagattcatcgcatgaggaatcctcctatagcttgactgactatgtatgcttgaagatacctgatggatcattaaataaagtaaattgcatcggtgtgataaagggctctggtaactgttgtactaccctcagcatgatgtcactttcaggttttctgttgcatatacctgacggatatgagtgtgttgacctgtcactttataaggacaaccaggtagttttactactgagtgaaacgtcttgttctgatagccctggaaaatcttggatggtgatgctgcaaatagagaacttttcctttatgccactctcaggaacattccctgcaaatatttacagtttgcaaaaactggtggtaacaattcttatttcccctatgtttgatctcctggcactcgatctgcaattggacacagattatgggaaagttcgtagcatacctcacaccgtatctactccatttgcagttagtgcatcgagaggagtagcctgtgtcttttcatcccggaggcatgccttggtttatatccttgatgaggatgaggaagcggagggggatgaaacttccgatatggagtgattattatccgattccttcaccttcggctcagccatttcagcttcaggcttcagcattgtcttatgtcttgttgcaatggaggcagaggcccggagatatcaatatgtacggaaacgtcgtctcattttcacggcaatgcatgcccgggttcagaagctacgtcgcgtggtaacagcctaacaggtcaccacgcacgcgcagccgcttttagagctcatgaaattgtcagtcgtcaccctgatgtgtgtaggccctgcaggttggacttcatcgtggttatttggaaagcgagcaaaattgtacacccatttctgatcgtgttgtgttatacgagtgcttgctagttgtgtaaaaaatctagaggtaacgtcaacgtgcaaaaaaaaagggtctgtcgcaaatcttgacggtcactagagctatcgcatttctaatcgtgtttgtgttatgtggattcattattttattgttcgagctgctaatgtacttggtaaaatacattgttgactgaactcgtgttgcgccttcaactcatgtttcctttcatcaaaccataggcatatctaagaacaagaaaacatgcctcatctggatctttgttctgttaaagaagcaagggg

SEQ ID NO: 44742 - DNA, 3166 bp, Zea Mays
caaaagttgactctgacggttagaatccgatcatcataatcccgcatataggtgctgacggccttttgccccccaaaatcttgttgtccaaaacccttctctacgcgtctcggtgcctcgccggctcgccgctcgcaatcgccggttcgccgtcgccatttgtccccttcccccccctcgcgaccgcccgcttcgagtgtcccccaaacaaaaaatccctcccgcctgcacggccctcgctggacgcggagcatggcggaggagcagatcgaagaggcgtccatggccgcggcggcggccacgccgttccagctccagttcgacaagcccatcccgttccagataaaaatggcagaatggaatccagagaaggatctgcttgctatggttactgatgactccaaggttctcctccatcgcttcaattggcaaaggctttggacaatctctccagggaagtgcatcacatcaatttgttggagccctgatggtaaaataatagcacttggcacagaagatggtttgattcttttgcatgatgtggagaatgggaagatgctaagaactacaaaatcccacgatgttgccattgtatctttgaattgggcagaagacgatccactgtcaaagtctgacaaggatgagtttttatcctatgaagaccgcaccacacgtttctttcctcctcctcctgtgatgcctaggataggtggactacgttctggagatactggtcttgcggatgagaacgaagaagctattccagaattttctagtgcttcctgtcagcgttttaacattctgtgcagtggtggcaaagatggttgtgtttgcttcagcgtttttggaatatttcctgttggaaagataaacataactaaaatcccaatcaatgttggatcctctagaaagagttaccaactccaggatgcttcagtcagcaaggtctctttatcaagaaacctccagaaatttgttattctgtgctttggaaagttggttgataccgacaacctctctgacagctgcgaaaattctggattacattgtctctacctagatacttctatcttcttcaaccggtgtcccaacaagcatcaagtattcaagatatggttgaagttgtccgtgcttctgtatctttaatatccaaacaatggtcaaacgccatgagtttattccatgagaaatttagtgccttgcccaatctgatatctacacatggagtggaatctagttctgaggatgagtttcttagccttttgtttgggacacgaacaagtccagcccttcaccattttttagctagttcacttggtgaagcgggtctcaagaggatagccaaggctgttgacagtgctggaagagatattcgtggcattatcactgagcatcttcagcctgcagtggagattatttcattcagactcgcagaattaagaggcctttcaagatggcgttcacgatttcaaactatcgggttagatggaaaccttattgatggtgtaactgagagtatagggatgctagttgttcaagtggagcgcttttcaagggtggcagccactgttgtttatctgtttcaaaatttctttgcctgggttttaaagtctgttagaatattattaaatgaacctaccgaccaagttccagcagcaaacagtgaacttgtggtgatttttcttaagtttcttcttgataaggatccaatcaaacaactacttgaagcagatgagagaattgagtgtgatatggatactgcaagacatgtagaacagctagtagtttttggaggatttacagacacccaatttttggaaaagagtttggtaaatcaattcaatgaattggaagatagcttgaaggaggctttcttgatgccatttactgctatctcttcgcagatacaatgtcaaggattgcttcctttatatcctgttacatcatcagctaccttgtcatcatcctgctcgccaacatcaatatcattttataaggatgaagattcatcgcatgaggaatcctcctatagcttgactgactatgtatgcttgaagatacctgatggatcattaaataaagtaaattgcatcggtgtgataaagggctctggtaactgttgtactaccctcagcatgatgtcactttcaggttttctgttgcatatacctgacggatatgagtgtgttgacctgtcactttataaggacaaccaggtagttttactactgagtgaaacgtcttgttctgatagccctggaaaatcttggatggtgatgctgcaaatagagaacttttcctttatgccactctcaggaacattccctgcaaatatttacagtttgcaaaaactggtggcactcgatctgcaattggacacagattatgggaaagttcgtagcatacctcacaccgtatctactccatttgcagttagtgcatcgagaggagtagcctgtgtcttttcatcccggaggcatgccttggtttatatccttgatgaggatgaggaagcggagggggatgaaacttccgatatggagtgattattatccgattccttcaccttcggctcagccatttcagcttcaggcttcagcattgtcttatgtcttgttgcaatggaggcagaggcccggagatatcaatatgtacggaaacgtcgtctcattttcacggcaatgcatgcccgggttcagaagctacgtcgcgtggtaacagcctaacaggtcaccacgcacgcgcagccgcttttagagctcatgaaattgtcagtcgtcaccctgatgtgtgtaggccctgcaggttggacttcatcgtggttatttggaaagcgagcaaaattgtacacccatttctgatcgtgttgtgttatacgagtgcttgctagttgtgtaaaaaatctagaggtaacgtcaacgtgcaaaaaaaaagggtctgtcgcaaatcttgacggtcactagagctatcgcatttctaatcgtgtttgtgttatgtggattcattattttattgttcgagctgctaatgtacttggtaaaatacattgttgactgaactcgtgttgcgccttcaactcatgtttcctttcatcaaaccataggcatatctaagaacaagaaaacatgcctcatctggatctttgttctgttaaagaagcaagggg

SEQ ID NO: 44743 - DNA, 3209 bp, Zea Mays
gacaaaagttgactctgacggttagaatccgatcatcataatcccgcatataggtgctgacggccttttgccccccaaaatcttgttgtccaaaacccttctctacgcgtctcggtgcctcgccggctcgccgctcgcaatcgccggttcgccgtcgccatttgtccccttcccccccctcgcgaccgcccgcttcgagtgtcccccaaacaaaaaatccctcccgcctgcacggccctcgctggacgcggagcatggcggaggagcagatcgaagaggcgtccatggccgcggcggcggccacgccgttccagctccagttcgacaagcccatcccgttccagataaaaatggcagaatggaatccagagaaggatctgcttgctatggttactgatgactccaaggttctcctccatcgcttcaattggcaaaggctttggacaatctctccagggaagtgcatcacatcaatttgttggagccctgatggtaaaataatagcacttggcacagaagatggtttgattcttttgcatgatgtggagaatgggaagatgctaagaactacaaaatcccacgatgttgccattgtatctttgaattgggcagaagacgatccactgtcaaagtctgacaaggatgagtttttatcctatgaagaccgcaccacacgtttctttcctcctcctcctgtgatgcctaggataggtggactacgttctggagatactggtcttgcggatgagaacgaagaagctattccagaattttctagtgcttcctgtcagcgttttaacattctgtgcagtggtggcaaagatggttgtgtttgcttcagcgtttttggaatatttcctgttggaaagatactttatgcctttgaaatttcagaacataactaaaatcccaatcaatgttggatcctctagaaagagttaccaactccaggatgcttcagtcagcaaggtctctttatcaagaaacctccagaaatttgttattctgtgctttggaaagttggttgataccgacaacctctctgacagctgcgaaaattctggattacattgtctctacctagatacttctatcttcttcaaccgaaaaaatgagctgcatcaggtgtcccaacaagcatcaagtattcaagatatggttgaagttgtccgtgcttctgtatctttaatatccaaacaatggtcaaacgccatgagtttattccatgagaaatttagtgccttgcccaatctgatatctacacatggagtggaatctagttctgaggatgagtttcttagccttttgtttgggacacgaacaagtccagcccttcaccattttttagctagttcacttggtgaagcgggtctcaagaggatagccaaggctgttgacagtgctggaagagatattcgtggcattatcactgagcatcttcagcctgcagtggagattatttcattcagactcgcagaattaagaggcctttcaagatggcgttcacgatttcaaactatcgggttagatggaaaccttattgatggtgtaactgagagtatagggatgctagttgttcaagtggagcgcttttcaagggtggcagccactgttgtttatctgtttcaaaatttctttgcctgggttttaaagtctgttagaatattattaaatgaacctaccgaccaagttccagcagcaaacagtgaacttgtggtgatttttcttaagtttcttcttgataaggatccaatcaaacaactacttgaagcagatgagagaattgagtgtgatatggatactgcaagacatgtagaacagctagtagtttttggaggatttacagacacccaatttttggaaaagagtttggtaaatcaattcaatgaattggaagatagcttgaaggaggctttcttgatgccatttactgctatctcttcgcagatacaatgtcaaggattgcttcctttatatcctgttacatcatcagctaccttgtcatcatcctgctcgccaacatcaatatcattttataaggatgaagattcatcgcatgaggaatcctcctatagcttgactgactatgtatgcttgaagatacctgatggatcattaaataaagtaaattgcatcggtgtgataaagggctctggtaactgttgtactaccctcagcatgatgtcactttcaggttttctgttgcatatacctgacggatatgagtgtgttgacctgtcactttataaggacaaccaggtagttttactactgagtgaaacgtcttgttctgatagccctggaaaatcttggatggtgatgctgcaaatagagaacttttcctttatgccactctcaggaacattccctgcaaatatttacagtttgcaaaaactggtggcactcgatctgcaattggacacagattatgggaaagttcgtagcatacctcacaccgtatctactccatttgcagttagtgcatcgagaggagtagcctgtgtcttttcatcccggaggcatgccttggtttatatccttgatgaggatgaggaagcggagggggatgaaacttccgatatggagtgattattatccgattccttcaccttcggctcagccatttcagcttcaggcttcagcattgtcttatgtcttgttgcaatggaggcagaggcccggagatatcaatatgtacggaaacgtcgtctcattttcacggcaatgcatgcccgggttcagaagctacgtcgcgtggtaacagcctaacaggtcaccacgcacgcgcagccgcttttagagctcatgaaattgtcagtcgtcaccctgatgtgtgtaggccctgcaggttggacttcatcgtggttatttggaaagcgagcaaaattgtacacccatttctgatcgtgttgtgttatacgagtgcttgctagttgtgtaaaaaatctagaggtaacgtcaacgtgcaaaaaaaaagggtctgtcgcaaatcttgacggtcactagagctatcgcatttctaatcgtgtttgtgttatgtggattcattattttattgttcgagctgctaatgtacttggtaaaatacattgttgactgaactcgtgttgcgccttcaactcatgtttcctttcatcaaaccataggcatatctaagaacaagaaaacatgcctcatctggatctttgttctgttaaagaagcaagggg

SEQ ID NO: 44744 - DNA, 2810 bp, Zea Mays
cccttctctacgcgtctcggtgcctcgccggctcgccgctcgcaatcgccggttcgccgtcgccatttgtccccttcccccccctcgcgaccgcccgcttcgagtgtcccccaaacaaaaaatccctcccgcctgcacggccctcgctggacgcggagcatggcggaggagcagatcgaagaggcgtccatggccgcggcggcggccacgccgttccagctccagttcgacaagcccatcccgttccagataaaaatggcagaatggaatccagagaaggatctgcttgctatggttactgatgactccaaggttctcctccatcgcttcaattggcaaaggctttggacaatctctccagggaagtgcatcacatcaatttgttggagccctgatggtaaaataatagcacttggcacagaagatggtttgattcttttgcatgatgtggaggtgtgtatctggatgatgataaaaactgtcagtgccttttgtgtctttgtatgaacattcgtttgtacttcatagaaacctgatccagtgcctatcttctcttaatatttttctaattgcttattctcatttttatatcatgcttaaacctttatgagcgaactattaggagacaattaagggatacaggcctcaaggacttcttgcccaattatgttttcgatagaggcattttaatacttcttgaagattattgcgtatcagctatactattgtcaattgtgtttgacaggcaggaccacttgatcacatacagttggggatcttgcagccactgcttgaacatctgtgcagattctcaagacctcactcttccatgataaacttctcacaatattttattgaaatgaaacttttccaatgacgctcccttagtatcttactatcttgcatcctctgcaaagctagcttgacctgcttctagctagccacctgctgcctgcatcaaaacaaactttacaatttgacgccatcactcaacaagtactctgtaataagtgtaatgtttttttaccatctttcaatggttaattttctttataagcttgaatggctaaaaaacaatttggtgggagaaatttatccaaaactccgccgtaatgcttaggcacaggtgattgcttggcactataatcacacacacagacacaaagggaaatgtattgcagtgtcataatttctttttttgcagtttcactcaaattgttagtactagtagtgtatgtaatctttcatactccctttcacctttaatttgaaaacaagaccaaatctgcacagcttgccactgtcagttaattttgaaatataacaatatctcatgtgtgtcaagatctacttgttacttttcttttacactgtcactttgtgcatttataactgaataaaaatctcattgcagaatgggaagatgctaagaactacaaaatcccacgatgttgccattgtatctttgaattgggcagaagacgatccactgtcaaaggtatgctattgcctttgcgatataagtatcatataataacacatgtgtagttacaaaaaatttcagttgatttacaaattcagcactaatcaaaattagtttaggtctctactaaaacttctcattactgattcttctgctaatttattcagtctgacaaggatgagtttttatcctatgaagaccgcaccacacgtttctttcctcctcctcctgtgatgcctaggataggtggactacgttctggagatactggtcttgcggatgagaacgaagaagctattccagaattttctagtgcttcctgtcagcgttttaacattctgtgcagtggtggcaaagatggttgtgtttgcttcagcgtttttggaatatttcctgttggaaagataaacataactaaaatcccaatcaatgttggatcctctagaaagagttaccaactccaggatgcttcagtcagcaaggtctctttatcaagaaacctccagaaatttgttattctgtgctttggaaagttggttgataccgacaacctctctgacagctgcgaaaattctggattacattgtctctacctagatacttctatcttcttcaaccggtgtcccaacaagcatcaagtattcaagatatggttgaagttgtccgtgcttctgtatctttaatatccaaacaatggtcaaacgccatgagtttattccatgagaaatttagtgccttgcccaatctgatatctacacatggagtggaatctagttctgaggatgagtttcttagccttttgtttgggacacgaacaagtccagcccttcaccattttttagctagttcacttggtgaagcgggtctcaagaggatagccaaggctgttgacagtgctggaagagatattcgtggcattatcactgagcatcttcagcctgcagtggagattatttcattcagactcgcagaattaagaggcctttcaagatggcgttcacgatttcaaactatcgggttagatggaaaccttattgatggtgtaactgagagtatagggatgctagttgttcaagtggagcgcttttcaagggtggcagccactgttgtttatctgtttcaaaatttctttgcctgggttttaaagtctgttagaatattattaaatgaacctaccgaccaagttccagcagcaaacagtgaacttgtggtgatttttcttaagtttcttcttgataaggatccaatcaaacaactacttgaagcagatgagagaattgagtgtgatattttttagtttttttctacacttggtatcttggtgttg

SEQ ID NO: 44745 - DNA, 336 bp, Zea Mays
gcagccgtgtggcaagttgggaagattacactctcatacatggaacatacaagatacaacctggtatgcatggaactatagctgttataggtgcattatgacacaatcttgaatgtctgcaacatcatgaagaaagctttatatgcatctatgatcgtccagcagttactttgaaggcactctatttgcactatccccttcttaattcaaaacttttcatgtaaatggaagtcttgaaatatgaagtggtgtttgatgaccgagctaggctaaaggggatccccatgcgagtgctcctaggtcacggtgttgttataattaacactacggtttctc

SEQ ID NO: 44746 - DNA, 454 bp, Zea Mays
gttttctccatgcaaacaacaggtcagtccaagtcatcaagcttcacattaatgcacagttgcacactactcggagggttttctctggataccaaaagcgaagcagcagggctcgtcgccgcgtgtgatgcagaaacggtgcagccaggcagatcctcaccaggctgcggcgtatggagtggaggataaaaactcagctgccactgtgtaggaagcgatgggaatcgtttggtgccgtcaggacacgatcgtgcggttgaagagaaaaaggtagacgtggatgtgctgagtgagagcgtgactttgctcccaactttaatatatagaaatagaaagaactctctaagcaatgattgtggatatacatgtttccttattattaaagcagcaaggaaacgtggccagagagcctatccacgtcgaccgaattttcttgaccgttcgatcattgatc

SEQ ID NO: 44747 - DNA, 397 bp, Zea Mays
ccgcgccgcgctggaggacctcgaggaccagttcgagtgttttctccagcagggctcgtcgccgcgtgtgatgcagaaacggtgcagccaggcagatcctcaccaggctgcggcgtatggagtggaggataaaaactcagctgccactgtgtaggaagcgatgggaatcgtttggtgccgtcaggacacgatcgtgcggttgaagagaaaaaggtagacgtggatgtgctgagtgagagcgtgactttgctcccaactttaatatatagaaatagaaagaactctctaagcaatgattgtggatatacatgtttccttattattaaagcagcaaggaaacgtggccagagagcctatccacgtcgaccgaattttcttgaccgttcgatcattgatc

SEQ ID NO: 44748 - DNA, 2948 bp, Zea Mays
ccattttttgactccttgcgagcttgtcaatttattaatgtttgctagtttgttgattggatgttcgtctagtcaagtgtcggtgtgactggaaatgcgggtggtttccaagcagtggttgtcgagacttgaaaccaccgtaggatcttgtgcatttaccacatgtttaagtgtgtcaatcgtcagagtagctagcgcaaactctgggtagggcatcgtcgtggttgtgatcatgtgaatcatctaactaccgcaaagcatgcaaacaacaggtcagtccaagtcatcaagcttcacattaatgcacagttgcacactactcggagggttttctctggataccaaaagcgaaggtatttaccaaagagctcttctatgattttttttctattttggctcaaggatatacttatgaggtgtttggtttgatgaatcactatatccaaaataaagtggtgcatcataggtccattcctcaaatttggtgggatgactccattccacatattagtactaaaaactaactatgaggaatgaggtggtgatggactaactcactccataccacaaaccaaacaaaaaagtgaggagtgagaagataatggactatatcattcctcaaaccaaacactccattaatgaaccttcaaatccaaggagaacgtataatgtatgataattgtatgattgacagagagtaaattaggatataagggcaaaaacaaaggaaaccagatcaatgtttgaaagagttgcacattgtctagaggtgataattatagcgattacggtagttgcatagtcaaccgacatgttcataggtttgtacaaacttatatattacatcattagcaggattcaacatctggagatcagttcaatatatacaacactgtgaaagtttcagcagtttggttatatatacataaaagcatttgtgctccaaaagtgacgatgttcgtcatcctacctgtacggaaaaggtgagcgtcagtagttaaagagtctttaagctgttgtgtctttttggtatggctataagaagaatactcagatgatattgattacaaattatgtacacgacatgagagtatggcaggagagtagatggtgtagtactttcatgagaacatcatgagatcgttgatgatctaatgatcaaggctgtcagggtatgtagaacctagctgtgtagtcttgatcctatgtgtttgttagtgttagtatgaaccaggattgatacctgcaaaattaaatagtgtttatgatttggcttcaatttttttataaatacatacttcttaggaggtgacgcgaggctgtctttattgagctcaactgaaatctgttcatcaacttgtaaacaaatggataagaagtgtcaagtaacatgacttctataaaataaaagtgaagaaattattttcggggcctttttggcaatgttgttcaaactattactagtgtattgtgcacgccccatgcacgcgtgttgcatagtaaatcagagtggtcatagaccgttggagttttggataaatgtggtacaatcacaattaaggtgacaatgatggttgtagagtagataaacattatactgcatagaatagtacaaacctaagatatcagaagcatcatcatgcaaaaaagacaacataatataattccatccaatattttcaataattcatgaacatttcctggttgaatggagatatcagaagcatcatcatgagaaatcgagcgtgtcccattgctaacttcatgtgtagtatcatatacataaagctcaaaaaattagaggctttttatatggtgttaataatgatcatattcgttttgaagattggtggaccgcgaccatcattggttgttctatcaatatggccacacgtgtatgtaaatgtaaatgaacagttatattgccttataatttgcaccaacctcttagatgatgaatcaccatcaaatcgtgccagtgataataagggttcaagcctaggcctataaggagaaaagagcagagcaacgacgacattgatattatggtgggcaaaagtacgatcaaccatggtatgaagctataatttttcccacaatgtaggaaaaacagtaaatcaaaaaggacattagatttcattcgtggtattttttataatgttcagctgaacctagtaataaaaaatgaagtcaagagttcattggacctagcaatgattcaaagtggtcttgcaatgtgatacgatgttgacaggttgtgcttgcgcttaatatagaatttacaattcaggtaggttggtacaccgttgtagcaatgtattaactatgctacttgttgatgatgatctttgttggttcaataattatctacgcacacaacgtactttaatcttcatgacaagtttcattaacaaatcacaagttagacatctagttagagatgttgcctttttgttgtctattatgaactaagatgatatgagatcacttactcagctttgttttcttgcttgggctaacacgtttcatatgtaacctggcctcataacaatgtataaacaatgtatatatgagttgcatggttgcaacatagatagatatctatgcaaggtagtgtctttagacctgatagatcagatataggttgacctctctctctctgtgtgtgtgtgtatgcactctttttttctttgatcagcaaaaaagtggtctatgtatatatgtatatgtgtatatacatgtttatatccttatgtgaatatgtacaaacataatatacgcacgtgtgcaagcatagagataacatgctcgttgcacccaaaaggacatgggaaacattgaaaaaatctacactgcatctaaggcagctagacatatatgtgtatctagaaatgacactggagattataatgtgcatatatgaacgtgactataaaaataggtatgga

SEQ ID NO: 44749 - DNA, 2477 bp, Zea Mays
cccctcctgacctcgctttccctccctccctccattttttgactccttgcgagcttgtcaatttattaatgtttgctagtttgttgattggatgttcgtctagtcaagtgtcggtgtgactggaaatgcgggtggtttccaagcagtggttgtcgagacttgaaaccaccgtaggatcttgtgcatttaccacatgtttaagtgtgtcaatcgtcagagtagctagcgcaaactctgggtagggcatcgtcgtggttgtgatcatgtgaatcatctaactaccgcaaagcatgcaaacaacaggtcagtccaagtcatcaagcttcacattaatgcacagttgcacactactcggagggttttctctggataccaaaagcgaaggattcaacatctggagatcagttcaatatatacaacactgtgaaagtttcagcagtttggttatatatacataaaagcatttgtgctccaaaagtgacgatgttcgtcatcctacctgtacggaaaaggtgagcgtcagtagttaaagagtctttaagctgttgtgtctttttggtatggctataagaagaatactcagatgatattgattacaaattatgtacacgacatgagagtatggcaggagagtagatggtgtagtactttcatgagaacatcatgagatcgttgatgatctaatgatcaaggctgtcagggtatgtagaacctagctgtgtagtcttgatcctatgtgtttgttagtgttagtatgaaccaggattgatacctgcaaaattaaatagtgtttatgatttggcttcaatttttttataaatacatacttcttaggaggtgacgcgaggctgtctttattgagctcaactgaaatctgttcatcaacttgtaaacaaatggataagaagtgtcaagtaacatgacttctataaaataaaagtgaagaaattattttcggggcctttttggcaatgttgttcaaactattactagtgtattgtgcacgccccatgcacgcgtgttgcatagtaaatcagagtggtcatagaccgttggagttttggataaatgtggtacaatcacaattaaggtgacaatgatggttgtagagtagataaacattatactgcatagaatagtacaaacctaagatatcagaagcatcatcatgcaaaaaagacaacataatataattccatccaatattttcaataattcatgaacatttcctggttgaatggagatatcagaagcatcatcatgagaaatcgagcgtgtcccattgctaacttcatgtgtagtatcatatacataaagctcaaaaaattagaggctttttatatggtgttaataatgatcatattcgttttgaagattggtggaccgcgaccatcattggttgttctatcaatatggccacacgtgtatgtaaatgtaaatgaacagttatattgccttataatttgcaccaacctcttagatgatgaatcaccatcaaatcgtgccagtgataataagggttcaagcctaggcctataaggagaaaagagcagagcaacgacgacattgatattatggtgggcaaaagtacgatcaaccatggtatgaagctataatttttcccacaatgtaggaaaaacagtaaatcaaaaaggacattagatttcattcgtggtattttttataatgttcagctgaacctagtaataaaaaatgaagtcaagagttcattggacctagcaatgattcaaagtggtcttgcaatgtgatacgatgttgacaggttgtgcttgcgcttaatatagaatttacaattcaggtaggttggtacaccgttgtagcaatgtattaactatgctacttgttgatgatgatctttgttggttcaataattatctacgcacacaacgtactttaatcttcatgacaagtttcattaacaaatcacaagttagacatctagttagagatgttgcctttttgttgtctattatgaactaagatgatatgagatcacttactcagctttgttttcttgcttgggctaacacgtttcatatgtaacctggcctcataacaatgtataaacaatgtatatatgagttgcatggttgcaacatagatagatatctatgcaaggtagtgtctttagacctgatagatcagatataggttgacctctctctctctgtgtgtgtgtgtatgcactctttttttctttgatcagcaaaaaagtggtctatgtatatatgtatatgtgtatatacatgtttatatccttatgtgaatatgtacaaacataatatacgcacgtgtgcaagcatagagataacatgctcgttgcacccaaaaggacatgggaaacattgaaaaaatctacactgcatctaaggcagctagacatatatgtgtatctagaaatgacactggagattataatgtgcatatatgaacgtgactataaaaataggtatgga

SEQ ID NO: 44750 - DNA, 2726 bp, Zea Mays
ccatccgcgccgcgctggaggacctcgaggaccagttcgagtgttttctcgtcagtccaagtcatcaagcttcacattaatgcacagttgcacactactcggagggttttctctggataccaaaagcgaaggtatttaccaaagagctcttctatgattttttttctattttggctcaaggatatacttatgaggtgtttggtttgatgaatcactatatccaaaataaagtggtgcatcataggtccattcctcaaatttggtgggatgactccattccacatattagtactaaaaactaactatgaggaatgaggtggtgatggactaactcactccataccacaaaccaaacaaaaaagtgaggagtgagaagataatggactatatcattcctcaaaccaaacactccattaatgaaccttcaaatccaaggagaacgtataatgtatgataattgtatgattgacagagagtaaattaggatataagggcaaaaacaaaggaaaccagatcaatgtttgaaagagttgcacattgtctagaggtgataattatagcgattacggtagttgcatagtcaaccgacatgttcataggtttgtacaaacttatatattacatcattagcaggattcaacatctggagatcagttcaatatatacaacactgtgaaagtttcagcagtttggttatatatacataaaagcatttgtgctccaaaagtgacgatgttcgtcatcctacctgtacggaaaaggtgagcgtcagtagttaaagagtctttaagctgttgtgtctttttggtatggctataagaagaatactcagatgatattgattacaaattatgtacacgacatgagagtatggcaggagagtagatggtgtagtactttcatgagaacatcatgagatcgttgatgatctaatgatcaaggctgtcagggtatgtagaacctagctgtgtagtcttgatcctatgtgtttgttagtgttagtatgaaccaggattgatacctgcaaaattaaatagtgtttatgatttggcttcaatttttttataaatacatacttcttaggaggtgacgcgaggctgtctttattgagctcaactgaaatctgttcatcaacttgtaaacaaatggataagaagtgtcaagtaacatgacttctataaaataaaagtgaagaaattattttcggggcctttttggcaatgttgttcaaactattactagtgtattgtgcacgccccatgcacgcgtgttgcatagtaaatcagagtggtcatagaccgttggagttttggataaatgtggtacaatcacaattaaggtgacaatgatggttgtagagtagataaacattatactgcatagaatagtacaaacctaagatatcagaagcatcatcatgcaaaaaagacaacataatataattccatccaatattttcaataattcatgaacatttcctggttgaatggagatatcagaagcatcatcatgagaaatcgagcgtgtcccattgctaacttcatgtgtagtatcatatacataaagctcaaaaaattagaggctttttatatggtgttaataatgatcatattcgttttgaagattggtggaccgcgaccatcattggttgttctatcaatatggccacacgtgtatgtaaatgtaaatgaacagttatattgccttataatttgcaccaacctcttagatgatgaatcaccatcaaatcgtgccagtgataataagggttcaagcctaggcctataaggagaaaagagcagagcaacgacgacattgatattatggtgggcaaaagtacgatcaaccatggtatgaagctataatttttcccacaatgtaggaaaaacagtaaatcaaaaaggacattagatttcattcgtggtattttttataatgttcagctgaacctagtaataaaaaatgaagtcaagagttcattggacctagcaatgattcaaagtggtcttgcaatgtgatacgatgttgacaggttgtgcttgcgcttaatatagaatttacaattcaggtaggttggtacaccgttgtagcaatgtattaactatgctacttgttgatgatgatctttgttggttcaataattatctacgcacacaacgtactttaatcttcatgacaagtttcattaacaaatcacaagttagacatctagttagagatgttgcctttttgttgtctattatgaactaagatgatatgagatcacttactcagctttgttttcttgcttgggctaacacgtttcatatgtaacctggcctcataacaatgtataaacaatgtatatatgagttgcatggttgcaacatagatagatatctatgcaaggtagtgtctttagacctgatagatcagatataggttgacctctctctctctgtgtgtgtgtgtatgcactctttttttctttgatcagcaaaaaagtggtctatgtatatatgtatatgtgtatatacatgtttatatccttatgtgaatatgtacaaacataatatacgcacgtgtgcaagcatagagataacatgctcgttgcacccaaaaggacatgggaaacattgaaaaaatctacactgcatctaaggcagctagacatatatgtgtatctagaaatgacactggagattataatgtgcatatatgaacgtgactataaaaataggtatgga

SEQ ID NO: 44751 - DNA, 2096 bp, Zea Mays
gggtagctgtcactgtgttggaagcggtcggaatcgtttgctgccgatcgtgcggttgaagagaaaatggtagacgtggatagcccaactagcctatccacgtccacgttcgatcctccatctacggcttcgatcgctccagcgcagcaagtctctgatatttctgacggacgtttcgtctttcctctgttgccttcgttttgggaggacttttcttccttcgcctctacaggtttggaatcggcgctgtccgtcttcgctcttctcggttcgttcctccctcctccctcccgtctgtctttgttcctctctcctcccacccatttgtcttcgttcctattcctcttgttgcctctgttgttcgcgtcggtaaatccgcctcgttcgtcttcctcccgttgcctccgtcgttcgcttagtcggagattaatcgtgacctaaatcgttcgatcagtttaggaacgatcagcctggctggctggattgaaatttaggcccagtggcccacttcacttgcccagcggccctgcccagcttcctttttcccaattcccaccacttgggtacacacgacacgaaccaggcaaccagctgcggagggaggaaccctagcggaacactgtgcaggtgacggcggcgcgctaccggtcacgggggatacggcggcatcgtcccctcctccatccccggcgcggcggcgccagcagccggcctgcagggacggtctccagtctccagaatccagattcagagcttgtccctgttttgtggtgtgctctgttgtactgtagcctccagggcaaattaaagctacaatgcaggctgcctactatgcaaaggatcttttggtttgaagtccagttgaccgaagttggaaaatacttctgatacttacagatttcacagaggttttcgaacacggctgaacacgcgcgcaaggcgtgcacagtacacgcgcgcagggggaggaggagaacaagaggatggtgaaggcaaggcccaagccaacgccggtcaaggcggccccagaagtgatcttcgacccaatggcctctggtgcccggaagccccgccgcccaggggcgccgtcagccagcaaagaatggcacagcttcatgggatcgagtctgtcggatatgtatcggaagccagttttggagaaatctgctgacacatctgatgaggagcctgacattgatatcatgaagctgctgaaagatgttgagatcattggtgcccctacatttaaggggcgaaagcaaatcgagaaccgcagagtagttgagttgggtggaaagtccgttaagaagcaccgcacaccattaagtgttgcgaagccagctctgaagaatcagaagaaacgagaacagaagaaaatggaagaggaaaaactacttgggatctttaggaagagggacaaggacaccaaacctcacaagacaaggccagaggaccgagtgcttagggccacagaagggcgctttaggaacggtatactgaacgtcaagcatcttctggcgccaccgaaaccatcaggcaaggacatgtcggaaccgaagatgaggaaggacaagcacaaggggaagggtaagcagaaggggggcagaaggaagagacgttgaagaaagcacacttctgtaacctggtttgctattaagaatttaagatagatggttgatgaaacgtttaaatgacaacacctttttgtgtccgtcctgaaattaagacgtttccttgctctgctggaatctttgaagtgatccttgaaacgatgtaattctccaccttgaaacgaaacgatgtaattctccaggatgcggttcaggaagaggcttatttggttcaattttatatgcccttcgatccctgggcatatttgtttttgtattgtcatcttgtatatgatcaaagctaggggtatttgtcgatggctgaaatgctgccgtccctaaaatgttagattgattccattctgcaaaaggaatacatttccattgtccagctgcaagaattttacatcgcaatcgattgttgcatgtccagtgattgtcagtacaacaagattacaatggactcttagttttacacgataaaag

SEQ ID NO: 44752 - DNA, 2100 bp, Zea Mays
gggtagctgtcactgtgttggaagcggtcggaatcgtttgctgccgatcgtgcggttgaagagaaaatggtagacgtggatagcccaactagcctatccacgtccacgttcgatcctccatctacggcttcgatcgctccagcgcagcaagtctctgatatttctgacggacgtttcgtctttcctctgttgccttcgttttgggaggacttttcttccttcgcctctacaggtttggaatcggcgctgtccgtcttcgctcttctcggttcgttcctccctcctccctcccgtctgtctttgttcctctctcctcccacccatttgtcttcgttcctattcctcttgttgcctctgttgttcgcgtcggtaaatccgcctcgttcgtcttcctcccgttgcctccgtcgttcgcttagtcggagattaatcgtgacctaaatcgttcgatcagtttaggaacgatcagcctggctggctggattgaaatttaggcccagtggcccacttcacttgcccagcggccctgcccagcttcctttttcccaattcccaccacttgggtacacacgacacgaaccaggcaaccagctgcggagggaggaaccctagcggaacactgtgcaggtgacggcggcgcgctaccggtcacgggggatacggcggcatcgtcccctcctccatccccggcgcggcggcgccagcagccggcctgcagggacggtctccagtctccagaatccagattcagagcttgtccctgttttgtggtgtgctctgttgtactgtagcctgtagccagggcaaattaaagctacaatgcaggctgcctactatgcaaaggatcttttggtttgaagtccagttgaccgaagttggaaaatacttctgatacttacagatttcacagaggttttcgaacacggctgaacacgcgcgcaaggcgtgcacagtacacgcgcgcagggggaggaggagaacaagaggatggtgaaggcaaggcccaagccaacgccggtcaaggcggccccagaagtgatcttcgacccaatggcctctggtgcccggaagccccgccgcccaggggcgccgtcagccagcaaagaatggcacagcttcatgggatcgagtctgtcggatatgtatcggaagccagttttggagaaatctgctgacacatctgatgaggagcctgacattgatatcatgaagctgctgaaagatgttgagatcattggtgcccctacatttaaggggcgaaagcaaatcgagaaccgcagagtagttgagttgggtggaaagtccgttaagaagcaccgcacaccattaagtgttgcgaagccagctctgaagaatcagaagaaacgagaacagaagaaaatggaagaggaaaaactacttgggatctttaggaagagggacaaggacaccaaacctcacaagacaaggccagaggaccgagtgcttagggccacagaagggcgctttaggaacggtatactgaacgtcaagcatcttctggcgccaccgaaaccatcaggcaaggacatgtcggaaccgaagatgaggaaggacaagcacaaggggaagggtaagcagaaggggggcagaaggaagagacgttgaagaaagcacacttctgtaacctggtttgctattaagaatttaagatagatggttgatgaaacgtttaaatgacaacacctttttgtgtccgtcctgaaattaagacgtttccttgctctgctggaatctttgaagtgatccttgaaacgatgtaattctccaccttgaaacgaaacgatgtaattctccaggatgcggttcaggaagaggcttatttggttcaattttatatgcccttcgatccctgggcatatttgtttttgtattgtcatcttgtatatgatcaaagctaggggtatttgtcgatggctgaaatgctgccgtccctaaaatgttagattgattccattctgcaaaaggaatacatttccattgtccagctgcaagaattttacatcgcaatcgattgttgcatgtccagtgattgtcagtacaacaagattacaatggactcttagttttacacgataaaag

SEQ ID NO: 44753 - DNA, 1606 bp, Zea Mays
gggtagctgtcactgtgttggaagcggtcggaatcgtttgctgccgatcgtgcggttgaagagaaaatggtagacgtggatagcccaactagcctatccacgtccacgttcgatcctccatctacggcttcgatcgctccagcgcagcaagtctctgatatttctgacggacgtttcgtctttcctctgttgccttcgttttgggaggacttttcttccttcgcctctacagccagggcaaattaaagctacaatgcaggctgcctactatgcaaaggatcttttggtttgaagtccagttgaccgaagttggaaaatacttctgatacttacagatttcacagaggtcttgtttattttctactattttccttcaagcacgtggaatagtacgtttgacaaacaatttgctgacgaggttttcgaacacggctgaacacgcgcgcaaggcgtgcacagtacacgcgcgcagggggaggaggagaacaagaggatggtgaaggcaaggcccaagccaacgccggtcaaggcggccccagaagtgatcttcgacccaatggcctctggtgcccggaagccccgccgcccaggggcgccgtcagccagcaaagaatggcacagcttcatgggatcgagtctgtcggatatgtatcggaagccagttttggagaaatctgctgacacatctgatgaggagcctgacattgatatcatgaagctgctgaaagatgttgagatcattggtgcccctacatttaaggggcgaaagcaaatcgagaaccgcagagtagttgagttgggtggaaagtccgttaagaagcaccgcacaccattaagtgttgcgaagccagctctgaagaatcagaagaaacgagaacagaagaaaatggaagaggaaaaactacttgggatctttaggaagagggacaaggacaccaaacctcacaagacaaggccagaggaccgagtgcttagggccacagaagggcgctttaggaacggtatactgaacgtcaagcatcttctggcgccaccgaaaccatcaggcaaggacatgtcggaaccgaagatgaggaaggacaagcacaaggggaagggtaagcagaaggggggcagaaggaagagacgttgaagaaagcacacttctgtaacctggtttgctattaagaatttaagatagatggttgatgaaacgtttaaatgacaacacctttttgtgtccgtcctgaaattaagacgtttccttgctctgctggaatctttgaagtgatccttgaaacgatgtaattctccaccttgaaacgaaacgatgtaattctccaggatgcggttcaggaagaggcttatttggttcaattttatatgcccttcgatccctgggcatatttgtttttgtattgtcatcttgtatatgatcaaagctaggggtatttgtcgatggctgaaatgctgccgtccctaaaatgttagattgattccattctgcaaaaggaatacatttccattgtccagctgcaagaattttacatcgcaatcgattgttgcatgtccagtgattgtcagtacaacaagattacaatggactcttagttttacacgataaaag

SEQ ID NO: 44754 - DNA, 2173 bp, Zea Mays
gggtagctgtcactgtgttggaagcggtcggaatcgtttgctgccgatcgtgcggttgaagagaaaatggtagacgtggatagcccaactagcctatccacgtccacgttcgatcctccatctacggcttcgatcgctccagcgcagcaagtctctgatatttctgacggacgtttcgtctttcctctgttgccttcgttttgggaggacttttcttccttcgcctctacaggtttggaatcggcgctgtccgtcttcgctcttctcggttcgttcctccctcctccctcccgtctgtctttgttcctctctcctcccacccatttgtcttcgttcctattcctcttgttgcctctgttgttcgcgtcggtaaatccgcctcgttcgtcttcctcccgttgcctccgtcgttcgcttagtcggagattaatcgtgacctaaatcgttcgatcagtttaggaacgatcagcctggctggctggattgaaatttaggcccagtggcccacttcacttgcccagcggccctgcccagcttcctttttcccaattcccaccacttgggtacacacgacacgaaccaggcaaccagctgcggagggaggaaccctagcggaacactgtgcaggtgacggcggcgcgctaccggtcacgggggatacggcggcatcgtcccctcctccatccccggcgcggcggcgccagcagccggcctgcagggacggtctccagtctccagaatccagattcagagcttgtccctgttttgtggtgtgctctgttgtactgtagcctccagggcaaattaaagctacaatgcaggctgcctactatgcaaaggatcttttggtttgaagtccagttgaccgaagttggaaaatacttctgatacttacagatttcacagaggtcttgtttattttctactattttccttcaagcacgtggaatagtacgtttgacaaacaatttgctgacgagcacaggttttcgaacacggctgaacacgcgcgcaaggcgtgcacagtacacgcgcgcagggggaggaggagaacaagaggatggtgaaggcaaggcccaagccaacgccggtcaaggcggccccagaagtgatcttcgacccaatggcctctggtgcccggaagccccgccgcccaggggcgccgtcagccagcaaagaatggcacagcttcatgggatcgagtctgtcggatatgtatcggaagccagttttggagaaatctgctgacacatctgatgaggagcctgacattgatatcatgaagctgctgaaagatgttgagatcattggtgcccctacatttaaggggcgaaagcaaatcgagaaccgcagagtagttgagttgggtggaaagtccgttaagaagcaccgcacaccattaagtgttgcgaagccagctctgaagaatcagaagaaacgagaacagaagaaaatggaagaggaaaaactacttgggatctttaggaagagggacaaggacaccaaacctcacaagacaaggccagaggaccgagtgcttagggccacagaagggcgctttaggaacggtatactgaacgtcaagcatcttctggcgccaccgaaaccatcaggcaaggacatgtcggaaccgaagatgaggaaggacaagcacaaggggaagggtaagcagaaggggggcagaaggaagagacgttgaagaaagcacacttctgtaacctggtttgctattaagaatttaagatagatggttgatgaaacgtttaaatgacaacacctttttgtgtccgtcctgaaattaagacgtttccttgctctgctggaatctttgaagtgatccttgaaacgatgtaattctccaccttgaaacgaaacgatgtaattctccaggatgcggttcaggaagaggcttatttggttcaattttatatgcccttcgatccctgggcatatttgtttttgtattgtcatcttgtatatgatcaaagctaggggtatttgtcgatggctgaaatgctgccgtccctaaaatgttagattgattccattctgcaaaaggaatacatttccattgtccagctgcaagaattttacatcgcaatcgattgttgcatgtccagtgattgtcagtacaacaagattacaatggactcttagttttacacgataaaag

SEQ ID NO: 44755 - DNA, 2141 bp, Zea Mays
caatgccccatcccattcgtggcgtgtgctcgccaaattggagcacgccgaggttacagcggcagcggtggacaatttggctggttggatcttatttgtgcgctcgtattgtatgttttatgcagagtcggaaggacgtggagggtcgctcttagtcatcaagaggtccgtctctttctgacgtgtttgcatacaaacagaaaatcttatagtttgccaatgtcgtttgttctagcaattttctatctactaaatcataaacatattagttgtttggcatagtagatcaaatgcataatctaattactggactagaaaaaatatgatccgttgtgctttgaatggtttctctctgtttcctagatgcagagcatggctcttattctttgcatgtttaaatcgattgtagtgatttgtttagttctgctctgcaaccctttgagagatacatacctgggtttgtatatttgtccatttcagaggtcaatgtattaccttgtcaggcagcttcaagatttctaaaattgacaaaaatggttggaagatcaaacatcgagaattcactttctacaagtggaacaattgcatatgagggcattgatctattgacatgtgcccatatttctatttatttgtcttcaagttctagatatctctcttattctgatttctagatatctctctaaaatttatggttgtgttagatatctctcttattctgatttctagatatccctcttattctgatttctagatgtgcttggtacaggtcagttttacctgatattctgtttttgttccttgtttgtttgaactgaggttgatttaggttgtgaacttgtgatgacaaaaataacatcctgctgataacctcaaatggcctgtctacgagatggaaaatggcctgatgataacctcaaaattttctccattatgggcaacaactattgagcagccaagatatcaacaacgaagaataaccaatttcgaattcacatcaatcaacaataggacctgtccctgatcaacttcaaaagcgcttaggaagacgttttcagctgaaaagaagaaaagtaaaatccggaaggcatgggatggaactaaagtcatttataatgttgcttcatggggcaccactgctgttggggtctacaataatcgagcattacttacgatcgcaactacaacgtttcagacttcctgccgtgtgatatccaagttcctttgaatattgtgtcaactactagggcatgttagaattgcttgcgtgtgtgcttttccattgttcaggtagcataaagtttgagaccatttgtttattctatgctgatgagttcgactgctaattagcaggaccttccagtcaaaagcagcatgtgtattgtataactgtaaatattgccttgatttgaacaaatttgttttttgtgctagaactttatttcacgaacttcatatgatagaccctactttagagtatttctttctcttctcatttcacattattgttatcacttctctttcaatgagaattttctttcttattttattttattttattttatgtagaagtgtagaaccatatagtctctttggctaatttaatatggttttgttatctggaaatcttgactaatatatttatcacatctttaaaagtggtattttgaattattagatcgacatgttaacaactgggtgggggtattctatctactatctttactactataacacactacttttaatagttctagtcgtggtttttgtgcgtcgcgcccccacccgctcgctcgttttccacgctgtgctatccaggagcgtccgtccgctctctgacatccacaaacactatcctttgagcattacatatctttttgaactgatttagttgtgcattaccattttattcaaaattttgtatgccgtcgcaacgcacgggcacttacctagtaataccatatattgacacatacatctaaatccatataaaaattacactgaaacatataataccatatattcactatacctctacactttgagaaatgaggaacaagatatatggttttgtagtcaaggaagaaaaaaaccaacattcgttaattgagaaggtgtttttttcagaaaaaataacaaaa

SEQ ID NO: 44756 - DNA, 2769 bp, Zea Mays
tcatatgctgattgtttgtgatatcattacaattacctcaacatgtataagaccttttcagcacaggtatcagatacaggcatcatgagtcgccaaaaacaatcagcagtccatgccttgatggttggcactttcttggcatgacacttgcttggcaccgctccatggttggcatgacctgtaattttgttcatcttcatcatgcctggacgtgtcctgtacgcctgtgttcgcgagacagagggcagcggcagcagcaggcatgtgccatgtgggccggtgcatggaagcatgtagtcagccattgtttgactccagcttttgtccctccaatacgatagtcagacagactgcaggaagcttatgtgtcatactacttctacttgttccgattagttaacgatgttgtactgggcagtccgggtgctgcaagccaccgacggtgtgcgggtacgcgtacgcgagcccgacggcgtggacgagcccggcggcggacgcggactgcgtggcgtggagcaacgaccccgacctgctctgctacgcctgcgcctcatgcaaggccggcgtgctgggcggcttgcacgagcagtggcgcagggccaccatcgcgctcatcttcgtctacgtcgtcggctgcagcgcgttccgtaacgcgcagaccgaggacctcttccgccgctacaaatggggaaattattaacgatctctcccactgatctactgcgtacgtacgtacacgccgacttgaaacggagtcggaaggacgtggagggtcgctcttagtcatcaagaggtccgtctctttctgacgtgtttgcatacaaacagaaaatcttatagtttgccaatgtcgtttgttctagcaattttctatctactaaatcataaacatattagttgtttggcatagtagatcaaatgcataatctaattactggactagaaaaaatatgatccgttgtgctttgaatggtttctctctgtttcctagatgcagagcatggctcttattctttgcatgtttaaatcgattgtagtgatttgtttagttctgctctgcaaccctttgagagatacatacctgggtttgtatatttgtccatttcagaggtcaatgtattaccttgtcaggcagcttcaagatttctaaaattgacaaaaatggttggaagatcaaacatcgagaattcactttctacaagtggaacaattgcatatgagggcattgatctattgacatgtgcccatatttctatttatttgtcttcaagttctagatatctctcttattctgatttctagatatctctctaaaatttatggttgtgttagatatctctcttattctgatttctagatatccctcttattctgatttctagatgtgcttggtacaggtcagttttacctgatattctgtttttgttccttgtttgtttgaactgaggttgatttaggttgtgaacttgtgatgacaaaaataacatcctgctgataacctcaaatggcctgtctacgagatggaaaatggcctgatgataacctcaaaattttctccattatgggcaacaactattgagcagccaagatatcaacaacgaagaataaccaatttcgaattcacatcaatcaacaataggacctgtccctgatcaacttcaaaagcgcttaggaagacgttttcagctgaaaagaagaaaagtaaaatccggaaggcatgggatggaactaaagtcatttataatgttgcttcatggggcaccactgctgttggggtctacaataatcgagcattacttacgatcgcaactacaacgtttcagacttcctgccgtgtgatatccaagttcctttgaatattgtgtcaactactagggcatgttagaattgcttgcgtgtgtgcttttccattgttcaggtagcataaagtttgagaccatttgtttattctatgctgatgagttcgactgctaattagcaggaccttccagtcaaaagcagcatgtgtattgtataactgtaaatattgccttgatttgaacaaatttgttttttgtgctagaactttatttcacgaacttcatatgatagaccctactttagagtatttctttctcttctcatttcacattattgttatcacttctctttcaatgagaattttctttcttattttattttattttattttatgtagaagtgtagaaccatatagtctctttggctaatttaatatggttttgttatctggaaatcttgactaatatatttatcacatctttaaaagtggtattttgaattattagatcgacatgttaacaactgggtgggggtattctatctactatctttactactataacacactacttttaatagttctagtcgtggtttttgtgcgtcgcgcccccacccgctcgctcgttttccacgctgtgctatccaggagcgtccgtccgctctctgacatccacaaacactatcctttgagcattacatatctttttgaactgatttagttgtgcattaccattttattcaaaattttgtatgccgtcgcaacgcacgggcacttacctagtaataccatatattgacacatacatctaaatccatataaaaattacactgaaacatataataccatatattcactatacctctacactttgagaaatgaggaacaagatatatggttttgtagtcaaggaagaaaaaaaccaacattcgttaattgagaaggtgtttttttcagaaaaaataacaaaa

SEQ ID NO: 44757 - DNA, 3000 bp, Zea Mays
ctcagatcaataccgcggccgtcgtcttctctccccccgcatggtggcccgtcgtccccttccaaccctcctccctcgcctgccggtgtccctttcttcccccgtgtggcggctcgcacccgcacgagatctagactaccttcccaccctcctcccctgcccgctcgcctgtcggcgtccctttcttctccccgtgcggcggcccgcgcccgcacgagatctagactagacgccgagggcacgacgctttgcctgcctcgcctccgtcccctcgtcgcctccacgactccacctctacctcctcggtgagagagagagagagcgggggagagagggcactagaccaccagcaagcatgaggcagaggaggagcgtggcggcgccgctacactctaatccgctggctaccccatcaggagagagagagaggggggagagaaggcaccagacaccgccagtaagcatgaggcagagaaggcaccagacatcgcgctatcctccgcatccgccgcccgtcggcttcgtccgctgcgagaattctcgtgtcgcccatcggcgacaactgtccgggtgctgcaagccaccgacggtgtgcgggtacgcgtacgcgagcccgacggcgtggacgagcccggcggcggacgcggactgcgtggcgtggagcaacgaccccgacctgctctgctacgcctgcgcctcatgcaaggccggcgtgctgggcggcttgcacgagcagtggcgcagggccaccatcgcgctcatcttcgtctacgtcgtcggctgcagcgcgttccgtaacgcgcagaccgaggacctcttccgccgctacaaatggggaaattattaacgatctctcccactgatctactgcgtacgtacgtacacgccgacttgaaacgggattttcagcaatccggttcaccaagatttgagcccaatgccccatcccattcgtggcgtgtgctcgccaaattggagcacgccagtcggaaggacgtggagggtcgctcttagtcatcaagaggtccgtctctttctgacgtgtttgcatacaaacagaaaatcttatagtttgccaatgtcgtttgttctagcaattttctatctactaaatcataaacatattagttgtttggcatagtagatcaaatgcataatctaattactggactagaaaaaatatgatccgttgtgctttgaatggtttctctctgtttcctagatgcagagcatggctcttattctttgcatgtttaaatcgattgtagtgatttgtttagttctgctctgcaaccctttgagagatacatacctgggtttgtatatttgtccatttcagaggtcaatgtattaccttgtcaggcagcttcaagatttctaaaattgacaaaaatggttggaagatcaaacatcgagaattcactttctacaagtggaacaattgcatatgagggcattgatctattgacatgtgcccatatttctatttatttgtcttcaagttctagatatctctcttattctgatttctagatatctctctaaaatttatggttgtgttagatatctctcttattctgatttctagatatccctcttattctgatttctagatgtgcttggtacaggtcagttttacctgatattctgtttttgttccttgtttgtttgaactgaggttgatttaggttgtgaacttgtgatgacaaaaataacatcctgctgataacctcaaatggcctgtctacgagatggaaaatggcctgatgataacctcaaaattttctccattatgggcaacaactattgagcagccaagatatcaacaacgaagaataaccaatttcgaattcacatcaatcaacaataggacctgtccctgatcaacttcaaaagcgcttaggaagacgttttcagctgaaaagaagaaaagtaaaatccggaaggcatgggatggaactaaagtcatttataatgttgcttcatggggcaccactgctgttggggtctacaataatcgagcattacttacgatcgcaactacaacgtttcagacttcctgccgtgtgatatccaagttcctttgaatattgtgtcaactactagggcatgttagaattgcttgcgtgtgtgcttttccattgttcaggtagcataaagtttgagaccatttgtttattctatgctgatgagttcgactgctaattagcaggaccttccagtcaaaagcagcatgtgtattgtataactgtaaatattgccttgatttgaacaaatttgttttttgtgctagaactttatttcacgaacttcatatgatagaccctactttagagtatttctttctcttctcatttcacattattgttatcacttctctttcaatgagaattttctttcttattttattttattttattttatgtagaagtgtagaaccatatagtctctttggctaatttaatatggttttgttatctggaaatcttgactaatatatttatcacatctttaaaagtggtattttgaattattagatcgacatgttaacaactgggtgggggtattctatctactatctttactactataacacactacttttaatagttctagtcgtggtttttgtgcgtcgcgcccccacccgctcgctcgttttccacgctgtgctatccaggagcgtccgtccgctctctgacatccacaaacactatcctttgagcattacatatctttttgaactgatttagttgtgcattaccattttattcaaaattttgtatgccgtcgcaacgcacgggcacttacctagtaataccatatattgacacatacatctaaatccatataaaaattacactgaaacatataataccatatattcactatacctctacactttgagaaatgaggaacaagatatatggttttgtagtcaaggaagaaaaaaaccaacattcgttaattgagaaggtgtttttttcagaaaaaataacaaaa

SEQ ID NO: 44758 - DNA, 4202 bp, Zea Mays
ccgcgaatcgcggccgccgcatcctcagatcaataccgcggccgtcgtcttctctccccccgcatggtggcccgtcgtccccttccaaccctcctccctcgcctgccggtgtccctttcttcccccgtgtggcggctcgcacccgcacgagatctagactaccttcccaccctcctcccctgcccgctcgcctgtcggcgtccctttcttctccccgtgcggcggcccgcgcccgcacgagatctagactagacgccgagggcacgacgctttgcctgcctcgcctccgtcccctcgtcgcctccacgactccacctctacctcctcggtgagagagagagagagcgggggagagagggcactagaccaccagcaagcatgaggcagaggaggagcgtggcggcgccgctacactctaatccgctggctaccccatcaggagagagagagaggggggagagaaggcaccagacaccgccagtaagcatgaggcagagaaggcaccagacatcgcgctatcctccgcatccgccgcccgtcggcttcgtccgctgcgagaattctcgtgtcgcccatcggcgacaactgtccgggtgctgcaagccaccgacggtgtgcgggtacgcgtacgcgagcccgacggcgtggacgagcccggcggcggacgcggactgcgtggcgtggagcaacgaccccgacctgctctgctacgcctgcgcctcatgcaaggccggcgtgctgggcggcttgcacgagcagtggcgcagggccaccatcgcgctcatcttcgtctacgtcgtcggctgcagcgcgttccgtaacgcgcagaccgaggacctcttccgccgctacaaatggggaaattattaacgatctctcccactgatctactgcgtacgtacgtacacgccgacttgaaacgggattttcagcaatccggttcaccaagatttgagcccaatgccccatcccattcgtggcgtgtgctcgccaaattggagcacgccgtaagcgctcttcgcgtccttttgttggggatggttgcgagttgtgttaaggtcgctcagcaattatgtgttacatgcaaaataaacatgaaaagaaatggtgtgtttaaatctatactactctattatctatacaactatattaaaaacctaaatatggtcagctggttactctattaagaacctagattcacatgtataagaccggtagcagtcattacaaacctccatgcggtggggtggattggctcatccacatttacaagtactcggatagacatcaattagtattagataatatggatttcggtctcaaaggtatgtttctactattaacaatacatgcaggctcaatatataaaacttgtaagtcgttatagatcagctgcaatcaatttatgaataacaaatattaagtactagatatagagcaattgcaaaataattagctgtataattgaacttgttagttttaaggctatgtcttttcacttttgctcctcccccattagaaacagtagcctatatttatataataacaccggacattctcataggtgaatgaagaactaaatttcttgtatgtgctgcagcacaatttgtgccacagattcagctcaaaagtcgatacgataacaaaattggtgtttttatatgttcttcaacatttcttttctgtacgttgaatttagataattgcagtggttgattctccctccttttttatctttgttatttcttgggccgtggtggaggaggttacagcggcagcggtggacaatttggctggttggatcttatttgtgcgctcgtattgtatgttttatgcagagtcggaaggacgtggagggtcgctcttagtcatcaagaggttgtgaacttgtgatgacaaaaataacatcctgctgataacctcaaatggcctgtctacgagatggaaaatggcctgatgataacctcaaaattttctccattatgggcaacaactattgagcagccaagatatcaacaacgaagaataaccaatttcgaattcacatcaatcaacaatagaacctctccagttgccttaacaagccttccaagaactgcacgcgagtcgcccaggtttgcaacatagagaggcccagcacagattacaccaacaaggcaacaggagccaattgatgcaatttgaggcttgaaagaccattccttgatgactagagaaagaaagccctcagtttcttggaaagcttttcggatcacgtttgctaacatggacttgtgctcagttgcaaaccctggaaaagaaagatagttttaatacactgacagattaagaaaactaagaataagtaatgtaaaaaaacaaagagcaaatatgacttgagttcattcccatggaaggcaatgcatcagatattggagaaatttgacgatgagggatgtaataggatagctatcttttgttggctaccccagctttggttctgtaaaacctttaattgttttcgataaaagcagagatctttaaaaaaagaataagtaatgtaacacacaagacagaatcagaaccaagctacataattaaataaaattgtctctttttttctgggataaccttaatacaatttcaactgccatccaatatccgatcatcagatctgccaaaccaactatcatttctattctgaaggcaataagtacaaatgcactttttgagatagggtcagcatcgtcatcatgctaacagttatagaaatgtgacccataaatcaaagcagcacaaaaaaaaagttgggacttgatcatcattgctaactgaatacttagtttctatctatataaaatagttgaatcatcataaccaactcattgtgccagcgttagttcagttagtggctattttttccgggtagagtatcaggcatccacacaaatgcatctatttgtaatagagatgaagcacacacttctaaacagatggttctccaggtataattcaaagaaaaatagccactaactggatctttgtatgagaggtgctttacatatttaatgtgtgaatttcatgtctatgcaggacctgtccctgatcaacttcaaaagcgcttaggaagacgttttcagctgaaaagaagaaaagtaaaatccggaaggcatgggatggaactaaagtcatttataatgttgcttcatggggcaccactgctgttggggtctacaataatcgagcattacttacgatcgcaactacaacgtttcagacttcctgccgtgtgatatccaagttcctttgaatattgtgtcaactactagggcatgttagaattgcttgcgtgtgtgcttttccattgttcaggtagcataaagtttgagaccatttgtttattctatgctgatgagttcgactgctaattagcaggaccttccagtcaaaagcagcatgtgtattgtataactgtaaatattgccttgatttgaacaaatttgttttttgtgctagaactttatttcacgaacttcatatgatagaccctactttagagtatttctttctcttctcatttcacattattgttatcacttctctttcaatgagaattttctttcttattttattttattttattttatgtagaagtgtagaaccatatagtctctttggctaatttaatatggttttgttatctggaaatcttgactaatatatttatcacatctttaaaagtggtattttgaattattagatcgacatgttaacaactgggtgggggtattctatctactatctttactactataacacactacttttaatagttctagtcgtggtttttgtgcgtcgcgcccccacccgctcgctcgttttccacgctgtgctatccaggagcgtccgtccgctctctgacatccacaaacactatcctttgagcattacatatctttttgaactgatttagttgtgcattaccattttattcaaaattttgtatgccgtcgcaacgcacgggcacttacctagtaataccatatattgacacatacatctaaatccatataaaaattacactgaaacatataataccatatattcactatacctctacactttgagaaatgaggaacaagatatatggttttgtagtcaaggaagaaaaaaaccaacattcgttaattgagaaggtgtttttttcagaaaaaataacaaaa

SEQ ID NO: 44759 - DNA, 3028 bp, Zea Mays
caactccggacgcgcctgtcgcgccgcgaatcgcggccgccgcatcctcagatcaataccgcggccgtcgtcttctctccccccgcatggtggcccgtcgtccccttccaaccctcctccctcgcctgccggtgtccctttcttcccccgtgtggcggctcgcacccgcacgagatctagactaccttcccaccctcctcccctgcccgctcgcctgtcggcgtccctttcttctccccgtgcggcggcccgcgcccgcacgagatctagactagacgccgagggcacgacgctttgcctgcctcgcctccgtcccctcgtcgcctccacgactccacctctacctcctcggtgagagagagagagagcgggggagagagggcactagaccaccagcaagcatgaggcagaggaggagcgtggcggcgccgctacactctaatccgctggctaccccatcaggagagagagagaggggggagagaaggcaccagacaccgccagtaagcatgaggcagagaaggcaccagacatcgcgctatcctccgcatccgccgcccgtcggcttcgtccgctgcgagaattctcgtgtcgcccatcggcgacaactgtccgggtgctgcaagccaccgacggtgtgcgggtacgcgtacgcgagcccgacggcgtggacgagcccggcggcggacgcggactgcgtggcgtggagcaacgaccccgacctgctctgctacgcctgcgcctcatgcaaggccggcgtgctgggcggcttgcacgagcagtggcgcagggccaccatcgcgctcatcttcgtctacgtcgtcggctgcagcgcgttccgtaacgcgcagaccgaggacctcttccgccgctacaaatggggaaattattaacgatctctcccactgatctactgcgtacgtacgtacacgccgacttgaaacggcggcagcggtggacaatttggctggttggatcttatttgtgcgctcgtattgtatgttttatgcagagtcggaaggacgtggagggtcgctcttagtcatcaagaggtccgtctctttctgacgtgtttgcatacaaacagaaaatcttatagtttgccaatgtcgtttgttctagcaattttctatctactaaatcataaacatattagttgtttggcatagtagatcaaatgcataatctaattactggactagaaaaaatatgatccgttgtgctttgaatggtttctctctgtttcctagatgcagagcatggctcttattctttgcatgtttaaatcgattgtagtgatttgtttagttctgctctgcaaccctttgagagatacatacctgggtttgtatatttgtccatttcagaggtcaatgtattaccttgtcaggcagcttcaagatttctaaaattgacaaaaatggttggaagatcaaacatcgagaattcactttctacaagtggaacaattgcatatgagggcattgatctattgacatgtgcccatatttctatttatttgtcttcaagttctagatatctctcttattctgatttctagatatctctctaaaatttatggttgtgttagatatctctcttattctgatttctagatatccctcttattctgatttctagatgtgcttggtacaggtcagttttacctgatattctgtttttgttccttgtttgtttgaactgaggttgatttaggttgtgaacttgtgatgacaaaaataacatcctgctgataacctcaaatggcctgtctacgagatggaaaatggcctgatgataacctcaaaattttctccattatgggcaacaactattgagcagccaagatatcaacaacgaagaataaccaatttcgaattcacatcaatcaacaataggacctgtccctgatcaacttcaaaagcgcttaggaagacgttttcagctgaaaagaagaaaagtaaaatccggaaggcatgggatggaactaaagtcatttataatgttgcttcatggggcaccactgctgttggggtctacaataatcgagcattacttacgatcgcaactacaacgtttcagacttcctgccgtgtgatatccaagttcctttgaatattgtgtcaactactagggcatgttagaattgcttgcgtgtgtgcttttccattgttcaggtagcataaagtttgagaccatttgtttattctatgctgatgagttcgactgctaattagcaggaccttccagtcaaaagcagcatgtgtattgtataactgtaaatattgccttgatttgaacaaatttgttttttgtgctagaactttatttcacgaacttcatatgatagaccctactttagagtatttctttctcttctcatttcacattattgttatcacttctctttcaatgagaattttctttcttattttattttattttattttatgtagaagtgtagaaccatatagtctctttggctaatttaatatggttttgttatctggaaatcttgactaatatatttatcacatctttaaaagtggtattttgaattattagatcgacatgttaacaactgggtgggggtattctatctactatctttactactataacacactacttttaatagttctagtcgtggtttttgtgcgtcgcgcccccacccgctcgctcgttttccacgctgtgctatccaggagcgtccgtccgctctctgacatccacaaacactatcctttgagcattacatatctttttgaactgatttagttgtgcattaccattttattcaaaattttgtatgccgtcgcaacgcacgggcacttacctagtaataccatatattgacacatacatctaaatccatataaaaattacactgaaacatataataccatatattcactatacctctacactttgagaaatgaggaacaagatatatggttttgtagtcaaggaagaaaaaaaccaacattcgttaattgagaaggtgtttttttcagaaaaaataacaaaa

SEQ ID NO: 44760 - DNA, 3877 bp, Zea Mays
caactccggacgcgcctgtcgcgccgcgaatcgcggccgccgcatcctcagatcaataccgcggccgtcgtcttctctccccccgcatggtggcccgtcgtccccttccaaccctcctccctcgcctgccggtgtccctttcttcccccgtgtggcggctcgcacccgcacgagatctagactaccttcccaccctcctcccctgcccgctcgcctgtcggcgtccctttcttctccccgtgcggcggcccgcgcccgcacgagatctagactagacgccgagggcacgacgctttgcctgcctcgcctccgtcccctcgtcgcctccacgactccacctctacctcctcggtgagagagagagagagcgggggagagagggcactagaccaccagcaagcatgaggcagaggaggagcgtggcggcgccgctacactctaatccgctggctaccccatcaggagagagagagaggggggagagaaggcaccagacaccgccagtaagcatgaggcagagaaggcaccagacatcgcgctatcctccgcatccgccgcccgtcggcttcgtccgctgcgagaattctcgtgtcgcccatcggcgacaactgtccgggtgctgcaagccaccgacggtgtgcgggtacgcgtacgcgagcccgacggcgtggacgagcccggcggcggacgcggactgcgtggcgtggagcaacgaccccgacctgctctgctacgcctgcgcctcatgcaaggccggcgtgctgggcggcttgcacgagcagtggcgcagggccaccatcgcgctcatcttcgtctacgtcgtcggctgcagcgcgttccgtaacgcgcagaccgaggacctcttccgccgctacaaatggggaaattattaacgatctctcccactgatctactgcgtacgtacgtacacgccgacttgaaacgggattttcagcaatccggttcaccaagatttgagcccaatgccccatcccattcgtggcgtgtgctcgccaaattggagcacgccgtaagcgctcttcgcgtccttttgttggggatggttgcgagttgtgttaaggtcgctcagcaattatgtgttacatgcaaaataaacatgaaaagaaatggtgtgtttaaatctatactactctattatctatacaactatattaaaaacctaaatatggtcagctggttactctattaagaacctagattcacatgtataagaccggtagcagtcattacaaacctccatgcggtggggtggattggctcatccacatttacaagtactcggatagacatcaattagtattagataatatggatttcggtctcaaaggtatgtttctactattaacaatacatgcaggctcaatatataaaacttgtaagtcgttatagatcagctgcaatcaatttatgaataacaaatattaagtactagatatagagcaattgcaaaataattagctgtataattgaacttgttagttttaaggctatgtcttttcacttttgctcctcccccattagaaacagtagcctatatttatataataacaccggacattctcataggtgaatgaagaactaaatttcttgtatgtgctgcagcacaatttgtgccacagattcagctcaaaagtcgatacgataacaaaattggtgtttttatatgttcttcaacatttcttttctgtacgttgaatttagataattgcagtggttgattctccctccttttttatctttgttatttcttgggccgtggtggaggaggttacagcggcagcggtggacaatttggctggttggatcttatttgtgcgctcgtattgtatgttttatgcagagtcggaaggacgtggagggtcgctcttagtcatcaagaggtccgtctctttctgacgtgtttgcatacaaacagaaaatcttatagtttgccaatgtcgtttgttctagcaattttctatctactaaatcataaacatattagttgtttggcatagtagatcaaatgcataatctaattactggactagaaaaaatatgatccgttgtgctttgaatggtttctctctgtttcctagatgcagagcatggctcttattctttgcatgtttaaatcgattgtagtgatttgtttagttctgctctgcaaccctttgagagatacatacctgggtttgtatatttgtccatttcagaggtcaatgtattaccttgtcaggcagcttcaagatttctaaaattgacaaaaatggttggaagatcaaacatcgagaattcactttctacaagtggaacaattgcatatgagggcattgatctattgacatgtgcccatatttctatttatttgtcttcaagttctagatatctctcttattctgatttctagatatctctctaaaatttatggttgtgttagatatctctcttattctgatttctagatatccctcttattctgatttctagatgtgcttggtacaggtcagttttacctgatattctgtttttgttccttgtttgtttgaactgaggttgatttaggttgtgaacttgtgatgacaaaaataacatcctgctgataacctcaaatggcctgtctacgagatggaaaatggcctgatgataacctcaaaattttctccattatgggcaacaactattgagcagccaagatatcaacaacgaagaataaccaatttcgaattcacatcaatcaacaataggacctgtccctgatcaacttcaaaagcgcttaggaagacgttttcagctgaaaagaagaaaagtaaaatccggaaggcatgggatggaactaaagtcatttataatgttgcttcatggggcaccactgctgttggggtctacaataatcgagcattacttacgatcgcaactacaacgtttcagacttcctgccgtgtgatatccaagttcctttgaatattgtgtcaactactagggcatgttagaattgcttgcgtgtgtgcttttccattgttcaggtagcataaagtttgagaccatttgtttattctatgctgatgagttcgactgctaattagcaggaccttccagtcaaaagcagcatgtgtattgtataactgtaaatattgccttgatttgaacaaatttgttttttgtgctagaactttatttcacgaacttcatatgatagaccctactttagagtatttctttctcttctcatttcacattattgttatcacttctctttcaatgagaattttctttcttattttattttattttattttatgtagaagtgtagaaccatatagtctctttggctaatttaatatggttttgttatctggaaatcttgactaatatatttatcacatctttaaaagtggtattttgaattattagatcgacatgttaacaactgggtgggggtattctatctactatctttactactataacacactacttttaatagttctagtcgtggtttttgtgcgtcgcgcccccacccgctcgctcgttttccacgctgtgctatccaggagcgtccgtccgctctctgacatccacaaacactatcctttgagcattacatatctttttgaactgatttagttgtgcattaccattttattcaaaattttgtatgccgtcgcaacgcacgggcacttacctagtaataccatatattgacacatacatctaaatccatataaaaattacactgaaacatataataccatatattcactatacctctacactttgagaaatgaggaacaagatatatggttttgtagtcaaggaagaaaaaaaccaacattcgttaattgagaaggtgtttttttcagaaaaaataacaaaa

SEQ ID NO: 44761 - DNA, 4143 bp, Zea Mays
ctgccaactccggacgcgcctgtcgcgccgcgaatcgcggccgccgcatcctcagatcaataccgcggccgtcgtcttctctccccccgcatggtggcccgtcgtccccttccaaccctcctccctcgcctgccggtgtccctttcttcccccgtgtggcggctcgcacccgcacgagatctagactaccttcccaccctcctcccctgcccgctcgcctgtcggcgtccctttcttctccccgtgcggcggcccgcgcccgcacgagatctagactagacgccgagggcacgacgctttgcctgcctcgcctccgtcccctcgtcgcctccacgactccacctctacctcctcggtgagagagagagagagcgggggagagagggcactagaccaccagcaagcatgaggcagaggaggagcgtggcggcgccgctacactctaatccgctggctaccccatcaggagagagagagaggggggagagaaggcaccagacaccgccagtaagcatgaggcagagaaggcaccagacatcgcgctatcctccgcatccgccgcccgtcggcttcgtccgctgcgagaattctcgtgtcgcccatcggcgacaactgtccgggtgctgcaagccaccgacggtgtgcgggtacgcgtacgcgagcccgacggcgtggacgagcccggcggcggacgcggactgcgtggcgtggagcaacgaccccgacctgctctgctacgcctgcgcctcatgcaaggccggcgtgctgggcggcttgcacgagcagtggcgcagggccaccatcgcgctcatcttcgtctacgtcgtcggctgcagcgcgttccgtaacgcgcagaccgaggacctcttccgccgctacaaatggggaaattattaacgatctctcccactgatctactgcgtacgtacgtacacgccgacttgaaacgggtgagttgcgctttctgtttctggccgtcttttttattattattttgcgaaatcgatctgtttctggtgctcttggcacagtggttagtgttgtagaatgtggacaacagctagaatgctagatgttaattctataggagcttatttatgtatctattctatctctatctgcgatatctgaagctaaggtaacatagattgttccatgagacatgcctacttttctggccacaggattttcagcaatccggttcaccaagatttgagcccaatgccccatcccattcgtggcgtgtgctcgccaaattggagcacgccagtcggaaggacgtggagggtcgctcttagtcatcaagaggttgtgaacttgtgatgacaaaaataacatcctgctgataacctcaaatggcctgtctacgagatggaaaatggcctgatgataacctcaaaattttctccattatgggcaacaactattgagcagccaagatatcaacaacgaagaataaccaatttcgaattcacatcaatcaacaataggtatgcactactgctctcaggccattttccatcatcatttttctctcatttttataatgggacaactatgaaaactgaaaatgtaatttgctggaatattaatttaatgattatttttctgaacacacaatgtttgtagattgtctgtttatatgaaggtagcagaactctgctgaaatcctgctgccagttttacaaatatattcagtttagtttgtttgctgaaacacaccaatctaatcctgctatccagttttgctgaaataatgtgagccagttttgctagaatcccgttgtccagttttgccatgtccttacaattacaccataaagtggaaaatcagcaaccagatcaagagtatagatttttgtgtgcctggatgagacccttcactcgccaaacgttatgtttgagaaccacaatacgtggatcatcaggatgtgatgactgcagctcttgtctaacttcttcatagcatgcattgtgctccgctgacaactgcgtggccagaacctctccagttgccttaacaagccttccaagaactgcacgcgagtcgcccaggtttgcaacatagagaggcccagcacagattacaccaacaaggcaacaggagccaattgatgcaatttgaggcttgaaagaccattccttgatgactagagaaagaaagccctcagtttcttggaaagcttttcggatcacgtttgctaacatggacttgtgctcagttgcaaaccctggaaaagaaagatagttttaatacactgacagattaagaaaactaagaataagtaatgtaaaaaaacaaagagcaaatatgacttgagttcattcccatggaaggcaatgcatcagatattggagaaatttgacgatgagggatgtaataggatagctatcttttgttggctaccccagctttggttctgtaaaacctttaattgttttcgataaaagcagagatctttaaaaaaagaataagtaatgtaacacacaagacagaatcagaaccaagctacataattaaataaaattgtctctttttttctgggataaccttaatacaatttcaactgccatccaatatccgatcatcagatctgccaaaccaactatcatttctattctgaaggcaataagtacaaatgcactttttgagatagggtcagcatcgtcatcatgctaacagttatagaaatgtgacccataaatcaaagcagcacaaaaaaaaagttgggacttgatcatcattgctaactgaatacttagtttctatctatataaaatagttgaatcatcataaccaactcattgtgccagcgttagttcagttagtggctattttttccgggtagagtatcaggcatccacacaaatgcatctatttgtaatagagatgaagcacacacttctaaacagatggttctccaggtataattcaaagaaaaatagccactaactggatctttgtatgagaggtgctttacatatttaatgtgtgaatttcatgtctatgcaggacctgtccctgatcaacttcaaaagcgcttaggaagacgttttcagctgaaaagaagaaaagtaaaatccggaaggcatgggatggaactaaagtcatttataatgttgcttcatggggcaccactgctgttggggtctacaataatcgagcattacttacgatcgcaactacaacgtttcagacttcctgccgtgtgatatccaagttcctttgaatattgtgtcaactactagggcatgttagaattgcttgcgtgtgtgcttttccattgttcaggtagcataaagtttgagaccatttgtttattctatgctgatgagttcgactgctaattagcaggaccttccagtcaaaagcagcatgtgtattgtataactgtaaatattgccttgatttgaacaaatttgttttttgtgctagaactttatttcacgaacttcatatgatagaccctactttagagtatttctttctcttctcatttcacattattgttatcacttctctttcaatgagaattttctttcttattttattttattttattttatgtagaagtgtagaaccatatagtctctttggctaatttaatatggttttgttatctggaaatcttgactaatatatttatcacatctttaaaagtggtattttgaattattagatcgacatgttaacaactgggtgggggtattctatctactatctttactactataacacactacttttaatagttctagtcgtggtttttgtgcgtcgcgcccccacccgctcgctcgttttccacgctgtgctatccaggagcgtccgtccgctctctgacatccacaaacactatcctttgagcattacatatctttttgaactgatttagttgtgcattaccattttattcaaaattttgtatgccgtcgcaacgcacgggcacttacctagtaataccatatattgacacatacatctaaatccatataaaaattacactgaaacatataataccatatattcactatacctctacactttgagaaatgaggaacaagatatatggttttgtagtcaaggaagaaaaaaaccaacattcgttaattgagaaggtgtttttttcagaaaaaataacaaaa

SEQ ID NO: 44762 - DNA, 2982 bp, Zea Mays
caacgcctctcaagtgatctaaagatcaaacttaagtaccacattattctttcttatatcaaatccctctgtgagaaatctccacaagttggagtctctcacgctttacacgagtgatctcaatcaaagcaaaggagtaaggagggagtagaaacacacataagagtacaagagcagcaacaccacgcatacaagcaaaagtgagaatgcaataatcaaaacgacagagtttctcttaagaaaacactcaattctctatagcatgagtgtgtggttgcattgaatcggagtttaagagtgctcttagtatacttggtaacaactctatgcacctagaggagtcctttagtcatttcttctttgtttggaaggccctggacgccttctgtccgtgggcgcaccgaacagtctggtacacgttggacagtgaacattgcacgatttccttccttttcctgcgaagccaaccgttgccggtcgttactgccattgattatgagaaatcaatataaactctagaacagagctactctacacagagttttggaatagagctgtttttggaatggaatggagccataccaaacatgtccttattaaatgtggggtatgtctaaagcatatctctactactatttatgaacatagtgtaggcgtgcacgattgcatggcgcacggttctgccaactccggacgcgcctgtcgcgccgcgaatcgcggccgccgcatcctcagatcaataccgcggccgtcgtcttctctccccccgcatggtggcccgtcgtccccttccaaccctcctccctcgcctgccggtgtccctttcttcccccgtgtggcggctcgcacccgcacgagatctagactaccttcccaccctcctcccctgcccgctcgcctgtcggcgtccctttcttctccccgtgcggcggcccgcgcccgcacgagatctagactagacgccgagggcacgacgctttgcctgcctcgcctccgtcccctcgtcgcctccacgactccacctctacctcctcggtgagagagagagagagcgggggagagagggcactagaccaccagcaagcatgaggcagaggaggagcgtggcggcgccgctacactctaatccgctggctaccccatcaggagagagagagaggggggagagaaggcaccagacaccgccagtaagcatgaggcagagaaggcaccagacatcgcgctatcctccgcatccgccgcccgtcggcttcgtccgctgcgagaattctcgtgtcgcccatcggcgacaactgtccgggtgctgcaagccaccgacggtgtgcgggtacgcgtacgcgagcccgacggcgtggacgagcccggcggcggacgcggactgcgtggcgtggagcaacgaccccgacctgctctgctacgcctgcgcctcatgcaaggccggcgtgctgggcggcttgcacgagcagtggcgcagggccaccatcgcgctcatcttcgtctacgtcgtcggctgcagcgcgttccgtaacgcgcagaccgaggacctcttccgccgctacaaatggggaaattattaacgatctctcccactgatctactgcgtacgtacgtacacgccgacttgaaacggagtcggaaggacgtggagggtcgctcttagtcatcaagaggttgtgaacttgtgatgacaaaaataacatcctgctgataacctcaaatggcctgtctacgagatggaaaatggcctgatgataacctcaaaattttctccattatgggcaacaactattgagcagccaagatatcaacaacgaagaataaccaatttcgaattcacatcaatcaacaataggacctgtccctgatcaacttcaaaagcgcttaggaagacgttttcagctgaaaagaagaaaagtaaaatccggaaggcatgggatggaactaaagtcatttataatgttgcttcatggggcaccactgctgttggggtctacaataatcgagcattacttacgatcgcaactacaacgtttcagacttcctgccgtgtgatatccaagttcctttgaatattgtgtcaactactagggcatgttagaattgcttgcgtgtgtgcttttccattgttcaggtagcataaagtttgagaccatttgtttattctatgctgatgagttcgactgctaattagcaggaccttccagtcaaaagcagcatgtgtattgtataactgtaaatattgccttgatttgaacaaatttgttttttgtgctagaactttatttcacgaacttcatatgatagaccctactttagagtatttctttctcttctcatttcacattattgttatcacttctctttcaatgagaattttctttcttattttattttattttattttatgtagaagtgtagaaccatatagtctctttggctaatttaatatggttttgttatctggaaatcttgactaatatatttatcacatctttaaaagtggtattttgaattattagatcgacatgttaacaactgggtgggggtattctatctactatctttactactataacacactacttttaatagttctagtcgtggtttttgtgcgtcgcgcccccacccgctcgctcgttttccacgctgtgctatccaggagcgtccgtccgctctctgacatccacaaacactatcctttgagcattacatatctttttgaactgatttagttgtgcattaccattttattcaaaattttgtatgccgtcgcaacgcacgggcacttacctagtaataccatatattgacacatacatctaaatccatataaaaattacactgaaacatataataccatatattcactatacctctacactttgagaaatgaggaacaagatatatggttttgtagtcaaggaagaaaaaaaccaacattcgttaattgagaaggtgtttttttcagaaaaaataacaaaa

SEQ ID NO: 44763 - DNA, 4810 bp, Zea Mays
gttaaagattgcactcaacgcctctcaagtgatctaaagatcaaacttaagtaccacattattctttcttatatcaaatccctctgtgagaaatctccacaagttggagtctctcacgctttacacgagtgatctcaatcaaagcaaaggagtaaggagggagtagaaacacacataagagtacaagagcagcaacaccacgcatacaagcaaaagtgagaatgcaataatcaaaacgacagagtttctcttaagaaaacactcaattctctatagcatgagtgtgtggttgcattgaatcggagtttaagagtgctcttagtatacttggtaacaactctatgcacctagaggagtcctttagtcatttcttctttgtttggaaggccctggacgccttctgtccgtgggcgcaccgaacagtctggtacacgttggacagtgaacattgcacgatttccttccttttcctgcgaagccaaccgttgccggtcgttactgccattgattatgagaaatcaatataaactctagaacagagctactctacacagagttttggaatagagctgtttttggaatggaatggagccataccaaacatgtccttattaaatgtggggtatgtctaaagcatatctctactactatttatgaacatagtgtaggcgtgcacgattgcatggcgcacggttctgccaactccggacgcgcctgtcgcgccgcgaatcgcggccgccgcatcctcagatcaataccgcggccgtcgtcttctctccccccgcatggtggcccgtcgtccccttccaaccctcctccctcgcctgccggtgtccctttcttcccccgtgtggcggctcgcacccgcacgagatctagactaccttcccaccctcctcccctgcccgctcgcctgtcggcgtccctttcttctccccgtgcggcggcccgcgcccgcacgagatctagactagacgccgagggcacgacgctttgcctgcctcgcctccgtcccctcgtcgcctccacgactccacctctacctcctcggtgagagagagagagagcgggggagagagggcactagaccaccagcaagcatgaggcagaggaggagcgtggcggcgccgctacactctaatccgctggctaccccatcaggagagagagagaggggggagagaaggcaccagacaccgccagtaagcatgaggcagagaaggcaccagacatcgcgctatcctccgcatccgccgcccgtcggcttcgtccgctgcgagaattctcgtgtcgcccatcggcgacaactgtccgggtgctgcaagccaccgacggtgtgcgggtacgcgtacgcgagcccgacggcgtggacgagcccggcggcggacgcggactgcgtggcgtggagcaacgaccccgacctgctctgctacgcctgcgcctcatgcaaggccggcgtgctgggcggcttgcacgagcagtggcgcagggccaccatcgcgctcatcttcgtctacgtcgtcggctgcagcgcgttccgtaacgcgcagaccgaggacctcttccgccgctacaaatggggaaattattaacgatctctcccactgatctactgcgtacgtacgtacacgccgacttgaaacgggtgagttgcgctttctgtttctggccgtcttttttattattattttgcgaaatcgatctgtttctggtgctcttggcacagtggttagtgttgtagaatgtggacaacagctagaatgctagatgttaattctataggagcttatttatgtatctattctatctctatctgcgatatctgaagctaaggtaacatagattgttccatgagacatgcctacttttctggccacaggattttcagcaatccggttcaccaagatttgagcccaatgccccatcccattcgtggcgtgtgctcgccaaattggagcacgccgtaagcgctcttcgcgtccttttgttggggatggttgcgagttgtgttaaggtcgctcagcaattatgtgttacatgcaaaataaacatgaaaagaaatggtgtgtttaaatctatactactctattatctatacaactatattaaaaacctaaatatggtcagctggttactctattaagaacctagattcacatgtataagaccggtagcagtcattacaaacctccatgcggtggggtggattggctcatccacatttacaagtactcggatagacatcaattagtattagataatatggatttcggtctcaaaggtatgtttctactattaacaatacatgcaggctcaatatataaaacttgtaagtcgttatagatcagctgcaatcaatttatgaataacaaatattaagtactagatatagagcaattgcaaaataattagctgtataattgaacttgttagttttaaggctatgtcttttcacttttgctcctcccccattagaaacagtagcctatatttatataataacaccggacattctcataggtgaatgaagaactaaatttcttgtatgtgctgcagcacaatttgtgccacagattcagctcaaaagtcgatacgataacaaaattggtgtttttatatgttcttcaacatttcttttctgtacgttgaatttagataattgcagtggttgattctccctccttttttatctttgttatttcttgggccgtggtggaggaggttacagcggcagcggtggacaatttggctggttggatcttatttgtgcgctcgtattgtatgttttatgcagagtcggaaggacgtggagggtcgctcttagtcatcaagaggtccgtctctttctgacgtgtttgcatacaaacagaaaatcttatagtttgccaatgtcgtttgttctagcaattttctatctactaaatcataaacatattagttgtttggcatagtagatcaaatgcataatctaattactggactagaaaaaatatgatccgttgtgctttgaatggtttctctctgtttcctagatgcagagcatggctcttattctttgcatgtttaaatcgattgtagtgatttgtttagttctgctctgcaaccctttgagagatacatacctgggtttgtatatttgtccatttcagaggtcaatgtattaccttgtcaggcagcttcaagatttctaaaattgacaaaaatggttggaagatcaaacatcgagaattcactttctacaagtggaacaattgcatatgagggcattgatctattgacatgtgcccatatttctatttatttgtcttcaagttctagatatctctcttattctgatttctagatatctctctaaaatttatggttgtgttagatatctctcttattctgatttctagatatccctcttattctgatttctagatgtgcttggtacaggtcagttttacctgatattctgtttttgttccttgtttgtttgaactgaggttgatttaggttgtgaacttgtgatgacaaaaataacatcctgctgataacctcaaatggcctgtctacgagatggaaaatggcctgatgataacctcaaaattttctccattatgggcaacaactattgagcagccaagatatcaacaacgaagaataaccaatttcgaattcacatcaatcaacaataggacctgtccctgatcaacttcaaaagcgcttaggaagacgttttcagctgaaaagaagaaaagtaaaatccggaaggcatgggatggaactaaagtcatttataatgttgcttcatggggcaccactgctgttggggtctacaataatcgagcattacttacgatcgcaactacaacgtttcagacttcctgccgtgtgatatccaagttcctttgaatattgtgtcaactactagggcatgttagaattgcttgcgtgtgtgcttttccattgttcaggtagcataaagtttgagaccatttgtttattctatgctgatgagttcgactgctaattagcaggaccttccagtcaaaagcagcatgtgtattgtataactgtaaatattgccttgatttgaacaaatttgttttttgtgctagaactttatttcacgaacttcatatgatagaccctactttagagtatttctttctcttctcatttcacattattgttatcacttctctttcaatgagaattttctttcttattttattttattttattttatgtagaagtgtagaaccatatagtctctttggctaatttaatatggttttgttatctggaaatcttgactaatatatttatcacatctttaaaagtggtattttgaattattagatcgacatgttaacaactgggtgggggtattctatctactatctttactactataacacactacttttaatagttctagtcgtggtttttgtgcgtcgcgcccccacccgctcgctcgttttccacgctgtgctatccaggagcgtccgtccgctctctgacatccacaaacactatcctttgagcattacatatctttttgaactgatttagttgtgcattaccattttattcaaaattttgtatgccgtcgcaacgcacgggcacttacctagtaataccatatattgacacatacatctaaatccatataaaaattacactgaaacatataataccatatattcactatacctctacactttgagaaatgaggaacaagatatatggttttgtagtcaaggaagaaaaaaaccaacattcgttaattgagaaggtgtttttttcagaaaaaataacaaaa

SEQ ID NO: 44764 - DNA, 1499 bp, Zea Mays
ctcaagtgatctaaagatcaaacttaagtaccacattattctttcttatatcaaatccctctgtgagaaatctccacaagttggagtctctcacgctttacacgagtgatctcaatcaaagcaaaggagtaaggagggagtagaaacacacataagagtacaagagcagcaacaccacgcatacaagcaaaagtgagaatgcaataatcaaaacgacagagtttctcttaagaaaacactcaattctctatagcatgagtgtgtggttgcattgaatcggagtttaagagtgctcttagtatacttggtaacaactctatgcacctagaggagtcctttagtcatttcttctttgtttggaaggccctggacgccttctgtccgtgggcgcaccgaacagtctggtacacgttggacagtgaacattgcacgatttccttccttttcctgcgaagccaaccgttgccggtcgttactgccattgattatgagaaatcaatataaactctagaacagagctactctacacagagttttggaatagagctgtttttggaatggaatggagccataccaaacatgtccttattaaatgtggggtatgtctaaagcatatctctactactatttatgaacatagtgtaggcgtgcacgattgcatggcgcacggttctgccaactccggacgcgcctgtcgcgccgcgaatcgcggccgccgcatcctcagatcaataccgcggccgtcgtcttctctccccccgcatggtggcccgtcgtccccttccaaccctcctccctcgcctgccggtgtccctttcttcccccgtgtggcggctcgcacccgcacgagatctagactaccttcccaccctcctcccctgcccgctcgcctgtcggcgtccctttcttctccccgtgcggcggcccgcgcccgcacgagatctagactagacgccgagggcacgacgctttgcctgcctcgcctccgtcccctcgtcgcctccacgactccacctctacctcctcggtgagagagagagagagcgggggagagagggcactagaccaccagcaagcatgaggcagaggaggagcgtggcggcgccgctacactctaatccgctggctaccccatcaggagagagagagaggggggagagaaggcaccagacaccgccagtaagcatgaggcagagaaggcaccagacatcgcgctatcctccgcatccgccgcccgtcggcttcgtccgctgcgagaattctcgtgtcgcccatcggcgacaactgagtcggaaggacgtggagggtcgctcttagtcatcaagaggttgtgaacttgtgatgacaaaaataacatcctgctgataacctcaaatggcctgtctacgagatggaaaatggcctgatgataacctcaaaattttctccattatgggcaacaactattgagcagccaagatatcaacaacgaagaataaccaatttcgaattcacatcaa

SEQ ID NO: 44765 - DNA, 2512 bp, Zea Mays
caatcaccacagttactgttaatagttcttcctataggtgccggagtggtctgcttggctgttgacattctccctacagaattctctaaagaggcctcccaacattttggaaacatactatctagacttgttgctagtttggcctcagtgaagcaaccggcagaacttccttcctacttgagaagagcttgcattgcacatgctggcagattaactcctttgtatgaatatatccctaggatgagaaatactatgatagatttggcacccgcaaaaacaaatccattgcctgacaagaagtatagcaccctggtatctctcagtgggcacctatttgataagttccttataaatgaagctttggacatcattgagacagctggaggttcatttcacttggttagatgtgaagttggacaaagcacggatgatatgtcatactcagagcttgaagtaggagcagatgatactgccacattggataaaattattgattccttgacttctttagctaatgaacatggtggagatcacgatgccgggcaagaaattgaattagctctgaagataggaaaagtcaatgagtatgaaactgacgtcacaattgataaaggagggccaaagattttaattcttggagctggaagagtctgtcggccagctgctgagtttctggcatcttacccagacatatgtacctatggtgttgatgaccatgatgcagatcaaattcatgttatcgtggcatctttgtatcaaaaagatgcagaagagacagttgatggtattgaaaatacaactgctacccagcttgatgttgctgatattggaagcctttcagatcttgtttctcaggttgaggttgtaattagcttgctgcctgctagttttcatgctgccattgcaggagtatgcatagagttgaagaagcacatggtaacggcaagctatgttgatgaatccatgtcaaacttgagccaagctgccaaagatgcaggtgtaactatactttgtgaaatgggcctagatcctggcatagatcacttgatgtcaatgaagatgattgatgaagctcatgcacgaaagggaaaaataaaggcatttacatcttactgtggtggattgccatctccagctgcagcaaacaatccgcttgcctataaattcagttggaacccagctggtgcactccggtcagggaaaaatcctgcagtctacaaatttcttggtgagacgatccatgtagatggtcataacttgtatgaatcagcaaagaggctcagactacgagagcttccagcttttgctctggaacacttgccaaatcggaattccttgatatatggtgacctttatggtatctccaaagaagcatccaccatatatagggctactcttcgttacgaaggttttagtgagattatggtaaccctttccaaaactgggttctttgatgctgcaaatcatccactgctgcaagatactagtcgtccaacatataagggtttccttgatgaactactgaataatatctccacaattaacacggacttagatattgaagcctctggtggatacgatgatgacctgattgccagactgttgaagctcgggtgttgcaaaaataaggaaatagctgttaagacagtcaaaaccatcaagttcttgggactacatgaagagactcaaatacctaagggttgttcgagcccatttgatgtgatttgccagcgaatggaacagaggatggcctatggccacaatgagcaagacatggtactgctccaccacgaagtcgaggtggaatacccggacgggcaacccgccgaaaagcaccaagcgacgctactggagttcgggaaggttgaaaatggcaggtccaccactgccatggcgctgaccgtcggcattccagcagcaataggggccctgctattgctaaagaataaggtccagacgaaaggagtgatcaggcctctgcaaccggaaatctacgttccagcattggagatcttggagtcgtcgggcatcaagctggttgagaaagtggagacttgaaagttccctgatacacagataaagatagtatgatatagcagggcacatgtatcttttgtattaactccgttctggaatatatatttgtgaactaaaatgtgacaaataaaaagaacgggtggagtatattgtaagagacggcaaagaaacctctgtatatatgacctgtcgatatcaaataatgccgatcagttagttggcttggctcttttgagggtttagtttatactagtaaatgagagcaaccagcgaagcataaacaagatgagacgtcagagcagcaacaacaacctgcgttgcctttggtttatattgcatcggttctccgaatgaactttgcatcctgtgcacatcagacatgtcccagagggatttcattttcattaaattgacatatcagcaaatctgcttatgcgtcgagatatttatgagaggggaagagagcttcatgaaa

SEQ ID NO: 44766 - DNA, 3763 bp, Zea Mays
gtaaaatgggcgaatttcaactagtaatttgttatcgtagctcgtagcaccagattgccatgccgtctttgaactgaggttgtggatttcatgtccgtgatctaggcgccttacttggactcaggtatgggttctgctgctactgagggcaatgacaccttgctgggcaatggagttgttgggattcttgctgagacttgtaatatgtgggaaagaagggcgccgttaactccttcccattgtgcccgccttctgctaggaggaggcaagaacggacctcgagtaaaccggattattgtgcagccaagcacaaggaggatccatcatgacgctcagtatgaggatgcaggatgcgagatttcagaagacctgtcagaatgcggccttatcataggcatcaaacaacccaagctgcagatgattctttcagatagagcgtacgctttcttttcacacacacacaaagcccaaaaagagaatatgccactgttagacaagatccttgaagaaagggtgtccttgtttgattatgagctaattgttggagatgatgggaaaagatcactagcatttgggaaatttgctggtagagctggactgatagatttcttacatggtctcggacagcgatatttgagccttggatactcgactccatttctctctctgggacaatctcatatgtatccttcgctcgctgcagccaaggctgcagtcattgtcgttgcagaagagatagcaacatttggacttccatccggaatttgtccgatagtgtttgtgttcactggagttggaaacgtctctcagggtgcgcaggagatattcaagttattgccccatacctttgttgatgctgagaagcttcccgaaatttttcaggccaggaatctgtctaagcaatctcagtcgaccaagagagtatttcaactttatggttgtgttgtgacctctagagacatggtttctcacaaggatcccaccagacaatttgacaaaggtgactattatgctcatccagaacactacacccctgtttttcatgaaagaattgctccatatgcatctgtcatcgtaaactgtatgtattgggagaagaggtttccaccattactaaatatggatcagttacagcaattgatggagactggttgtcctttagtcggcgtttgtgacataacttgtgatattggaggttccattgaatttatcaacaagagtacatcaatagagaggcctttctttcggtatgatccttctaagaattcataccatgatgatatggaaggtgccggagtggtctgcttggctgttgacattctccctacagaattctctaaagaggcctcccaacattttggaaacatactatctagacttgttgctagtttggcctcagtgaagcaaccggcagaacttccttcctacttgagaagagcttgcattgcacatgctggcagattaactcctttgtatgaatatatccctaggatgagaaatactatgatagatttggcacccgcaaaaacaaatccattgcctgacaagaagtatagcaccctggtatctctcagtgggcacctatttgataagttccttataaatgaagctttggacatcattgagacagctggaggttcatttcacttggttagatgtgaagttggacaaagcacggatgatatgtcatactcagagcttgaagtaggagcagatgatactgccacattggataaaattattgattccttgacttctttagctaatgaacatggtggagatcacgatgccgggcaagaaattgaattagctctgaagataggaaaagtcaatgagtatgaaactgacgtcacaattgataaaggagggccaaagattttaattcttggagctggaagagtctgtcggccagctgctgagtttctggcatcttacccagacatatgtacctatggtgttgatgaccatgatgcagatcaaattcatgttatcgtggcatctttgtatcaaaaagatgcagaagagacagttgatggtattgaaaatacaactgctacccagcttgatgttgctgatattggaagcctttcagatcttgtttctcaggttgaggttgtaattagcttgctgcctgctagttttcatgctgccattgcaggagtatgcatagagttgaagaagcacatggtaacggcaagctatgttgatgaatccatgtcaaacttgagccaagctgccaaagatgcaggtgtaactatactttgtgaaatgggcctagatcctggcatagatcacttgatgtcaatgaagatgattgatgaagctcatgcacgaaagggaaaaataaaggcatttacatcttactgtggtggattgccatctccagctgcagcaaacaatccgcttgcctataaattcagttggaacccagctggtgcactccggtcagggaaaaatcctgcagtctacaaatttcttggtgagacgatccatgtagatggtcataacttgtatgaatcagcaaagaggctcagactacgagagcttccagcttttgctctggaacacttgccaaatcggaattccttgatatatggtgacctttatggtatctccaaagaagcatccaccatatatagggctactcttcgttacgaaggttttagtgagattatggtaaccctttccaaaactgggttctttgatgctgcaaatcatccactgctgcaagatactagtcgtccaacatataagggtttccttgatgaactactgaataatatctccacaattaacacggacttagatattgaagcctctggtggatacgatgatgacctgattgccagactgttgaagctcgggtgttgcaaaaataaggaaatagctgttaagacagtcaaaaccatcaagttcttgggactacatgaagagactcaaatacctaagggttgttcgagcccatttgatgtgatttgccagcgaatggaacagaggatggcctatggccacaatgagcaagacatggtactgctccaccacgaagtcgaggtggaatacccggacgggcaacccgccgaaaagcaccaagcgacgctactggagttcgggaaggttgaaaatggcaggtccaccactgccatggcgctgaccgtcggcattccagcagcaataggggccctgctattgctaaagaataaggtccagacgaaaggagtgatcaggcctctgcaaccggaaatctacgttccagcattggagatcttggagtcgtcgggcatcaagctggttgagaaagtggagacttgaaagttccctgatacacagataaagatagtatgatatagcagggcacatgtatcttttgtattaactccgttctggaatatatatttgtgaactaaaatgtgacaaataaaaagaacgggtggagtatattgtaagagacggcaaagaaacctctgtatatatgacctgtcgatatcaaataatgccgatcagttagttggcttggctcttttgagggtttagtttatactagtaaatgagagcaaccagcgaagcataaacaagatgagacgtcagagcagcaacaacaacctgcgttgcctttggtttatattgcatcggttctccgaatgaactttgcatcctgtgcacatcagacatgtcccagagggatttcattttcattaaattgacatatcagcaaatctgcttatgcgtcgagatatttatgagaggggaagagagcttcatgaaa

SEQ ID NO: 44767 - DNA, 3679 bp, Zea Mays
agcgcagaggcctcgtccgtctccgtttccgtctccctccccgcgccacctcactcgttcgccgcctccgccggcgcccgtgcgccatctccactccagcgcgctctacgccgatcgagctgccaggaggttgtggatttcatgtccgtgatctaggcgccttacttggactcaggaggaggcaagaacggacctcgagtaaaccggattattgtgcagccaagcacaaggaggatccatcatgacgctcagtatgaggatgcaggatgcgagatttcagaagacctgtcagaatgcggccttatcataggcatcaaacaacccaagctgcagatgattctttcagatagagcgtacgctttcttttcacacacacacaaagcccaaaaagagaatatgccactgttagacaagatccttgaagaaagggtgtccttgtttgattatgagctaattgttggagatgatgggaaaagatcactagcatttgggaaatttgctggtagagctggactgatagatttcttacatggtctcggacagcgatatttgagccttggatactcgactccatttctctctctgggacaatctcatatgtatccttcgctcgctgcagccaaggctgcagtcattgtcgttgcagaagagatagcaacatttggacttccatccggaatttgtccgatagtgtttgtgttcactggagttggaaacgtctctcagggtgcgcaggagatattcaagttattgccccatacctttgttgatgctgagaagcttcccgaaatttttcaggccaggaatctgtctaagcaatctcagtcgaccaagagagtatttcaactttatggttgtgttgtgacctctagagacatggtttctcacaaggatcccaccagacaatttgacaaaggtgactattatgctcatccagaacactacacccctgtttttcatgaaagaattgctccatatgcatctgtcatcgtaaactgtatgtattgggagaagaggtttccaccattactaaatatggatcagttacagcaattgatggagactggttgtcctttagtcggcgtttgtgacataacttgtgatattggaggttccattgaatttatcaacaagagtacatcaatagagaggcctttctttcggtatgatccttctaagaattcataccatgatgatatggaaggtgccggagtggtctgcttggctgttgacattctccctacagaattctctaaagaggcctcccaacattttggaaacatactatctagacttgttgctagtttggcctcagtgaagcaaccggcagaacttccttcctacttgagaagagcttgcattgcacatgctggcagattaactcctttgtatgaatatatccctaggatgagaaatactatgatagatttggcacccgcaaaaacaaatccattgcctgacaagaagtatagcaccctggtatctctcagtgggcacctatttgataagttccttataaatgaagctttggacatcattgagacagctggaggttcatttcacttggttagatgtgaagttggacaaagcacggatgatatgtcatactcagagcttgaagtaggagcagatgatactgccacattggataaaattattgattccttgacttctttagctaatgaacatggtggagatcacgatgccgggcaagaaattgaattagctctgaagataggaaaagtcaatgagtatgaaactgacgtcacaattgataaaggagggccaaagattttaattcttggagctggaagagtctgtcggccagctgctgagtttctggcatcttacccagacatatgtacctatggtgttgatgaccatgatgcagatcaaattcatgttatcgtggcatctttgtatcaaaaagatgcagaagagacagttgatggtattgaaaatacaactgctacccagcttgatgttgctgatattggaagcctttcagatcttgtttctcaggttgaggttgtaattagcttgctgcctgctagttttcatgctgccattgcaggagtatgcatagagttgaagaagcacatggtaacggcaagctatgttgatgaatccatgtcaaacttgagccaagctgccaaagatgcaggtgtaactatactttgtgaaatgggcctagatcctggcatagatcacttgatgtcaatgaagatgattgatgaagctcatgcacgaaagggaaaaataaaggcatttacatcttactgtggtggattgccatctccagctgcagcaaacaatccgcttgcctataaattcagttggaacccagctggtgcactccggtcagggaaaaatcctgcagtctacaaatttcttggtgagacgatccatgtagatggtcataacttgtatgaatcagcaaagaggctcagactacgagagcttccagcttttgctctggaacacttgccaaatcggaattccttgatatatggtgacctttatggtatctccaaagaagcatccaccatatatagggctactcttcgttacgaaggttttagtgagattatggtaaccctttccaaaactgggttctttgatgctgcaaatcatccactgctgcaagatactagtcgtccaacatataagggtttccttgatgaactactgaataatatctccacaattaacacggacttagatattgaagcctctggtggatacgatgatgacctgattgccagactgttgaagctcgggtgttgcaaaaataaggaaatagctgttaagacagtcaaaaccatcaagttcttgggactacatgaagagactcaaatacctaagggttgttcgagcccatttgatgtgatttgccagcgaatggaacagaggatggcctatggccacaatgagcaagacatggtactgctccaccacgaagtcgaggtggaatacccggacgggcaacccgccgaaaagcaccaagcgacgctactggagttcgggaaggttgaaaatggcaggtccaccactgccatggcgctgaccgtcggcattccagcagcaataggggccctgctattgctaaagaataaggtccagacgaaaggagtgatcaggcctctgcaaccggaaatctacgttccagcattggagatcttggagtcgtcgggcatcaagctggttgagaaagtggagacttgaaagttccctgatacacagataaagatagtatgatatagcagggcacatgtatcttttgtattaactccgttctggaatatatatttgtgaactaaaatgtgacaaataaaaagaacgggtggagtatattgtaagagacggcaaagaaacctctgtatatatgacctgtcgatatcaaataatgccgatcagttagttggcttggctcttttgagggtttagtttatactagtaaatgagagcaaccagcgaagcataaacaagatgagacgtcagagcagcaacaacaacctgcgttgcctttggtttatattgcatcggttctccgaatgaactttgcatcctgtgcacatcagacatgtcccagagggatttcattttcattaaattgacatatcagcaaatctgcttatgcgtcgagatatttatgagaggggaagagagcttcatgaaa

SEQ ID NO: 44768 - DNA, 3797 bp, Zea Mays
agcgcagaggcctcgtccgtctccgtttccgtctccctccccgcgccacctcactcgttcgccgcctccgccggcgcccgtgcgccatctccactccagcgcgctctacgccgatcgagctgccaggaggttgtggatttcatgtccgtgatctaggcgccttacttggactcaggtatgggttctgctgctactgagggcaatgacaccttgctgggcaatggagttgttgggattcttgctgagacttgtaatatgtgggaaagaagggcgccgttaactccttcccattgtgcccgccttctgctaggaggaggcaagaacggacctcgagtaaaccggattattgtgcagccaagcacaaggaggatccatcatgacgctcagtatgaggatgcaggatgcgagatttcagaagacctgtcagaatgcggccttatcataggcatcaaacaacccaagctgcagatgattctttcagatagagcgtacgctttcttttcacacacacacaaagcccaaaaagagaatatgccactgttagacaagatccttgaagaaagggtgtccttgtttgattatgagctaattgttggagatgatgggaaaagatcactagcatttgggaaatttgctggtagagctggactgatagatttcttacatggtctcggacagcgatatttgagccttggatactcgactccatttctctctctgggacaatctcatatgtatccttcgctcgctgcagccaaggctgcagtcattgtcgttgcagaagagatagcaacatttggacttccatccggaatttgtccgatagtgtttgtgttcactggagttggaaacggagatattcaagttattgccccatacctttgttgatgctgagaagcttcccgaaatttttcaggccaggaatctgtctaagcaatctcagtcgaccaagagagtatttcaactttatggttgtgttgtgacctctagagacatggtttctcacaaggatcccaccagacaatttgacaaaggtgactattatgctcatccagaacactacacccctgtttttcatgaaagaattgctccatatgcatctgtcatcgtaaactgtatgtattgggagaagaggtttccaccattactaaatatggatcagttacagcaattgatggagactggttgtcctttagtcggcgtttgtgacataacttgtgatattggaggttccattgaatttatcaacaagagtacatcaatagagaggcctttctttcggtatgatccttctaagaattcataccatgatgatatggaaggtgccggagtggtctgcttggctgttgacattctccctacagaattctctaaagaggcctcccaacattttggaaacatactatctagacttgttgctagtttggcctcagtgaagcaaccggcagaacttccttcctacttgagaagagcttgcattgcacatgctggcagattaactcctttgtatgaatatatccctaggatgagaaatactatgatagatttggcacccgcaaaaacaaatccattgcctgacaagaagtatagcaccctggtatctctcagtgggcacctatttgataagttccttataaatgaagctttggacatcattgagacagctggaggttcatttcacttggttagatgtgaagttggacaaagcacggatgatatgtcatactcagagcttgaagtaggagcagatgatactgccacattggataaaattattgattccttgacttctttagctaatgaacatggtggagatcacgatgccgggcaagaaattgaattagctctgaagataggaaaagtcaatgagtatgaaactgacgtcacaattgataaaggagggccaaagattttaattcttggagctggaagagtctgtcggccagctgctgagtttctggcatcttacccagacatatgtacctatggtgttgatgaccatgatgcagatcaaattcatgttatcgtggcatctttgtatcaaaaagatgcagaagagacagttgatggtattgaaaatacaactgctacccagcttgatgttgctgatattggaagcctttcagatcttgtttctcaggttgaggttgtaattagcttgctgcctgctagttttcatgctgccattgcaggagtatgcatagagttgaagaagcacatggtaacggcaagctatgttgatgaatccatgtcaaacttgagccaagctgccaaagatgcaggtgtaactatactttgtgaaatgggcctagatcctggcatagatcacttgatgtcaatgaagatgattgatgaagctcatgcacgaaagggaaaaataaaggcatttacatcttactgtggtggattgccatctccagctgcagcaaacaatccgcttgcctataaattcagttggaacccagctggtgcactccggtcagggaaaaatcctgcagtctacaaatttcttggtgagacgatccatgtagatggtcataacttgtatgaatcagcaaagaggctcagactacgagagcttccagcttttgctctggaacacttgccaaatcggaattccttgatatatggtgacctttatggtatctccaaagaagcatccaccatatatagggctactcttcgttacgaaggttttagtgagattatggtaaccctttccaaaactgggttctttgatgctgcaaatcatccactgctgcaagatactagtcgtccaacatataagggtttccttgatgaactactgaataatatctccacaattaacacggacttagatattgaagcctctggtggatacgatgatgacctgattgccagactgttgaagctcgggtgttgcaaaaataaggaaatagctgttaagacagtcaaaaccatcaagttcttgggactacatgaagagactcaaatacctaagggttgttcgagcccatttgatgtgatttgccagcgaatggaacagaggatggcctatggccacaatgagcaagacatggtactgctccaccacgaagtcgaggtggaatacccggacgggcaacccgccgaaaagcaccaagcgacgctactggagttcgggaaggttgaaaatggcaggtccaccactgccatggcgctgaccgtcggcattccagcagcaataggggccctgctattgctaaagaataaggtccagacgaaaggagtgatcaggcctctgcaaccggaaatctacgttccagcattggagatcttggagtcgtcgggcatcaagctggttgagaaagtggagacttgaaagttccctgatacacagataaagatagtatgatatagcagggcacatgtatcttttgtattaactccgttctggaatatatatttgtgaactaaaatgtgacaaataaaaagaacgggtggagtatattgtaagagacggcaaagaaacctctgtatatatgacctgtcgatatcaaataatgccgatcagttagttggcttggctcttttgagggtttagtttatactagtaaatgagagcaaccagcgaagcataaacaagatgagacgtcagagcagcaacaacaacctgcgttgcctttggtttatattgcatcggttctccgaatgaactttgcatcctgtgcacatcagacatgtcccagagggatttcattttcattaaattgacatatcagcaaatctgcttatgcgtcgagatatttatgagaggggaagagagcttcatgaaa

SEQ ID NO: 44769 - DNA, 3840 bp, Zea Mays
agcgcagaggcctcgtccgtctccgtttccgtctccctccccgcgccacctcactcgttcgccgcctccgccggcgcccgtgcgccatctccactccagcgcgctctacgccgatcgagctgccaggaggttgtggatttcatgtccgtgatctaggcgccttacttggactcaggtatgggttctgctgctactgagggcaatgacaccttgctgggcaatggagttgttgggattcttgctgagacttgtaatatgtgggaaagaagggcgccgttaactccttcccattgtgcccgccttctgctaggaggaggcaagaacggacctcgagtaaaccggattattgtgcagccaagcacaaggaggatccatcatgacgctcagtatgaggatgcaggatgcgagatttcagaagacctgtcagaatgcggccttatcataggcatcaaacaacccaagctgcagatgattctttcagatagagcgtacgctttcttttcacacacacacaaagcccaaaaagagaatatgccactgttagacaagatccttgaagaaagggtgtccttgtttgattatgagctaattgttggagatgatgggaaaagatcactagcatttgggaaatttgctggtagagctggactgatagatttcttacatggtctcggacagcgatatttgagccttggatactcgactccatttctctctctgggacaatctcatatgtatccttcgctcgctgcagccaaggctgcagtcattgtcgttgcagaagagatagcaacatttggacttccatccggaatttgtccgatagtgtttgtgttcactggagttggaaacgtctctcagggtgcgcaggagatattcaagttattgccccatacctttgttgatgctgagaagcttcccgaaatttttcaggccaggaatctgtctaagcaatctcagtcgaccaagagagtatttcaactttatggttgtgttgtgacctctagagacatggtttctcacaaggatcccaccagacaatttgacaaaggtgactattatgctcatccagaacactacacccctgtttttcatgaaagaattgctccatatgcatctgtcatcgcaattgatggagactggttgtcctttagtcggcgtttgtgacataacttgtgatattggaggttccattgaatttatcaacaagagtacatcaatagagaggcctttctttcggtatgatccttctaagaattcataccatgatgatatggaaggtgccggagtggtctgcttggctgttgacattctccctacagaattctctaaagaggcctcccaacattttggaaacatactatctagacttgttgctagtttggcctcagtgaagcaaccggcagaacttccttcctacttgagaagagcttgcattgcacatgctggcagattaactcctttgtatgaatatatccctaggatgagaaatactatgatagatttggcacccgcaaaaacaaatccattgcctgacaagaagtatagcaccctggtatctctcagtgggcacctatttgataagttccttataaatgaagctttggacatcattgagacagctggaggttcatttcacttggttagatgtgaagttggacaaagcacggatgatatgtcatactcagagcttgaagtaggagcagatgatactgccacattggataaaattattgattccttgacttctttagctaatgaacatggtggagatcacgatgccgggcaagaaattgaattagctctgaagataggaaaagtcaatgagtatgaaactgacgtcacaattgataaaggagggccaaagattttaattcttggagctggaagagtctgtcggccagctgctgagtttctggcatcttacccagacatatgtacctatggtgttgatgaccatgatgcagatcaaattcatgttatcgtggcatctttgtatcaaaaagatgcagaagagacagttgatggtattgaaaatacaactgctacccagcttgatgttgctgatattggaagcctttcagatcttgtttctcaggttgaggttgtaattagcttgctgcctgctagttttcatgctgccattgcaggagtatgcatagagttgaagaagcacatggtaacggcaagctatgttgatgaatccatgtcaaacttgagccaagctgccaaagatgcaggtgtaactatactttgtgaaatgggcctagatcctggcatagatcacttgatgtcaatgaagatgattgatgaagctcatgcacgaaagggaaaaataaaggcatttacatcttactgtggtggattgccatctccagctgcagcaaacaatccgcttgcctataaattcagttggaacccagctggtgcactccggtcagggaaaaatcctgcagtctacaaatttcttggtgagacgatccatgtagatggtcataacttgtatgaatcagcaaagaggctcagactacgagagcttccagcttttgctctggaacacttgccaaatcggaattccttgatatatggtgacctttatggtatctccaaagaagcatccaccatatatagggctactcttcgttacgaaggttttagtgagattatggtaaccctttccaaaactgggttctttgatgctgcaaatcatccactgctgcaagatactagtcgtccaacatataagggtttccttgatgaactactgaataatatctccacaattaacacggacttagatattgaagcctctggtggatacgatgatgacctgattgccagactgttgaagctcgggtgttgcaaaaataaggaaatagctgttaagacagtcaaaaccatcaagttcttgggactacatgaagagactcaaatacctaagggttgttcgagcccatttgatgtgatttgccagcgaatggaacagaggatggcctatggccacaatgagcaagacatggtactgctccaccacgaagtcgaggtggaatacccggacgggcaacccgccgaaaagcaccaagcgacgctactggagttcgggaaggttgaaaatggcaggtccaccactgccatggcgctgaccgtcggcattccagcagcaataggggccctgctattgctaaagaataaggtccagacgaaaggagtgatcaggcctctgcaaccggaaatctacgttccaggtgtgctacgtagtttttcatgcttgtccttgtggaattaccatgacgtgtaacggtgctgacccgtgtgtttgcgtgtctgaagcattggagatcttggagtcgtcgggcatcaagctggttgagaaagtggagacttgaaagttccctgatacacagataaagatagtatgatatagcagggcacatgtatcttttgtattaactccgttctggaatatatatttgtgaactaaaatgtgacaaataaaaagaacgggtggagtatattgtaagagacggcaaagaaacctctgtatatatgacctgtcgatatcaaataatgccgatcagttagttggcttggctcttttgagggtttagtttatactagtaaatgagagcaaccagcgaagcataaacaagatgagacgtcagagcagcaacaacaacctgcgttgcctttggtttatattgcatcggttctccgaatgaactttgcatcctgtgcacatcagacatgtcccagagggatttcattttcattaaattgacatatcagcaaatctgcttatgcgtcgagatatttatgagaggggaagagagcttcatgaaa

SEQ ID NO: 44770 - DNA, 4604 bp, Zea Mays
cctccctccagataaactccgccagcgcagaggcctcgtccgtctccgtttccgtctccctccccgcgccacctcactcgttcgccgcctccgccggcgcccgtgcgccatctccactccagcgcgctctacgccgatcgagctgccaggaggttgtggatttcatgtccgtgatctaggcgccttacttggactcagggcaatgacaccttgctgggcaatggagttgttgggattcttgctgagacttgtaatatgtgggaaagaagggcgccgttaactccttcccattgtgcccgccttctgctaggaggaggcaagaacggacctcgagtaaaccggattattgtgcagccaagcacaaggaggatccatcatgacgctcagtatgaggatgcaggatgcgagatttcagaagacctgtcagaatgcggccttatcataggcatcaaacaacccaagctgcagatgattctttcagatagagcgtacgctttcttttcacacacacacaaagcccaaaaagagaatatgccactgttagacaagatccttgaagaaagggtgtccttgtttgattatgagctaattgttggagatgatgggaaaagatcactagcatttgggaaatttgctggtagagctggactgatagatttcttacatggtctcggacagcgatatttgagccttggatactcgactccatttctctctctgggacaatctcatatgtatccttcgctcgctgcagccaaggctgcagtcattgtcgttgcagaagagatagcaacatttggacttccatccggaatttgtccgatagtgtttgtgttcactggagttggaaacgtctctcagggtgcgcaggagatattcaagttattgccccatacctttgttgatgctgagaagcttcccgaaatttttcaggccaggaatctgtctaagcaatctcagtcgaccaagagagtatttcaactttatggttgtgttgtgacctctagagacatggtttctcacaaggatcccaccagacaatttgacaaaggtgactattatgctcatccagaacactacacccctgtttttcatgaaagaattgctccatatgcatctgtcatcgtaaactgtatgtattgggagaagaggtttccaccattactaaatatggatcagttacagcaattgatggagactggttgtcctttagtcggcgtttgtgacataacttgtgatattggaggttccattgaatttatcaacaagagtacatcaatagagaggcctttctttcggtatgatccttctaagaattcataccatgatgatatggaaggtgccggagtggtctgcttggctgttgacattctccctacagaattctctaaagaggcctcccaacattttggaaacatactatctagacttgttgctagtttggcctcagtgaagcaaccggcagaacttccttcctacttgagaagagcttgcattgcacatgctggcagattaactcctttgtatgaatatatccctaggatgagaaatactatgatgtaagcttcaaatacttctattcttcattgttgtattcctctcagatagttcacttgtacgatgtgatccatataggtgcaaaccactcaaatagatattgttaaaatatgtggattattttagtgttttgcactatgcttgttattctacaatacggggagtagccttttattaaacagccctgcaaattgtgtccttcaaagtttcagttggcggactttcttaccatggcatagactatgcttgtatccctccaaactcacactatgctgagtataaaagggggtagaccggtagagtgtacttatgctgtggaattagtctattgtataggatgctactatgaatacatcccttgcactcctttgtgcagagtgtttccccattgggcatgttaatggatgtgtttcttaacttctatagttctactattgtaaaccagaacacttcaggttggataaaggactaagtggcctagtttttactcttttttgctttaactagtatgctttgttggttatttttaataagtggacaagcatctctgattcatgtgtcttttgttatcttatcaataatttgaacaccatcatattcctgtccctttattttttttgttcagaaacttctctatgtagtggttgctcatgttgtatatattgtttttttgggattttccatagcatcacataaattcttttctcattatggtgcttaccagtatttaccaattgccacattttaatggtacttaatgttgttgtcgaagttatattctatttcttgcagagatttggcacccgcaaaaacaaatccattgcctgacaagaagtatagcaccctggtatctctcagtgggcacctatttgataagttccttataaatgaagctttggacatcattgagacagctggaggttcatttcacttggttagatgtgaagttggacaaagcacggatgatatgtcatactcagagcttgaagtaggagcagatgatactgccacattggataaaattattgattccttgacttctttagctaatgaacatggtggagatcacgatgccgggcaagaaattgaattagctctgaagataggaaaagtcaatgagtatgaaactgacgtcacaattgataaaggagggccaaagattttaattcttggagctggaagagtctgtcggccagctgctgagtttctggcatcttacccagacatatgtacctatggtgttgatgaccatgatgcagatcaaattcatgttatcgtggcatctttgtatcaaaaagatgcagaagagacagttgatggtattgaaaatacaactgctacccagcttgatgttgctgatattggaagcctttcagatcttgtttctcaggttgaggttgtaattagcttgctgcctgctagttttcatgctgccattgcaggagtatgcatagagttgaagaagcacatggtaacggcaagctatgttgatgaatccatgtcaaacttgagccaagctgccaaagatgcaggtgtaactatactttgtgaaatgggcctagatcctggcatagatcacttgatgtcaatgaagatgattgatgaagctcatgcacgaaagggaaaaataaaggcatttacatcttactgtggtggattgccatctccagctgcagcaaacaatccgcttgcctataaattcagttggaacccagctggtgcactccggtcagggaaaaatcctgcagtctacaaatttcttggtgagacgatccatgtagatggtcataacttgtatgaatcagcaaagaggctcagactacgagagcttccagcttttgctctggaacacttgccaaatcggaattccttgatatatggtgacctttatggtatctccaaagaagcatccaccatatatagggctactcttcgttacgaaggttttagtgagattatggtaaccctttccaaaactgggttctttgatgctgcaaatcatccactgctgcaagatactagtcgtccaacatataagggtttccttgatgaactactgaataatatctccacaattaacacggacttagatattgaagcctctggtggatacgatgatgacctgattgccagactgttgaagctcgggtgttgcaaaaataaggaaatagctgttaagacagtcaaaaccatcaagttcttgggactacatgaagagactcaaatacctaagggttgttcgagcccatttgatgtgatttgccagcgaatggaacagaggatggcctatggccacaatgagcaagacatggtactgctccaccacgaagtcgaggtggaatacccggacgggcaacccgccgaaaagcaccaagcgacgctactggagttcgggaaggttgaaaatggcaggtccaccactgccatggcgctgaccgtcggcattccagcagcaataggggccctgctattgctaaagaataaggtccagacgaaaggagtgatcaggcctctgcaaccggaaatctacgttccagcattggagatcttggagtcgtcgggcatcaagctggttgagaaagtggagacttgaaagttccctgatacacagataaagatagtatgatatagcagggcacatgtatcttttgtattaactccgttctggaatatatatttgtgaactaaaatgtgacaaataaaaagaacgggtggagtatattgtaagagacggcaaagaaacctctgtatatatgacctgtcgatatcaaataatgccgatcagttagttggcttggctcttttgagggtttagtttatactagtaaatgagagcaaccagcgaagcataaacaagatgagacgtcagagcagcaacaacaacctgcgttgcctttggtttatattgcatcggttctccgaatgaactttgcatcctgtgcacatcagacatgtcccagagggatttcattttcattaaattgacatatcagcaaatctgcttatgcgtcgagatatttatgagaggggaagagagcttcatgaaa

SEQ ID NO: 44771 - DNA, 3852 bp, Zea Mays
cgcctctctattttaagctgacctccctccagataaactccgccagcgcagaggcctcgtccgtctccgtttccgtctccctccccgcgccacctcactcgttcgccgcctccgccggcgcccgtgcgccatctccactccagcgcgctctacgccgatcgagctgccaggaggttgtggatttcatgtccgtgatctaggcgccttacttggactcaggtatgggttctgctgctactgagggcaatgacaccttgctgggcaatggagttgttgggattcttgctgagacttgtaatatgtgggaaagaagggcgccgttaactccttcccattgtgcccgccttctgctaggaggaggcaagaacggacctcgagtaaaccggattattgtgcagccaagcacaaggaggatccatcatgacgctcagtatgaggatgcaggatgcgagatttcagaagacctgtcagaatgcggccttatcataggcatcaaacaacccaagatgattctttcagatagagcgtacgctttcttttcacacacacacaaagcccaaaaagagaatatgccactgttagacaagatccttgaagaaagggtgtccttgtttgattatgagctaattgttggagatgatgggaaaagatcactagcatttgggaaatttgctggtagagctggactgatagatttcttacatggtctcggacagcgatatttgagccttggatactcgactccatttctctctctgggacaatctcatatgtatccttcgctcgctgcagccaaggctgcagtcattgtcgttgcagaagagatagcaacatttggacttccatccggaatttgtccgatagtgtttgtgttcactggagttggaaacgtctctcagggtgcgcaggagatattcaagttattgccccatacctttgttgatgctgagaagcttcccgaaatttttcaggccaggaatctgtctaagcaatctcagtcgaccaagagagtatttcaactttatggttgtgttgtgacctctagagacatggtttctcacaaggatcccaccagacaatttgacaaaggtgactattatgctcatccagaacactacacccctgtttttcatgaaagaattgctccatatgcatctgtcatcgtaaactgtatgtattgggagaagaggtttccaccattactaaatatggatcagttacagcaattgatggagactggttgtcctttagtcggcgtttgtgacataacttgtgatattggaggttccattgaatttatcaacaagagtacatcaatagagaggcctttctttcggtatgatccttctaagaattcataccatgatgatatggaaggtgccggagtggtctgcttggctgttgacattctccctacagaattctctaaagaggcctcccaacattttggaaacatactatctagacttgttgctagtttggcctcagtgaagcaaccggcagaacttccttcctacttgagaagagcttgcattgcacatgctggcagattaactcctttgtatgaatatatccctaggatgagaaatactatgatagatttggcacccgcaaaaacaaatccattgcctgacaagaagtatagcaccctggtatctctcagtgggcacctatttgataagttccttataaatgaagctttggacatcattgagacagctggaggttcatttcacttggttagatgtgaagttggacaaagcacggatgatatgtcatactcagagcttgaagtaggagcagatgatactgccacattggataaaattattgattccttgacttctttagctaatgaacatggtggagatcacgatgccgggcaagaaattgaattagctctgaagataggaaaagtcaatgagtatgaaactgacgtcacaattgataaaggagggccaaagattttaattcttggagctggaagagtctgtcggccagctgctgagtttctggcatcttacccagacatatgtacctatggtgttgatgaccatgatgcagatcaaattcatgttatcgtggcatctttgtatcaaaaagatgcagaagagacagttgatggtattgaaaatacaactgctacccagcttgatgttgctgatattggaagcctttcagatcttgtttctcaggttgaggttgtaattagcttgctgcctgctagttttcatgctgccattgcaggagtatgcatagagttgaagaagcacatggtaacggcaagctatgttgatgaatccatgtcaaacttgagccaagctgccaaagatgcaggtgtaactatactttgtgaaatgggcctagatcctggcatagatcacttgatgtcaatgaagatgattgatgaagctcatgcacgaaagggaaaaataaaggcatttacatcttactgtggtggattgccatctccagctgcagcaaacaatccgcttgcctataaattcagttggaacccagctggtgcactccggtcagggaaaaatcctgcagtctacaaatttcttggtgagacgatccatgtagatggtcataacttgtatgaatcagcaaagaggctcagactacgagagcttccagcttttgctctggaacacttgccaaatcggaattccttgatatatggtgacctttatggtatctccaaagaagcatccaccatatatagggctactcttcgttacgaaggttttagtgagattatggtaaccctttccaaaactgggttctttgatgctgcaaatcatccactgctgcaagatactagtcgtccaacatataagggtttccttgatgaactactgaataatatctccacaattaacacggacttagatattgaagcctctggtggatacgatgatgacctgattgccagactgttgaagctcgggtgttgcaaaaataaggaaatagctgttaagacagtcaaaaccatcaagttcttgggactacatgaagagactcaaatacctaagggttgttcgagcccatttgatgtgatttgccagcgaatggaacagaggatggcctatggccacaatgagcaagacatggtactgctccaccacgaagtcgaggtggaatacccggacgggcaacccgccgaaaagcaccaagcgacgctactggagttcgggaaggttgaaaatggcaggtccaccactgccatggcgctgaccgtcggcattccagcagcaataggggccctgctattgctaaagaataaggtccagacgaaaggagtgatcaggcctctgcaaccggaaatctacgttccagcattggagatcttggagtcgtcgggcatcaagctggttgagaaagtggagacttgaaagttccctgatacacagataaagatagtatgatatagcagggcacatgtatcttttgtattaactccgttctggaatatatatttgtgaactaaaatgtgacaaataaaaagaacgggtggagtatattgtaagagacggcaaagaaacctctgtatatatgacctgtcgatatcaaataatgccgatcagttagttggcttggctcttttgagggtttagtttatactagtaaatgagagcaaccagcgaagcataaacaagatgagacgtcagagcagcaacaacaacctgcgttgcctttggtttatattgcatcggttctccgaatgaactttgcatcctgtgcacatcagacatgtcccagagggatttcattttcattaaattgacatatcagcaaatctgcttatgcgtcgagatatttatgagaggggaagagagcttcatgaaa

SEQ ID NO: 44772 - DNA, 4317 bp, Zea Mays
ccggctcagagtgcagttccctctttggctcttcttcccatccccatcgtgtcgtgtcgtgccgtgcgcttccgagacagctcactccaccagcagggccgtcaccaccacgtcggcgtcgccatccatcgtcctcgtcggagcccaggccagctgagagctgactcctctccccgaaaggctggaaccgtccaaaaaggaagggtgcggatagcgtgtccaaatcgaaatcgagcagagttcctgggcgactgggcgcctctctattttaagctgacctccctccagataaactccgccagcgcagaggcctcgtccgtctccgtttccgtctccctccccgcgccacctcactcgttcgccgcctccgccggcgcccgtgcgccatctccactccagcgcgctctacgccgatcgagctgccaggaggttgtggatttcatgtccgtgatctaggcgccttacttggactcaggtatgggttctgctgctactgagggcaatgacaccttgctgggcaatggagttgttgggattcttgctgagacttgtaatatgtgggaaagaagggcgccgttaactccttcccattgtgcccgccttctgctaggaggaggcaagaacggacctcgagtaaaccggattattgtgcagccaagcacaaggaggatccatcatgacgctcagtatgaggatgcaggatgcgagatttcagaagacctgtcagaatgcggccttatcataggcatcaaacaacccaagctgcagatgattctttcagatagagcgtacgctttcttttcacacacacacaaagcccaaaaagagaatatgccactgttagacaagatccttgaagaaagggtgtccttgtttgattatgagctaattgttggagatgatgggaaaagatcactagcatttgggaaatttgctggtagagctggactgatagatttcttacatggtctcggacagcgatatttgagccttggatactcgactccatttctctctctgggacaatctcatatgtatccttcgctcgctgcagccaaggctgcagtcattgtcgttgcagaagagatagcaacatttggacttccatccggaatttgtccgatagtgtttgtgttcactggagttggaaacgtctctcagggtgcgcaggagatattcaagttattgccccatacctttgttgatgctgagaagcttcccgaaatttttcaggccaggaatctgtctaagcaatctcagtcgaccaagagagtatttcaactttatggttgtgttgtgacctctagagacatggtttctcacaaggatcccaccagacaatttgacaaaggtgactattatgctcatccagaacactacacccctgtttttcatgaaagaattgctccatatgcatctgtcatcgtaaactgtatgtattgggagaagaggtttccaccattactaaatatggatcagttacagcaattgatggagactggttgtcctttagtcggcgtttgtgacataacttgtgatattggaggttccattgaatttatcaacaagagtacatcaatagagaggcctttctttcggtatgatccttctaagaattcataccatgatgatatggaaggtgccggagtggtctgcttggctgttgacattctccctacagaattctctaaagaggcctcccaacattttggaaacatactatctagacttgttgctagtttggcctcagtgaagcaaccggcagaacttccttcctacttgagaagagcttgcattgcacatgctggcagattaactcctttgtatgaatatatccctaggatgagaaatactatgatagatttggcacccgcaaaaacaaatccattgcctgacaagaagtatagcaccctggtatctctcagtgggcacctatttgataagttccttataaatgaagctttggacatcattgagacagctggaggttcatttcacttggttagatgtgaagttggacaaagcacggatgatatgtcatactcagagcttgaagtaggagcagatgatactgccacattggataaaattattgattccttgacttctttagctaatgaacatggtggagatcacgatgccgggcaagaaattgaattagctctgaagataggaaaagtcaatgagtatgaaactgacgtcacaattgataaaggagggccaaagattttaattcttggagctggaagagtctgtcggccagctgctgagtttctggcatcttacccagacatatgtacctatggtgttgatgaccatgatgcagatcaaattcatgttatcgtggcatctttgtatcaaaaagatgcagaagagacagttgatggtattgaaaatacaactgctacccagcttgatgttgctgatattggaagcctttcagatcttgtttctcaggtaagtttcatcctgatacttaaatctgggtgggctccattgttttttaaactaacttcattcacacttaggcaatagcttctatgcggttcaggacattggtttgtgctttctttctggcaaaatatttaacttgtacccctgaatttgttgattacagtactaactagtcagaagattaatgatgcgagctcctcttgcaggttgaggttgtaattagcttgctgcctgctagttttcatgctgccattgcaggagtatgcatagagttgaagaagcacatggtaacggcaagctatgttgatgaatccatgtcaaacttgagccaagctgccaaagatgcaggtgtaactatactttgtgaaatgggcctagatcctggcatagatcacttgatgtcaatgaagatgattgatgaagctcatgcacgaaagggaaaaataaaggcatttacatcttactgtggtggattgccatctccagctgcagcaaacaatccgcttgcctataaattcagttggaacccagctggtgcactccggtcagggaaaaatcctgcagtctacaaatttcttggtgagacgatccatgtagatggtcataacttgtatgaatcagcaaagaggctcagactacgagagcttccagcttttgctctggaacacttgccaaatcggaattccttgatatatggtgacctttatggtatctccaaagaagcatccaccatatatagggctactcttcgttacgaaggttttagtgagattatggtaaccctttccaaaactgggttctttgatgctgcaaatcatccactgctgcaagatactagtcgtccaacatataagggtttccttgatgaactactgaataatatctccacaattaacacggacttagatattgaagcctctggtggatacgatgatgacctgattgccagactgttgaagctcgggtgttgcaaaaataaggaaatagctgttaagacagtcaaaaccatcaagttcttgggactacatgaagagactcaaatacctaagggttgttcgagcccatttgatgtgatttgccagcgaatggaacagaggatggcctatggccacaatgagcaagacatggtactgctccaccacgaagtcgaggtggaatacccggacgggcaacccgccgaaaagcaccaagcgacgctactggagttcgggaaggttgaaaatggcaggtccaccactgccatggcgctgaccgtcggcattccagcagcaataggggccctgctattgctaaagaataaggtccagacgaaaggagtgatcaggcctctgcaaccggaaatctacgttccagcattggagatcttggagtcgtcgggcatcaagctggttgagaaagtggagacttgaaagttccctgatacacagataaagatagtatgatatagcagggcacatgtatcttttgtattaactccgttctggaatatatatttgtgaactaaaatgtgacaaataaaaagaacgggtggagtatattgtaagagacggcaaagaaacctctgtatatatgacctgtcgatatcaaataatgccgatcagttagttggcttggctcttttgagggtttagtttatactagtaaatgagagcaaccagcgaagcataaacaagatgagacgtcagagcagcaacaacaacctgcgttgcctttggtttatattgcatcggttctccgaatgaactttgcatcctgtgcacatcagacatgtcccagagggatttcattttcattaaattgacatatcagcaaatctgcttatgcgtcgagatatttatgagaggggaagagagcttcatgaaa

SEQ ID NO: 44773 - DNA, 4112 bp, Zea Mays
ggcagtccggctcagagtgcagttccctctttggctcttcttcccatccccatcgtgtcgtgtcgtgccgtgcgcttccgagacagctcactccaccagcagggccgtcaccaccacgtcggcgtcgccatccatcgtcctcgtcggagcccaggccagctgagagctgactcctctccccgaaaggctggaaccgtccaaaaaggaagggtgcggatagcgtgtccaaatcgaaatcgagcagagttcctgggcgactgggcgcctctctattttaagctgacctccctccagataaactccgccagcgcagaggcctcgtccgtctccgtttccgtctccctccccgcgccacctcactcgttcgccgcctccgccggcgcccgtgcgccatctccactccagcgcgctctacgccgatcgagctgccaggaggttgtggatttcatgtccgtgatctaggcgccttacttggactcaggtatgggttctgctgctactgagggcaatgacaccttgctgggcaatggagttgttgggattcttgctgagacttgtaatatgtgggaaagaagggcgccgttaactccttcccattgtgcccgccttctgctaggaggaggcaagaacggacctcgagtaaaccggattattgtgcagccaagcacaaggaggatccatcatgacgctcagtatgaggatgcaggatgcgagatttcagaagacctgtcagaatgcggccttatcataggcatcaaacaacccaagctgcagatgattctttcagatagagcgtacgctttcttttcacacacacacaaagcccaaaaagagaatatgccactgttagacaagatccttgaagaaagggtgtccttgtttgattatgagctaattgttggagatgatgggaaaagatcactagcatttgggaaatttgctggtagagctggactgatagatttcttacatggtctcggacagcgatatttgagccttggatactcgactccatttctctctctgggacaatctcatatgtatccttcgctcgctgcagccaaggctgcagtcattgtcgttgcagaagagatagcaacatttggacttccatccggaatttgtccgatagtgtttgtgttcactggagttggaaacgggtgcgcaggagatattcaagttattgccccatacctttgttgatgctgagaagcttcccgaaatttttcaggccaggaatctgtctaagcaatctcagtcgaccaagagagtatttcaactttatggttgtgttgtgacctctagagacatggtttctcacaaggatcccaccagacaatttgacaaaggtgactattatgctcatccagaacactacacccctgtttttcatgaaagaattgctccatatgcatctgtcatcgtaaactgtatgtattgggagaagaggtttccaccattactaaatatggatcagttacagcaattgatggagactggttgtcctttagtcggcgtttgtgacataacttgtgatattggaggttccattgaatttatcaacaagagtacatcaatagagaggcctttctttcggtatgatccttctaagaattcataccatgatgatatggaaggtgccggagtggtctgcttggctgttgacattctccctacagaattctctaaagaggcctcccaacattttggaaacatactatctagacttgttgctagtttggcctcagtgaagcaaccggcagaacttccttcctacttgagaagagcttgcattgcacatgctggcagattaactcctttgtatgaatatatccctaggatgagaaatactatgatagatttggcacccgcaaaaacaaatccattgcctgacaagaagtatagcaccctggtatctctcagtgggcacctatttgataagttccttataaatgaagctttggacatcattgagacagctggaggttcatttcacttggttagatgtgaagttggacaaagcacggatgatatgtcatactcagagcttgaagtaggagcagatgatactgccacattggataaaattattgattccttgacttctttagctaatgaacatggtggagatcacgatgccgggcaagaaattgaattagctctgaagataggaaaagtcaatgagtatgaaactgacgtcacaattgataaaggagggccaaagattttaattcttggagctggaagagtctgtcggccagctgctgagtttctggcatcttacccagacatatgtacctatggtgttgatgaccatgatgcagatcaaattcatgttatcgtggcatctttgtatcaaaaagatgcagaagagacagttgatggtattgaaaatacaactgctacccagcttgatgttgctgatattggaagcctttcagatcttgtttctcaggttgaggttgtaattagcttgctgcctgctagttttcatgctgccattgcaggagtatgcatagagttgaagaagcacatggtaacggcaagctatgttgatgaatccatgtcaaacttgagccaagctgccaaagatgcaggtgtaactatactttgtgaaatgggcctagatcctggcatagatcacttgatgtcaatgaagatgattgatgaagctcatgcacgaaagggaaaaataaaggcatttacatcttactgtggtggattgccatctccagctgcagcaaacaatccgcttgcctataaattcagttggaacccagctggtgcactccggtcagggaaaaatcctgcagtctacaaatttcttggtgagacgatccatgtagatggtcataacttgtatgaatcagcaaagaggctcagactacgagagcttccagcttttgctctggaacacttgccaaatcggaattccttgatatatggtgacctttatggtatctccaaagaagcatccaccatatatagggctactcttcgttacgaaggttttagtgagattatggtaaccctttccaaaactgggttctttgatgctgcaaatcatccactgctgcaagatactagtcgtccaacatataagggtttccttgatgaactactgaataatatctccacaattaacacggacttagatattgaagcctctggtggatacgatgatgacctgattgccagactgttgaagctcgggtgttgcaaaaataaggaaatagctgttaagacagtcaaaaccatcaagttcttgggactacatgaagagactcaaatacctaagggttgttcgagcccatttgatgtgatttgccagcgaatggaacagaggatggcctatggccacaatgagcaagacatggtactgctccaccacgaagtcgaggtggaatacccggacgggcaacccgccgaaaagcaccaagcgacgctactggagttcgggaaggttgaaaatggcaggtccaccactgccatggcgctgaccgtcggcattccagcagcaataggggccctgctattgctaaagaataaggtccagacgaaaggagtgatcaggcctctgcaaccggaaatctacgttccagcattggagatcttggagtcgtcgggcatcaagctggttgagaaagtggagacttgaaagttccctgatacacagataaagatagtatgatatagcagggcacatgtatcttttgtattaactccgttctggaatatatatttgtgaactaaaatgtgacaaataaaaagaacgggtggagtatattgtaagagacggcaaagaaacctctgtatatatgacctgtcgatatcaaataatgccgatcagttagttggcttggctcttttgagggtttagtttatactagtaaatgagagcaaccagcgaagcataaacaagatgagacgtcagagcagcaacaacaacctgcgttgcctttggtttatattgcatcggttctccgaatgaactttgcatcctgtgcacatcagacatgtcccagagggatttcattttcattaaattgacatatcagcaaatctgcttatgcgtcgagatatttatgagaggggaagagagcttcatgaaa

SEQ ID NO: 44774 - DNA, 4090 bp, Zea Mays
cggcagtccggctcagagtgcagttccctctttggctcttcttcccatccccatcgtgtcgtgtcgtgccgtgcgcttccgagacagctcactccaccagcagggccgtcaccaccacgtcggcgtcgccatccatcgtcctcgtcggagcccaggccagctgagagctgactcctctccccgaaaggctggaaccgtccaaaaaggaagggtgcggatagcgtgtccaaatcgaaatcgagcagagttcctgggcgactgggcgcctctctattttaagctgacctccctccagataaactccgccagcgcagaggcctcgtccgtctccgtttccgtctccctccccgcgccacctcactcgttcgccgcctccgccggcgcccgtgcgccatctccactccagcgcgctctacgccgatcgagctgccaggaggttgtggatttcatgtccgtgatctaggcgccttacttggactcagggcaatgacaccttgctgggcaatggagttgttgggattcttgctgagacttgtaatatgtgggaaagaagggcgccgttaactccttcccattgtgcccgccttctgctaggaggaggcaagaacggacctcgagtaaaccggattattgtgcagccaagcacaaggaggatccatcatgacgctcagtatgaggatgcaggatgcgagatttcagaagacctgtcagaatgcggccttatcataggcatcaaacaacccaagctgcagatgattctttcagatagagcgtacgctttcttttcacacacacacaaagcccaaaaagagaatatgccactgttagacaagatccttgaagaaagggtgtccttgtttgattatgagctaattgttggagatgatgggaaaagatcactagcatttgggaaatttgctggtagagctggactgatagatttcttacatggtctcggacagcgatatttgagccttggatactcgactccatttctctctctgggacaatctcatatgtatccttcgctcgctgcagccaaggctgcagtcattgtcgttgcagaagagatagcaacatttggacttccatccggaatttgtccgatagtgtttgtgttcactggagttggaaacgggtgcgcaggagatattcaagttattgccccatacctttgttgatgctgagaagcttcccgaaatttttcaggccaggaatctgtctaagcaatctcagtcgaccaagagagtatttcaactttatggttgtgttgtgacctctagagacatggtttctcacaaggatcccaccagacaatttgacaaaggtgactattatgctcatccagaacactacacccctgtttttcatgaaagaattgctccatatgcatctgtcatcgtaaactgtatgtattgggagaagaggtttccaccattactaaatatggatcagttacagcaattgatggagactggttgtcctttagtcggcgtttgtgacataacttgtgatattggaggttccattgaatttatcaacaagagtacatcaatagagaggcctttctttcggtatgatccttctaagaattcataccatgatgatatggaaggtgccggagtggtctgcttggctgttgacattctccctacagaattctctaaagaggcctcccaacattttggaaacatactatctagacttgttgctagtttggcctcagtgaagcaaccggcagaacttccttcctacttgagaagagcttgcattgcacatgctggcagattaactcctttgtatgaatatatccctaggatgagaaatactatgatagatttggcacccgcaaaaacaaatccattgcctgacaagaagtatagcaccctggtatctctcagtgggcacctatttgataagttccttataaatgaagctttggacatcattgagacagctggaggttcatttcacttggttagatgtgaagttggacaaagcacggatgatatgtcatactcagagcttgaagtaggagcagatgatactgccacattggataaaattattgattccttgacttctttagctaatgaacatggtggagatcacgatgccgggcaagaaattgaattagctctgaagataggaaaagtcaatgagtatgaaactgacgtcacaattgataaaggagggccaaagattttaattcttggagctggaagagtctgtcggccagctgctgagtttctggcatcttacccagacatatgtacctatggtgttgatgaccatgatgcagatcaaattcatgttatcgtggcatctttgtatcaaaaagatgcagaagagacagttgatggtattgaaaatacaactgctacccagcttgatgttgctgatattggaagcctttcagatcttgtttctcaggttgaggttgtaattagcttgctgcctgctagttttcatgctgccattgcaggagtatgcatagagttgaagaagcacatggtaacggcaagctatgttgatgaatccatgtcaaacttgagccaagctgccaaagatgcaggtgtaactatactttgtgaaatgggcctagatcctggcatagatcacttgatgtcaatgaagatgattgatgaagctcatgcacgaaagggaaaaataaaggcatttacatcttactgtggtggattgccatctccagctgcagcaaacaatccgcttgcctataaattcagttggaacccagctggtgcactccggtcagggaaaaatcctgcagtctacaaatttcttggtgagacgatccatgtagatggtcataacttgtatgaatcagcaaagaggctcagactacgagagcttccagcttttgctctggaacacttgccaaatcggaattccttgatatatggtgacctttatggtatctccaaagaagcatccaccatatatagggctactcttcgttacgaaggttttagtgagattatggtaaccctttccaaaactgggttctttgatgctgcaaatcatccactgctgcaagatactagtcgtccaacatataagggtttccttgatgaactactgaataatatctccacaattaacacggacttagatattgaagcctctggtggatacgatgatgacctgattgccagactgttgaagctcgggtgttgcaaaaataaggaaatagctgttaagacagtcaaaaccatcaagttcttgggactacatgaagagactcaaatacctaagggttgttcgagcccatttgatgtgatttgccagcgaatggaacagaggatggcctatggccacaatgagcaagacatggtactgctccaccacgaagtcgaggtggaatacccggacgggcaacccgccgaaaagcaccaagcgacgctactggagttcgggaaggttgaaaatggcaggtccaccactgccatggcgctgaccgtcggcattccagcagcaataggggccctgctattgctaaagaataaggtccagacgaaaggagtgatcaggcctctgcaaccggaaatctacgttccagcattggagatcttggagtcgtcgggcatcaagctggttgagaaagtggagacttgaaagttccctgatacacagataaagatagtatgatatagcagggcacatgtatcttttgtattaactccgttctggaatatatatttgtgaactaaaatgtgacaaataaaaagaacgggtggagtatattgtaagagacggcaaagaaacctctgtatatatgacctgtcgatatcaaataatgccgatcagttagttggcttggctcttttgagggtttagtttatactagtaaatgagagcaaccagcgaagcataaacaagatgagacgtcagagcagcaacaacaacctgcgttgcctttggtttatattgcatcggttctccgaatgaactttgcatcctgtgcacatcagacatgtcccagagggatttcattttcattaaattgacatatcagcaaatctgcttatgcgtcgagatatttatgagaggggaagagagcttcatgaaa

SEQ ID NO: 44775 - DNA, 4375 bp, Zea Mays
aagtcaggcgtcgggtcctcagtcgtagcggcggcgatggcgcgcggcggcggggggcggtcgaagaaggaggatgaggaggagctgcggggggcgaagcgcggttacaaggaggcgtcggcggagggtaatcgggaggaggaggcgcgctgggctaacgtcatcggcgacatctacaagcgccgctgcgagtacgtcgaggccctccggtggcttcgggcggactacgaggtctccgtaaagcacctcccgcagcggcacctcctcccctcctgtcagtcgctcggcgaggtctacctccgcctcggccgcttctcggaggcgctcacctaccagaagaagcatctacagctcgcaaaggagtctgatgaccttgttgagcagcagcgagctaccacacagcttgggagaacataccatgaaatccttctaagatctgaaaatgaccatagtgccataaggaatgcaaaaaagtactttaaatcttcgatgaagctggcaaggattctaaaggagagatccccttcccaaaagtcggactttctaaaagaacttattgatgcgtacaataatatgggcatgcttgagctggaacttgataattttgaagaagctgagaaactacttatccagggcctgaagatatgcgacgacgaagaggtagattcgtatgatgatgctcgcactaggctccatcataatctcggaaatgtttatactgaactacagaattggaaaaaagccagggggcacattgagaaggacatagagatatgtagaaaaatacgccatcttcaaggtgaggcaaaaggattcataaatctgggggagttacattatcgagttcagaagtatgacaatgcaaaactttgttacaataaagctcttgaagtagcaagatccttggaagatgaggatgctctaattgaacaaattcaccagaatattgaaactgttacgaaagcagttgaagtatttgagcagttgaaggaggatgaactgaagctaaaaaaacttatccgggacacttctaatgctcgtggaacatctaaagagagaaaactcctacttgatcagcatgcatggctggatagtcttattgagaaggccaggatgatatgtgcatggcaaaaacacaaggaattctcaaaagggaaaaaaagggtagcaaatgaacttcgcgataaggaaaagttgagtgattctcttctgtcgataggagaatcataccaaaagcttagaaacttcagtaaagctcgtaagtggtacatgaaaagttggaacatatatcggtcgatagggaacttagagggacaagcattagcgaaagtgaacattggcaatgttcttgattcttgtggcgactgggctggtgcattgcaagcttacgaagaaggctaccggattgctgtggaagcagacctacctaatgtgcaactttctgccctcgagaacatgcattacagtcatatggtcagatttgataatatcgaagaagccaagaaaatgcaggaaaaaatagacaatctgaagcaaacactgaatcaatgtgaagcaagggatactgttagtgactactgctcagaaactgacactgaaggtggttgcacatctgataacacgcttgatgctcagaatgaccatggacaggctgcaaataactacgaggaacctgatgatgatgttacgcttgcttcactcgttcagaggagtgggagctcatccaagattaaggtacccaagatacggaattcttctaagaagtttgatgaactatgtgatgtgactgaagacatacataattcttctaagaaggttgatgaactaggtgatatggctgaaggcactagggcagttttaagtagatcacgttctgatcactctgttggcagaaaacgtgtccgtgtgatcttatcagatgatgaatccgacgagaatcatgaaaacgttcagtttaaaaagacatcaactagtcctgcagatagtatgtcagtctcagaccatggagcaagcagcagcagaaaccaggatactttacaagttaatcaaacaagggatgcaccctatccagctgaggagagcatttgttcattcaaatcaagtagtcctattgatcatgcttttgaaggcataggattaggtgcttccagtgcaggaaagggaccaacctccaaatcagcagcaagtttttccaagctcagtacacctggctcaaacagtctgaatgaaagccaaaatgctgttggttctcaatccaaagatgctgataatcacttctgggccttcagaatcggcggccatctggtttacttggatggacgtgcttgtgtacatgaaggtgcttttagcattgactctctcaaagttgaagtagcatgtgtatattatcttcagatttctgatgaaaaaagggccaaaggtctattgcctatcattggggagctaaagtttcgtgggaaggtattggaagatgcggtatccatatattatgatgatcagctcgcttctgaacagaagtgtgttgatgttgttattgatgattgggtgccaaagcagctgatgaagttgtatgttgatttctgcatgaagtcattagaagcacccaataagaagctgctgacgaaactatataatcttgaggtctccgaagatgaaatcattgtttctgattgcggactgcaggatatgtcaattgtcccctttcttgatgccctaagatctcacaaaacaatagcagttttggatctttctcataatttactaggaaatcaaacagttgaaagacttcagcatatatttgcttcatcaagtcacacatatggtggcttgactctggatttacattgtaatcgattgggtccaactgctttatttcagatatgtgagtgcgctgttttgactgatcgattggaagtacttaatctatctgggaatcgcctcactgatgcatgcagttcttacctattcacaatcctgaaaaagtgcaaagcttgaatgtcgagcagtgttctatcacgtcaagaactgttcagaagatgacagatgcactccatgaagagtctgtcctttcacatctctcattaggaaagaacaacccaatttctagcaatacaatgcttaaccttctatccaaacttgcatctctcacaaggttttcagaactaagcctgactggtataaaactgaataagttaatggttgataagttgtgcctccttgcacaatcctcgtgcctatcaggacttctgctaggtggaacttccattggaccggtggagacaactaggcttactgaggcattgtcttgtacatctcaagatttcctaaggttggagttgtctaattgtgggctcacaacacctgatttcacacaaatctgtacaaatctctcccggatcaatattcttgagttaaaccttggaggaaatccaattaacctggagggatgtgatgctgtacagcgaatgcttgtaaatccccaatgcagtattagatctctcagccttgacaaatgcaatcttggacttgctggaattgtccgtgtcattcaatcattaccaggtgaggaacaattttgtggaagcatcagtctctacattaagttaataatattctactttcagaaaacagccaattagaggagctgcgcgtgtctaagaacaccaacttggcgttggagacaacaacaaagtatgacgaagacatgcaggaagtatcaacagcttctgagcaaaagcaatgtaatgaccctgaaacaacgaatgatatagctccagggaacatagattttgcgaacatgcaggttccagacagtgaagatgaagcagataatgatgcccaccgtgccagatctggttcacgcaggagctgtgcaagttcatcgcagaaaaactcttactcttcttgtcagatgattgaagaactggcgaaggcccttatttcagcaaagcagttgatggtgcttgatcttagctgcaatggtttgtcggaggaggcagtccagtcactgtattctgcttgggcgtctgttccgagaggcgatggaatggctcggaaacatgtaaataaggaggtggtccacttttcagtggatggtatgaggtgctgcggcctaaaaccctgctgcagaagagacctgcaaatgtgaaccctggacgaccttccgatgctaaattatggttgcactctgtaaataaatcatgagtgaatcaactaggcgttgaagcattgtcaatgcaacttcacactagtcacgatagtttggtgagtaattatgctgattcgcgggaatgtatacactacaatactagatgcttgagatttgggtatgcagttgtttcctgaggtgcagttactccttcgaaatcgtgccgtg

SEQ ID NO: 44776 - DNA, 4316 bp, Zea Mays
aagtcaggcgtcgggtcctcagtcgtagcggcggcgatggcgcgcggcggcggggggcggtcgaagaaggaggatgaggaggagctgcggggggcgaagcgcggttacaaggaggcgtcggcggagggtaatcgggaggaggaggcgcgctgggctaacgtcatcggcgacatctacaagcgccgctgcgagtacgtcgaggccctccggtggcttcgggcggactacgaggtctccgtaaagcacctcccgcagcggcacctcctcccctcctgtcagtcgctcggcgaggtctacctccgcctcggccgcttctcggaggcgctcacctaccagaagaagcatctacagctcgcaaaggagtctgatgaccttgttgagcagcagcgagctaccacacagcttgggagaacataccatgaaatccttctaagatctgaaaatgaccatagtgccataaggaatgcaaaaaagtactttaaatcttcgatgaagctggcaaggattctaaaggagagatccccttcccaaaagtcggactttctaaaagaacttattgatgcgtacaataatatgggcatgcttgagctggaacttgataattttgaagaagctgagaaactacttatccagggcctgaagatatgcgacgacgaagaggtagattcgtatgatgatgctcgcactaggctccatcataatctcggaaatgtttatactgaactacagaattggaaaaaagccagggggcacattgagaaggacatagagatatgtagaaaaatacgccatcttcaaggtgaggcaaaaggattcataaatctgggggagttacattatcgagttcagaagtatgacaatgcaaaactttgttacaataaagctcttgaagtagcaagatccttggaagatgaggatgctctaattgaacaaattcaccagaatattgaaactgttacgaaagcagttgaagtatttgagcagttgaaggaggatgaactgaagctaaaaaaacttatccgggacacttctaatgctcgtggaacatctaaagagagaaaactcctacttgatcagcatgcatggctggatagtcttattgagaaggccaggatgatatgtgcatggcaaaaacacaaggaattctcaaaagggaaaaaaagggtagcaaatgaacttcgcgataaggaaaagttgagtgattctcttctgtcgataggagaatcataccaaaagcttagaaacttcagtaaagctcgtaagtggtacatgaaaagttggaacatatatcggtcgatagggaacttagagggacaagcattagcgaaagtgaacattggcaatgttcttgattcttgtggcgactgggctggtgcattgcaagcttacgaagaaggctaccggattgctgtggaagcagacctacctaatgtgcaactttctgccctcgagaacatgcattacagtcatatggtcagatttgataatatcgaagaagccaagaaaatgcaggaaaaaatagacaatctgaagcaaacactgaatcaatgtgaagcaagggatactgttagtgactactgctcagaaactgacactgaaggtggttgcacatctgataacacgcttgatgctcagaatgaccatggacaggctgcaaataactacgaggaacctgatgatgatgttacgcttgcttcactcgttcagaggagtgggagctcatccaagattaaggtacccaagatacggaattcttctaagaagtttgatgaactatgtgatgtgactgaagacatacataattcttctaagaaggttgatgaactaggtgatatggctgaaggcactagggcagttttaagtagatcacgttctgatcactctgttggcagaaaacgtgtccgtgtgatcttatcagatgatgaatccgacgagaatcatgaaaacgttcagtttaaaaagacatcaactagtcctgcagatagtatgtcagtctcagaccatggagcaagcagcagcagaaaccaggatactttacaagttaatcaaacaagggatgcaccctatccagctgaggagagcatttgttcattcaaatcaagtagtcctattgatcatgcttttgaaggcataggattaggtgcttccagtgcaggaaagggaccaacctccaaatcagcagcaagtttttccaagctcagtacacctggctcaaacagtctgaatgaaagccaaaatgctgttggttctcaatccaaagatgctgataatcacttctgggccttcagaatcggcggccatctggtttacttggatggacgtgcttgtgtacatgaaggtgcttttagcattgactctctcaaagttgaagtagcatgtgtatattatcttcagatttctgatgaaaaaagggccaaaggtctattgcctatcattggggagctaaagtttcgtgggaaggtattggaagatgcggtatccatatattatgatgatcagctcgcttctgaacagaagtgtgttgatgttgttattgatgattgggtgccaaagcagctgatgaagttgtatgttgatttctgcatgaagtcattagaagcacccaataagaagctgctgacgaaactatataatcttgaggtctccgaagatgaaatcattgtttctgattgcggactgcaggatatgtcaattgtcccctttcttgatgccctaagatctcacaaaacaatagcagttttggatctttctcataatttactaggaaatcaaacagttgaaagacttcagcatatatttgcttcatcaagtcacacatatggtggcttgactctggatttacattgtaatcgattgggtccaactgctttatttcagatatgtgagtgcgctgttttgactgatcgattggaagtacttaatctatctgggaatcgcctcactgatgcatgcagttcttacctattcacaatcctgaaaaagtgcaaagcactttatagcttgaatgtcgagcagtgttctatcacgtcaagaactgttcagaagatgacagatgcactccatgaagagtctgtcctttcacatctctcattaggaaagaacaacccaatttctagcaatacaatgcttaaccttctatccaaacttgcatctctcacaaggttttcagaactaagcctgactggtataaaactgaataagttaatggttgataagttgtgcctccttgcacaatcctcgtgcctatcaggacttctgctaggtggaacttccattggaccggtggagacaactaggcttactgaggcattgtcttgtacatctcaagatttcctaaggttggagttgtctaattgtgggctcacaacacctgatttcacacaaatctgtacaaatctctcccggatcaatattcttgagttaaaccttggaggaaatccaattaacctggagggatgtgatgctgtacagcgaatgcttgtaaatccccaatgcagtattagatctctcagccttgacaaatgcaatcttggacttgctggaattgtccgtgtcattcaatcattaccagccaattagaggagctgcgcgtgtctaagaacaccaacttggcgttggagacaacaacaaagtatgacgaagacatgcaggaagtatcaacagcttctgagcaaaagcaatgtaatgaccctgaaacaacgaatgatatagctccagggaacatagattttgcgaacatgcaggttccagacagtgaagatgaagcagataatgatgcccaccgtgccagatctggttcacgcaggagctgtgcaagttcatcgcagaaaaactcttactcttcttgtcagatgattgaagaactggcgaaggcccttatttcagcaaagcagttgatggtgcttgatcttagctgcaatggtttgtcggaggaggcagtccagtcactgtattctgcttgggcgtctgttccgagaggcgatggaatggctcggaaacatgtaaataaggaggtggtccacttttcagtggatggtatgaggtgctgcggcctaaaaccctgctgcagaagagacctgcaaatgtgaaccctggacgaccttccgatgctaaattatggttgcactctgtaaataaatcatgagtgaatcaactaggcgttgaagcattgtcaatgcaacttcacactagtcacgatagtttggtgagtaattatgctgattcgcgggaatgtatacactacaatactagatgcttgagatttgggtatgcagttgtttcctgaggtgcagttactccttcgaaatcgtgccgtg

SEQ ID NO: 44777 - DNA, 4323 bp, Zea Mays
aagtcaggcgtcgggtcctcagtcgtagcggcggcgatggcgcgcggcggcggggggcggtcgaagaaggaggatgaggaggagctgcggggggcgaagcgcggttacaaggaggcgtcggcggagggtaatcgggaggaggaggcgcgctgggctaacgtcatcggcgacatctacaagcgccgctgcgagtacgtcgaggccctccggtggcttcgggcggactacgaggtctccgtaaagcacctcccgcagcggcacctcctcccctcctgtcagtcgctcggcgaggtctacctccgcctcggccgcttctcggaggcgctcacctaccagaagaagcatctacagctcgcaaaggagtctgatgaccttgttgagcagcagcgagctaccacacagcttgggagaacataccatgaaatccttctaagatctgaaaatgaccatagtgccataaggaatgcaaaaaagtactttaaatcttcgatgaagctggcaaggattctaaaggagagatccccttcccaaaagtcggactttctaaaagaacttattgatgcgtacaataatatgggcatgcttgagctggaacttgataattttgaagaagctgagaaactacttatccagggcctgaagatatgcgacgacgaagaggtagattcgtatgatgatgctcgcactaggctccatcataatctcggaaatgtttatactgaactacagaattggaaaaaagccagggggcacattgagaaggacatagagatatgtagaaaaatacgccatcttcaaggtgaggcaaaaggattcataaatctgggggagttacattatcgagttcagaagtatgacaatgcaaaactttgttacaataaagctcttgaagtagcaagatccttggaagatgaggatgctctaattgaacaaattcaccagaatattgaaactgttacgaaagcagttgaagtatttgagcagttgaaggaggatgaactgaagctaaaaaaacttatccgggacacttctaatgctcgtggaacatctaaagagagaaaactcctacttgatcagcatgcatggctggatagtcttattgagaaggccaggatgatatgtgcatggcaaaaacacaaggaattctcaaaagggaaaaaaagggtagcaaatgaacttcgcgataaggaaaagttgagtgattctcttctgtcgataggagaatcataccaaaagcttagaaacttcagtaaagctcgtaagtggtacatgaaaagttggaacatatatcggtcgatagggaacttagagggacaagcattagcgaaagtgaacattggcaatgttcttgattcttgtggcgactgggctggtgcattgcaagcttacgaagaaggctaccggattgctgtggaagcagacctacctaatgtgcaactttctgccctcgagaacatgcattacagtcatatggtcagatttgataatatcgaagaagccaagaaaatgcaggaaaaaatagacaatctgaagcaaacactgaatcaatgtgaagcaagggatactgttagtgactactgctcagaaactgacactgaaggtggttgcacatctgataacacgcttgatgctcagaatgaccatggacaggctgcaaataactacgaggaacctgatgatgatgttacgcttgcttcactcgttcagaggagtgggagctcatccaagattaaggtacccaagatacggaattcttctaagaagtttgatgaactatgtgatgtgactgaagacatacataattcttctaagaaggttgatgaactaggtgatatggctgaaggcactagggcagttttaagtagatcacgttctgatcactctgttggcagaaaacgtgtccgtgtgatcttatcagatgatgaatccgacgagaatcatgaaaacgttcagtttaaaaagacatcaactagtcctgcagatagtatgtcagtctcagaccatggagcaagcagcagcagaaaccaggatactttacaagttaatcaaacaagggatgcaccctatccagctgaggagagcatttgttcattcaaatcaagtagtcctattgatcatgcttttgaaggcataggattaggtgcttccagtgcaggaaagggaccaacctccaaatcagcagcaagtttttccaagctcagtacacctggctcaaacagtctgaatgaaagccaaaatgctgttggttctcaatccaaagatgctgataatcacttctgggccttcagaatcggcggccatctggtttacttggatggacgtgcttgtgtacatgaaggtgcttttagcattgactctctcaaagttgaagtagcatgtgtatattatcttcagatttctgatgaaaaaagggccaaaggtctattgcctatcattggggagctaaagtttcgtgggaaggtattggaagatgcggtatccatatattatgatgatcagctcgcttctgaacagaagtgtgttgatgttgttattgatgattgggtgccaaagcagctgatgaagttgtatgttgatttctgcatgaagtcattagaagcacccaataagaagctgctgacgaaactatataatcttgaggtctccgaagatgaaatcattgtttctgattgcggactgcaggatatgtcaattgtcccctttcttgatgccctaagatctcacaaaacaatagcagttttggatctttctcataatttactaggaaatcaaacagttgaaagacttcagcatatatttgcttcatcaagtcacacatatggtggcttgactctggatttacattgtaatcgattgggtccaactgctttatttcagatatgtgagtgcgctgttttgactgatcgattggaagtacttaatctatctgggaatcgcctcactgatgcatgcagttcttacctattcacaatcctgaaaaagtgcaaagcactttatagcttgaatgtcgagcagtgttctatcacgtcaagaactgttcagaagatgacagatgcactccatgaagagtctgtcctttcacatctctcattaggaaagaacaacccaatttctagcaatacaatgcttaaccttctatccaaacttgcatctctcacaaggttttcagaactaagcctgactggtataaaactgaataagttaatggttgataagttgtgcctccttgcacaatcctcgtgcctatcaggacttctgctaggtggaacttccattggaccggtggagacaactaggcttactgaggcattgtcttgtacatctcaagatttcctaaggttggagttgtctaattgtgggctcacaacacctgatttcacacaaatctgtacaaatctctcccggatcaatattcttgagttaaaccttggaggaaatccaattaacctggagggatgtgatgctgtacagcgaatgcttgtaaatccccaatgcagtattagatctctcagccttgacaaatgcaatcttggacttgctggaattgtccgtgtcattcaatcattaccagaaaacagccaattagaggagctgcgcgtgtctaagaacaccaacttggcgttggagacaacaacaaagtatgacgaagacatgcaggaagtatcaacagcttctgagcaaaagcaatgtaatgaccctgaaacaacgaatgatatagctccagggaacatagattttgcgaacatgcaggttccagacagtgaagatgaagcagataatgatgcccaccgtgccagatctggttcacgcaggagctgtgcaagttcatcgcagaaaaactcttactcttcttgtcagatgattgaagaactggcgaaggcccttatttcagcaaagcagttgatggtgcttgatcttagctgcaatggtttgtcggaggaggcagtccagtcactgtattctgcttgggcgtctgttccgagaggcgatggaatggctcggaaacatgtaaataaggaggtggtccacttttcagtggatggtatgaggtgctgcggcctaaaaccctgctgcagaagagacctgcaaatgtgaaccctggacgaccttccgatgctaaattatggttgcactctgtaaataaatcatgagtgaatcaactaggcgttgaagcattgtcaatgcaacttcacactagtcacgatagtttggtgagtaattatgctgattcgcgggaatgtatacactacaatactagatgcttgagatttgggtatgcagttgtttcctgaggtgcagttactccttcgaaatcgtgccgtg

SEQ ID NO: 44778 - DNA, 4111 bp, Zea Mays
cttcctctcggcccttgacggaaaattcgggtggaaaaagggaaaaaagtcaggcgtcgggtcctcagtcgtagcggcggcgatggcgcgcggcggcggggggcggtcgaagaaggaggatgaggaggagctgcggggggcgaagcgcggttacaaggaggcgtcggcggagggtaatcgggaggaggaggcgcgctgggctaacgtcatcggcgacatctacaagcgccgctgcgagtacgtcgaggccctccggtggcttcgggcggactacgaggtctccgtaaagcacctcccgcagcggcacctcctcccctcctgtcagtcgctcggcgaggtctacctccgcctcggccgcttctcggaggcgctcacctaccagaagaagcatctacagctcgcaaaggagtctgatgaccttgttgagcagcagcgagctaccacacagcttgggagaacataccatgaaatccttctaagatctgaaaatgaccatagtgccataaggaatgcaaaaaagtactttaaatcttcgatgaagctggcaaggattctaaaggagagatccccttcccaaaagtcggactttctaaaagaacttattgatgcgtacaataatatgggcatgcttgagctggaacttgataattttgaagaagctgagaaactacttatccagggcctgaagatatgcgacgacgaagaggtagattcgtatgatgatgctcgcactaggctccatcataatctcggaaatgtttatactgaactacagaattggaaaaaagccagggggcacattgagaaggacatagagatatgtagaaaaatacgccatcttcaaggtgaggcaaaaggattcataaatctgggggagttacattatcgagttcagaagtatgacaatgcaaaactttgttacaataaagctcttgaagtagcaagatccttggaagatgaggatgctctaattgaacaaattcaccagaatattgaaactgttacgaaagcagttgaagtatttgagcagttgaaggaggatgaactgaagctaaaaaaacttatccgggacacttctaatgctcgtggaacatctaaagagagaaaactcctacttgatcagcatgcatggctggatagtcttattgagaaggccaggatgatatgtgcatggcaaaaaggacaagcattagcgaaagtgaacattggcaatgttcttgattcttgtggcgactgggctggtgcattgcaagcttacgaagaaggctaccggattgctgtggaagcagacctacctaatgtgcaactttctgccctcgagaacatgcattacagtcatatggtcagatttgataatatcgaagaagccaagaaaatgcaggaaaaaatagacaatctgaagcaaacactgaatcaatgtgaagcaagggatactgttagtgactactgctcagaaactgacactgaaggtggttgcacatctgataacacgcttgatgctcagaatgaccatggacaggctgcaaataactacgaggaacctgatgatgatgttacgcttgcttcactcgttcagaggagtgggagctcatccaagattaaggttgatgaactaggtgatatggctgaaggcactagggcagttttaagtagatcacgttctgatcactctgttggcagaaaacgtgtccgtgtgatcttatcagatgatgaatccgacgagaatcatgaaaacgttcagtttaaaaagacatcaactagtcctgcagatagtatgtcagtctcagaccatggagcaagcagcagcagaaaccaggatactttacaagttaatcaaacaagggatgcaccctatccagctgaggagagcatttgttcattcaaatcaagtagtcctattgatcatgcttttgaaggcataggattaggtgcttccagtgcaggaaagggaccaacctccaaatcagcagcaagtttttccaagctcagtacacctggctcaaacagtctgaatgaaagccaaaatgctgttggttctcaatccaaagatgctgataatcacttctgggccttcagaatcggcggccatctggtttacttggatggacgtgcttgtgtacatgaaggtgcttttagcattgactctctcaaagttgaagtagcatgtgtatattatcttcagatttctgatgaaaaaagggccaaaggtctattgcctatcattggggagctaaagtttcgtgggaaggtattggaagatgcggtatccatatattatgatgatcagctcgcttctgaacagaagtgtgttgatgttgttattgatgattgggtgccaaagcagctgatgaagttgtatgttgatttctgcatgaagtcattagaagcacccaataagaagctgctgacgaaactatataatcttgaggtctccgaagatgaaatcattgtttctgattgcggactgcaggatatgtcaattgtcccctttcttgatgccctaagatctcacaaaacaatagcagttttggatctttctcataatttactaggaaatcaaacagttgaaagacttcagcatatatttgcttcatcaagtcacacatatggtggcttgactctggatttacattgtaatcgattgggtccaactgctttatttcagatatgtgagtgcgctgttttgactgatcgattggaagtacttaatctatctgggaatcgcctcactgatgcatgcagttcttacctattcacaatcctgaaaaagtgcaaagcactttatagcttgaatgtcgagcagtgttctatcacgtcaagaactgttcagaagatgacagatgcactccatgaagagtctgtcctttcacatctctcattaggaaagaacaacccaatttctagcaatacaatgcttaaccttctatccaaacttgcatctctcacaaggttttcagaactaagcctgactggtataaaactgaataagttaatggttgataagttgtgcctccttgcacaatcctcgtgcctatcaggacttctgctaggtggaacttccattggaccggtggagacaactaggcttactgaggcattgtcttgtacatctcaagatttcctaaggttggagttgtctaattgtgggctcacaacacctgatttcacacaaatctgtacaaatctctcccggatcaatattcttgagttaaaccttggaggaaatccaattaacctggagggatgtgatgctgtacagcgaatgcttgtaaatccccaatgcagtattagatctctcagccttgacaaatgcaatcttggacttgctggaattgtccgtgtcattcaatcattaccagaaaacagccaattagaggagctgcgcgtgtctaagaacaccaacttggcgttggagacaacaacaaagtatgacgaagacatgcaggaagtatcaacagcttctgagcaaaagcaatgtaatgaccctgaaacaacgaatgatatagctccagggaacatagattttgcgaacatgcaggttccagacagtgaagatgaagcagataatgatgcccaccgtgccagatctggttcacgcaggagctgtgcaagttcatcgcagaaaaactcttactcttcttgtcagatgattgaagaactggcgaaggcccttatttcagcaaagcagttgatggtgcttgatcttagctgcaatggtttgtcggaggaggcagtccagtcactgtattctgcttgggcgtctgttccgagaggcgatggaatggctcggaaacatgtaaataaggaggtggtccacttttcagtggatggtatgaggtgctgcggcctaaaaccctgctgcagaagagacctgcaaatgtgaaccctggacgaccttccgatgctaaattatggttgcactctgtaaataaatcatgagtgaatcaactaggcgttgaagcattgtcaatgcaacttcacactagtcacgatagtttggtgagtaattatgctgattcgcgggaatgtatacactacaatactagatgcttgagatttgggtatgcagttgtttcctgaggtgcagttactccttcgaaatcgtgccgtg

SEQ ID NO: 44779 - DNA, 2302 bp, Zea Mays
aagtcaggcgtcgggtcctcagtcgtagcggcggcgatggcgcgcggcggcggggggcggtcgaagaaggaggatgaggaggagctgcggggggcgaagcgcggttacaaggaggcgtcggcggagggtaatcgggaggaggaggcgcgctgggctaacgtcatcggcgacatctacaagcgccgctgcgagtacgtcgaggccctccggtggcttcgggcggactacgaggtctccgtaaagcacctcccgcagcggcacctcctcccctcctgtcagtcgctcggcgaggtctacctccgcctcggccgcttctcggaggcgctcacctaccagaagaagcatctacagctcgcaaaggagtctgatgaccttgttgagcagcagcgagctaccacacagcttgggagaacataccatgaaatccttctaagatctgaaaatgaccatagtgccataaggaatgcaaaaaagtactttaaatcttcgatgaagctggcaaggattctaaaggagagatccccttcccaaaagtcggactttctaaaagaacttattgatgcgtacaataatatgggcatgcttgagctggaacttgataattttgaagaagctgagaaactacttatccagggcctgaagatatgcgacgacgaagaggtagattcgtatgatgatgctcgcactaggctccatcataatctcggaaatgtttatactgaactacagaattggaaaaaagccagggggcacattgagaaggacatagagatatgtagaaaaatacgccatcttcaaggtgaggcaaaaggattcataaatctgggggagttacattatcgagttcagaagtatgacaatgcaaaactttgttacaataaagctcttgaagtagcaagatccttggaagatgaggatgctctaattgaacaaattcaccagaatattgaaactgttacgaaagcagttgaagtatttgagcagttgaaggaggatgaactgaagctaaaaaaacttatccgggacacttctaatgctcgtggaacatctaaagagagaaaactcctacttgatcagcatgcatggctggatagtcttattgagaaggccaggatgatatgtgcatggcaaaaacacaaggaattctcaaaagggaaaaaaagggtagcaaatgaacttcgcgataaggaaaagttgagtgattctcttctgtcgataggagaatcataccaaaagcttagaaacttcagtaaagctcgtaagtggtacatgaaaagttggaacatatatcggtcgatagggaacttagagggacaagcattagcgaaagtgaacattggcaatgttcttgattcttgtggcgactgggctggtgcattgcaagcttacgaagaaggctaccggattgctgtggaagcagacctacctaatgtgcaactttctgccctcgagaacatgcattacagtcatatggtcagatttgataatatcgaagaagccaagaaaatgcaggaaaaaatagacaatctgaagcaaacactgaatcaatgtgaagcaagggatactgttagtgactactgctcagaaactgacactgaaggtggttgcacatctgataacacgcttgatgctcagaatgaccatggacaggctgcaaataactacgaggaacctgatgatgatgttacgcttgcttcactcgttcagaggagtgggagctcatccaagattaaggtacccaagatacggaattcttctaagaagtttgatgaactatgtgatgtgactgaagacatacataattcttctaagaaggttgatgaactaggtgatatggctgaaggcactagggcagttttaagtagatcacgttctgatcactctgttggcagaaaacgtgtccgtgtgatcttatcagatgatgaatccgacgagaatcatgaaaacgttcagtttaaaaagacatcaactagtcctgcagatagtatgtcagtctcagaccatggagcaagcagcagcagaaaccaggatactttacaagttaatcaaacaagggatgcaccctatccagctgaggagagcatttgttcattcaaatcaagtagtcctattgatcatgcttttgaaggcataggattaggtgcttccagtgcaggaaagggaccaacctccaaatcagcagcaagtttttccaagctcagtacacctggctcaaacagtctgaatgaaagccaaaatgctgttggttctcaatccaaagatgctgataatgaggagcataattaaatttgataaatctgtg

SEQ ID NO: 44780 - DNA, 1987 bp, Zea Mays
tatacctcgaccgctttcaagtcacgattgcctacaaaacataatgttcagaacatcacaatccaagtactattttcttggtaatagttcaatacacacccaattttttttaattatcatggtatcaacttctccagttaaaaaaatgaatagcttagaagtcactcactgtcactggtagtggtagtacaacacaaccggcacagatggggaaagaaaactgtagtatcatcgacgagtttcaatggaaatccctcttaggcctgtagacgctggttcggttttcgaagtacctttcaaccctaaagacctctcaaaagactaaaggcatatgatgagctaaacgcctcttcagatcacagcagctggcagaggcgacatgatgtgccctccctactgctgacatcaccaaagccaacggtcaaactgctaccgtgctgctgatgctaggaaccggccgtatcatcttcggatgtaacgtagtgcttggggaacagcttctgtttccggccgttcctcttccggttggcgttcggacctcgcggctttggcgtgtcgctcacctgcagaagacaagataaaattgagaggccaccatcaaatgcagaaagaagattctattcctttgaattagtctagttgagttggagcttatgagcaacaaacatatttcattcgtgcaccggagcataggttcccagcttaccagcaccactagttttgtcgggtactcaaagaaaagaacaaacatggagcatcagaggcatccaggtgaatggcaatttaaggtactatatactaaggggaccgtgaacaaaatgacgtgtgaccgatctatctgttcacatgccaaactggtaatgaactcataataaagaattaaagcactgctaccacccaaaatgacacaatatgcaaccaaaatgacatggaatatgagacatcacatcacaaggatatgaaaaatccactttcacgcagctacatatatgggaaaaagtggtacatcggtctgttccaccacttggaccgtctacctgtttttttttaaaaaaaaaagcttttatgcgaaaacgtcaagtcttcatgtcaagaatgcatctagtggtggagcttttcgtagcccccatgggacccaatcaatataaaaagtttcagtagagtccttaacaatttattggactatatcatgtgatcatgatgactattaaacgccccaaagggcctaggtactaagatagaatggggcccagcaagtgacccaggactaacatcccttggcaaatgaataaaggataaaccaaaagtttatcgataaaaaatatatatttaaaatttgtaccagccatgctgaatttctgtttcttcataaaccttataaataccaaatacaccagggcaaaataatatatttcacaacacaggaagcagtaatagagagtaacagaaaaatgacgtgaacacatgagcatactatcaaggaatatcagcacttaaagactcgccactgtagctaacttttacatagctgctaacttcttttaataaccacctagggacttcatacttctcaagtgaatctacagacgcctaaaattatgatgagaaaaaggcactcacatagcaccacaatcattttttttttcaaaaaaggtacgcataaaacaaaacatcaaagtggccacaaaagtctctttacataacaatctcctacatcacatttgcttatggtacatgtttggtcaattgcatgaccgttcgtcagaagcaagctgtaataagatcagagttatcaaatatacataatcagacacagtaaaaataactatggcctctgccatgttgcatcattatcaagcagaataaattgttaatgacaagtgcacttaccccaaaacaaaatccagcctggctctgacctgcaccacattcaacaggccttggaggctttcctgagtccattgctgatgaaccccgcttattgaag

SEQ ID NO: 44781 - DNA, 849 bp, Zea Mays
atcaaatattgacctatgctaatcaagagttgaacgaaagaagtgaagattcttctgtgtgcagacaaccgaaacttttcttgaattgcctcaagattactaatacatttgttgacttacacttctaaatgggatacatgtaactgtcctgcctaagtgcccatgaggatgacccctgtctattttagtaatctataggctttttatgatatgcaggtttatgaggttgtcaagttttcatttcaatgcaaatccagctggacaacaccatgtcacaaagcagtgtgcttctagatacagttcagtcttggcgtcatcgaatcaatgaaacatgaagttagaagcacaccgagatccagtggcttgtgaccccttgaccctttagaggaagcgcactagagtcgttggcaagaagaagaggatcgccaagaagaagtctgaggctgccgagtaccaaaagcttcttgctcagaggctgaaggaatagagagaccgcgagagcttggccaagaggaggtccaagctttctgccgcttccaaggcttccgctaccatcgccgcttaagaatgttcgatgctttgatatgtttcaagacctatcttgttacagcttaaataccttatgctactctgattgtgttgcaacttgcaactgcccctgtacttgatagatttgtattagatgctcaagctacagagggtaggttcctaattatgaccatatgactatgtactaaattatatatctgttgctaagttaaaatacatacaaaataagtttactccgaccatcttgtagaaaaacaagttatagtgactaaggatatctgaattgctcctatgttactt

SEQ ID NO: 44782 - DNA, 838 bp, Zea Mays
atcaaatattgacctatgctaatcaagagttgaacgaaagaagtgaagattcttctgtgtgcagacaaccgaaacttttcttgaattgcctcaagattactaatacatttgttgacttacacttctaaatgggatacatgtaactgtcctgcctaagtgcccatgaggatgacccctgtctattttagtaatctataggctttttatgatatgcaggtttatgaggttgtcaagttttcatttcaatgcaaatccagctggacaacaccatgtcacaaagcagatacagttcagtcttggcgtcatcgaatcaatgaaacatgaagttagaagcacaccgagatccagtggcttgtgaccccttgaccctttagaggaagcgcactagagtcgttggcaagaagaagaggatcgccaagaagaagtctgaggctgccgagtaccaaaagcttcttgctcagaggctgaaggaatagagagaccgcgagagcttggccaagaggaggtccaagctttctgccgcttccaaggcttccgctaccatcgccgcttaagaatgttcgatgctttgatatgtttcaagacctatcttgttacagcttaaataccttatgctactctgattgtgttgcaacttgcaactgcccctgtacttgatagatttgtattagatgctcaagctacagagggtaggttcctaattatgaccatatgactatgtactaaattatatatctgttgctaagttaaaatacatacaaaataagtttactccgaccatcttgtagaaaaacaagttatagtgactaaggatatctgaattgctcctatgttactt

SEQ ID NO: 44783 - DNA, 661 bp, Zea Mays
aggtttatgaggttgtcaagttttcatttcaatgcaaatccagctggacaacaccatgtcacaaagcaggcatctcacattaaaggaagatgttattcttttcgagatacagttcagtcttggcgtcatcgaatcaatgaaacatgaagttagaagcacaccgagatccagtggcttgtgaccccttgaccctttagaggaagcgcactagagtcgttggcaagaagaagaggatcgccaagaagaagtctgaggctgccgagtaccaaaagcttcttgctcagaggctgaaggaatagagagaccgcgagagcttggccaagaggaggtccaagctttctgccgcttccaaggcttccgctaccatcgccgcttaagaatgttcgatgctttgatatgtttcaagacctatcttgttacagcttaaataccttatgctactctgattgtgttgcaacttgcaactgcccctgtacttgatagatttgtattagatgctcaagctacagagggtaggttcctaattatgaccatatgactatgtactaaattatatatctgttgctaagttaaaatacatacaaaataagtttactccgaccatcttgtagaaaaacaagttatagtgactaaggatatctgaattgctcctatgttactt

SEQ ID NO: 44784 - DNA, 673 bp, Zea Mays
taggtttatgaggttgtcaagttttcatttcaatgcaaatccagctggacaacaccatgtcacaaagcaggcatctcacattaaaggaagatgttattcttttcgagtgtgcttctagatacagttcagtcttggcgtcatcgaatcaatgaaacatgaagttagaagcacaccgagatccagtggcttgtgaccccttgaccctttagaggaagcgcactagagtcgttggcaagaagaagaggatcgccaagaagaagtctgaggctgccgagtaccaaaagcttcttgctcagaggctgaaggaatagagagaccgcgagagcttggccaagaggaggtccaagctttctgccgcttccaaggcttccgctaccatcgccgcttaagaatgttcgatgctttgatatgtttcaagacctatcttgttacagcttaaataccttatgctactctgattgtgttgcaacttgcaactgcccctgtacttgatagatttgtattagatgctcaagctacagagggtaggttcctaattatgaccatatgactatgtactaaattatatatctgttgctaagttaaaatacatacaaaataagtttactccgaccatcttgtagaaaaacaagttatagtgactaaggatatctgaattgctcctatgttactt

SEQ ID NO: 44785 - DNA, 779 bp, Zea Mays
ggcagggccattgctactgcaagtcgcccctaagcctggtactaagagttgtaggaggcaagaattcacagttatctttgtctacatgctattctttgaacacaatatttacgagcttgataggcctgttttggaatacaaattatgtgtccgataggtttatgaggttgtcaagttttcatttcaatgcaaatccagctggacaacaccatgtcacaaagcagatacagttcagtcttggcgtcatcgaatcaatgaaacatgaagttagaagcacaccgagatccagtggcttgtgaccccttgaccctttagaggaagcgcactagagtcgttggcaagaagaagaggatcgccaagaagaagtctgaggctgccgagtaccaaaagcttcttgctcagaggctgaaggaatagagagaccgcgagagcttggccaagaggaggtccaagctttctgccgcttccaaggcttccgctaccatcgccgcttaagaatgttcgatgctttgatatgtttcaagacctatcttgttacagcttaaataccttatgctactctgattgtgttgcaacttgcaactgcccctgtacttgatagatttgtattagatgctcaagctacagagggtaggttcctaattatgaccatatgactatgtactaaattatatatctgttgctaagttaaaatacatacaaaataagtttactccgaccatcttgtagaaaaacaagttatagtgactaaggatatctgaattgctcctatgttactt

SEQ ID NO: 44786 - DNA, 796 bp, Zea Mays
tggagaggcagggccattgctactgcaagtcgcccctaagcctggtactaagagttgtaggaggcaagaattcacagttatctttgtctacatgctattctttgaacacaatatttacgagcttgataggcctgttttggaatacaaattatgtgtccgataggtttatgaggttgtcaagttttcatttcaatgcaaatccagctggacaacaccatgtcacaaagcagtgtgcttctagatacagttcagtcttggcgtcatcgaatcaatgaaacatgaagttagaagcacaccgagatccagtggcttgtgaccccttgaccctttagaggaagcgcactagagtcgttggcaagaagaagaggatcgccaagaagaagtctgaggctgccgagtaccaaaagcttcttgctcagaggctgaaggaatagagagaccgcgagagcttggccaagaggaggtccaagctttctgccgcttccaaggcttccgctaccatcgccgcttaagaatgttcgatgctttgatatgtttcaagacctatcttgttacagcttaaataccttatgctactctgattgtgttgcaacttgcaactgcccctgtacttgatagatttgtattagatgctcaagctacagagggtaggttcctaattatgaccatatgactatgtactaaattatatatctgttgctaagttaaaatacatacaaaataagtttactccgaccatcttgtagaaaaacaagttatagtgactaaggatatctgaattgctcctatgttactt

SEQ ID NO: 44787 - DNA, 540 bp, Zea Mays
tcttgcaaggtttatgaggttgtcaagttttcatttcaatgcaaatccagctggacaacaccatgtcacaaagcagaggaagcgcactagagtcgttggcaagaagaagaggatcgccaagaagaagtctgaggctgccgagtaccaaaagcttcttgctcagaggctgaaggaatagagagaccgcgagagcttggccaagaggaggtccaagctttctgccgcttccaaggcttccgctaccatcgccgcttaagaatgttcgatgctttgatatgtttcaagacctatcttgttacagcttaaataccttatgctactctgattgtgttgcaacttgcaactgcccctgtacttgatagatttgtattagatgctcaagctacagagggtaggttcctaattatgaccatatgactatgtactaaattatatatctgttgctaagttaaaatacatacaaaataagtttactccgaccatcttgtagaaaaacaagttatagtgactaaggatatctgaattgctcctatgttactt

SEQ ID NO: 44788 - DNA, 368 bp, Zea Mays
cgccataatgttacaggctcttaatttttgagatacaattagttcattgcacccaacatattttgtttttaagacagaaatcttcatttgatgcttaacatgaacttttcaatcttcctattgcagattgcaagcattgtagcttctggtattcaacctctccataacctcacattgttgaggttcattgaccagaaggttggtgcaggggagagtgtgttgtggactcaacaacaaatcgagagaggtttcacagctattgagaacctgatacaactaaaaggatgcgccgggaagtatgcaacaggagatgaagtccaattgcttcaaaatcaagtccgacttccaagaagagcaaggatgacgat

SEQ ID NO: 44789 - DNA, 1319 bp, Zea Mays
ctcgtgcctccttataaaaaggagtagtcgccatcggtgctcggctgctcgcctcccccgctctttcggttattcccgtgcgcgtgcgagagagagagagcggaagaaagaagagacggcggcggcggcggcgaaggcgtcggcttccgttggcaaggccacgggagggcgcgagccatatcgatcgcaatggagagcgggcgcgggctgggcggcggcggccaccgcggccattggttcggcctcgtcgccgactgcggctgcgcggcctcgctggcggaatcgccctgccgcagcggctcgtctacggtggagcgggacagcgacatccccgcagaggcgacgcagcgggagtgggacggcgatgaggtcgagagcgacgacggcgaggtgcagagcccgtacaagggctcctccttcgacaccatggacgtgctccaggaggccctgcccttcaggaaaggggtacccaagttttacaatggggagtctggatctactgcaaagcttcaagaccttccggaaccagaaacaccatcccctaggaagcgcaaaggccttcttccattcagtttcaaatgggacaaagaggtataccccgatggtgacgcaatcaaaagccccacaaactgcaggaggatgactacatcgcctgctgccacaagcagctcaacaagcaacagtggcagcgatgatgaacataaccgctctcagaagctgtcttcccgtcgcccgctcagaatgcccatcaatgccctgggtgtttttgcttctccgcctggacctcgtccaccccagccgttctcagctcacatgagatctcaatcaatgcttgatgtgcaggatgtgacagagacagactcagccgccatggtcactcccagggacaagcgcatgaagaagtagcaaaagctgaatagtatcaccgacaatcacatgaagaaatagcaagagctgaatgtggttagtcctgctctagctccagaacatttagtggagttagtagagcaggtcattaggggctctagaaaatcgtagagctagttagaagacatttaaacaagttatttcatttattatttagattataaatgttttaaaactatttaaatctctattatataaattttcgtggttgttacccttctcgctttataaaatctatcgatatgatatataaaagtgtaacaatgcacaagtatataactacagctttacgctagagccgacacgttgctggattatgcttgtaaatggtggattatgcttttcaaccatgttgctcttactaaactttgctttgctcaccgttatgaaat

SEQ ID NO: 44790 - DNA, 967 bp, Zea Mays
ccagtgctactccaaactgcttcctctctccaagttacttgtctttgttttggagttggcaatttgtttgtttatccattgtgaagcagcctggggaatctcttaggaaaggggtacccaagttttacaatggggagtctggatctactgcaaagcttcaagaccttccggaaccagaaacaccatcccctaggaagcgcaaaggccttcttccattcagtttcaaatgggacaaagaggtataccccgatggtgacgcaatcaaaagccccacaaactgcaggaggatgactacatcgcctgctgccacaagcagctcaacaagcaacagtggcagcgatgatgaacataaccgctctcagaagctgtcttcccgtcgcccgctcagaatgcccatcaatgccctgggtgtttttgcttctccgcctggacctcgtccaccccagccgttctcagctcacatgagatctcaatcaatgcttgatgtgcaggatgtgacagagacagactcagccgccatggtcactcccagggacaagcgcatgaagaagtagcaaaagctgaatagtatcaccgacaatcacatgaagaaatagcaagagctgaatgtggttagtcctgctctagctccagaacatttagtggagttagtagagcaggtcattaggggctctagaaaatcgtagagctagttagaagacatttaaacaagttatttcatttattatttagattataaatgttttaaaactatttaaatctctattatataaattttcgtggttgttacccttctcgctttataaaatctatcgatatgatatataaaagtgtaacaatgcacaagtatataactacagctttacgctagagccgacacgttgctggattatgcttgtaaatggtggattatgcttttcaaccatgttgctcttactaaactttgctttgctcaccgttatgaaat

SEQ ID NO: 44791 - DNA, 966 bp, Zea Mays
caaactgatgcagcctcacggaagtgatacatggtactgcatcagcaaaatattcagttggaacgtgacggccagtgctactccaaactgcttcctctctccaaggaaaggggtacccaagttttacaatggggagtctggatctactgcaaagcttcaagaccttccggaaccagaaacaccatcccctaggaagcgcaaaggccttcttccattcagtttcaaatgggacaaagaggtataccccgatggtgacgcaatcaaaagccccacaaactgcaggaggatgactacatcgcctgctgccacaagcagctcaacaagcaacagtggcagcgatgatgaacataaccgctctcagaagctgtcttcccgtcgcccgctcagaatgcccatcaatgccctgggtgtttttgcttctccgcctggacctcgtccaccccagccgttctcagctcacatgagatctcaatcaatgcttgatgtgcaggatgtgacagagacagactcagccgccatggtcactcccagggacaagcgcatgaagaagtagcaaaagctgaatagtatcaccgacaatcacatgaagaaatagcaagagctgaatgtggttagtcctgctctagctccagaacatttagtggagttagtagagcaggtcattaggggctctagaaaatcgtagagctagttagaagacatttaaacaagttatttcatttattatttagattataaatgttttaaaactatttaaatctctattatataaattttcgtggttgttacccttctcgctttataaaatctatcgatatgatatataaaagtgtaacaatgcacaagtatataactacagctttacgctagagccgacacgttgctggattatgcttgtaaatggtggattatgcttttcaaccatgttgctcttactaaactttgctttgctcaccgttatgaaat

SEQ ID NO: 44792 - DNA, 1955 bp, Zea Mays
gtttccatggcctagctggctagtaggtccgcttagtaaatttgttcaggagttcgcttctagtcttcttcaggaaagttttactcttattaaactccctgacatcgtccaaggaagcaagtgatttcattatgaaagattggtctattttctccaaatttgatcataatggagcttacctccccatgttgccaatcgactctccaatatctcatgatgttgggttaggattgatatcacaagtcggaaacttagttgaatgttcatttcaacatccaaggcatatatgtgctacggggagtggcacagttcaggaagcattcagctgtttgaacaagtttgctgaagctttctatttctggttttctagagcatcgaatcctaagctattccaaaggctatcagctgctgcaggctcaagttcaagagtttgtcggtcacacataaagcaagtggcctcttgcttgcagcatttaccaggactacagtttggttcacaattaagaaaagatcatgctgtacagatgcttttagcgaggcttgcaagcacaacttttggacgcctgtggacggaggtggaggagcatcatgcctgcaacatccttatgttggctgccgctactgtagtaccaccatttgaaaacatatctccgaagatgctggctgagtcaatggcactaagaaaagatggtgggaacatcccctgctggacagtcatactcggaagaaatccgtccaggttgtgcgtgtgttgctgtgccaagagtactcttgcgagaagatgtaacagaaccgaaaactggcatcaagttccccactctacttaaagacaattccaatctgactacagaggtccttgttggaatgggtttcagaagcatgcgaataatgagggttaaagatctgaatctttatgcctttggattatatatacaacctgattctgtttgcaaaaagctgggtccaaagtatgcttgtattccagatgctgagttgaaggatcacccagatttctatgaagatcttttgagggaaaatattgatatgactgttaggctagtagtaagctacaatggcctcagcattggcacagttcgagatgcatttgagaagtctcttgccttccggctgaaaaagatgaatcctaatactgattatgattgcttgaagacatttggttcttgttttaatgaatacattcgtatacctgctgtaagtttctatggtatgtctgtgctacgtaactctgcatttggtgtgagaagttaaaagttaatgcaaccgcagggtacaaagatagacttccggcaaacatccgatggtcagctaataactgaaattgatggcaaacaaattggcactgtccacagcaaatatctctgcagaaccttcttcgatatgtatattggtgacccccctgtttcagttgagaccaaacacggcattgcgcaaaatgtggctggactcatgagaagatgctaggaaaacagggaaaccaaaccgaagaactcggaactatttcctccatctatacaaggagagatgtacatagaaaggaagccaggagaggattgattgtatttttagtggtagacagcgactttgtatgctgtaattaacaggcagaaggtttcgacagacaggcctggcatccttagcaaatgcctcctatgcttctcatatggtatggcattttgccatttcctggttcgctgggggcactgtatcatgagcatatccaagagcttctcagaagtctcccctaaattatgttttttttttgaaaaatggcggttccttttaccaatcattctcactaattttttaaatgtcccttagaactgattttcaggagttattttgtacaacaggaggatgtttctctatcccaagtcaaaaaaatggcggggttcagctttgtccctacggactcgagggtaatgtagataattgag

SEQ ID NO: 44793 - DNA, 2393 bp, Zea Mays
ggccttcctccgcgccttcaagtccggcaagcccgacgccttctttgacagtctccctttcctggatacatgctcgatgctcctagtaaacactaaacaccgtgcgtgatgttctgaacatctatctatctctctctctgagctagatttatgtggtacgaagaaccctcctgttcagatgggcctatgtatgatacgtgttgctcactcgcttgctcctcctcgcagtctcaatggatggatgctgtcgttttttgcctttgcccgccctgaatggctgctgcaaagtctggaactgaaacagcttattaaggcagattaagcaagagctcgctcatcaccattaatcagttgtgctgatcaaacagacgaacagtcagatagacaggtcgtcggccgtgaacgccagcggcccatcaaagtgcaccagcttgccgcccacatcgccaccggactccacctccgccgccgacgaccacataggggcggcgacaccggttctgacgggagaagaaaacggcgcgcggacggacagcgacggagcatgattaatggttctcctcaacggctaataacgattcttcaggaaagttttactcttattaaactccctgacatcgtccaaggaagcaagtgatttcattatgaaagattggtctattttctccaaatttgatcataatggagcttacctccccatgttgccaatcgactctccaatatctcatgatgttgggttaggattgatatcacaagtcggaaacttagttgaatgttcatttcaacatccaaggcatatatgtgctacggggagtggcacagttcaggaagcattcagctgtttgaacaagtttgctgaagctttctatttctggttttctagagcatcgaatcctaagctattccaaaggctatcagctgctgcaggctcaagttcaagagtttgtcggtcacacataaagcaagtggcctcttgcttgcagcatttaccaggactacagtttggttcacaattaagaaaagatcatgctgtacagatgcttttagcgaggcttgcaagcacaacttttggacgcctgtggacggaggtggaggagcatcatgcctgcaacatccttatgttggctgccgctactgtagtaccaccatttgaaaacatatctccgaagatgctggctgagtcaatggcactaagaaaagatggtgggaacatcccctgctggacagtcatactcggaagaaatccgtccaggttgtgcgtgtgttgctgtgccaagagtactcttgcgagaagatgtaacagaaccgaaaactggcatcaagttccccactctacttaaagacaattccaatctgactacagaggtccttgttggaatgggtttcagaagcatgcgaataatgagggttaaagatctgaatctttatgcctttggattatatatacaacctgattctgtttgcaaaaagctgggtccaaagtatgcttgtattccagatgctgagttgaaggatcacccagatttctatgaagatcttttgagggaaaatattgatatgactgttaggctagtagtaagctacaatggcctcagcattggcacagttcgagatgcatttgagaagtctcttgccttccggctgaaaaagatgaatcctaatactgattatgattgcttgaagacatttggttcttgttttaatgaatacattcgtatacctgctggtacaaagatagacttccggcaaacatccgatggtcagctaataactgaaattgatggcaaacaaattggcactgtccacagcaaatatctctgcagaaccttcttcgatatgtatattggtgacccccctgtttcagttgagaccaaacacggcattgcgcaaaatgtggctggactcatgagaagatgctaggaaaacagggaaaccaaaccgaagaactcggaactatttcctccatctatacaaggagagatgtacatagaaaggaagccaggagaggattgattgtatttttagtggtagacagcgactttgtatgctgtaattaacaggcagaaggtttcgacagacaggcctggcatccttagcaaatgcctcctatgcttctcatatggtatggcattttgccatttcctggttcgctgggggcactgtatcatgagcatatccaagagcttctcagaagtctcccctaaattatgttttttttttgaaaaatggcggttccttttaccaatcattctcactaattttttaaatgtcccttagaactgattttcaggagttattttgtacaacaggaggatgtttctctatcccaagtcaaaaaaatggcggggttcagctttgtccctacggactcgagggtaatgtagataattgag

SEQ ID NO: 44794 - DNA, 2211 bp, Zea Mays
gcggccgtcccggcggcagcgtcgcgcaccagctccaggttcggtcgcactcgcacgggcgtgtaccaaggcttcatgttcagcagcctgacggtgctgatgacgacggcggaggcgtgcaagcaggtgctgatggacgaggacgcgttcgtgacggggtggcccaaggcgacggtggcgctggtcgggccgcggtcgttcgtggcgatgccgcacgacgagcaccggcgcctccgcaagctgacggccgcgcccatcaacggcttcgacgcgctcacagggtaccgtgccgtaggtgctcttccccatgatttcggcggtggcgcacagcaggtcgtcggccgtgaacgccagcggcccatcaaagtgcaccagcttgccgcccacatcgccaccggactccacctccgccgccgacgaccacataggggcggcgacaccggttctgacgggagaagaaaacggcgcgcggacggacagcgacggagcatgattaatggttctcctcaacggctaataacgattcttcaggaaagttttactcttattaaactccctgacatcgtccaaggaagcaagtgatttcattatgaaagattggtctattttctccaaatttgatcataatggagcttacctccccatgttgccaatcgactctccaatatctcatgatgttgggttaggattgatatcacaagtcggaaacttagttgaatgttcatttcaacatccaaggcatatatgtgctacggggagtggcacagttcaggaagcattcagctgtttgaacaagtttgctgaagctttctatttctggttttctagagcatcgaatcctaagctattccaaaggctatcagctgctgcaggctcaagttcaagagtttgtcggtcacacataaagcaagtggcctcttgcttgcagcatttaccaggactacagtttggttcacaattaagaaaagatcatgctgtacagatgcttttagcgaggcttgcaagcacaacttttggacgcctgtggacggaggtggaggagcatcatgcctgcaacatccttatgttggctgccgctactgtagtaccaccatttgaaaacatatctccgaagatgctggctgagtcaatggcactaagaaaagatggtgggaacatcccctgctggacagtcatactcggaagaaatccgtccaggttgtgcgtgtgttgctgtgccaagagtactcttgcgagaagatgtaacagaaccgaaaactggcatcaagttccccactctacttaaagacaattccaatctgactacagaggtccttgttggaatgggtttcagaagcatgcgaataatgagggttaaagatctgaatctttatgcctttggattatatatacaacctgattctgtttgcaaaaagctgggtccaaagtatgcttgtattccagatgctgagttgaaggatcacccagatttctatgaagatcttttgagggaaaatattgatatgactgttaggctagtagtaagctacaatggcctcagcattggcacagttcgagatgcatttgagaagtctcttgccttccggctgaaaaagttgatggcaaacaaattggcactgtccacagcaaatatctctgcagaaccttcttcgatatgtatattggtgacccccctgtttcagttgagaccaaacacggcattgcgcaaaatgtggctggactcatgagaagatgctaggaaaacagggaaaccaaaccgaagaactcggaactatttcctccatctatacaaggagagatgtacatagaaaggaagccaggagaggattgattgtatttttagtggtagacagcgactttgtatgctgtaattaacaggcagaaggtttcgacagacaggcctggcatccttagcaaatgcctcctatgcttctcatatggtatggcattttgccatttcctggttcgctgggggcactgtatcatgagcatatccaagagcttctcagaagtctcccctaaattatgttttttttttgaaaaatggcggttccttttaccaatcattctcactaattttttaaatgtcccttagaactgattttcaggagttattttgtacaacaggaggatgtttctctatcccaagtcaaaaaaatggcggggttcagctttgtccctacggactcgagggtaatgtagataattgag

SEQ ID NO: 44795 - DNA, 2925 bp, Zea Mays
gctgctgcatctaacgccgtgactcgtctccatcctttctcttttctcttccaccgggtcgacgcagtgcagcgcgagcttcagcgtgtccatgagctgctcgtccgcggccgtcccggcggcagcgtcgcgcaccagctccaggtcgaacagcatcgtccatcgttccattcccatccataccccctcaatcggccgggatgctgggtgtagggacggccgcggcggtgctgctcggggccgtggcgttggtgctcgcggatgccgctgcgaggagagcgcactggtggtacagggaggcggctgaggtggtgctggtcggcggcgtggctttggtggtggtggacgccgcggcgcggagggcgcacgggtggtacagggaggcggcggcgcggctgccgccgggggagatggggtggcccttggtcggcggcatgtgggccttcctccgcgccttcaagtccggcaagcccgacgccttctttgacagtctccctttcctggatacatgctcgatgctcctagtaaacactaaacacctctcaatggatggatgctgtcgttttttgcctttgcccgccctgaatggctgctgcaaagtctggaactgaaacagcttattaaggttcggtcgcactcgcacgggcgtgtaccaaggcttcatgttcagcagcctgacggtgctgatgacgacggcggaggcgtgcaagcaggtgctgatggacgaggacgcgttcgtgacggggtggcccaaggcgacggtggcgctggtcgggccgcggtcgttcgtggcgatgccgcacgacgagcaccggcgcctccgcaagctgacggccgcgcccatcaacggcttcgacgcgctcacagggtaccgtgccgtaggtgctcttccccatgatttcggcggtggcgcacagcaggtcgtcggccgtgaacgccagcggcccatcaaagtgcaccagcttgccgcccacatcgccaccggactccacctccgccgccgacgaccacataggggcggcgacaccggttctgacgggagaagaaaacggcgcgcggacggacagcgacggagcatgattaatggttctcctcaacggctaataacgattcttcaggaaagttttactcttattaaactccctgacatcgtccaaggaagcaagtgatttcattatgaaagattggtctattttctccaaatttgatcataatggagcttacctccccatgttgccaatcgactctccaatatctcatgatgttgggttaggattgatatcacaagtcggaaacttagttgaatgttcatttcaacatccaaggcatatatgtgctacggggagtggcacagttcaggaagcattcagctgtttgaacaagtttgctgaagctttctatttctggttttctagagcatcgaatcctaagctattccaaaggctatcagctgctgcaggctcaagttcaagagtttgtcggtcacacataaagcaagtggcctcttgcttgcagcatttaccaggactacagtttggttcacaattaagaaaagatcatgctgtacagatgcttttagcgaggcttgcaagcacaacttttggacgcctgtggacggaggtggaggagcatcatgcctgcaacatccttatgttggctgccgctactgtagtaccaccatttgaaaacatatctccgaagatgctggctgagtcaatggcactaagaaaagatggtgggaacatcccctgctggacagtcatactcggaagaaatccgtccaggttgtgcgtgtgttgctgtgccaagagtactcttgcgagaagatgtaacagaaccgaaaactggcatcaagttccccactctacttaaagacaattccaatctgactacagaggtccttgttggaatgggtttcagaagcatgcgaataatgagggttaaagatctgaatctttatgcctttggattatatatacaacctgattctgtttgcaaaaagctgggtccaaagtatgcttgtattccagatgctgagttgaaggatcacccagatttctatgaagatcttttgagggaaaatattgatatgactgttaggctagtagtaagctacaatggcctcagcattggcacagttcgagatgcatttgagaagtctcttgccttccggctgaaaaagatgaatcctaatactgattatgattgcttgaagacatttggttcttgttttaatgaatacattcgtatacctgctggtacaaagatagacttccggcaaacatccgatggtcagctaataactgaaattgatggcaaacaaattggcactgtccacagcaaatatctctgcagaaccttcttcgatatgtatattggtgacccccctgtttcagttgagaccaaacacggcattgcgcaaaatgtggctggactcatgagaagatgctaggaaaacagggaaaccaaaccgaagaactcggaactatttcctccatctatacaaggagagatgtacatagaaaggaagccaggagaggattgattgtatttttagtggtagacagcgactttgtatgctgtaattaacaggcagaaggtttcgacagacaggcctggcatccttagcaaatgcctcctatgcttctcatatggtatggcattttgccatttcctggttcgctgggggcactgtatcatgagcatatccaagagcttctcagaagtctcccctaaattatgttttttttttgaaaaatggcggttccttttaccaatcattctcactaattttttaaatgtcccttagaactgattttcaggagttattttgtacaacaggaggatgtttctctatcccaagtcaaaaaaatggcggggttcagctttgtccctacggactcgagggtaatgtagataattgag

SEQ ID NO: 44796 - DNA, 2887 bp, Zea Mays
gctgctgcatctaacgccgtgactcgtctccatcctttctcttttctcttccaccgggtcgacgcagtgcagcgcgagcttcagcgtgtccatgagctgctcgtccgcggccgtcccggcggcagcgtcgcgcaccagctccaggtcgaacagcatcgtccatcgttccattcccatccataccccctcaatcggccgggatgctgggtgtagggacggccgcggcggtgctgctcggggccgtggcgttggtgctcgcggatgccgctgcgaggagagcgcactggtggtacagggaggcggctgaggtggtgctggtcggcggcgtggctttggtggtggtggacgccgcggcgcggagggcgcacgggtggtacagggaggcggcggcgcggctgccgccgggggagatggggtggcccttggtcggcggcatgtgggccttcctccgcgccttcaagtccggcaagcccgacgccttctttgacagtctccctttcctggatacatgctcgatgctcctagtaaacactaaacacctctcaatggatggatgctgtcgttttttgcctttgcccgccctgaatggctgctgcaaagtctggaactgaaacagcttattaaggcagattaagcaagagctcgctcatcaccattaatcagttcggtcgcactcgcacgggcgtgtaccaaggcttcatgttcagcagcctgacggtgctgatgacgacggcggaggcgtgcaagcaggtgctgatggacgaggacgcgttcgtgacggggtggcccaaggcgacggtggcgctggtcgggccgcggtcgttcgtggcgatgccgcacgacgagcaccggcgcctccgcaagctgacggccgcgcccatcaacggcttcgacgcgctcacagggtaccgtgccgtaggtgctcttccccatgatttcggcggtggcgcacagcaggtcgtcggccgtgaacgccagcggcccatcaaagtgcaccagcttgccgcccacatcgccaccggactccacctccgccgccgacgaccacataggggcggcgacaccggttctgacgggagaagaaaacggcgcgcggacggacagcgacggagcatgattaatggttctcctcaacggctaataacgattcttcaggaaagttttactcttattaaactccctgacatcgtccaaggaagcaagtgatttcattatgaaagattggtctattttctccaaatttgatcataatggagcttacctccccatgttgccaatcgactctccaatatctcatgatgttgggttaggattgatatcacaagtcggaaacttagttgaatgttcatttcaacatccaaggcatatatgtgctacggggagtggcacagttcaggaagcattcagctgtttgaacaagtttgctgaagctttctatttctggttttctagagcatcgaatcctaagctattccaaaggctatcagctgctgcaggctcaagttcaagagtttgtcggtcacacataaagcaagtggcctcttgcttgcagcatttaccaggactacagtttggttcacaattaagaaaagatcatgctgtacagatgcttttagcgaggcttgcaagcacaacttttggacgcctgtggacggaggtggaggagcatcatgcctgcaacatccttatgttggctgccgctactgtagtaccaccatttgaaaacatatctccgaagatgctggctgagtcaatggcactaagaaaagatggtgggaacatcccctgctggacagtcatactcggaagaaatccgtccaggttgtgcgtgtgttgctgtgccaagagtactcttgcgagaagatgtaacagaaccgaaaactggcatcaagttccccactctacttaaagacaattccaatctgactacagaggtccttgttggaatgggtttcagaagcatgcgaataatgagggttaaagatctgaatctttatgcctttggattatatatacaacctgattctgtttgcaaaaagctgggtccaaagtatgcttgtattccagatgctgagttgaaggatcacccagatttctatgaagatcttttgagggaaaatattgatatgactgttaggctagtagtaagctacaatggcctcagcattggcacagttcgagatgcatttgagaagtctcttgccttccggctgaaaaagggtacaaagatagacttccggcaaacatccgatggtcagctaataactgaaattgatggcaaacaaattggcactgtccacagcaaatatctctgcagaaccttcttcgatatgtatattggtgacccccctgtttcagttgagaccaaacacggcattgcgcaaaatgtggctggactcatgagaagatgctaggaaaacagggaaaccaaaccgaagaactcggaactatttcctccatctatacaaggagagatgtacatagaaaggaagccaggagaggattgattgtatttttagtggtagacagcgactttgtatgctgtaattaacaggcagaaggtttcgacagacaggcctggcatccttagcaaatgcctcctatgcttctcatatggtatggcattttgccatttcctggttcgctgggggcactgtatcatgagcatatccaagagcttctcagaagtctcccctaaattatgttttttttttgaaaaatggcggttccttttaccaatcattctcactaattttttaaatgtcccttagaactgattttcaggagttattttgtacaacaggaggatgtttctctatcccaagtcaaaaaaatggcggggttcagctttgtccctacggactcgagggtaatgtagataattgag

SEQ ID NO: 44797 - DNA, 2717 bp, Zea Mays
gctgctgcatctaacgccgtgactcgtctccatcctttctcttttctcttccaccgggtcgacgcagtgcagcgcgagcttcagcgtgtccatgagctgctcgtccgcggccgtcccggcggcagcgtcgcgcaccagctccaggtcgaacagcatcgtccatcgttccattcccatccataccccctcaatcggccgggatgctgggtgtagggacggccgcggcggtgctgctcggggccgtggcgttggtgctcgcggatgccgctgcgaggagagcgcactggtggtacagggaggcggctgaggtggtgctggtcggcggcgtggctttggtggtggtggacgccgcggcgcggagggcgcacgggtggtacagggaggcggcggcgcggctgccgccgggggagatggggtggcccttggtcggcggcatgtgggccttcctccgcgccttcaagtccggcaagcccgacgccttctttgacagtctccctttcctggatacatgctcgatgctcctagtaaacactaaacacctctcaatggatggatgctgtcgttttttgcctttgcccgccctgaatggctgctgcaaagtctggaactgaaacagcttattaaggcagattaagcaagagctcgctcatcaccattaatcagttcggtcgcactcgcacgggcgtgtaccaaggcttcatgttcagcagcctgacggtgctgatgacgacggcggaggcgtgcaagcaggtgctcttccccatgatttcggcggtggcgcacagcaggtcgtcggccgtgaacgccagcggcccatcaaagtgcaccagcttgccgcccacatcgccaccggactccacctccgccgccgacgaccacataggggcggcgacaccggttctgacgggagaagaaaacggcgcgcggacggacagcgacggagcatgattaatggttctcctcaacggctaataacgattcttcaggaaagttttactcttattaaactccctgacatcgtccaaggaagcaagtgatttcattatgaaagattggtctattttctccaaatttgatcataatggagcttacctccccatgttgccaatcgactctccaatatctcatgatgttgggttaggattgatatcacaagtcggaaacttagttgaatgttcatttcaacatccaaggcatatatgtgctacggggagtggcacagttcaggaagcattcagctgtttgaacaagtttgctgaagctttctatttctggttttctagagcatcgaatcctaagctattccaaaggctatcagctgctgcaggctcaagttcaagagtttgtcggtcacacataaaatgcttttagcgaggcttgcaagcacaacttttggacgcctgtggacggaggtggaggagcatcatgcctgcaacatccttatgttggctgccgctactgtagtaccaccatttgaaaacatatctccgaagatgctggctgagtcaatggcactaagaaaagatggtgggaacatcccctgctggacagtcatactcggaagaaatccgtccaggttgtgcgtgtgttgctgtgccaagagtactcttgcgagaagatgtaacagaaccgaaaactggcatcaagttccccactctacttaaagacaattccaatctgactacagaggtccttgttggaatgggtttcagaagcatgcgaataatgagggttaaagatctgaatctttatgcctttggattatatatacaacctgattctgtttgcaaaaagctgggtccaaagtatgcttgtattccagatgctgagttgaaggatcacccagatttctatgaagatcttttgagggaaaatattgatatgactgttaggctagtagtaagctacaatggcctcagcattggcacagttcgagatgcatttgagaagtctcttgccttccggctgaaaaagatgaatcctaatactgattatgattgcttgaagacatttggttcttgttttaatgaatacattcgtatacctgctggtacaaagatagacttccggcaaacatccgatggtcagctaataactgaaattgatggcaaacaaattggcactgtccacagcaaatatctctgcagaaccttcttcgatatgtatattggtgacccccctgtttcagttgagaccaaacacggcattgcgcaaaatgtggctggactcatgagaagatgctaggaaaacagggaaaccaaaccgaagaactcggaactatttcctccatctatacaaggagagatgtacatagaaaggaagccaggagaggattgattgtatttttagtggtagacagcgactttgtatgctgtaattaacaggcagaaggtttcgacagacaggcctggcatccttagcaaatgcctcctatgcttctcatatggtatggcattttgccatttcctggttcgctgggggcactgtatcatgagcatatccaagagcttctcagaagtctcccctaaattatgttttttttttgaaaaatggcggttccttttaccaatcattctcactaattttttaaatgtcccttagaactgattttcaggagttattttgtacaacaggaggatgtttctctatcccaagtcaaaaaaatggcggggttcagctttgtccctacggactcgagggtaatgtagataattgag

SEQ ID NO: 44798 - DNA, 3157 bp, Zea Mays
gctgctgcatctaacgccgtgactcgtctccatcctttctcttttctcttccaccgggtcgacgcagtgcagcgcgagcttcagcgtgtccatgagctgctcgtccgcggccgtcccggcggcagcgtcgcgcaccagctccaggtcgaacagcatcgtccatcgttccattcccatccataccccctcaatcggccgggatgctgggtgtagggacggccgcggcggtgctgctcggggccgtggcgttggtgctcgcggatgccgctgcgaggagagcgcactggtggtacagggaggcggctgaggtggtgctggtcggcggcgtggctttggtggtggtggacgccgcggcgcggagggcgcacgggtggtacagggaggcggcggcgcggctgccgccgggggagatggggtggcccttggtcggcggcatgtgggccttcctccgcgccttcaagtccggcaagcccgacgccttctttgacagtctccctttcctggatacatgctcgatgctcctagtaaacactaaacaccgtgcgtgatgttctgaacatctatctatctctctctctgagctagatttatgtggtacgaagaaccctcctgttcagatgggcctatgtatgatacgtgttgctcactcgcttgctcctcctcgcagtctcaatggatggatgctgtcgttttttgcctttgcccgccctgaatggctgctgcaaagtctggaactgaaacagcttattaaggcagattaagcaagagctcgctcatcaccattaatcagttgtgctgatcaaacagacgaacagtcagatagacaggcaaccagaccatctgacctggatgcaccattaattgcaggttcggtcgcactcgcacgggcgtgtaccaaggcttcatgttcagcagcctgacggtgctgatgacgacggcggaggcgtgcaagcaggtgctgatggacgaggacgcgttcgtgacggggtggcccaaggcgacggtggcgctggtcgggccgcggtcgttcgtggcgatgccgcacgacgagcaccggcgcctccgcaagctgacggccgcgcccatcaacggcttcgacgcgctcacagggtaccgtgccgtaggtgctcttccccatgatttcggcggtggcgcacagcaggtcgtcggccgtgaacgccagcggcccatcaaagtgcaccagcttgccgcccacatcgccaccggactccacctccgccgccgacgaccacataggggcggcgacaccggttctgacgggagaagaaaacggcgcgcggacggacagcgacggagcatgattaatggttctcctcaacggctaataacgattcttcaggaaagttttactcttattaaactccctgacatcgtccaaggaagcaagtgatttcattatgaaagattggtctattttctccaaatttgatcataatggagcttacctccccatgttgccaatcgactctccaatatctcatgatgttgggttaggattgatatcacaagtcggaaacttagttgaatgttcatttcaacatccaaggcatatatgtgctacggggagtggcacagttcaggaagcattcagctgtttgaacaagtttgctgaagctttctatttctggttttctagagcatcgaatcctaagctattccaaaggctatcagctgctgcaggctcaagttcaagagtttgtcggtcacacataaagcaagtggcctcttgcttgcagcatttaccaggactacagtttggttcacaattaagaaaagatcatgctgtacagatgcttttagcgaggcttgcaagcacaacttttggacgcctgtggacggaggtggaggagcatcatgcctgcaacatccttatgttggctgccgctactgtagtaccaccatttgaaaacatatgctggctgagtcaatggcactaagaaaagatggtgggaacatcccctgctggacagtcatactcggaagaaatccgtccaggttgtgcgtgtgttgctgtgccaagagtactcttgcgagaagatgtaacagaaccgaaaactggcatcaagttccccactctacttaaagacaattccaatctgactacagaggtccttgttggaatgggtttcagaagcatgcgaataatgagggttaaagatctgaatctttatgcctttggattatatatacaacctgattctgtttgcaaaaagctgggtccaaagtatgcttgtattccagatgctgagttgaaggatcacccagatttctatgaagatcttttgagggaaaatattgatatgactgttaggctagtagtaagctacaatggcctcagcattggcacagttcgagatgcatttgagaagtctcttgccttccggctgaaaaagatgaatcctaatactgattatgattgcttgaagacatttggttcttgttttaatgaatacattcgtatacctgctggtacaaagatagacttccggcaaacatccgatggtcagctaataactgaaattgatggcaaacaaattggcactgtccacagcaaatatctctgcagaaccttcttcgatatgtatattggtgacccccctgtttcagttgagaccaaacacggcattgcgcaaaatgtggctggactcatgagaagatgctaggaaaacagggaaaccaaaccgaagaactcggaactatttcctccatctatacaaggagagatgtacatagaaaggaagccaggagaggattgattgtatttttagtggtagacagcgactttgtatgctgtaattaacaggcagaaggtttcgacagacaggcctggcatccttagcaaatgcctcctatgcttctcatatggtatggcattttgccatttcctggttcgctgggggcactgtatcatgagcatatccaagagcttctcagaagtctcccctaaattatgttttttttttgaaaaatggcggttccttttaccaatcattctcactaattttttaaatgtcccttagaactgattttcaggagttattttgtacaacaggaggatgtttctctatcccaagtcaaaaaaatggcggggttcagctttgtccctacggactcgagggtaatgtagataattgag

SEQ ID NO: 44799 - DNA, 2988 bp, Zea Mays
gctgctgcatctaacgccgtgactcgtctccatcctttctcttttctcttccaccgggtcgacgcagtgcagcgcgagcttcagcgtgtccatgagctgctcgtccgcggccgtcccggcggcagcgtcgcgcaccagctccaggtcgaacagcatcgtccatcgttccattcccatccataccccctcaatcggccgggatgctgggtgtagggacggccgcggcggtgctgctcggggccgtggcgttggtgctcgcggatgccgctgcgaggagagcgcactggtggtacagggaggcggctgaggtggtgctggtcggcggcgtggctttggtggtggtggacgccgcggcgcggagggcgcacgggtggtacagggaggcggcggcgcggctgccgccgggggagatggggtggcccttggtcggcggcatgtgggccttcctccgcgccttcaagtccggcaagcccgacgccttctttgacagtctccctttcctggatacatgctcgatgctcctagtaaacactaaacaccgtgcgtgatgttctgaacatctatctatctctctctctgagctagatttatgtgtctcaatggatggatgctgtcgttttttgcctttgcccgccctgaatggctgctgcaaagtctggaactgaaacagcttattaaggcagattaagttcggtcgcactcgcacgggcgtgtaccaaggcttcatgttcagcagcctgacggtgctgatgacgacggcggaggcgtgcaagcaggtgctgatggacgaggacgcgttcgtgacggggtggcccaaggcgacggtggcgctggtcgggccgcggtcgttcgtggcgatgccgcacgacgagcaccggcgcctccgcaagctgacggccgcgcccatcaacggcttcgacgcgctcacagggtaccgtgccgtaggtgctcttccccatgatttcggcggtggcgcacagcaggtcgtcggccgtgaacgccagcggcccatcaaagtgcaccagcttgccgcccacatcgccaccggactccacctccgccgccgacgaccacataggggcggcgacaccggttctgacgggagaagaaaacggcgcgcggacggacagcgacggagcatgattaatggttctcctcaacggctaataacgattcttcaggaaagttttactcttattaaactccctgacatcgtccaaggaagcaagtgatttcattatgaaagattggtctattttctccaaatttgatcataatggagcttacctccccatgttgccaatcgactctccaatatctcatgatgttgggttaggattgatatcacaagtcggaaacttagttgaatgttcatttcaacatccaaggcatatatgtgctacggggagtggcacagttcaggaagcattcagctgtttgaacaagtttgctgaagctttctatttctggttttctagagcatcgaatcctaagctattccaaaggctatcagctgctgcaggctcaagttcaagagtttgtcggtcacacataaagcaagtggcctcttgcttgcagcatttaccaggactacagtttggttcacaattaagaaaagatcatgctgtacagatgcttttagcgaggcttgcaagcacaacttttggacgcctgtggacggaggtggaggagcatcatgcctgcaacatccttatgttggctgccgctactgtagtaccaccatttgaaaacatatctccgaagatgctggctgagtcaatggcactaagaaaagatggtgggaacatcccctgctggacagtcatactcggaagaaatccgtccaggttgtgcgtgtgttgctgtgccaagagtactcttgcgagaagatgtaacagaaccgaaaactggcatcaagttccccactctacttaaagacaattccaatctgactacagaggtccttgttggaatgggtttcagaagcatgcgaataatgagggttaaagatctgaatctttatgcctttggattatatatacaacctgattctgtttgcaaaaagctgggtccaaagtatgcttgtattccagatgctgagttgaaggatcacccagatttctatgaagatcttttgagggaaaatattgatatgactgttaggctagtagtaagctacaatggcctcagcattggcacagttcgagatgcatttgagaagtctcttgccttccggctgaaaaagatgaatcctaatactgattatgattgcttgaagacatttggttcttgttttaatgaatacattcgtatacctgctggtacaaagatagacttccggcaaacatccgatggtcagctaataactgaaattgatggcaaacaaattggcactgtccacagcaaatatctctgcagaaccttcttcgatatgtatattggtgacccccctgtttcagttgagaccaaacacggcattgcgcaaaatgtggctggactcatgagaagatgctaggaaaacagggaaaccaaaccgaagaactcggaactatttcctccatctatacaaggagagatgtacatagaaaggaagccaggagaggattgattgtatttttagtggtagacagcgactttgtatgctgtaattaacaggcagaaggtttcgacagacaggcctggcatccttagcaaatgcctcctatgcttctcatatggtatggcattttgccatttcctggttcgctgggggcactgtatcatgagcatatccaagagcttctcagaagtctcccctaaattatgttttttttttgaaaaatggcggttccttttaccaatcattctcactaattttttaaatgtcccttagaactgattttcaggagttattttgtacaacaggaggatgtttctctatcccaagtcaaaaaaatggcggggttcagctttgtccctacggactcgagggtaatgtagataattgag

SEQ ID NO: 44800 - DNA, 2931 bp, Zea Mays
gctgctgcatctaacgccgtgactcgtctccatcctttctcttttctcttccaccgggtcgacgcagtgcagcgcgagcttcagcgtgtccatgagctgctcgtccgcggccgtcccggcggcagcgtcgcgcaccagctccaggtcgaacagcatcgtccatcgttccattcccatccataccccctcaatcggccgggatgctgggtgtagggacggccgcggcggtgctgctcggggccgtggcgttggtgctcgcggatgccgctgcgaggagagcgcactggtggtacagggaggcggctgaggtggtgctggtcggcggcgtggctttggtggtggtggacgccgcggcgcggagggcgcacgggtggtacagggaggcggcggcgcggctgccgccgggggagatggggtggcccttggtcggcggcatgtgggccttcctccgcgccttcaagtccggcaagcccgacgccttctttgacagtctccctttcctggatacatgctcgatgctcctagtaaacactaaacaccgtgcgtgatgttctgaacatctatctatctctctctctgagctagatttatgtgtctcaatggatggatgctgtcgttttttgcctttgcccgccctgaatggctgctgcaaagtctggaactgaaacagcttattaaggcagattaagcaagagctcgctcatcaccattaatcagttcggtcgcactcgcacgggcgtgtaccaaggcttcatgttcagcagcctgacggtgctgatgacgacggcggaggcgtgcaagcaggtgctgatggacgaggacgcgttcgtgacggggtggcccaaggcgacggtggcgctggtcgggccgcggtcgttcgtggcgatgccgcacgacgagcaccggcgcctccgcaagctgacggccgcgcccatcaacggcttcgacgcgctcacagggtaccgtgccgtaggtgctcttccccatgatttcggcggtggcgcacagcaggtcgtcggccgtgaacgccagcggcccatcaaagtgcaccagcttgccgcccacatcgccaccggactccacctccgccgccgacgaccacataggggcggcgacaccggttctgacgggagaagaaaacggcgcgcggacggacagcgacggagcatgattaatggttctcctcaacggctaataacgattcttcaggaaagttttactcttattaaactccctgacatcgtccaaggaagcaagtgatttcattatgaaagattggtctattttctccaaatttgatcataatggagcttacctccccatgttgccaatcgactctccaatatctcatgatgttgggttaggattgatatcacaagtcggaaacttagttgaatgttcatttcaacatccaaggcatatatgtgctacggggagtggcacagttcaggaagcattcagctgtttgaacaagtttgctgaagctttctatttctggttttctagagcatcgaatcctaagctattccaaaggctatcagctgctgcaggctcaagttcaagagtttgtcggtcacacataaagcaagtggcctcttgcttgcagcatttaccaggactacagtttggttcacaattaagaaaagatcatgctgtacagatgcttttagcgaggcttgcaagcacaacttttggacgcctgtggacggaggtggaggagcatcatgcctgcaacatccttatgttggctgccgctactgtagtaccaccatttgaaaacatatgctggctgagtcaatggcactaagaaaagatggtgggaacatcccctgctggacagtcatactcggaagaaatccgtccaggttgtgcgtgtgttgctgtgccaagagtactcttgcgagaagatgtaacagaaccgaaaactggcatcaagttccccactctacttaaagacaattccaatctgactacagaggtccttgttggaatgggtttcagaagcatgcgaataatgagggttaaagatctgaatctttatgcctttggattatatatacaacctgattctgtttgcaaaaagctgggtccaaagtatgcttgtattccagatgctgagttgaaggatcacccagatttctatgaagatcttttgagggaaaatattgatatgactgttaggctagtagtaagctacaatggcctcagcattggcacagttcgagatgcatttgagaagtctcttgccttccggctgaaaaagggtacaaagatagacttccggcaaacatccgatggtcagctaataactgaaattgatggcaaacaaattggcactgtccacagcaaatatctctgcagaaccttcttcgatatgtatattggtgacccccctgtttcagttgagaccaaacacggcattgcgcaaaatgtggctggactcatgagaagatgctaggaaaacagggaaaccaaaccgaagaactcggaactatttcctccatctatacaaggagagatgtacatagaaaggaagccaggagaggattgattgtatttttagtggtagacagcgactttgtatgctgtaattaacaggcagaaggtttcgacagacaggcctggcatccttagcaaatgcctcctatgcttctcatatggtatggcattttgccatttcctggttcgctgggggcactgtatcatgagcatatccaagagcttctcagaagtctcccctaaattatgttttttttttgaaaaatggcggttccttttaccaatcattctcactaattttttaaatgtcccttagaactgattttcaggagttattttgtacaacaggaggatgtttctctatcccaagtcaaaaaaatggcggggttcagctttgtccctacggactcgagggtaatgtagataattgag

SEQ ID NO: 44801 - DNA, 2014 bp, Zea Mays
gctgctgcatctaacgccgtgactcgtctccatcctttctcttttctcttccaccgggtcgacgcagtgcagcgcgagcttcagcgtgtccatgagctgctcgtccgcggccgtcccggcggcagcgtcgcgcaccagctccaggtcgaacagcatcgtccatcgttccattcccatccataccccctcaatcggccgggatgctgggtgtagggacggccgcggcggtgctgctcggggccgtggcgttggtgctcgcggatgccgctgcgaggagagcgcactggtggtacagggaggcggctgaggtggtgctggtcggcggcgtggctttggtggtggtggacgccgcggcgcggagggcgcacgggtggtacagggaggcggcggcgcggctgccgccgggggagatggggtggcccttggtcggcggcatgtgggccttcctccgcgccttcaagtccggcaagcccgacgccttctttgacagtctccctttcctggatacatgctcgatgctcctagtaaacactaaacaccgtgcgtgatgttctgaacatctatctatctctctctctgagctagatttatgtgtctcaatggatggatgctgtcgttttttgcctttgcccgccctgaatggctgctgcaaagtctggaactgaaacagcttattaaggcagattaagcaagagctcgctcatcaccattaatcagttcggtcgcactcgcacgggcgtgtaccaaggcttcatgttcagcagcctgacggtgctgatgacgacggcggaggcgtgcaagcaggtgctgatggacgaggacgcgttcgtgacggggtggcccaaggcgacggtggcgctggtcgggccgcggtcgttcgtggcgatgccgcacgacgagcaccggcgcctccgcaagctgacggccgcgcccatcaacggcttcgacgcgctcacagggtaccgtgccgtaggtgctcttccccatgatttcggcggtggcgcacagcaggtcgtcggccgtgaacgccagcggcccatcaaagtgcaccagcttgccgcccacatcgccaccggactccacctccgccgccgacgaccacataggggcggcgacaccggttctgacgggagaagaaaacggcgcgcggacggacagcgacggagcatgattaatggttctcctcaacggctaataacgattcttcaggaaagttttactcttattaaactccctgacatcgtccaaggaagcaagtgatttcattatgaaagattggtctattttctccaaatttgatcataatggagcttacctccccatgttgccaatcgactctccaatatctcatgatgttgggttaggattgatatcacaagtcggaaacttagttgaatgttcatttcaacatccaaggcatatatgtgctacggggagtggcacagttcaggaagcattcagctgtttgaacaagtttgctgaagctttctatttctggttttctagagcatcgaatcctaagctattccaaaggctatcagctgctgcaggctcaagttcaagagtttgtcggtcacacataaagcaagtggcctcttgcttgcagcatttaccaggactacagtttggttcacaattaagaaaagatcatgctgtacagatgcttttagcgaggcttgcaagcacaacttttggacgcctgtggacggaggtggaggagcatcatgcctgcaacatccttatgttggctgccgctactgtagtaccaccatttgaaaacatatctccgaagatgctggctgagtcaatggcactaagaaaagatggtgggaacatcccctgctggacagtcatactcggaagaaatccgtccaggttgtgcgtgtgttgctgtgccaagagtactcttgcgagaagatgtaacagaaccgaaaactggcatcaagttccccactctacttaaagacaattccaatctgactacagaggtacactgcccccagttgacacatgc

SEQ ID NO: 44802 - DNA, 997 bp, Zea Mays
tggctctgctgcaagcctgcaaatcactaggtcactgagaacatgttgggtggcaagaaagttacagttgtatttgtcctaggtggtcctggaagtggaaaaggcacacagtgtgccaacatcgtggagcactttggattcacccatcttagtgctggagatcttctgcgtgcagagattaaatctggctctgagaacggaaccatgattgagaacatgataaaggagggaaagattgttccatcggaggtgactataaagcttttgcaggaggcaatgataaaaagtgaaaatgacaaattcctgatcgatggatttccaaggaatgaggagaatcatatggagaaacgactcctggggcgcaatcagggaagggttgatgataacattgaaactatcaaaaaaaggttcaaaacctttgttgactcaactctgcctgtcattgagcattacaactcaaaggacaaggttaaaaagattgatgctgcaaaaccaatccccgaggtgtttgaagacgtcaaagccatttttgccccatattctctaaaggctgaatagagcaatctaagggacatgataaaggtgatacatggtgtctaggcaccacataaacatatctgtgattatgatggaccctttaatatagaacaaaagttttggctcatttgagctaccagcgtaccagtaggcaattcgatttgttaccagcaacaagtgatctgattcccagtggtcctgctagagtaacattttttaccactgtctgttgtctatgtatcctttgatattgtgttgtaccaatgtgcaatttactctatggactgatggaacattgtgccatcccatccaccagatttattgtggcgttatggaaagcatagaaccgctgccatattctttaatttgtacgctgaaatatactcgttggcaccgaacttttggttgatgacttcgtgatataataaccctaccggcagtaaatatctacgctcaacaa

SEQ ID NO: 44803 - DNA, 1020 bp, Zea Mays
ataattggctctgctgcaagcctgcaaatcactaggtcactgagaacatgttgggtggcaagaaagttacagttgtatttgtcctaggtggtcctggaagtggaaaaggcacacagtgtgccaacatcgtggagcactttggattcacccatcttagtgctggagatcttctgcgtgcagagattaaatctggctctgagaacggaaccatgattgagaacatgataaaggagggaaagattgttccatcggaggtgactataaagcttttgcaggaggcaatgataaaaagtgaaaatgacaaattcctgatcgatggatttccaaggaatgaggagaatcgtgcagcctttgagaatgttaccaaaatttctcctgcatttgtgctattctttgactgttctgaagaagatatggagaaacgactcctggggcgcaatcagggaagggttgatgataacattgaaactatcaaaaaaaggttcaaaacctttgttgactcaactctgcctgtcattgagcattacaactcaaaggacaaggttaaaaagattgatgctgcaaaaccaatccccgaggtgtttgaagacgtcaaagccatttttgccccatattctctaaaggcaccacataaacatatctgtgattatgatggaccctttaatatagaacaaaagttttggctcatttgagctaccagcgtaccagtaggcaattcgatttgttaccagcaacaagtgatctgattcccagtggtcctgctagagtaacattttttaccactgtctgttgtctatgtatcctttgatattgtgttgtaccaatgtgcaatttactctatggactgatggaacattgtgccatcccatccaccagatttattgtggcgttatggaaagcatagaaccgctgccatattctttaatttgtacgctgaaatatactcgttggcaccgaacttttggttgatgacttcgtgatataataaccctaccggcagtaaatatctacgctcaacaa

SEQ ID NO: 44804 - DNA, 1118 bp, Zea Mays
ctttgcattactcatttacttgaagtttctgatcctctgcatattcaataattggctctgctgcaagcctgcaaatcactaggtcactgagaacatgttgggtggcaagaaagttacagttgtatttgtcctaggtggtcctggaagtggaaaaggcacacagtgtgccaacatcgtggagcactttggattcacccatcttagtgctggagatcttctgcgtgcagagattaaatctggctctgagaacggaaccatgattgagaacatgataaaggagggaaagattgttccatcggaggtgactataaagcttttgcaggaggcaatgataaaaagtgaaaatgacaaattcctgatcgatggatttccaaggaatgaggagaatcgtgcagcctttgagaatgttaccaaaatttctcctgcatttgtgctattctttgactgttctgaagaagatatggagaaacgactcctggggcgcaatcagggaagggttgatgataacattgaaactatcaaaaaaaggttcaaaacctttgttgactcaactctgcctgtcattgagcattacaactcaaaggacaaggttaaaaagattgatgctgcaaaaccaatccccgaggtgtttgaagacgtcaaagccatttttgccccatattctctaaaggctgaatagagcaatctaagggacatgataaaggtgatacatggtgtctaggcaccacataaacatatctgtgattatgatggaccctttaatatagaacaaaagttttggctcatttgagctaccagcgtaccagtaggcaattcgatttgttaccagcaacaagtgatctgattcccagtggtcctgctagagtaacattttttaccactgtctgttgtctatgtatcctttgatattgtgttgtaccaatgtgcaatttactctatggactgatggaacattgtgccatcccatccaccagatttattgtggcgttatggaaagcatagaaccgctgccatattctttaatttgtacgctgaaatatactcgttggcaccgaacttttggttgatgacttcgtgatataataaccctaccggcagtaaatatctacgctcaacaa

SEQ ID NO: 44805 - DNA, 1377 bp, Zea Mays
cttcctcccccgttcgctttcctttcaggcggtcaccacttcaccaacaggcgccaccacaccaccgacccatttgccgcgttggtgttgccggatcttcaagcaggcagcacaccccacccggacccgagaacccgcgcgcgcgcgtattaataacggcaacctcgctcgcggctcgccgagggaatcgcacgcacccagcgatcagcgcagattccttccacgccccccctcctttccaggtcccctcgcccgcgctctcagatctcgcgcgcctcccacaagggaaaccttgagccatgggcacagttgtggatgccgctccagcagttgtggctgaggtcactgagaacatgttgggtggcaagaaagttacagttgtatttgtcctaggtggtcctggaagtggaaaaggcacacagtgtgccaacatcgtggagcactttggattcacccatcttagtgctggagatcttctgcgtgcagagattaaatctggctctgagaacggaaccatgattgagaacatgataaaggagggaaagattgttccatcggaggtgactataaagcttttgcaggaggcaatgataaaaagtgaaaatgacaaattcctgatcgatggatttccaaggaatgaggagaatcgtgcagcctttgagaatgttaccaaaatttctcctgcatttgtgctattctttgactgttctgaagaagatatggagaaacgactcctggggcgcaatcagggaagggttgatgataacattgaaactatcaaaaaaaggttcaaaacctttgttgactcaactctgcctgtcattgagcattacaactcaaaggacaaggttaaaaagattgatgctgcaaaaccaatccccgaggtgtttgaagacgtcaaagccatttttgccccatattctctaaaggctgaatagagcaatctaagggacatgataaaggtgatacatggtgtctaggcaccacataaacatatctgtgattatgatggaccctttaatatagaacaaaagttttggctcatttgagctaccagcgtaccagtaggcaattcgatttgttaccagcaacaagtgatctgattcccagtggtcctgctagagtaacattttttaccactgtctgttgtctatgtatcctttgatattgtgttgtaccaatgtgcaatttactctatggactgatggaacattgtgccatcccatccaccagatttattgtggcgttatggaaagcatagaaccgctgccatattctttaatttgtacgctgaaatatactcgttggcaccgaacttttggttgatgacttcgtgatataataaccctaccggcagtaaatatctacgctcaacaa

SEQ ID NO: 44806 - DNA, 1441 bp, Zea Mays
agacgtaagtgtcacggagcggaacattccatctctccagtgatccagtcctaacactcccctccgcgccgacgcctctggtgtctggtcaggcggtcaccacttcaccaacaggcgccaccacaccaccgacccatttgccgcgttggtgttgccggatcttcaagcaggcagcacaccccacccggacccgagaacccgcgcgcgcgcgtattaataacggcaacctcgctcgcggctcgccgagggaatcgcacgcacccagcgatcagcgcagattccttccacgccccccctcctttccaggtcccctcgcccgcgctctcagatctcgcgcgcctcccacaagggaaaccttgagccatgggcacagttgtggatgccgctccagcagttgtggctgaggtcactgagaacatgttgggtggcaagaaagttacagttgtatttgtcctaggtggtcctggaagtggaaaaggcacacagtgtgccaacatcgtggagcactttggattcacccatcttagtgctggagatcttctgcgtgcagagattaaatctggctctgagaacggaaccatgattgagaacatgataaaggagggaaagattgttccatcggaggtgactataaagcttttgcaggaggcaatgataaaaagtgaaaatgacaaattcctgatcgatggatttccaaggaatgaggagaatcgtgcagcctttgagaatgttaccaaaatttctcctgcatttgtgctattctttgactgttctgaagaagatatggagaaacgactcctggggcgcaatcagggaagggttgatgataacattgaaactatcaaaaaaaggttcaaaacctttgttgactcaactctgcctgtcattgagcattacaactcaaaggacaaggttaaaaagattgatgctgcaaaaccaatccccgaggtgtttgaagacgtcaaagccatttttgccccatattctctaaaggctgaatagagcaatctaagggacatgataaaggtgatacatggtgtctaggcaccacataaacatatctgtgattatgatggaccctttaatatagaacaaaagttttggctcatttgagctaccagcgtaccagtaggcaattcgatttgttaccagcaacaagtgatctgattcccagtggtcctgctagagtaacattttttaccactgtctgttgtctatgtatcctttgatattgtgttgtaccaatgtgcaatttactctatggactgatggaacattgtgccatcccatccaccagatttattgtggcgttatggaaagcatagaaccgctgccatattctttaatttgtacgctgaaatatactcgttggcaccgaacttttggttgatgacttcgtgatataataaccctaccggcagtaaatatctacgctcaacaa

SEQ ID NO: 44807 - DNA, 2811 bp, Zea Mays
ggaaagaccaaagttgttgacatggctgtttggcaaggaagatgttcgcaaacagacgagaaacagcagcagctgtaattgttcagaagtatgtccgaagatggctgctacgtagagctcacctgcaagcatgtttggcagctctccttattcagtcttacattcgagggttcatcgctcgccgctatttctctgtcattagggaacataaagctgctacagtgatacagtccacatggagaagacggaagtttgtcatacttttccagaattaccggcaagccactgtggcaattcagtgttcttggagacagaagcttgcaagaaaggagctaaggaaactcaaaatggctgcaaatgaagctggtgcactgcgtgaggcaaagaataagcttgagaaaaagatggatgatcttgctttaagacttacccttgaaaggagactgcgggcttccagtgaagagtcaaaatcagtagaaatattgaagcgtgacaaaataattgaatcattaagtgcagaatgtgctgccgctaagtcagctgctcaaaatgaacatgccaaaaaattgctgctccaaaagcagttggatgattctttgagagagattactatgttgcagagtaaaaagattatgtcagcagaagcagcagaagaaaactccaacctaaagaacttagttgaatcattatctacgaagaactcaatactggagaatgaacttattgtgactcgcaaaagtagtgatgatacaatggaaaaattgaaggaagtcgaggggaaatgcaaccatctacagcaaaacttggacaaattgcaggagaaacttacaaacttggaaaatgaaaatcatgtcttaagacagaaggcatttaatatgccgacaatgaacaatctgtctgtagctccaaagacattatctgagaaattttctgcatcaattgggcttcccaacagtgagccaaagcatatatatgaaagcccaacacctacaaaatatctggcttctcttccacagactttgagtacatcaaggagatcgaggttgcctgttgaaaggcatgagcaaaatcatgaaattttattgagatgcatcaaagaaaatttaggatataaggatggcaaaccagttgcagcatgtatcatttacaaatgtcttttgcactggcgtgcttttgaatcagagcgaactgctatttttgatcacgtgattgaggccataaatgatgtcctaaaggggaacgaagctgatggtagattaccttattggttgtccaatacctctgcattgctatgccttctccaaagaaatctgcggtcaaatggattattcactaccccgtctcgtcgttctggtggagctctagggaagatagcacaaacattgaggtctccttcaaagtttataggccgcagtgatactctaccacatgttgatgcacggtatccagccatactattcaaacagcagcttactgcatgtgtcgaaaagatatttgggcagctcagagataatctaaaaaaggaaatatcacctcttcttaatgtttgcattcaggctccaaagtcaacacgtgggcaatctggaaaagcatccaagtcatctggagttggtgcccacccagcatcgaactccaactgggacaatatcgtcaatttccttgacttacttatggatacattgcgcgaaaattatgtgccatccttctttatacgtaaacttatcacacaattattctccttcatcaatatacagttgtttaacagtcttcttctccgacgtgaatgttgtacattctccaatggggaatacgtgaaagctgggctatcgttgttggagaaatggattactgatgtcacagatgagtttgcgggtacatcttggcacgagctcaattatatcagacaagctgttggatttttggtaattgattctgcaagctgcccgtctttctgtttctgttcattgtttgtcttttaggctattttcacaaaattcgttatacacaggttatacaccaaaaaagaaaaaagacgcttgaggagatcaagcaagatctttgcccgtccttgagtgttcgccaaatctatagaatatgctcgatgtattgggatgacaaatacggtacccaaggcatttcaaccgaggtggttgctgcaatgcgggagatggtcaacaaagatacccagaatcttgtgtcaaattccttcttgttggatgatgacttaagtataccattctctaccgaggatctatcaatggcaatcccgtcaatagattatgctgacgtcgatcttccagaatctcttcagcactatacatcagtacagtttctactaaggcagcaggatccacagcctgcccaatagaatgaatgtggtcagcctgccctgaagatctgtctgtcccctggttgtttctaccaaggcagcaggatccacagcctgcggcctgcccaatagaatggatgtggtcagcctgccctgaagatctgtctgtcccctggttttattggggtaacatccatctgcgatgttgtattgatgtttagagagtacctagtttggtggagtggacacaatttaaaagcaaccattgttgctagatgccaattcattggtgttcactccccaagtatttttcattgtacaggaaatgttgtaagtctgttgactagcgcaaaattagttatatcagtggtaaattgggcaatgcgcatcagtgcatcaccgatggtatcttctacacatgaatcgttagccagttaaccgctaggtcgggcgatcataagctccaggctgtctgatatggg

SEQ ID NO: 44808 - DNA, 2812 bp, Zea Mays
attgttttcagatttgatggttgttaggctgtttggcaaggaagatgttcgcaaacagacgagaaacagcagcagctgtaattgttcagaagtatgtccgaagatggctgctacgtagagctcacctgcaagcatgtttggcagctctccttattcagtcttacattcgagggttcatcgctcgccgctatttctctgtcattagggaacataaagctgctacagtgatacagtccacatggagaagacggaagtttgtcatacttttccagaattaccggcaagccactgtggcaattcagtgttcttggagacagaagcttgcaagaaaggagctaaggaaactcaaaatggctgcaaatgaagctggtgcactgcgtgaggcaaagaataagcttgagaaaaagatggatgatcttgctttaagacttacccttgaaaggagactgcgggcttccagtgaagagtcaaaatcagtagaaatattgaagcgtgacaaaataattgaatcattaagtgcagaatgtgctgccgctaagtcagctgctcaaaatgaacatgccaaaaaattgctgctccaaaagcagttggatgattctttgagagagattactatgttgcagagtaaaaagattatgtcagcagaagcagcagaagaaaactccaacctaaagaacttagttgaatcattatctacgaagaactcaatactggagaatgaacttattgtgactcgcaaaagtagtgatgatacaatggaaaaattgaaggaagtcgaggggaaatgcaaccatctacagcaaaacttggacaagagaaacttacaaacttggaaaatgaaaatcatgtcttaagacagaaggcatttaatatgccgacaatgaacaatctgtctgtagctccaaagacattatctgagaaattttctgcatcaattgggcttcccaacagtgagccaaagcatatatatgtaagctttttcttttcctttcaacttgggtaactgcacttgtctggatcttgtaaaaaagctttaatttgacagagaatgaaaattgtaggaaagcccaacacctacaaaatatctggcttctcttccacagactttgagtacatcaaggagatcgaggttgcctgttgaaaggcatgagcaaaatcatgaaattttattgagatgcatcaaagaaaatttaggatataaggatggcaaaccagttgcagcatgtatcatttacaaatgtcttttgcactggcgtgcttttgaatcagagcgaactgctatttttgatcacgtgattgaggccataaatgatgtcctaaaggggaacgaagctgatggtagattaccttattggttgtccaatacctctgcattgctatgccttctccaaagaaatctgcggtcaaatggattattcactaccccgtctcgtcgttctggtggagctctagggaagatagcacaaacattgaggtctccttcaaagtttataggccgcagtgatactctaccacatgttgatgcacggtatccagccatactattcaaacagcagcttactgcatgtgtcgaaaagatatttgggcagctcagagataatctaaaaaaggaaatatcacctcttcttaatgtttgcattcaggctccaaagtcaacacgtgggcaatctggaaaagcatccaagtcatctggagttggtgcccacccagcatcgaactccaactgggacaatatcgtcaatttccttgacttacttatggatacattgcgcgaaaattatgtgccatccttctttatacgtaaacttatcacacaattattctccttcatcaatatacagttgtttaacagtcttcttctccgacgtgaatgttgtacattctccaatggggaatacgtgaaagctgggctatcgttgttggagaaatggattactgatgtcacagatgagtttgcgggtacatcttggcacgagctcaattatatcagacaagctgttggatttttggttatacaccaaaaaagaaaaaagacgcttgaggagatcaagcaagatctttgcccgtccttgagtgttcgccaaatctatagaatatgctcgatgtattgggatgacaaatacggtacccaaggcatttcaaccgaggtggttgctgcaatgcgggagatggtcaacaaagatacccagaatcttgtgtcaaattccttcttgttggatgatgacttaagtataccattctctaccgaggatctatcaatggcaatcccgtcaatagattatgctgacgtcgatcttccagaatctcttcagcactatacatcagtacagtttctactaaggcagcaggatccacagcctgcccaatagaatgaatgtggtcagcctgccctgaagatctgtctgtcccctggttgtttctaccaaggcagcaggatccacagcctgcggcctgcccaatagaatggatgtggtcagcctgccctgaagatctgtctgtcccctggttttattggggtaacatccatctgcgatgttgtattgatgtttagagagtacctagtttggtggagtggacacaatttaaaagcaaccattgttgctagatgccaattcattggtgttcactccccaagtatttttcattgtacaggaaatgttgtaagtctgttgactagcgcaaaattagttatatcagtggtaaattgggcaatgcgcatcagtgcatcaccgatggtatcttctacacatgaatcgttagccagttaaccgctaggtcgggcgatcataagctccaggctgtctgatatggg

SEQ ID NO: 44809 - DNA, 3080 bp, Zea Mays
caatgtactaatgttccgtgatgattattgattagagaatttaaatgacctacatctatttacatgattcactcttctttctatctcatataggtttctattttttatataaaccccctcccccaccattgctcttgtgcataaacatccagtttttttaaaatgcgccatcagcatattggaaattgttagtgctgcgagcttggtaaaacaaaggtgttccttagggctggtcaaattgcgattttagatatgcgccgtgctgagattttggacaacgctgcacggcacattcaaggccgtttcagaacatttatcacacgcaaagaatttgtgaaaacaagggaggcttcaatttctatacaagcatactgcagaggctgtttggcaaggaagatgttcgcaaacagacgagaaacagcagcagctgtaattgttcagaagtatgtccgaagatggctgctacgtagagctcacctgcaagcatgtttggcagctctccttattcagtcttacattcgagggttcatcgctcgccgctatttctctgtcattagggaacataaagctgctacagtgatacagtccacatggagaagacggaagtttgtcatacttttccagaattaccggcaagccactgtggcaattcagtgttcttggagacagaagcttgcaagaaaggagctaaggaaactcaaaatggctgcaaatgaagctggtgcactgcgtgaggcaaagaataagcttgagaaaaagatggatgatcttgctttaagacttacccttgaaaggagactgcgggcttccagtgaagagtcaaaatcagtagaaatattgaagcgtgacaaaataattgaatcattaagtgcagaatgtgctgccgctaagtcagctgctcaaaatgaacatgccaaaaaattgctgctccaaaagcagttggatgattctttgagagagattactatgttgcagagtaaaaagattatgtcagcagaagcagcagaagaaaactccaacctaaagaacttagttgaatcattatctacgaagaactcaatactggagaatgaacttattgtgactcgcaaaagtagtgatgatacaatggaaaaattgaaggaagtcgaggggaaatgcaaccatctacagcaaaacttggacaaattgcaggagaaacttacaaacttggaaaatgaaaatcatgtcttaagacagaaggcatttaatatgccgacaatgaacaatctgtctgtagctccaaagacattatctgagaaattttctgcatcaattgggcttcccaacagtgagccaaagcatatatatgaaagcccaacacctacaaaatatctggcttctcttccacagactttgagtacatcaaggagatcgaggttgcctgttgaaaggcatgagcaaaatcatgaaattttattgagatgcatcaaagaaaatttaggatataaggatggcaaaccagttgcagcatgtatcatttacaaatgtcttttgcactggcgtgcttttgaatcagagcgaactgctatttttgatcacgtgattgaggccataaatgatgtcctaaaggggaacgaagctgatggtagattaccttattggttgtccaatacctctgcattgctatgccttctccaaagaaatctgcggtcaaatggattattcactaccccgtctcgtcgttctggtggagctctagggaagatagcacaaacattgaggtctccttcaaagtttataggccgcagtgatactctaccacatgttgatgcacggtatccagccatactattcaaacagcagcttactgcatgtgtcgaaaagatatttgggcagctcagagataatctaaaaaaggaaatatcacctcttcttaatgtttgcattcaggctccaaagtcaacacgtgggcaatctggaaaagcatccaagtcatctggagttggtgcccacccagcatcgaactccaactgggacaatatcgtcaatttccttgacttacttatggatacattgcgcgaaaattatgtgccatccttctttatacgtaaacttatcacacaattattctccttcatcaatatacagttgtttaacagtcttcttctccgacgtgaatgttgtacattctccaatggggaatacgtgaaagctgggctatcgttgttggagaaatggattactgatgtcacagatgagtttgcgggtacatcttggcacgagctcaattatatcagacaagctgttggatttttggttatacaccaaaaaagaaaaaagacgcttgaggagatcaagcaagatctttgcccgtccttgagtgttcgccaaatctatagaatatgctcgatgtattgggatgacaaatacggtacccaaggcatttcaaccgaggtggttgctgcaatgcgggagatggtcaacaaagatacccagaatcttgtgtcaaattccttcttgttggatgatgacttaagtataccattctctaccgaggatctatcaatggcaatcccgtcaatagattatgctgacgtcgatcttccagaatctcttcagcactatacatcagtacagtttctactaaggcagcaggatccacagcctgcccaatagaatgaatgtggtcagcctgccctgaagatctgtctgtcccctggttgtttctaccaaggcagcaggatccacagcctgcggcctgcccaatagaatggatgtggtcagcctgccctgaagatctgtctgtcccctggttttattggggtaacatccatctgcgatgttgtattgatgtttagagagtacctagtttggtggagtggacacaatttaaaagcaaccattgttgctagatgccaattcattggtgttcactccccaagtatttttcattgtacaggaaatgttgtaagtctgttgactagcgcaaaattagttatatcagtggtaaattgggcaatgcgcatcagtgcatcaccgatggtatcttctacacatgaatcgttagccagttaaccgctaggtcgggcgatcataagctccaggctgtctgatatggg

SEQ ID NO: 44810 - DNA, 2965 bp, Zea Mays
atgtaacgtaaatagattacatgggttacgatgaaaaaatgatgacaaagggtattctcgaaaagatgaagcttgaaaattttcaacttggtaaaacaaaggtgttccttagggctggtcaaattgcgattttagatatgcgccgtgctgagattttggacaacgctgcacggcacattcaaggccgtttcagaacatttatcacacgcaaagaatttgtgaaaacaagggaggcttcaatttctatacaagcatactgcagaggctgtttggcaaggaagatgttcgcaaacagacgagaaacagcagcagctgtaattgttcagaagtatgtccgaagatggctgctacgtagagctcacctgcaagcatgtttggcagctctccttattcagtcttacattcgagggttcatcgctcgccgctatttctctgtcattagggaacataaagctgctacagtgatacagtccacatggagaagacggaagtttgtcatacttttccagaattaccggcaagccactgtggcaattcagtgttcttggagacagaagcttgcaagaaaggagctaaggaaactcaaaatggctgcaaatgaagctggtgcactgcgtgaggcaaagaataagcttgagaaaaagatggatgatcttgctttaagacttacccttgaaaggagactgcgggcttccagtgaagagtcaaaatcagtagaaatattgaagcgtgacaaaataattgaatcattaagtgcagaatgtgctgccgctaagtcagctgctcaaaatgaacatgccaaaaaattgctgctccaaaagcagttggatgattctttgagagagattactatgttgcagagtaaaaagattatgtcagcagaagcagcagaagaaaactccaacctaaagaacttagttgaatcattatctacgaagaactcaatactggagaatgaacttattgtgactcgcaaaagtagtgatgatacaatggaaaaattgaaggaagtcgaggggaaatgcaaccatctacagcaaaacttggacaaattgcaggagaaacttacaaacttggaaaatgaaaatcatgtcttaagacagaaggcatttaatatgccgacaatgaacaatctgtctgtagctccaaagacattatctgagaaattttctgcatcaattgggcttcccaacagtgagccaaagcatatatatgaaagcccaacacctacaaaatatctggcttctcttccacagactttgagtacatcaaggagatcgaggttgcctgttgaaaggcatgagcaaaatcatgaaattttattgagatgcatcaaagaaaatttaggatataaggatggcaaaccagttgcagcatgtatcatttacaaatgtcttttgcactggcgtgcttttgaatcagagcgaactgctatttttgatcacgtgattgaggccataaatgatgtcctaaaggggaacgaagctgatggtagattaccttattggttgtccaatacctctgcattgctatgccttctccaaagaaatctgcggtcaaatggattattcactaccccgtctcgtcgttctggtggagctctagggaagatagcacaaacattgaggtctccttcaaagtttataggccgcagtgatactctaccacatgttgatgcacggtatccagccatactattcaaacagcagcttactgcatgtgtcgaaaagatatttgggcagctcagagataatctaaaaaaggaaatatcacctcttcttaatgtttgcattcaggctccaaagtcaacacgtgggcaatctggaaaagcatccaagtcatctggagttggtgcccacccagcatcgaactccaactgggacaatatcgtcaatttccttgacttacttatggatacattgcgcgaaaattatgtgccatccttctttatacgtaaacttatcacacaattattctccttcatcaatatacagttgtttaacagtcttcttctccgacgtgaatgttgtacattctccaatggggaatacgtgaaagctgggctatcgttgttggagaaatggattactgatgtcacagatgagtttgcgggtacatcttggcacgagctcaattatatcagacaagctgttggatttttggttatacaccaaaaaagaaaaaagacgcttgaggagatcaagcaagatctttgcccgtccttgagtgttcgccaaatctatagaatatgctcgatgtattgggatgacaaatacggtacccaaggcatttcaaccgaggtggttgctgcaatgcgggagatggtcaacaaagatacccagaatcttgtgtcaaattccttcttgttggatgatgacttaagtataccattctctaccgaggatctatcaatggcaatcccgtcaatagattatgctgacgtcgatcttccagaatctcttcagcactatacatcagtacagtttctactaaggcagcaggatccacagcctgcccaatagaatgaatgtggtcagcctgccctgaagatctgtctgtcccctggttgtttctaccaaggcagcaggatccacagcctgcggcctgcccaatagaatggatgtggtcagcctgccctgaagatctgtctgtcccctggttttattggggtaacatccatctgcgatgttgtattgatgtttagagagtacctagtttggtggagtggacacaatttaaaagcaaccattgttgctagatgccaattcattggtgttcactccccaagtatttttcattgtacaggaaatgttgtaagtctgttgactagcgcaaaattagttatatcagtggtaaattgggcaatgcgcatcagtgcatcaccgatggtatcttctacacatgaatcgttagccagttaaccgctaggtcgggcgatcataagctccaggctgtctgatatggg

SEQ ID NO: 44811 - DNA, 3034 bp, Zea Mays
ggaagaagccttgcgtaggtaggaaagaaaatcgcatgtgggccctgcacacactgcaaccacttatccatccaaagggtgtcttagaggctgtccgtattagtcttgctggctatcctaccagaaggacttatgctgaatttgttgaccggtttgctgttcttgtgccagaattgatgattggaagttacgatgaaaaaatgatgacaaagggtattctcgaaaagatgaagcttgaaaattttcaacttggtaaaacaaaggtgttccttagggctggtcaaattgcgattttagatatgcgccgtgctgagattttggacaacgctgcacggcacattcaaggccgtttcagaacatttatcacacgcaaagaatttgtgaaaacaagggaggcttcaatttctatacaagcatactgcagaggctgtttggcaaggaagatgttcgcaaacagacgagaaacagcagcagctgtaattgttcagaagtatgtccgaagatggctgctacgtagagctcacctgcaagcatgtttggcagctctccttattcagtcttacattcgagggttcatcgctcgccgctatttctctgtcattagggaacataaagctgctacagtgatacagtccacatggagaagacggaagtttgtcatacttttccagaattaccggcaagccactgtggcaattcagtgttcttggagacagaagcttgcaagaaaggagctaaggaaactcaaaatggctgcaaatgaagctggtgcactgcgtgaggcaaagaataagcttgagaaaaagatggatgatcttgctttaagacttacccttgaaaggagactgcgggcttccagtgaagagtcaaaatcagtagaaatattgaagcgtgacaaaataattgaatcattaagtgcagaatgtgctgccgctaagtcagctgctcaaaatgaacatgccaaaaaattgctgctccaaaagcagttggatgattctttgagagagattactatgttgcagagtaaaaagattatgtcagcagaagcagcagaagaaaactccaacctaaagaacttagttgaatcattatctacgaagaactcaatactggagaatgaacttattgtgactcgcaaaagtagtgatgatacaatggaaaaattgaaggaagtcgaggggaaatgcaaccatctacagcaaaacttggacaaattgcaggagaaacttacaaacttggaaaatgaaaatcatgtcttaagacagaaggcatttaatatgccgacaatgaacaatctgtctgtagctccaaagacattatctgagaaattttctgcatcaattgggcttcccaacagtgagccaaagcatatatatgaaagcccaacacctacaaaatatctggcttctcttccacagactttgagtacatcaaggagatcgaggttgcctgttgaaaggcatgagcaaaatcatgaaattttattgagatgcatcaaagaaaatttaggatataaggatggcaaaccagttgcagcatgtatcatttacaaatgtcttttgcactggcgtgcttttgaatcagagcgaactgctatttttgatcacgtgattgaggccataaatgatgtcctaaaggggaacgaagctgatggtagattaccttattggttgtccaatacctctgcattgctatgccttctccaaagaaatctgcggtcaaatggattattcactaccccgtctcgtcgttctggtggagctctagggaagatagcacaaacattgaggtctccttcaaagtttataggccgcagtgatactctaccacatgttgatgcacggtatccagccatactattcaaacagcagcttactgcatgtgtcgaaaagatatttgggcagctcagagataatctaaaaaaggaaatatcacctcttcttaatgtttgcattcaggctccaaagtcaacacgtgggcaatctggaaaagcatccaagtcatctggagttggtgcccacccagcatcgaactccaactgggacaatatcgtcaatttccttgacttacttatggatacattgcgcgaaaattatgtgccatccttctttatacgtaaacttatcacacaattattctccttcatcaatatacagttgtttaacagtcttcttctccgacgtgaatgttgtacattctccaatggggaatacgtgaaagctgggctatcgttgttggagaaatggattactgatgtcacagatgagtttgcgggtacatcttggcacgagctcaattatatcagacaagctgttggatttttggttatacaccaaaaaagaaaaaagacgcttgaggagatcaagcaagatctttgcccgtccttgagtgttcgccaaatctatagaatatgctcgatgtattgggatgacaaatacggtacccaaggcatttcaaccgaggtggttgctgcaatgcgggagatggtcaacaaagatacccagaatcttgtgtcaaattccttcttgttggatgatgacttaagtataccattctctaccgaggatctatcaatggcaatcccgtcaatagattatgctgacgtcgatcttccagaatctcttcagcactatacatcagtacagtttctactaaggcagcaggatccacagcctgcccaatagaatgaatgtggtcagcctgccctgaagatctgtctgtcccctggttttattggggtaacatccatctgcgatgttgtattgatgtttagagagtacctagtttggtggagtggacacaatttaaaagcaaccattgttgctagatgccaattcattggtgttcactccccaagtatttttcattgtacaggaaatgttgtaagtctgttgactagcgcaaaattagttatatcagtggtaaattgggcaatgcgcatcagtgcatcaccgatggtatcttctacacatgaatcgttagccagttaaccgctaggtcgggcgatcataagctccaggctgtctgatatggg

SEQ ID NO: 44812 - DNA, 3866 bp, Zea Mays
atctgcgctactcaatctggtgaacacgtttttagtataaatagctctgaagtggtgtgattcagatctattggtctcaacgctatgtagccgatctatacatactcgtgaaggaataattgttaaagcattggattgtgctgctgccgcagctaatcgtgatgctttagcgaagactgtatatgcaagattatttgactggcttgttgagaatattaataagtctattggtcaagatgtggattccaagctacaaattggtgtgctggatatctacggctttgaaagcttcaaaaacaacagctttgagcagttctgcattaactttgcaaatgaaaaacttcagcaacactttaatgagcatgtattcaagatggaacaggaggagtacaaaagtgaggaaattaattggagctacattgagttcattgacaatcaggatgtgctggatttgattgaaaagaaaccaattggaattattgcactgctggatgaagcctgacctttgcgacaaagatgttcagaaacttctcttcccatcttaggctcgagaggacaaaattctcagaaacagattttaccatctcacactatgctgggaaggtcacgtatcaaacagattcttttctggaaaagaatcgagattatattgttgcagaacactgcaatcttctatcatcttcaaggtgcccatttgtttctggacttttcacttcattgcctgaagaatctataagatcttcatacaagttctcatcagttgcttccagattcaagctacaattgcaagccctgatggaaaccctaaactcgactgaacctcactatgtacgctgtgtgaagcccaactctgctaatcgacctcagctttttgaaaatcaaagtgtattgcatcaacttcgttgtgggggtgtcttagaggctgtccgtattagtcttgctggctatcctaccagaaggacttatgctgaatttgttgaccggtttgctgttcttgtgccagaattgatgattggaagttacgatgaaaaaatgatgacaaagggtattctcgaaaagatgaagcttgaaaattttcaacttggtaaaacaaaggtgttccttagggctggtcaaattgcgattttagatatgcgccgtgctgagattttggacaacgctgcacggcacattcaaggccgtttcagaacatttatcacacgcaaagaatttgtgaaaacaagggaggcttcaatttctatacaagcatactgcagaggctgtttggcaaggaagatgttcgcaaacagacgagaaacagcagcagctgtaattgttcagaagtatgtccgaagatggctgctacgtagagctcacctgcaagcatgtttggcagctctccttattcagtcttacattcgagggttcatcgctcgccgctatttctctgtcattagggaacataaagctgctacagtgatacagtccacatggagaagacggaagtttgtcatacttttccagaattaccggcaagccactgtggcaattcagtgttcttggagacagaagcttgcaagaaaggagctaaggaaactcaaaatggctgcaaatgaagctggtgcactgcgtgaggcaaagaataagcttgagaaaaagatggatgatcttgctttaagacttacccttgaaaggagactgcgggcttccagtgaagagtcaaaatcagtagaaatattgaagcgtgacaaaataattgaatcattaagtgcagaatgtgctgccgctaagtcagctgctcaaaatgaacatgccaaaaaattgctgctccaaaagcagttggatgattctttgagagagattactatgttgcagagtaaaaagattatgtcagcagaagcagcagaagaaaactccaacctaaagaacttagttgaatcattatctacgaagaactcaatactggagaatgaacttattgtgactcgcaaaagtagtgatgatacaatggaaaaattgaaggaagtcgaggggaaatgcaaccatctacagcaaaacttggacaaattgcaggagaaacttacaaacttggaaaatgaaaatcatgtcttaagacagaaggcatttaatatgccgacaatgaacaatctgtctgtagctccaaagacattatctgagaaattttctgcatcaattgggcttcccaacagtgagccaaagcatatatatgaaagcccaacacctacaaaatatctggcttctcttccacagactttgagtacatcaaggagatcgaggttgcctgttgaaaggcatgagcaaaatcatgaaattttattgagatgcatcaaagaaaatttaggatataaggatggcaaaccagttgcagcatgtatcatttacaaatgtcttttgcactggcgtgcttttgaatcagagcgaactgctatttttgatcacgtgattgaggccataaatgatgtcctaaaggggaacgaagctgatggtagattaccttattggttgtccaatacctctgcattgctatgccttctccaaagaaatctgcggtcaaatggattattcactaccccgtctcgtcgttctggtggagctctagggaagatagcacaaacattgaggtctccttcaaagtttataggccgcagtgatactctaccacatgttgatgcacggtatccagccatactattcaaacagcagcttactgcatgtgtcgaaaagatatttgggcagctcagagataatctaaaaaaggaaatatcacctcttcttaatgtttgcattcaggctccaaagtcaacacgtgggcaatctggaaaagcatccaagtcatctggagttggtgcccacccagcatcgaactccaactgggacaatatcgtcaatttccttgacttacttatggatacattgcgcgaaaattatgtgccatccttctttatacgtaaacttatcacacaattattctccttcatcaatatacagttgtttaacagtcttcttctccgacgtgaatgttgtacattctccaatggggaatacgtgaaagctgggctatcgttgttggagaaatggattactgatgtcacagatgagtttgcgggtacatcttggcacgagctcaattatatcagacaagctgttggatttttggttatacaccaaaaaagaaaaaagacgcttgaggagatcaagcaagatctttgcccgtccttgagtgttcgccaaatctatagaatatgctcgatgtattgggatgacaaatacggtacccaaggcatttcaaccgaggtggttgctgcaatgcgggagatggtcaacaaagatacccagaatcttgtgtcaaattccttcttgttggatgatgacttaagtataccattctctaccgaggatctatcaatggcaatcccgtcaatagattatgctgacgtcgatcttccagaatctcttcagcactatacatcagtacagtttctactaaggcagcaggatccacagcctgcccaatagaatgaatgtggtcagcctgccctgaagatctgtctgtcccctggttttattggggtaacatccatctgcgatgttgtattgatgtttagagagtacctagtttggtggagtggacacaatttaaaagcaaccattgttgctagatgccaattcattggtgttcactccccaagtatttttcattgtacaggaaatgttgtaagtctgttgactagcgcaaaattagttatatcagtggtaaattgggcaatgcgcatcagtgcatcaccgatggtatcttctacacatgaatcgttagccagttaaccgctaggtcgggcgatcataagctccaggctgtctgatatggg

SEQ ID NO: 44813 - DNA, 5134 bp, Zea Mays
caaggcaaagcaaaaatttcgcgatgagtccaccacgactccaagcagctgcggccgcgccgctctaaccggagctccgttaagactccgccgccccaaatctcagcgcctgagtccgccgctctcctcccgtgctcgccgccactggtttccgcgccgggacttgggttcggtggggcgacgtggagcttagggtttcggcaggatgagctaccggaaggggttgaaggtttgggtggaggagaagggggaagggtgggtggaggcggaggtggtggaagcgaaggagcgcgccgtcgtcgtgttctcgagccagcggaaaaagattacagtttcaccagaaaaattgttgcccagggatacagatgaagatctgggtgggggtcatgtggatgacatgaccaaattgacatatctaaatgaaccaggtgttctttacaatctgaagaaaagatatgcattgaatgagatatatacgtacaccggaagcatcttgattgccgttaatccttttacaaggctgcctcacctgtacaatgaatacatgatggaacaatacaagggcatccgattaggggagctgagtccgcatgtttttgcggtggcggatgcatcatacagggctatggtgaatgattctcgaagccaatccatcctggttagtggtgaaagtggtgctggcaaaaccgaaacaacgaagcttattatgcagtatctcacctttgttggcggtagagccgctcttgatgaccggacggttgaacaacaggttctagaatctaaccctcttttggaggcatttggcaatgcaaaaacagtacgcaatgacaattcaagtcgatttggaaaattcgtagagatacagtttgattcaagtggtagaatatctggagctgctattaggacctatcttttggaaaggtcccgtgttgtgcaaattactgatcctgaaaggaattttcattgcttctaccaattgtgtgcctctggaaaggacgcagagctgtacaaacttgggcatataagcagttttcattacttgaatcaaagcaatacacatgatttggaagggacaaacaatgaagatgagtactggaagacaaaaagggcaatggatattgttgggattagcagagaagatcaggacgctatatttcggacattggcagccattcttcatcttggcaatattgagtttgtcccaggaaaagatgctgattcttcaaaaattaaggattcaacctcaaattttcatctccaaacagcagctaaattatttatgtgtgattcagatctattggtctcaacgctatgtagccgatctatacatactcgtgaaggaataattgttaaagcattggattgtgctgctgccgcagctaatcgtgatgctttagcgaagactgtatatgcaagattatttgactggcttgttgagaatattaataagtctattggtcaagatgtggattccaagctacaaattggtgtgctggatatctacggctttgaaagcttcaaaaacaacagctttgagcagttctgcattaactttgcaaatgaaaaacttcagcaacactttaatgagcatgtattcaagatggaacaggaggagtacaaaagtgaggaaattaattggagctacattgagttcattgacaatcaggatgtgctggatttgattgaaaagaaaccaattggaattattgcactgctggatgaagcctgtatgtttcccaaatctacgcatgagacctttgcgacaaagatgttcagaaacttctcttcccatcttaggctcgagaggacaaaattctcagaaacagattttaccatctcacactatgctgggaaggtcacgtatcaaacagattcttttctggaaaagaatcgagattatattgttgcagaacactgcaatcttctatcatcttcaaggtgcccatttgtttctggacttttcacttcattgcctgaagaatctataagatcttcatacaagttctcatcagttgcttccagattcaagctacaattgcaagccctgatggaaaccctaaactcgactgaacctcactatgtacgctgtgtgaagcccaactctgctaatcgacctcagctttttgaaaatcaaagtgtattgcatcaacttcgttgtgggggtgtcttagaggctgtccgtattagtcttgctggctatcctaccagaaggacttatgctgaatttgttgaccggtttgctgttcttgtgccagaattgatgattggaagttacgatgaaaaaatgatgacaaagggtattctcgaaaagatgaagcttgaaaattttcaacttggtaaaacaaaggtgttccttagggctggtcaaattgcgattttagatatgcgccgtgctgagattttggacaacgctgcacggcacattcaaggccgtttcagaacatttatcacacgcaaagaatttgtgaaaacaagggaggcttcaatttctatacaagcatactgcagaggctgtttggcaaggaagatgttcgcaaacagacgagaaacagcagcagctgtaattgttcagaagtatgtccgaagatggctgctacgtagagctcacctgcaagcatgtttggcagctctccttattcagtcttacattcgagggttcatcgctcgccgctatttctctgtcattagggaacataaagctgctacagtgatacagtccacatggagaagacggaagtttgtcatacttttccagaattaccggcaagccactgtggcaattcagtgttcttggagacagaagcttgcaagaaaggagctaaggaaactcaaaatggctgcaaatgaagctggtgcactgcgtgaggcaaagaataagcttgagaaaaagatggatgatcttgctttaagacttacccttgaaaggagactgcgggcttccagtgaagagtcaaaatcagtagaaatattgaagcgtgacaaaataattgaatcattaagtgcagaatgtgctgccgctaagtcagctgctcaaaatgaacatgccaaaaaattgctgctccaaaagcagttggatgattctttgagagagattactatgttgcagagtaaaaagattatgtcagcagaagcagcagaagaaaactccaacctaaagaacttagttgaatcattatctacgaagaactcaatactggagaatgaacttattgtgactcgcaaaagtagtgatgatacaatggaaaaattgaaggaagtcgaggggaaatgcaaccatctacagcaaaacttggacaaattgcaggagaaacttacaaacttggaaaatgaaaatcatgtcttaagacagaaggcatttaatatgccgacaatgaacaatctgtctgtagctccaaagacattatctgagaaattttctgcatcaattgggcttcccaacagtgagccaaagcatatatatagaatgaaaattgtaggaaagcccaacacctacaaaatatctggcttctcttccacagactttgagtacatcaaggagatcgaggttgcctgttgaaaggcatgagcaaaatcatgaaattttattgagatgcatcaaagaaaatttaggatataaggatggcaaaccagttgcagcatgtatcatttacaaatgtcttttgcactggcgtgcttttgaatcagagcgaactgctatttttgatcacgtgattgaggccataaatgatgtcctaaaggggaacgaagctgatggtagattaccttattggttgtccaatacctctgcattgctatgccttctccaaagaaatctgcggtcaaatggattattcactaccccgtctcgtcgttctggtggagctctagggaagatagcacaaacattgaggtctccttcaaagtttataggccgcagtgatactctaccacatgttgatgcacggtatccagccatactattcaaacagcagcttactgcatgtgtcgaaaagatatttgggcagctcagagataatctaaaaaaggaaatatcacctcttcttaatgtttgcattcaggctccaaagtcaacacgtgggcaatctggaaaagcatccaagtcatctggagttggtgcccacccagcatcgaactccaactgggacaatatcgtcaatttccttgacttacttatggatacattgcgcgaaaattatgtgccatccttctttatacgtaaacttatcacacaattattctccttcatcaatatacagttgtttaacagtcttcttctccgacgtgaatgttgtacattctccaatggggaatacgtgaaagctgggctatcgttgttggagaaatggattactgatgtcacagatgagtttgcgggtacatcttggcacgagctcaattatatcagacaagctgttggatttttggttatacaccaaaaaagaaaaaagacgcttgaggagatcaagcaagatctttgcccgtccttgagtgttcgccaaatctatagaatatgctcgatgtattgggatgacaaatacggtacccaaggcatttcaaccgaggtggttgctgcaatgcgggagatggtcaacaaagatacccagaatcttgtgtcaaattccttcttgttggatgatgacttaagtataccattctctaccgaggatctatcaatggcaatcccgtcaatagattatgctgacgtcgatcttccagaatctcttcagcactatacatcagtacagtttctactaaggcagcaggatccacagcctgcccaatagaatgaatgtggtcagcctgccctgaagatctgtctgtcccctggttttattggggtaacatccatctgcgatgttgtattgatgtttagagagtacctagtttggtggagtggacacaatttaaaagcaaccattgttgctagatgccaattcattggtgttcactccccaagtatttttcattgtacaggaaatgttgtaagtctgttgactagcgcaaaattagttatatcagtggtaaattgggcaatgcgcatcagtgcatcaccgatggtatcttctacacatgaatcgttagccagttaaccgctaggtcgggcgatcataagctccaggctgtctgatatggg

SEQ ID NO: 44814 - DNA, 5144 bp, Zea Mays
cgagattcccctcaaggcaccccaaaccgatgctttctggccactgaaaagcgcacgggagaagaagcgccaaggcaaagcaaaaatttcgcgatgagtccaccacgactccaagcagctgcggccgcgccgctctaaccggagctccgttaagactccgccgccccaaatctcagcgcctgagtccgccgctctcctcccgtgctcgccgccactggtttccgcgccgggacttgggttcggtggggcgacgtggagcttagggtttcggcaggatgagctaccggaaggggttgaaggtttgggtggaggagaagggggaagggtgggtggaggcggaggtggtggaagcgaaggagcgcgccgtcgtcgtgttctcgagccagcggaaaaagattacagtttcaccagaaaaattgttgcccagggatacagatgaagatctgggtgggggtcatgtggatgacatgaccaaattgacatatctaaatgaaccaggtgttctttacaatctgaagaaaagatatgcattgaatgagatatatgctgcctcacctgtacaatgaatacatgatggaacaatacaagggcatccgattaggggagctgagtccgcatgtttttgcggtggcggatgcatcatacagggctatggtgaatgattctcgaagccaatccatcctggttagtggtgaaagtggtgctggcaaaaccgaaacaacgaagcttattatgcagtatctcacctttgttggcggtagagccgctcttgatgaccggacggttgaacaacaggttctagaatctaaccctcttttggaggcatttggcaatgcaaaaacagtacgcaatgacaattcaagtcgatttggaaaattcgtagagatacagtttgattcaagtggtagaatatctggagctgctattaggacctatcttttggaaaggtcccgtgttgtgcaaattactgatcctgaaaggaattttcattgcttctaccaattgtgtgcctctggaaaggacgcagagctgtacaaacttgggcatataagcagttttcattacttgaatcaaagcaatacacatgatttggaagggacaaacaatgaagatgagtactggaagacaaaaagggcaatggatattgttgggattagcagagaagatcaggacgctatatttcggacattggcagccattcttcatcttggcaatattgagtttgtcccaggaaaagatgctgattcttcaaaaattaaggattcaacctcaaattttcatctccaaacagcagctaaattatttatgtgtgattcagatctattggtctcaacgctatgtagccgatctatacatactcgtgaaggaataattgttaaagcattggattgtgctgctgccgcagctaatcgtgatgctttagcgaagactgtatatgcaagattatttgactggcttgttgagaatattaataagtctattggtcaagatgtggattccaagctacaaattggtgtgctggatatctacggctttgaaagcttcaaaaacaacagctttgagcagttctgcattaactttgcaaatgaaaaacttcagcaacactttaatgagcatgtattcaagatggaacaggaggagtacaaaagtgaggaaattaattggagctacattgagttcattgacaatcaggatgtgctggatttgattgaaaagaaaccaattggaattattgcactgctggatgaagcctgtatgtttcccaaatctacgcatgagacctttgcgacaaagatgttcagaaacttctcttcccatcttaggctcgagaggacaaaattctcagaaacagattttaccatctcacactatgctgggaaggtcacgtatcaaacagattcttttctggaaaagaatcgagattatattgttgcagaacactgcaatcttctatcatcttcaaggtgcccatttgtttctggacttttcacttcattgcctgaagaatctataagatcttcatacaagttctcatcagttgcttccagattcaagctacaattgcaagccctgatggaaaccctaaactcgactgaacctcactatgtacgctgtgtgaagcccaactctgctaatcgacctcagctttttgaaaatcaaagtgtattgcatcaacttcgttgtgggggtgtcttagaggctgtccgtattagtcttgctggctatcctaccagaaggacttatgctgaatttgttgaccggtttgctgttcttgtgccagaattgatgattggaagttacgatgaaaaaatgatgacaaagggtattctcgaaaagatgaagcttgaaaattttcaacttggtaaaacaaaggtgttccttagggctggtcaaattgcgattttagatatgcgccgtgctgagattttggacaacgctgcacggcacattcaaggccgtttcagaacatttatcacacgcaaagaatttgtgaaaacaagggaggcttcaatttctatacaagcatactgcagaggctgtttggcaaggaagatgttcgcaaacagacgagaaacagcagcagctgtaattgttcagaagtatgtccgaagatggctgctacgtagagctcacctgcaagcatgtttggcagctctccttattcagtcttacattcgagggttcatcgctcgccgctatttctctgtcattagggaacataaagctgctacagtgatacagtccacatggagaagacggaagtttgtcatacttttccagaattaccggcaagccactgtggcaattcagtgttcttggagacagaagcttgcaagaaaggagctaaggaaactcaaaatggctgcaaatgaagctggtgcactgcgtgaggcaaagaataagcttgagaaaaagatggatgatcttgctttaagacttacccttgaaaggagactgcgggcttccagtgaagagtcaaaatcagtagaaatattgaagcgtgacaaaataattgaatcattaagtgcagaatgtgctgccgctaagtcagctgctcaaaatgaacatgccaaaaaattgctgctccaaaagcagttggatgattctttgagagagattactatgttgcagagtaaaaagattatgtcagcagaagcagcagaagaaaactccaacctaaagaacttagttgaatcattatctacgaagaactcaatactggagaatgaacttattgtgactcgcaaaagtagtgatgatacaatggaaaaattgaaggaagtcgaggggaaatgcaaccatctacagcaaaacttggacaaattgcaggagaaacttacaaacttggaaaatgaaaatcatgtcttaagacagaaggcatttaatatgccgacaatgaacaatctgtctgtagctccaaagacattatctgagaaattttctgcatcaattgggcttcccaacagtgagccaaagcatatatatgaaagcccaacacctacaaaatatctggcttctcttccacagactttgagtacatcaaggagatcgaggttgcctgttgaaaggcatgagcaaaatcatgaaattttattgagatgcatcaaagaaaatttaggatataaggatggcaaaccagttgcagcatgtatcatttacaaatgtcttttgcactggcgtgcttttgaatcagagcgaactgctatttttgatcacgtgattgaggccataaatgatgtcctaaaggggaacgaagctgatggtagattaccttattggttgtccaatacctctgcattgctatgccttctccaaagaaatctgcggtcaaatggattattcactaccccgtctcgtcgttctggtggagctctagggaagatagcacaaacattgaggtctccttcaaagtttataggccgcagtgatactctaccacatgttgatgcacggtatccagccatactattcaaacagcagcttactgcatgtgtcgaaaagatatttgggcagctcagagataatctaaaaaaggaaatatcacctcttcttaatgtttgcattcaggctccaaagtcaacacgtgggcaatctggaaaagcatccaagtcatctggagttggtgcccacccagcatcgaactccaactgggacaatatcgtcaatttccttgacttacttatggatacattgcgcgaaaattatgtgccatccttctttatacgtaaacttatcacacaattattctccttcatcaatatacagttgtttaacagtcttcttctccgacgtgaatgttgtacattctccaatggggaatacgtgaaagctgggctatcgttgttggagaaatggattactgatgtcacagatgagtttgcgggtacatcttggcacgagctcaattatatcagacaagctgttggatttttggttatacaccaaaaaagaaaaaagacgcttgaggagatcaagcaagatctttgcccgtccttgagtgttcgccaaatctatagaatatgctcgatgtattgggatgacaaatacggtacccaaggcatttcaaccgaggtggttgctgcaatgcgggagatggtcaacaaagatacccagaatcttgtgtcaaattccttcttgttggatgatgacttaagtataccattctctaccgaggatctatcaatggcaatcccgtcaatagattatgctgacgtcgatcttccagaatctcttcagcactatacatcagtacagtttctactaaggcagcaggatccacagcctgcccaatagaatgaatgtggtcagcctgccctgaagatctgtctgtcccctggttttattggggtaacatccatctgcgatgttgtattgatgtttagagagtacctagtttggtggagtggacacaatttaaaagcaaccattgttgctagatgccaattcattggtgttcactccccaagtatttttcattgtacaggaaatgttgtaagtctgttgactagcgcaaaattagttatatcagtggtaaattgggcaatgcgcatcagtgcatcaccgatggtatcttctacacatgaatcgttagccagttaaccgctaggtcgggcgatcataagctccaggctgtctgatatggg

SEQ ID NO: 44815 - DNA, 5195 bp, Zea Mays
cacactccgagattcccctcaaggcaccccaaaccgatgctttctggccactgaaaagcgcacgggagaagaagcgccaaggcaaagcaaaaatttcgcgatgagtccaccacgactccaagcagctgcggccgcgccgctctaaccggagctccgttaagactccgccgccccaaatctcagcgcctgagtccgccgctctcctcccgtgctcgccgccactggtttccgcgccgggacttgggttcggtggggcgacgtggagcttagggtttcggcaggatgagctaccggaaggggttgaaggtttgggtggaggagaagggggaagggtgggtggaggcggaggtggtggaagcgaaggagcgcgccgtcgtcgtgttctcgagccagcggaaaaagattacagtttcaccagaaaaattgttgcccagggatacagatgaagatctgggtgggggtcatgtggatgacatgaccaaattgacatatctaaatgaaccaggtgttctttacaatctgaagaaaagatatgcattgaatgagatatatacgtacaccggaagcatcttgattgccgttaatccttttacaaggctgcctcacctgtacaatgaatacatgatggaacaatacaagggcatccgattaggggagctgagtccgcatgtttttgcggtggcggatgcatcatacagggctatggtgaatgattctcgaagccaatccatcctggttagtggtgaaagtggtgctggcaaaaccgaaacaacgaagcttattatgcagtatctcacctttgttggcggtagagccgctcttgatgaccggacggttgaacaacaggttctagaatctaaccctcttttggaggcatttggcaatgcaaaaacagtacgcaatgacaattcaagtcgatttggaaaattcgtagagatacagtttgattcaagtggtagaatatctggagctgctattaggacctatcttttggaaaggtcccgtgttgtgcaaattactgatcctgaaaggaattttcattgcttctaccaattgtgtgcctctggaaaggacgcagagctgtacaaacttgggcatataagcagttttcattacttgaatcaaagcaatacacatgatttggaagggacaaacaatgaagatgagtactggaagacaaaaagggcaatggatattgttgggattagcagagaagatcaggacgctatatttcggacattggcagccattcttcatcttggcaatattgagtttgtcccaggaaaagatgctgattcttcaaaaattaaggattcaacctcaaattttcatctccaaacagcagctaaattatttatgtgtgattcagatctattggtctcaacgctatgtagccgatctatacatactcgtgaaggaataattgttaaagcattggattgtgctgctgccgcagctaatcgtgatgctttagcgaagactgtatatgcaagattatttgactggcttgttgagaatattaataagtctattggtcaagatgtggattccaagctacaaattggtgtgctggatatctacggctttgaaagcttcaaaaacaacagctttgagcagttctgcattaactttgcaaatgaaaaacttcagcaacactttaatgagcatgtattcaagatggaacaggaggagtacaaaagtgaggaaattaattggagctacattgagttcattgacaatcaggatgtgctggatttgattgaaaagaaaccaattggaattattgcactgctggatgaagcctgtatgtttcccaaatctacgcatgagacctttgcgacaaagatgttcagaaacttctcttcccatcttaggctcgagaggacaaaattctcagaaacagattttaccatctcacactatgctgggaaggtcacgtatcaaacagattcttttctggaaaagaatcgagattatattgttgcagaacactgcaatcttctatcatcttcaaggtgcccatttgtttctggacttttcacttcattgcctgaagaatctataagatcttcatacaagttctcatcagttgcttccagattcaagctacaattgcaagccctgatggaaaccctaaactcgactgaacctcactatgtacgctgtgtgaagcccaactctgctaatcgacctcagctttttgaaaatcaaagtgtattgcatcaacttcgttgtgggggtgtcttagaggctgtccgtattagtcttgctggctatcctaccagaaggacttatgctgaatttgttgaccggtttgctgttcttgtgccagaattgatgattggaagttacgatgaaaaaatgatgacaaagggtattctcgaaaagatgaagcttgaaaattttcaacttggtaaaacaaaggtgttccttagggctggtcaaattgcgattttagatatgcgccgtgctgagattttggacaacgctgcacggcacattcaaggccgtttcagaacatttatcacacgcaaagaatttgtgaaaacaagggaggcttcaatttctatacaagcatactgcagaggctgtttggcaaggaagatgttcgcaaacagacgagaaacagcagcagctgtaattgttcagaagtatgtccgaagatggctgctacgtagagctcacctgcaagcatgtttggcagctctccttattcagtcttacattcgagggttcatcgctcgccgctatttctctgtcattagggaacataaagctgctacagtgatacagtccacatggagaagacggaagtttgtcatacttttccagaattaccggcaagccactgtggcaattcagtgttcttggagacagaagcttgcaagaaaggagctaaggaaactcaaaatggctgcaaatgaagctggtgcactgcgtgaggcaaagaataagcttgagaaaaagatggatgatcttgctttaagacttacccttgaaaggagactgcgggcttccagtgaagagtcaaaatcagtagaaatattgaagcgtgacaaaataattgaatcattaagtgcagaatgtgctgccgctaagtcagctgctcaaaatgaacatgccaaaaaattgctgctccaaaagcagttggatgattctttgagagagattactatgttgcagagtaaaaagattatgtcagcagaagcagcagaagaaaactccaacctaaagaacttagttgaatcattatctacgaagaactcaatactggagaatgaacttattgtgactcgcaaaagtagtgatgatacaatggaaaaattgaaggaagtcgaggggaaatgcaaccatctacagcaaaacttggacaaattgcaggagaaacttacaaacttggaaaatgaaaatcatgtcttaagacagaaggcatttaatatgccgacaatgaacaatctgtctgtagctccaaagacattatctgagaaattttctgcatcaattgggcttcccaacagtgagccaaagcatatatatgaaagcccaacacctacaaaatatctggcttctcttccacagactttgagtacatcaaggagatcgaggttgcctgttgaaaggcatgagcaaaatcatgaaattttattgagatgcatcaaagaaaatttaggatataaggatggcaaaccagttgcagcatgtatcatttacaaatgtcttttgcactggcgtgcttttgaatcagagcgaactgctatttttgatcacgtgattgaggccataaatgatgtcctaaaggggaacgaagctgatggtagattaccttattggttgtccaatacctctgcattgctatgccttctccaaagaaatctgcggtcaaatggattattcactaccccgtctcgtcgttctggtggagctctagggaagatagcacaaacattgaggtctccttcaaagtttataggccgcagtgatactctaccacatgttgatgcacggtatccagccatactattcaaacagcagcttactgcatgtgtcgaaaagatatttgggcagctcagagataatctaaaaaaggaaatatcacctcttcttaatgtttgcattcaggctccaaagtcaacacgtgggcaatctggaaaagcatccaagtcatctggagttggtgcccacccagcatcgaactccaactgggacaatatcgtcaatttccttgacttacttatggatacattgcgcgaaaattatgtgccatccttctttatacgtaaacttatcacacaattattctccttcatcaatatacagttgtttaacagtcttcttctccgacgtgaatgttgtacattctccaatggggaatacgtgaaagctgggctatcgttgttggagaaatggattactgatgtcacagatgagtttgcgggtacatcttggcacgagctcaattatatcagacaagctgttggatttttggttatacaccaaaaaagaaaaaagacgcttgaggagatcaagcaagatctttgcccgtccttgagtgttcgccaaatctatagaatatgctcgatgtattgggatgacaaatacggtacccaaggcatttcaaccgaggtggttgctgcaatgcgggagatggtcaacaaagatacccagaatcttgtgtcaaattccttcttgttggatgatgacttaagtataccattctctaccgaggatctatcaatggcaatcccgtcaatagattatgctgacgtcgatcttccagaatctcttcagcactatacatcagtacagtttctactaaggcagcaggatccacagcctgcccaatagaatgaatgtggtcagcctgccctgaagatctgtctgtcccctggttttattggggtaacatccatctgcgatgttgtattgatgtttagagagtacctagtttggtggagtggacacaatttaaaagcaaccattgttgctagatgccaattcattggtgttcactccccaagtatttttcattgtacaggaaatgttgtaagtctgttgactagcgcaaaattagttatatcagtggtaaattgggcaatgcgcatcagtgcatcaccgatggtatcttctacacatgaatcgttagccagttaaccgctaggtcgggcgatcataagctccaggctgtctgatatggg

SEQ ID NO: 44816 - DNA, 1046 bp, Zea Mays
ccatcttggacttttaagacagcgctgcggctgcgctcgatcgaaccaaaaaaaaaaagaaaggaaaatccacatgcaatgcaaaagatctcgacatatatcttacgatccgatgggcctacacgctgacacgccgacgcttttgggtcttgagtcttgaccccatgggccccgcccgcccgcccgccaagtgcgcgtctgcttcggatcttcgtcaccggataagccacctgcttccgatcgcacagccctatcaactctcctcgcctgccgtcgccgcctcgcgctctccgatcccgcgcatattctccaccagtagtcctctgctccgccacacccaccactgctagggcgccgcgccgcaggcccgcagccccctaatctccgagtgctgatcacgcggaaaccgatggcgctcctcgcgccgagcccgcgcgcgctccgcgtgcgggagaccgcggcggcggcgctcccgcactcatcggcgaccgctgcatgctcgaccgtcggcggcggggcggccaggcgggcgctgtggctgtgggacaacggcggcgggaccgggacggggaggaggaaggagcaccgggagagagtccggccggaggcgtactgctgggacgtgtccaggccggtggagatggaggagatcgacagcatcgagaagctcgatgatgcgctcaggtggtccgtcgagaacaaccagcccgtcgtcatcgactggatggcaggttggtgtcggaaatgcatctacctgatgcccagaatggagaagatggcaggagaatatcctgaagtgaggttttacttcatcgatgtcaataaagttccacagggggtggtgaaaagaggaaatgtaactagaatgcccactattcagctatggaaggatggagagtggaaagcggaagtaataggaggccacaaagcttgtcttgtgatggatgaggttagagaaatgatcgagaataacaagtgactaaacacccaagttatgcaatagatgttgtactgtgtttgatgtagtttccaggtcttggtccaag

SEQ ID NO: 44817 - DNA, 1641 bp, Zea Mays
ccatcttggacttttaagacagcgctgcggctgcgctcgatcgaaccaaaaaaaaaaagaaaggaaaatccacatgcaatgcaaaagatctcgacatatatcttacgatccgatgggcctacacgctgacacgccgacgcttttgggtcttgagtcttgaccccatgggccccgcccgcccgcccgccaagtgcgcgtctgcttcggatcttcgtcaccggataagccacctgcttccgatcgcacagccctatcaactctcctcgcctgccgtcgccgcctcgcgctctccgatcccgcgcatattctccaccagtagtcctctgctccgccacacccaccactgctagggcgccgcgccgcaggcccgcagccccctaatctccgagtgctgatcacgcggaaaccgatggcgctcctcgcgccgagcccgcgcgcgctccgcgtgcgggagaccgcggcggcggcgctcccgcactcatcggcgaccgctgcatgctcgaccgtcggcggcggggcggccaggcgggcgctgtggctgtgggacaacggcggcgggaccgggacggggaggaggaaggagcaccgggagagagtccggccggaggcgtactgctgggacgtgtccaggccggtggagatggaggagatcgacagcatcgagaagctcgatgatgcgctcaggtggtccgtcgagaacaaccagcccgtcgtcatcgactggatggcaggttggtgtcggaaatgcatctacctgatgcccagaatggagaagatggcaggagaatatcctgagttagtgtgacttcacctcagcagaatgtttttttcggcacaagtgaggttttacttcatcgatgtcaataaagttccacagggggtggtgaaaagaggaaatgtaactgtaagtcggcaaattcagagattgttgacaagatagtagttcattcaaaaggactaaaataatctgactgccttgcctttctgtgtgcaatactgcaaatctaccttcagagaatgcccactattcaggtgccactgcattttcttctgccaattcattcctttcttccaagaaaccgtgaatgccttgtaacttgaaaaacattgatcctaaaccgtgcattcatgttcagctatggaaggatggagagtggaaagcggaagtaataggaggccacaaagcttgtcttgtgatggatgaggttagagaaatgatcgagaataacaagtgactaaacacccaagttatgcaatagatgttgtactgtgtttgatgtaagtatagacatcagacgatctcttcatatactaagctgaaatcaaatcacgttttagttttgtactaagccaaacttgctgatttgaaccaagcttactgaaaaatgcattaacatctacgatatcaaacaaatctcaaaatacatttcatggtgtattttattaatcttgtttggtgttttagttgtttgtgcattttttcttttaacgtggtcaaagattaaaaaaaagtttgacttatgacaaaacaaaaatggattacaattgtaacaacaaagggagtaaaatccataggatatattgtatttcaggaatcaggatggaggggggatatcttgaattatcatatccttctttatg

SEQ ID NO: 44818 - DNA, 1587 bp, Zea Mays
ccatcttggacttttaagacagcgctgcggctgcgctcgatcgaaccaaaaaaaaaaagaaaggaaaatccacatgcaatgcaaaagatctcgacatatatcttacgatccgatgggcctacacgctgacacgccgacgcttttgggtcttgagtcttgaccccatgggccccgcccgcccgcccgccaagtgcgcgtctgcttcggatcttcgtcaccggataagccacctgcttccgatcgcacagccctatcaactctcctcgcctgccgtcgccgcctcgcgctctccgatcccgcgcatattctccaccagtagtcctctgctccgccacacccaccactgctagggcgccgcgccgcaggcccgcagccccctaatctccgagtgctgatcacgcggaaaccgatggcgctcctcgcgccgagcccgcgcgcgctccgcgtgcgggagaccgcggcggcggcgctcccgcactcatcggcgaccgctgcatgctcgaccgtcggcggcggggcggccaggcgggcgctgtggctgtgggacaacggcggcgggaccgggacggggaggaggaaggagcaccgggagagagtccggccggaggcgtactgctgggacgtgtccaggccggtggagatggaggagatcgacagcatcgagaagctcgatgatgcgctcaggtggtccgtcgagaacaaccagcccgtcgtcatcgactggtacgagagtgctagcttgttggttgttgcacatgttgccagacctgcaatgatctcactctactccattgacctgtctggttttcggatgttgattgtcattagagtagaatcgagatgatttttcgcctttattttatccgcatgcttaaatctaatatcatatctcatcggaagttgaggcgctgtctattgcttccaggatggcaggttggtgtcggaaatgcatctacctgatgcccagaatggagaagatggcaggagaatatcctgaagtgaggttttacttcatcgatgtcaataaagttccacagggggtggtgaaaagaggaaatgtaactagaatgcccactattcagctatggaaggatggagagtggaaagcggaagtaataggaggccacaaagcttgtcttgtgatggatgaggttagagaaatgatcgagaataacaagtgactaaacacccaagttatgcaatagatgttgtactgtgtttgatgtaagtatagacatcagacgatctcttcatatactaagctgaaatcaaatcacgttttagttttgtactaagccaaacttgctgatttgaaccaagcttactgaaaaatgcattaacatctacgatatcaaacaaatctcaaaatacatttcatggtgtattttattaatcttgtttggtgttttagttgtttgtgcattttttcttttaacgtggtcaaagattaaaaaaaagtttgacttatgacaaaacaaaaatggattacaattgtaacaacaaagggagtaaaatccataggatatattgtatttcaggaatcaggatggaggggggatatcttgaattatcatatccttctttatg

SEQ ID NO: 44819 - DNA, 1636 bp, Zea Mays
ccatcttggacttttaagacagcgctgcggctgcgctcgatcgaaccaaaaaaaaaaagaaaggaaaatccacatgcaatgcaaaagatctcgacatatatcttacgatccgatgggcctacacgctgacacgccgacgcttttgggtcttgagtcttgaccccatgggccccgcccgcccgcccgccaagtgcgcgtctgcttcggatcttcgtcaccggataagccacctgcttccgatcgcacagccctatcaactctcctcgcctgccgtcgccgcctcgcgctctccgatcccgcgcatattctccaccagtagtcctctgctccgccacacccaccactgctagggcgccgcgccgcaggcccgcagccccctaatctccgagtgctgatcacgcggaaaccgatggcgctcctcgcgccgagcccgcgcgcgctccgcgtgcgggagaccgcggcggcggcgctcccgcactcatcggcgaccgctgcatgctcgaccgtcggcggcggggcggccaggcgggcgctgtggctgtgggacaacggcggcgggaccgggacggggaggaggaaggagcaccgggagagagtccggccggaggcgtactgctgggacgtgtccaggccggtggagatggaggagatcgacagcatcgagaagctcgatgatgcgctcaggtggtccgtcgagaacaaccagcccgtcgtcatcgactggtacgagagtgctagcttgttggttgttgcacatgttgccagacctgcaatgatctcactctactccattgacctgtctggttttcggatgttgattgtcattagagtagaatcgagatgatttttcgcctttattttatccgcatgcttaaatctaatatcatatctcatcggaagttgaggcgctgtctattgcttccaggatggcaggttggtgtcggaaatgcatctacctgatgcccagaatggagaagatggcaggagaatatcctgagttagtgtgacttcacctcagcagaatgtttttttcggcacagtttagaagtgaggttttacttcatcgatgtcaataaagttccacagggggtggtgaaaagaggaaatgtaactagaatgcccactattcagctatggaaggatggagagtggaaagcggaagtaataggaggccacaaagcttgtcttgtgatggatgaggttagagaaatgatcgagaataacaagtgactaaacacccaagttatgcaatagatgttgtactgtgtttgatgtaagtatagacatcagacgatctcttcatatactaagctgaaatcaaatcacgttttagttttgtactaagccaaacttgctgatttgaaccaagcttactgaaaaatgcattaacatctacgatatcaaacaaatctcaaaatacatttcatggtgtattttattaatcttgtttggtgttttagttgtttgtgcattttttcttttaacgtggtcaaagattaaaaaaaagtttgacttatgacaaaacaaaaatggattacaattgtaacaacaaagggagtaaaatccataggatatattgtatttcaggaatcaggatggaggggggatatcttgaattatcatatccttctttatg

SEQ ID NO: 44820 - DNA, 1774 bp, Zea Mays
ccggccctcccagcggccagcagcagcacgcaccgcgccatcaatccatcgacaagccatctcagctgcccacggctgcactgccactgccacgccatggccctggacgacgcctgcgcctacgactgttgcgcgttacctccaccgctccattgcttggactgggactgggactcggagctgcttcacactcatcgtcacactaccagtgccggaggtgccgccgtccaagcagagccgcccaccttcttcgtcccggcgacgccaggtgtgcagccgtcggcggcgtccagtggcggctacctgcacgacgccatcactcactggagcgacgaccgtcgcagcaagcggcagcggatggcggcggcggtggcaacgacgacgacgcctcccgctcggcgtccggcgaccaccgtcagcgaggaccttcagtgccttcttgcgggcttctgggattcaacaagcgaggccgagggaggagcagacttccgccatgatctgaacaccacgaccccggagccggagccggagacgacgacggagatacgctgcagttttgcctcagtacgccggtgctgcaagcagagcagaggaggaagcagacaatgggagcggtaggcaccaacagctacgggacaaaacagtggttactggtcgtacttgctctcgccagttctgattctggtcgactgatagatggccggcccattagcccactgggctgctgcagcctgcatatgcacagcagtacagcactcgatctgctcctagattaattgcttgcgtagcgtagcgtagcgactagcgaaggtgtttgttaatttccttaggcagcagcaatagtcgcactactgtgcctccatacaaacagtttggacatgcatgaaactcactccagtttgaagctcgggcgtgcaggcgaggacgaggcagttgcgtcgggcagggaggaccagcagaggggggccagcgcgcaggtgctgctgccagcgccagcggcagtggcgcagcgcggagaggaggaggaggaggaggcaaaggcgaccgcggtagtcccccctcctcggttccccgccaccgcgccagccgctgctcccgtgcagcggcagctgcagctgcaaaaggcggccgagggtgcagccgccacgacgacggcgcccgcctctgcctgctcctctttgctgtcactgtcaggggaggacagggagaagagaggcgtcggggtgctgtaccccttcgcggtggtcaagccgctggggctagacgacggccgcatgacgacgctcagcgacgtgaaccacagaatcctcaagagaccggcaaggccggtccggcaccccgtcggcccgttcgcgtgcggccccgccgtgtcggcccacggcctcggcctgtccgggaaggtggtcgtcagcctcaccaagatcaggacgggagggaacggcaccataaccatcatcagaacaagaggctgatggatcatggatgtcatcaaccgtttccgatcccgcttcttttttttttgttcttgtttttaggtcgccatgcctgttgtccagggtaatcatggtacattggctgctacggttgtaaatacaccctccgggttggttttcagtgcaggcttctgccttctctactactagtaattaactagctaaaactcccactacatttgaattgaacgtacatcgtacataatatgctgcagaaaagttttttttttaaaaaaaatgcagcctaggaattttaggtaaatataagggatgtccaacct

SEQ ID NO: 44821 - DNA, 1146 bp, Zea Mays
cccggccctcccagcggccagcagcagcacgcaccgcgccatcaatccatcgacaagccatctcagctgcccacggctgcactgccactgccacgccatggccctggacgacgcctgcgcctacgactgttgcgcgttacctccaccgctccattgcttggactgggactgggactcggagctgcttcacactcatcgtcacactaccagtgccggaggtgccgccgtccaagcagagccgcccaccttcttcgtcccggcgacgccaggtgtgcagccgtcggcggcgtccagtggcggctacctgcacgacgccatcactcactggagcgacgaccgtcgcagcaagcggcagcggatggcggcggcggtggcaacgacgacgacgcctcccgctcggcgtccggcgaccaccgtcagcgaggaccttcagtgccttcttgcgggcttctgggattcaacaagcgaggccgagggaggagcagacttccgccatgatctgaacaccacgaccccggagccggagccggagacgacgacggagatacgctgcagttttgcctcaggggaggacagggagaagagaggcgtcggggtgctgtaccccttcgcggtggtcaagccgctggggctagacgacggccgcatgacgacgctcagcgacgtgaaccacagaatcctcaagagaccggcaaggccggtccggcaccccgtcggcccgttcgcgtgcggccccgccgtgtcggcccacggcctcggcctgtccgggaaggtggtcgtcagcctcaccaagatcaggacgggagggaacggcaccataaccatcatcagaacaagaggctgatggatcatggatgtcatcaaccgtttccgatcccgcttcttttttttttgttcttgtttttaggtcgccatgcctgttgtccagggtaatcatggtacattggctgctacggttgtaaatacaccctccgggttggttttcagtgcaggcttctgccttctctactactagtaattaactagctaaaactcccactacatttgaattgaacgtacatcgtacataatatgctgcagaaaagttttttttttaaaaaaaatgcagcctaggaattttaggtaaatataagggatgtccaacct

SEQ ID NO: 44822 - DNA, 713 bp, Zea Mays
gtctctgcttcctctgatgaatacatgctccaggtgcgaaatgtccccatcttagcggtgaaggtaatgttcttgagctggcaattctagttatcctcgcacttgagtggaccgtcggtacacctcgccggtcttcaactccaccgtcaccacgtgacccgctgtctcacggaggaacttcaccaggatcctcaggctcctgactcatcttcctctttccgtctctctctctctcgctggttctcttcccctctgtgcgccgctaaaacccagctcgtagaaacagccaaacatgaggcggcacaagacaaagcgagggaccaatggcaaagggagatggaaagggaaaacccgcccaacaatggcgccaaattgcggggtcgagatccatctctcacctccccatggccatctcgagctgctccagcttttgagcgacgtccgccatatccgacgaacgcaccttgtacccgagcgcggccagcagctcgtccacctcctcctgttcccctgtccccgccgccgcctccatcagtcttgtccttggaggagcccatgtagccgtcgctcccaccggcgtcttggtactcacgcagtcgcgcttcagcttgggatttggatacagggttgagaattgggagttgggaaggaaaatggaagggagaggagggacagagatggcaatagccaatagggaccgatcccgttctttc

SEQ ID NO: 44823 - DNA, 276 bp, Zea Mays
caacttttgaactctgaaaacagagagaaatacagagaccaaaacagactgagaaaataaaaaaaatgcttggtacaaccctatgtagtcattataggtttccattagatacggacatacgggcaaaagaagataaaatcaaattatagaagatggtccaatggaagtgaatagcaattacctatattagtgtttgtatgttattacttatatctgagccaatatatacgactaaaccaaaggcagccaaaaaagcaatgcttgaggtagagtgag

SEQ ID NO: 44824 - DNA, 2687 bp, Zea Mays
tcctgagctgtagcgtgctgctccgtcaggaccagcgagattactgccgcgtacctcccgctaccaccaccaccactgctctgtttgctgcgtagcagcggccggggctatatagcgcctcggaggaggagctaggtatagacctcgtggcactagcacagccgcccgctatataccgctagtgcactactagctgcttgccaggtcccagccagccagccagccctctcgtcccggattgcgctcgaagcaagcggccgcccgaggcgaggcgaggcgtgcgcgcgccgcgagacgatggacttcggcgacgacgtcatggacggcggctccgacgcccagcgccgcaagaagagataccaccgccacacaccgcgccagattcagcagctcgaggcgatgttcaaggagtgcccgcacccggacgagaaccagcggatgcagctgagcagggagctggggctggagccccggcagatcaagttctggttccagaaccgccggacgcagatgaaggcgcagcacgagcgccaggacaactgcttcctgcgcgcggagaacgacaagatccggtgcgagaacatcgccatgcgggaggcgctccggagcgtcatctgccccacctgcggcggcccgcccgtcgccgacgactacttcgacgagcagaagctgcgcatggagaacgcgcgactcaaagaagagcttgaccgggtgtccagcctgacgtccaagtacctggggcggcccatcacgcagctgccgccggcgcaggcggcgctgtccatgtcgtcgctggacctgtccgtcggcgggctcggcagcccgtcgctggacctcgacctcctcagcggcggctcctcggggtatcccccgttccacctcccgatgccggtgtcggagatggagcggcccatgatggccgagatggcgacgcgcgccatggacgagctcatcaggatggcgcaggccggcgagcacctgtgggtcaaggcgggcggccgcgaggtgctcaacgtcgacacgtacgacagcgtcttcgccaagcccggggccgcctcgttccgcggccccgacgtgcacgtcgaggggtcccgcgactcgggcctagtcttcatgagcgccgtcggcctcgtcgacatgttcatggactcgagcaagtggacggagtttttccctgccatcgtgtccaaggcgcgcacggtcgacgtcctcgtgaacggcatggccgggcggagcgagtctttggttctgatgtacgaggagctgcacgtgatgtcgccggtcgtcccgacgcgcgagttctgcttcctgcgctactgccggcagatcgagcgcgggctgtgggcgatcgcggacatctcggtggacctgcagcagcacgacgcgaggttcggcgcgccgccgtcgcgctcgtgccgcctcccgtcgggatgcctcatcgccgatatggccgacggctcctccaaggtgacatgggtggagcacatggagatcgaggacagggttcccatccacctgctctaccgcgacctcatcctcagcggcgccgcgttcggggcgcaccggtggctcgccgccctgcagagggcgtgcgagcggtgcgcgtgcctcgtcccggccggtatgccgcaccgcgacattgcagttgcaggagtgacgccggaagggaaacggagcatgatgaagctgtcgcagcggatggtgagcagcttctgcgcgagcctgagcgcgtcgcagctccaccggtggacgacgctgtcggggcccagcgacgtgggcgtccgcgtcacggtgcaccgcagcacggacccggggcagcccagcggcgtggtgctcagcgcggccacgtccatctggctgccggtcccgtgcgaccgggtgttcgccttcgtccgcgacgagcacacgcgctcccagtgggacgtgctgtcgcacgggaacccggtgcaggaggtgtcgcgcatccccaacggctcccacccagggaactgcatctccttgctcagaggcctgaacgcgagccagaacagcatgctgatcctgcaggagagctgcaccgacgggacggggtcgctggtggtgtacgcgccgatcgacatcccggcggccaacgtggtgatgagcggcgaggacccgtccgcgatcccgctcctgccgtcgggcttcaccatcctgccggacgggcggcccggcgcgccgtcgtcgtcgagcgccggcggcccgctggtgggctcccccgcggcggcggggtcgctggtgacggtggcgttccagatcctggatttgaagcttgcttgccggcgaggctttgcacgaaacgggggagtcaagaacgcaccatgctcgtctcattcctcttgctgccgtcacgctcatcagttgttaattccattcctctttgtgtctcccctcccctagtttctgccgccgatttgcagtctcgctcccattctgtagtttgcagcagaggatgatgcatggttcgggtattgacttctatctaatggtgtgaagccttcaatgatcattaattctctccttctttttagtaagggaaatgtcactgtcactgctttgattgttccttttcattctttcctctctctcactgtttaatccttcaatatgatcaatgggcgggttatttttattttctggctcagctcgtggaatctgtcatgattgag

SEQ ID NO: 44825 - DNA, 419 bp, Zea Mays
cgtgaagtcgccgcgctcgtcgtcgcccccgacgaacgtgcaccggaggaggattgtgccgctactcagcagcttcctgtcggcggcgccctgcgtcatcgatgtctcgatcggtactcactgtcatactactgcctgctgatcgatcctgatggcaggcaggacacgtacttataggtctggggagcttgggatcgtctggggagatgtgaaatgatgtgtagtagatggaattggcagtgccaagcatgaagagagtgagagagcgcctctggtcacgcacgaggtgacggtggacggtggcgccgcgcgagagaagaacctgtaacgcttgctagcttgcttcatgccatatataatctgtatgtgccgtggctcgctttcctctgataggcgacgagttcagccacgcgcggcac

SEQ ID NO: 44826 - DNA, 1304 bp, Zea Mays
gtgcgatcgacgcgctttgtttggcaagtgatgaagcagttcgcatcggaggtgcagaagctgtcggagaaggtgctggacctgctgtgcgagaacctgggcctggagcccgggtacctgaaggcggccttcgcggggtcggacggcggcccgacgttcggcaccaaggtgagcgcgtacccgccgtgcccgcgcccggacctggtggccggcctgcgcgcgcacaccgacgccggcggcctcatcctgctgctccaggacgaccaggtgagcgggctgcagctgctcaggggcggcgacggcggggagtgggtggacgtgccgccgctgcgccacgccatcgtcgccaacgtcggcgaccagctggaggtggtcaccaacgggcggtacaagagcgcggtgcaccgcgtgctcgcccgccccgacggcaaccgcatgtccgtcgcgtccttctacaacccgggcgccgacgccgtcatcttcccggcccccgcgctcgtcggcgaggaggagcgagccgagaagaaggccaccacgtacccgaggttcgtgttcgaggactacatgaacctgtacgcgcgccacaagttcgaggccaaggagccccggttcgaggccatgaagtcgtcggccatcgccaccgcgtgagcacataatactgccgtgttctcccttcgtggggtgcatatgcttgagcttgaagagccatgtgcctgtatgtagtggcacgtacggtggttatgcgtgtatcgtggaatggcgcggcgtgatgtattttggttgtctcagatctaagtgtgtgcgtatatattgtgtactgtaaagtttgcagcgtctgattaatgtacgagcagtgtgtgtacctaaccagaacctggaatgtggctggctgtgtgctgatattactaccacatcaggtgagtggccacccgtcgtcgcctcctacggctccggtgccgactcgaccccttccttccctgcgaccctgcggccccaccgcccttatctccatggatacttgcggcgagcaaaggcttaacaaaggagaacagtgtgcaaaacatacctgcagtgagcaaaggctttacatgaggatatcaggatatgcacagacctaccatacaagctatagcctttcctttacaacaaaacaccagctagaagatccgcatatgctaccgattgttcactctccatgttttgttcggcttacattgttacgctgagttagatggttaattgcacagtaacctgccgactgcactatcaccttgtcttggctttccttctcttctatacaaaag

SEQ ID NO: 44827 - DNA, 1235 bp, Zea Mays
atcaagacctaactccctcatctcatggctatgagatataaaatgtgccaatatcctagttgatgcaagcggactggtcaaattggcagattttggacttgcaaaggagatgtcaattttgagccaggcaaaatctagcaagggaactgtctactggatggcccctgaggttgctaaggctaagccacatggacctccagcggacatatggagtcttggctgcacagttttggagatgctgacaggcgaagtgccgtatcctgatatggaatgggtaagtgactgtgcctccttgatatcttctgtaacagtaacatttctataatgtatatatacaatgcaatttaaagtttaaactttgaatacaagaatcatgaatgtgaataaatttagacagaaagaagatctgtgtcatttcctgactgatagatttgctgtttatctatgtttgtgtgtgcaaatgtcatatagtatagtggacctaaaatagcagtagtcttggtcaagatgattccgttattttcacgagaaatatcatagatgcgcgcgcgcacacagacgcaggctttgctcaaaattggtaggggaataccaccagaaattcctaatacattatcagaagatgcgcgtgatttcataaagaagtgtgtccaagcaaatccaaatgaccggccatgtgctgctcagttattcgagcacccatttgtgcagcggccactgcaacaatatggcgtgtgatgttctccttggctgctaacacatttgattgtacataagctgatttaacttacatgcctaagctgttgatattatgagaatgatcccttggcccgagttccgagagtgaaccctcaatctgaaggcatccgttgctcaatgttccattttcatgctttgtagtttaggtttaggggtaggtcatcccttgctcactgtaccattttcatgatttgtagtttatggggtctaaaattgctttcaatctggtaagcacacccagacacttagaagcaacaatgtttgctttgatgtgggatgacttgtataagtggttcttttcgagcttgtccactttttacaccatgctctaacgactgtctcagcatgatatgcataatgataaacaagggaaatggtttaaaatgatgtttattggcgccttttgaaataccacatgtttaaaacgatgactattggcaccttttgaaataccatatgtcaacagagtggctctt

SEQ ID NO: 44828 - DNA, 1253 bp, Zea Mays
caaatttgctattatcaaatgcagtcaactggctatttgtgatggatttttctttgctgtcaaggaagtatcattagtggatcaaggactcaatggaaaacaacgcattctgcagcttgaacatgagatatctctcttgagtcgtttggagcatgaaaatatagttcaatattttggaacacataaggtgggaaactatatatttttcttgaacttgttagtcaaggatctttggcagctttatatcaaaaatatcatttgcaagattcacaagtctcagcatatacacgacagattctgaacggtttgcactatctacatcgccggaatgttctgcacagagatataaaatgtgccaatatcctagttgatgcaagcggactggtcaaattggcagattttggacttgcaaaggagatgtcaattttgagccaggcaaaatctagcaagggaactgtctactggatggcccctgaggttgctaaggctaagccacatggacctccagcggacatatggagtcttggctgcacagttttggagatgctgacaggcgaagtgccgtatcctgatatggaatgggctttgctcaaaattggtaggggaataccaccagaaattcctaatacattatcagaagatgcgcgtgatttcataaagaagtgtgtccaagcaaatccaaatgaccggccatgtgctgctcagttattcgagcacccatttgtgcagcggccactgcaacaatatggcgtgtgatgttctccttggctgctaacacatttgattgtacataagctgatttaacttacatgcctaagctgttgatattatgagaatgatcccttggcccgagttccgagagtgaaccctcaatctgaaggcatccgttgctcaatgttccattttcatgctttgtagtttaggtttaggggtaggtcatcccttgctcactgtaccattttcatgatttgtagtttatggggtctaaaattgctttcaatctggtaagcacacccagacacttagaagcaacaatgtttgctttgatgtgggatgacttgtataagtggttcttttcgagcttgtccactttttacaccatgctctaacgactgtctcagcatgatatgcataatgataaacaagggaaatggtttaaaatgatgtttattggcgccttttgaaataccacatgtttaaaacgatgactattggcaccttttgaaataccatatgtcaacagagtggctctt

SEQ ID NO: 44829 - DNA, 1259 bp, Zea Mays
cacaaatttgctattatcaaatgcagtcaactggctatttgtgatggatttttctttgctgtcaaggaagtatcattagtggatcaaggactcaatggaaaacaacgcattctgcagcttgaacatgagatatctctcttgagtcgtttggagcatgaaaatatagttcaatattttggaacacataaggaaggtgggaaactatatatttttcttgaacttgttagtcaaggatctttggcagctttatatcaaaaatatcatttgcaagattcacaagtctcagcatatacacgacagattctgaacggtttgcactatctacatcgccggaatgttctgcacagagatataaaatgtgccaatatcctagttgatgcaagcggactggtcaaattggcagattttggacttgcaaaggagatgtcaattttgagccaggcaaaatctagcaagggaactgtctactggatggcccctgaggttgctaaggctaagccacatggacctccagcggacatatggagtcttggctgcacagttttggagatgctgacaggcgaagtgccgtatcctgatatggaatgggctttgctcaaaattggtaggggaataccaccagaaattcctaatacattatcagaagatgcgcgtgatttcataaagaagtgtgtccaagcaaatccaaatgaccggccatgtgctgctcagttattcgagcacccatttgtgcagcggccactgcaacaatatggcgtgtgatgttctccttggctgctaacacatttgattgtacataagctgatttaacttacatgcctaagctgttgatattatgagaatgatcccttggcccgagttccgagagtgaaccctcaatctgaaggcatccgttgctcaatgttccattttcatgctttgtagtttaggtttaggggtaggtcatcccttgctcactgtaccattttcatgatttgtagtttatggggtctaaaattgctttcaatctggtaagcacacccagacacttagaagcaacaatgtttgctttgatgtgggatgacttgtataagtggttcttttcgagcttgtccactttttacaccatgctctaacgactgtctcagcatgatatgcataatgataaacaagggaaatggtttaaaatgatgtttattggcgccttttgaaataccacatgtttaaaacgatgactattggcaccttttgaaataccatatgtcaacagagtggctctt

SEQ ID NO: 44830 - DNA, 1263 bp, Zea Mays
cagggttcacaaatttgctattatcaaatgcagtcaactggctatttgtgatggatttttctttgctgtcaaggaagtatcattagtggatcaaggactcaatggaaaacaacgcattctgcagcttgaacatgagatatctctcttgagtcgtttggagcatgaaaatatagttcaatattttggaacacataaggaaggtgggaaactatatatttttcttgaacttgttagtcaaggatctttggcagctttatatcaaaaatatcatttgcaagattcacaagtctcagcatatacacgacagattctgaacggtttgcactatctacatcgccggaatgttctgcacagagatataaaatgtgccaatatcctagttgatgcaagcggactggtcaaattggcagattttggacttgcaaaggagatgtcaattttgagccaggcaaaatctagcaagggaactgtctactggatggcccctgaggctaagccacatggacctccagcggacatatggagtcttggctgcacagttttggagatgctgacaggcgaagtgccgtatcctgatatggaatggacgcaggctttgctcaaaattggtaggggaataccaccagaaattcctaatacattatcagaagatgcgcgtgatttcataaagaagtgtgtccaagcaaatccaaatgaccggccatgtgctgctcagttattcgagcacccatttgtgcagcggccactgcaacaatatggcgtgtgatgttctccttggctgctaacacatttgattgtacataagctgatttaacttacatgcctaagctgttgatattatgagaatgatcccttggcccgagttccgagagtgaaccctcaatctgaaggcatccgttgctcaatgttccattttcatgctttgtagtttaggtttaggggtaggtcatcccttgctcactgtaccattttcatgatttgtagtttatggggtctaaaattgctttcaatctggtaagcacacccagacacttagaagcaacaatgtttgctttgatgtgggatgacttgtataagtggttcttttcgagcttgtccactttttacaccatgctctaacgactgtctcagcatgatatgcataatgataaacaagggaaatggtttaaaatgatgtttattggcgccttttgaaataccacatgtttaaaacgatgactattggcaccttttgaaataccatatgtcaacagagtggctctt

SEQ ID NO: 44831 - DNA, 1360 bp, Zea Mays
ccagggttcacaaatttgctattatcaaatgcagtcaactggctatttgtgatggatttttctttgctgtcaaggaagtatcattagtggatcaaggactcaatggaaaacaacgcattctgcagcttgaacatgagatatctctcttgagtcgtttggagcatgaaaatatagttcaatattttggaacacataaggaaggtgggaaactatatatttttcttgaacttgttagtcaaggatctttggcagctttatatcaaaaatatcatttgcaagattcacaagtctcagcatatacacgacagattctgaacggtttgcactatctacatcgccggaatgttctgcacagagatataaaatgtgccaatatcctagttgatgcaagcggactggtcaaattggcagattttggacttgcaaaggagatgtcaattttgagccaggcaaaatctagcaagggaactgtctactggatggcccctgaggttgctaaggctaagccacatggacctccagcggacatatggagtcttggctgcacagttttggagatgctgacaggcgaagtgccgtatcctgatatggaatggtatagtggacctaaaatagcagtagtcttggtcaagatgattccgttattttcacgagaaatatcatagatgcgcgcgcgcacacagacgcaggctttgctcaaaattggtaggggaataccaccagaaattcctaatacattatcagaagatgcgcgtgatttcataaagaagtgtgtccaagcaaatccaaatgaccggccatgtgctgctcagttattcgagcacccatttgtgcagcggccactgcaacaatatggcgtgtgatgttctccttggctgctaacacatttgattgtacataagctgatttaacttacatgcctaagctgttgatattatgagaatgatcccttggcccgagttccgagagtgaaccctcaatctgaaggcatccgttgctcaatgttccattttcatgctttgtagtttaggtttaggggtaggtcatcccttgctcactgtaccattttcatgatttgtagtttatggggtctaaaattgctttcaatctggtaagcacacccagacacttagaagcaacaatgtttgctttgatgtgggatgacttgtataagtggttcttttcgagcttgtccactttttacaccatgctctaacgactgtctcagcatgatatgcataatgataaacaagggaaatggtttaaaatgatgtttattggcgccttttgaaataccacatgtttaaaacgatgactattggcaccttttgaaataccatatgtcaacagagtggctctt

SEQ ID NO: 44832 - DNA, 2337 bp, Zea Mays
cgcgcgcgcacggcgcctccaggtcgcggctccgctccgctcttgcacacccagaaggcaaacgcaaaccatatcctccctcctcgtcaaaccccactcgcaaagcgcggacgcgttccgcctcgcgcctgtgcccctccctccttctgctctgctctgccctgctccccacgcaagggccaccgcgcgccggagcccatcccatcccatggaggcgccgcagcggcccaggccgcgccagcggccgcagctcgcgcgcatcaacgcgatgaagcactcctcgtaccccgccgaggacgaaggcgacgacgacctcgcgccggtcgacctcggctccgagttcgcgtcgcagaccagcttccgcatccgccgcgggggcgcggaggtcgccgacctcttccggaagctcggcctcaagggccccgaggacttcaccatccccccggccatctacgccgccggcatggcgcacatccccaacccttcccgcagccgccgccagtcgctgcaggcaccgctgctgccggctgcgggcgctgacgggatggcaccagcaccacagggacctccagatgtttctgcacgggacgctgcactcgcagcgaggctggatgcagccgtccaaggtgaagagcaagctgtgttggccgccaaagtagtccaaccggaaccggaggtcgctcaagtttctgcacgatcatacaaggggtctggaaccgaatcgagcaacagagcagtccaattggagacaggggaatcttctagacgagtgattgctgccgcggtgaaggaggggactgcacacggagtgaagggaaagggcgatgtggtcaaggtggatcagctacgagtggaaagaacaaaagcggtggttgtcgaggcgccaagagagactaccgctgccgtggttcaagctgtagcggagtccccttctcagagcaccgagtatttgatctcgccgtcgccaaataggcggtttaagagaactatcacgtcttggaccaagggacaccatctcggcagtggatcttttggttctgtgtacgaggcgatcagcgagaactccagggttcacaaatttgctattatcaaatgcagtcaactggctatttgtgatggatttttctttgctgtcaaggaagtatcattagtggatcaaggactcaatggaaaacaacgcattctgcagcttgaacatgagatatctctcttgagtcgtttggagcatgaaaatatagttcaatattttggaacacataaggaaggtgggaaactatatatttttcttgaacttgttagtcaaggatctttggcagctttatatcaaaaatatcatttgcaagattcacaagtctcagcatatacacgacagattctgaacggtttgcactatctacatcgccggaatgttctgcacagagatataaaatgtgccaatatcctagttgatgcaagcggactggtcaaattggcagattttggacttgcaaaggagatgtcaattttgagccaggcaaaatctagcaagggaactgtctactggatggcccctgaggttgctaaggctaagccacatggacctccagcggacatatggagtcttggctgcacagttttggagatgctgacaggcgaagtgccgtatcctgatatggaatggacgcaggctttgctcaaaattggtaggggaataccaccagaaattcctaatacattatcagaagatgcgcgtgatttcataaagaagtgtgtccaagcaaatccaaatgaccggccatgtgctgctcagttattcgagcacccatttgtgcagcggccactgcaacaatatggcgtgtgatgttctccttggctgctaacacatttgattgtacataagctgatttaacttacatgcctaagctgttgatattatgagaatgatcccttggcccgagttccgagagtgaaccctcaatctgaaggcatccgttgctcaatgttccattttcatgctttgtagtttaggtttaggggtaggtcatcccttgctcactgtaccattttcatgatttgtagtttatggggtctaaaattgctttcaatctggtaagcacacccagacacttagaagcaacaatgtttgctttgatgtgggatgacttgtataagtggttcttttcgagcttgtccactttttacaccatgctctaacgactgtctcagcatgatatgcataatgataaacaagggaaatggtttaaaatgatgtttattggcgccttttgaaataccacatgtttaaaacgatgactattggcaccttttgaaataccatatgtcaacagagtggctctt

SEQ ID NO: 44833 - DNA, 2277 bp, Zea Mays
cgcgcgcgcacggcgcctccaggtcgcggctccgctccgctcttgcacacccagaaggcaaacgcaaaccatatcctccctcctcgtcaaaccccactcgcaaagcgcggacgcgttccgcctcgcgcctgtgcccctccctccttctgctctgctctgccctgctccccacgcaagggccaccgcgcgccggagcccatcccatcccatggaggcgccgcagcggcccaggccgcgccagcggccgcagctcgcgcgcatcaacgcgatgaagcactcctcgtaccccgccgaggacgaaggcgacgacgacctcgcgccggtcgacctcggctccgagttcgcgtcgcagaccagcttccgcatccgccgcgggggcgcggaggtcgccgacctcttccggaagctcggcctcaagggccccgaggacttcaccatccccccggccatctacgccgccggcatggcgcacatccccaacccttcccgcagccgccgccagtcgctgcaggcaccgctgctgccggctgcgggcgctgacgggatggcaccagcaccacagggacctccagatgtttctgcacgggacgctgcactcgcagcgaggctggatgcagccgtccaaggtgaagagcaagctgtgttggccgccaaagtagtccaaccggaaccggaggtcgctcaagtttctgcacgatcatacaaggggtctggaaccgaatcgagcaacagagcagtccaattggagacaggggaatcttctagacgagtgattgctgccgcggtgaaggaggggactgcacacggagtgaagggaaagggcgatgtggtcaaggtggatcagctacgagtggaaagaacaaaagcggtggttgtcgaggcgccaagagagactaccgctgccgtggttcaagctgtagcggagtccccttctcagagcaccgagtatttgatctcgccgtcgccaaataggcggtttaagagaactatcacgtcttggaccaagggacaccatctcggcagtggatcttttggttctgtgtacgaggcgatcagcgatgatggatttttctttgctgtcaaggaagtatcattagtggatcaaggactcaatggaaaacaacgcattctgcagcttgaacatgagatatctctcttgagtcgtttggagcatgaaaatatagttcaatattttggaacacataaggaaggtgggaaactatatatttttcttgaacttgttagtcaaggatctttggcagctttatatcaaaaatatcatttgcaagattcacaagtctcagcatatacacgacagattctgaacggtttgcactatctacatcgccggaatgttctgcacagagatataaaatgtgccaatatcctagttgatgcaagcggactggtcaaattggcagattttggacttgcaaaggagatgtcaattttgagccaggcaaaatctagcaagggaactgtctactggatggcccctgaggttgctaaggctaagccacatggacctccagcggacatatggagtcttggctgcacagttttggagatgctgacaggcgaagtgccgtatcctgatatggaatgggctttgctcaaaattggtaggggaataccaccagaaattcctaatacattatcagaagatgcgcgtgatttcataaagaagtgtgtccaagcaaatccaaatgaccggccatgtgctgctcagttattcgagcacccatttgtgcagcggccactgcaacaatatggcgtgtgatgttctccttggctgctaacacatttgattgtacataagctgatttaacttacatgcctaagctgttgatattatgagaatgatcccttggcccgagttccgagagtgaaccctcaatctgaaggcatccgttgctcaatgttccattttcatgctttgtagtttaggtttaggggtaggtcatcccttgctcactgtaccattttcatgatttgtagtttatggggtctaaaattgctttcaatctggtaagcacacccagacacttagaagcaacaatgtttgctttgatgtgggatgacttgtataagtggttcttttcgagcttgtccactttttacaccatgctctaacgactgtctcagcatgatatgcataatgataaacaagggaaatggtttaaaatgatgtttattggcgccttttgaaataccacatgtttaaaacgatgactattggcaccttttgaaataccatatgtcaacagagtggctctt

SEQ ID NO: 44834 - DNA, 284 bp, Zea Mays
acttaatactcctttcttaagcaatgtctataagcttgggcagcggacgtcagctgttctaaagtctacatcacaattaaattggttttacaaagcacaaggaatgatgatacacatatagtcacatggtatcacaccaaaccagaaagcctaaataagcaaaatggagcataagtactctacctcagtcaacaaactgaccgggctgaatctacatacaaatttctctattcgcgtgaactctctttctttttttttttttttttttgatcaaaaagcaaaag

SEQ ID NO: 44835 - DNA, 2637 bp, Zea Mays
gaatttgatgcaattgggacagataccttgggatgtgcagaacattggtattcctccatagcttgagtgccaagatccatacctcccagtgaaatggaattttcagcagagatgcgccctttagaaacatctgtaggccagatagcagtgatgacaggatctgcaaaagagacctttttgttctttatcttgggaatccagcgccctggctgccccatccccatccccctacgccggaaaggagtggatggcctgtatcttccactcgagctgtagcagtcctccacaccaccacggcatcgcgaggaacgcgcccacccagagaggctacgctgtcgacgagtgtcctgatgcctatgctggtgaaaatcttcatcatcatcatggtcccagtcccgacgcatggtctccctgcctctgaactccactgaacgctcccgcttttcaccagcagagtcagacacaccatagctccacacgaactctctgcgaggcttccgattcataggcccacccctagtgttcctcccatgaatgaggcagagatcctcaaccacttcaatatggttgcgaagcgtgtacacatggccttttttcagatctgtcggttcagcatggtgagcacccacaagaggcagaggggtgcttataggtggtaattcagagtcgggttcagacaccgttagccacacctccttagggatttcacaggggtcagagcaccatgcccaaaggtcaaaagaacgggtacgctctctacgcctagagcgctcctgaacataatgaatagtgcagctcctgcctaaggcccttgatgccacctcctcaccccagcagtgaacaggaatcccttccacccggaccttaactctaaactcccaactggtctttctagcatagctctcttctgaccagtcaccgaaatgaaactcacgcccacgataagaaactgatcttctatcaatagcccattgcttggttcttgcatcaggaaagataatgaaaaactgttctgggaaatgtttgacaagttgatactgaccatggcagagattgaacttctctctcagcatgtctcctgccacaatggtgtcaacctcatggctatttccatcgaatgagcacaccaccgccttgctgatgagatcatccctgcgacgacggattgaaccagtcgccgaaattgcacagaaggcgcgcgacggtcttgcccttgggtcacctgggtagcgagcctccatgttctggccctcctgagctgcacggaggtaggatttgttgtgttgaactggagaaaagttgagcacaggttcaggggcctgtttctgctccttaagaagagagttgagttgtcgctggtgctgttggcgcctggagttgacattgctggtgtactgcattgaatgctgcactggttcaggttggggaggagttgaattgtgcctgcttctgtagtaaattcctgggcatgccctagccctatggccaaaatgtaggcactgccagcatcgagtaggctccgagcaacgaaaagcgaagtgatctggcgagaggcagttgtagcatttaccctgaagctttgtcttgaaggtgctggtacctttcgtgtcatgttgctgctgagacggagatctcttaagattttcaacagtcttgcgccaccagaatttaggcctcaccacactccatccaccttcttccagtaccggggcgtcagccttgtgctgaccggaatgaagtcggccgtaacttctcaggtcatgtccgccgtccacagccagctgatgtgaagtagcattgctcgcattgaaattgaaatcaacttcattgcagtcaggcgccggcgagctgcccactgcccatttcctcttctctgagaccgggattcgggccggtgccaacagatctacaggatctccgattgaagatgtctctgaataaaactttcttgtagattttggcgctgaagctgacgcagcaagcagagacgtgccatcagcagttgcggcatgcttctgcagatccaaatctgacggaactttgtctctgcgggactgaaaaacatggggcaaagcatccttgatctgctcctgcaagcaaaaatccccctttgtagggcttaccgtgagggggaaactatgggagttcccctccccagcttccaaaccagatgttgaggcgattgtgaggacgggggtggctgcagcggcgatgccgccggaggatggggctggagctggagctggagctggagctggagcggtgggcagaactgcggggcgggatatctggcgagtggcggcagaggaagatcggcggcccaaggcgagcgagcggcggcggagcgccgcacgggagcgcgagcgcattctaaaccctaaggccctagctcagcaaatctgatgtaaatgaattgtcatggactctcggtgaaattttctccacgccattcttgcgaaatactcaacatgatgaggaaaaacaaaacataaacattatacttacaccattacacgttcagtatatataactagtaagcaggaaacatgacgatttagaatagccagcatcgacaaattacttacaaatagaaacattacctgtttcctcccacgcgacctcgcggccaactcccgg

SEQ ID NO: 44836 - DNA, 76 bp, Zea Mays
gttccatttcctcggcctgttattaccggcagcagcgtgtcagattggtaacaccgtgtcaacggctcactcaacg

SEQ ID NO: 44837 - DNA, 612 bp, Zea Mays
tgcacggcacggacttccggtagacgtcggccaggtgcgagtcgctgccgacgcggccgcccacgaagatgtccgcggcctcgacgatcttgccgtcgctgtccttggtgaggcagcccatgaagccgatgtccgccacctgcacctggccgcagctgttggggcatccggtccagtgcatgcggaccggccgcggcacggccacgcgcttctccacctcccgcgccacctgcagcgcccgcgccttggtctcgatgatggcctgcccgcagaactggttgcccgtgcacgccaccagccccctgagcagcatcgacggccgcggcgagagccgctgctcctgcagcagcggctccgccagcagcgcgtcgagcctctcgttgctgacgttggggagcacgatgttctgctccaccgtgagccggagctcgccggtgccgtactcgtcggcgagccgcgccagctcgaacatgtccgcggcctgcagccggcccaccggcacgtggaggcccacgtacgacaggccttcctgcttctgcgggtgcacgccgaggtagtcccgccgctcccagcgcttgtcgacgaggtcctccggcgcggcgcgctccagca

SEQ ID NO: 44838 - DNA, 734 bp, Zea Mays
ggggcaatgacgcagctcatgaggttataccgaggcgcgtcaattgctggttgaaaactatttccaaaccccctctgcggcccgcaagggccacagagaatttctggaagggctccctctaaccaggatttgaagaactgcgggtacacctgccatgccgctaccccgttttcaccgggccttggattactacgtacttgcctgtcatctgcatatcaagaatatcatattctccagggaacatatttattgatttcctagggtattctatagaaatataaaatgtgactagactctccatgctggtagaggctgttagtaaataatgtattgacatagtatggtgcagagtaatacctgttagttggatcaagttctgaggattcgcttgttctgaaactagaaaatatttgcctttctatcatcagagtctaaattaataatgaggtaattttttcgcatctgggcttagtgtacttgttaatccaacgggagttaaatatggtgtctacaggtcgcataatacatatttatgatattacataagtattatcatatttttattaattatattttaaaaagtatatctatttcattgtgtgtgttctatatgtgcattttttttaacaaatttgaagtatgcgttttataataaaatctaaattatatttttttggagaccgaaacatatctgagaaactgcagagaatttgtttgtataggctggacgtgag

SEQ ID NO: 44839 - DNA, 801 bp, Zea Mays
ctcccagtttccgtttttttaatgctttgtttactcgcggggatcatggggtaatcgcgtgggccgtgcctggctgggtttatttatgccgacctgccaattggagcaaatcccctttcctgcccctccccctccgcctttcctctctctcgctctcctcctctcctctcctctccttccgcatcacacaccacgactcccaaccgccggttggctttgctgctccgagctcttccacacccgccctctctcttgtgggtcggcggccgagtgtctgcgtcgtccacggagatcagggatcggcggcggggtatggcgagggagcgtcgggagataaagaggatagagagcgcggcggcgcggcaggtcacgttctccaagcgccgccgcggcctcttcaagaaggctgaggagctctccgtgctgtgcgatgccgacgtcgcgctcatcgtcttctcctccacgggaaagctctcccagttcgccagctccagtatgaatgagatcattgacaagtacagcacacattctaaaaacctggggaaagcagaacagccttcacttgacttgaacttagaacatagcaaatatgcaaatttgaatgagcaacttgtggaagcaagccttcgactcaggcagatgagaggtgaagaacttgagggattgagtgttgaagaactccagcaattggagaagaatctggaatctggtctgcatagggtccttcaaacaaaggatcaacaattcttggaacagatcagcgacctcgaacaaaagtaatggtgggagcgagtagcggcc

SEQ ID NO: 44840 - DNA, 1522 bp, Zea Mays
caaaaacccaacccaaaactgaatgagacgaacgaccaaacatgaaatccggcccctttgctagaatccaccatccaccccacgaaatcgttccgaaaccgttcggtccagcggtccagaccaaacataaacttccggcgcagcgcacagccgctcgccgccgtcctccatcccaattcccacacggaagcggaacctcccaattccgcaccaccatcccaccggcggccaccgccgatggagatctaacagcagagccactcctatctcaacccaactgcgcagatccaccaccatggagaccgagcggatccgggagctcatcctcctcactctccgggcgccgcccgcccgcctcgccctcgtgggtggcaaccacaccgccgctcgcttctgcacccgctaagctcgcctcctcaccatcttccgcgccggccttctcttcaccgccgactcaaacggcaaaagacagcgctctcgctcagctcagcccggcgtccgcgatgccggctgacatcgtcgtgatccgtctccccggcccgcgcgccctccgcgtgctcgcgcgctccgtgctctttgccgtcgcgctgctcttcctgccatggctccgccccgccgaggcgcccgcccgaggccgcgccgtcgacacgtgcggcgcagccgcggcccaggcggagctcctgctgcgcgaccttcaccaggagggcctgcccgtccacggagcccgcgccgtcgtcctcgtcgccaatggcgtctgcgattcgaccgcaccgaagcaggacctgcggcggatgctgatgataggggagtcgtcagtggactttctgctggatttcgggtacttcaacgaagacgctgacagcttgccgcagaactaccgcaccatatacatccaccgcttcgctgaagcttttattggggtcaagaaggttgcccccgccgaggacaacagccatgccggcaccagcaccagaacggagctgctatcacctcctgcctttgaccttaaggaaggggtgttttacagtcggccagatgagactaccaattgtgaattcaagaacatggcgaggaagctcttactttcagacatcactgggactccaacggcatactcctacaaacgcaaattgttggtgcagatgctccgtaaggatcaggagagttgattctgcttcttttatggaatgtgaaaaggctgcagcctgcagcggcgcttttatggagtgaagctgttctagcttcccgggagagcagcaacatcacatcagttataaaccgactgcatacacaatgaatacatggtaatggactggagtcagggaatattcttatcagttgcagtctagtaggctgtgatttgtacctcttgatctggtttgttcttgctgggttttcttctcttttcagttgttgttgtttgcgtgacttgtagcttggtgataagtttctcatatgatgtatcatctgtgttgatctatgacgttcacagttgtcttcttgacaccatccattagaggaa

SEQ ID NO: 44841 - DNA, 1320 bp, Zea Mays
ccggtaagcgcgtcttgccccttgggcaacttatattatatattttttattccttaaaacaaaaggccattgcagatgttgaaaaggcagttattgagtctatggaaaaacaatatgcggatgttttggctccaccaaaggattgtgttgcaccaaagaaattcggcctcaaagttgtccaaaaactcacaaagcgcaattcaacggtgccctataccgtacctgaagatcttggcattctcttgaatacattgaaaagactacttgatgttttgcgacctcggattgagagtcacttgaagtcatggagttcttgtatacctaacggaggaaattctgcggccattggagaaaaacttagtgaagttacagtgacattgagagctaaattccgaaattacatgcaagcggttgttgagaagctttctgagaatacccgtatgcaaaataccacaaagctcaaaaagatcattcaggattcaaaagagttggtgcttgaatctgatatccgcaccaggatgcaggcgttgaaggatcagctaattcaggcgataaatcatgtgcacaaagtctctgaagtacatgtttttgtagccatatgccgaggtttttgggaccggatgggacaggatgtgctgagtttcctggagaatcgcaaagaaaataaagcctggtataaaggtattggatgatactttcgcatcccagctgcaacagctgctaggcaatacaatcccgccgaaggacctggagccacccagatccgtcgtggaagttcgctctattctctgcaaagatgcaccccgccagaagaattctagtttctactattgatgatcaaggtcactgtacataatagtcatgcacatcagcgcatgcagctttatcttggagagaaaaaggtcaaggtgtccgggtctttataaagaaaaggaccaacgaggtctggattctggaggaggctcagtgatctctgagaaactagccttgtgttacaccagaaaaaatatttttgctggttaacctgcctatgttcccattgcctgtgggatggggtctacatatggaaactggattgcgcggtgtgatccaattaacattgtaggttagcttcattgatagcacctagctgtggttaagcagttgctctatttttgaacatgttaactgttcttaggattttttttgaaaggtatggagagccaaaaaaaaaactttgatggttaccgatgcctctgtattgtgtagcaatattgaaaaataagcatacaagtctttaactttcaatataaacagtattatccacaatttcaagtatta

SEQ ID NO: 44842 - DNA, 1997 bp, Zea Mays
ctattttaaaactttattatacaaacagtgcaatctataatacaaaacagtactttgcacggctatttacacgacgtcatggcattatattacctaggatgtacaaagatgacaccatgcagtaccattctaaaacttaatttttaactacagttggtgaacctaatacagcctggtgaagcattagcaaataacaatttaaaagttacaacaatttttagaatttgatgctcctgttaaaaacaaggcatcacattatttctatgttggctccaggaattgttgcaaataaaaggctataacaataaagggctataaaacgaggccaggacgaaacaaaaaagtcatcccggacaatacctaataaatttctcaatgctcgacagcagcctaagtgcgataaacaacacacaaaaaaaggagccactaggccttatgtgtggtgtgtcttgtgagaaattaccaggtgcatttctcaggaaaggacataaaagaaaggtgcatctcagtgggggaatcaggtgcccgggaaaggtaggtgggagacgaagtttctcgcgcgcaggcgatgagaagaacagtggcttcaaagtggagggcaaaaaaaaaaaaagaattaactatggatgctacaaccaacaagcaccgacgaaagaaaaaaaaggataaaagaagtggagaggcgttcctctttcactttggaggaaaccacaaaaatgcaaaatcacacaggacatgacgggccccggaacaggagagaagcaaaagcgaaagcaccacctgccgtccaagcaccaaaggcatgcacgaagaatcggctcggcccccaaaaagcacagggcccaggcgcccaccgcgcagcctgccaggcgggggagccgttggatgtcgcacaaactgcccagtcctccgcagtggagtacagcgccagcgagccaccagcaccctcatcctccgtttcgcggctcacagagatacctcaaaacccaaccaggccggcgtccaggtgtccacagaaagaggagagcagagagagcgggagatcatggagctctgcgtctctaccactgcctccgtccgcgccaccgccgcgcccatatccttcgccccgccccggcgaggcgcgtctgcttccaccgccctcccgctccaccgccgaatcccaactcgaggctggtgttgcgccagcgcggccgtgcctgacccggcgccctccgaagagctcgcatccgcctcctacaccgtcgtcgtcgcggacaagcccgattcgcctgccgatgacaaggtcgacgaggttagcgccgcgcctagtggctccgcggaggcgcccgtagcagaaccggtgtcatcagaggcgtccccgtccccgtccacggatgacggcggtctggatgagatactaagcaagttgaacattgaagtgactccgattttaatcctcactggatctggtgcctttgttgctttatggatcctatcttctgttgtttctgcagttgattcagtccccctgctcccaaaattgctggaattagtaggaactggttactcaatttggttcaccgcacggcatctccttttcaaggaaagcagagatggcatgtttgcaaagttcaaggatatcaaagagaggatcatttgatctaccatcgatatctggtcacgtgtttaggctttacagcctgcttattattaggttttctcccctttcaaatattactgaaggggtaaagaaggtcgtatatctaatttttcttctcacggggtctgtcattaggcttctcaagtttggctagtgtgcttcttcaggtcactctcgatgttttttactcaatcctatgtgtatgctgccgaataaagctttaaaaagatgaatgcaattagtatgttctcgctcctatgcaagttttgaaatccagtgtccagtaaacatttcagataccatatgttaagctcgagccttctgtgagaccgacggagctgcagctcaacttagc

SEQ ID NO: 44843 - DNA, 3059 bp, Zea Mays
caggcgtcttcgtctctcccccctgcgtagcgtgcgtaatggcatatcgtcctgttccttcctcgggcgtcgccggccgccgtttgcgcccggtctgatcaccgttcgtttctctcctccagcgaggagaggatagtccaaaccgaaagcagccaaacggtgaggagggagagaccgcgagagcgagagaatataaaaaggagtgggctttctttcgatcgctgcgctgcgtcccaggcagtcctccgagcagtgctagtccaccttgctagctcgcccgctcgtcgcgctccctcgatcagatctaatcattatttaatcctttttttttccagtctcacatgagcactccccactcgtcctccacctcctccgtcccaccacaccgcgcctcccctccccagatcccccaatccctaaccctagcacccacggcgtcctccgcctcgccctcctcctcctccgcgtccggtatgcgggacgcggcggaggacgactccgactcgccgccgtcgcagatgtcggaggacgaccccggcggagggggcggggaccggtgggagccggatctgcggggcggcaacggcggcggcggcggcggcgggaggtgggctccgccggaccaggtgctggagaacgtgctcgagaccgtgctcgagttcctcaccgccgcgcgggaccgcaacgccgcctcgctcgtctgccgctcctggtaccgcgccgaggcgcagacgcgccgcgagctcttcatcggcaactgctacgccgtctcgccgcgccgcgccgtcgagcgcttcggcggcctgcgcgccgtcgtgctcaagggcaagccccgcttcgcggacttcagcctcgtgccctacggctggggcgcctacgtctccccctgggtggccgcgctcggccccgcctacccgcggctccagcgcatctgcctcaagcggatggccgtatccgacgacgacctcgcgctcgtcgccagctccttccccttcctcagggacctctcgctcgtgtgctgcgatggcttcagcacgctcggtctcgccgtcatcgccgagcgctgccggcatcttcgtgtgctggatctgatcgaagattacgtagaggacgacgatgaggagctggtggattggatctccaagttcccagagtccaacacctctctggagtcgcttgtcttcgattgtgtcagctgcccgttcaactttgaggccctggaggcacttgttgcacgctcaccggctttgcgacggctgcgtgtgaaccaccatgtttcagtagagcagctgcgtcgtctcatggtctctggtttgtctatcaggtttccgggaggttgacccagaatacctcccggcgatctaccctgtctgtgccaacctcacgtcactaaacttcagctttgcaagcctaaccgctgcggaactgaagccagctattcgcaactgcacgaatcttcgcactttctgggtccttgatactgtgggtgatgaaggccttcgtgctgtggctgatgcatgctctgatctccgtgagctgagagtttttcctttggatgcctctgaagattccgagggttcggtctcagacgttggtcttcaggcaatctcagaaggctgccggaagctggaatcaatcctctacttttgccagaggatgacaaatgcagcagtaattgatatgtcgaagaactgtcctgagctcgtagtgttccgcctctgcattatgggccgccaccgacccgatcgggacactggggagcccatggacgaaggtttcggtgcaatcgtgatgaactgcaagaaactcaccaggctttcggtctccggcctgctcaccgataaggcctttgcgtacatcggaaaacacgggaagctaataaagaccctctccgtcgccttcgctgggaacagtgacatggccctccagtatgtattcgaggggtgcaccaagctgcagaagcttgaggtcagagatagccctttcagtgacaggggtttgctctcaggactggactacttgtacaacatgaggttcttgtggatgaactcgtgcaggctgacgatgaggggctgtagaggtgtagctcagcagatgcagaatctggtggtcgaagtaatcaaggaccactccgaagatgaaggggaggctgagaccgttgacaagctgtacttgtatcggtcactggcagggccaaggaatgatgctccgccgttcgtcaccctcttgtagtgctgctgccgccaccggaagaacacagccctgctgtacccacgaacatgtttgttgtattgttaacttaccaagttttcagagcaagcgaggggagcgtcctgcggatgattttcaaggtgctgcaggcgaggggagcgtcccatcgtaaaatcaatcaagtcagaacctgccgattattcttttccacacttgatctggcgtgggcggcatccagagttggggcagttgaggagcacatccagatccagagcgagagacatctgatggcctcctcattcatggcgccagcgcttacagtaatagcagtgatggatgggtagtgtctgattgcacaggaactgactgcacactgatggctccagtcagcaggcttgggggacggttctgtggcgctctcaagtctccagctacttgtgctttgtgccatctcccgttccatttttcagatcagaccaatgaattgggatcctggagggggtcgtcatggcagcccaacaccagccggcaccaactgggctgatatgctgagaaaggatcctgttgagctgagagcgccaccttcttccatccgcgtgctagccactcgcgtcgcgcgccggaaccaaaccctagtagctagccagccgtcccgaatagttaaacacggatgcggttgtctctttgtcatggacgaacgcattcttttataccactagtcctctgctgtggctgtggctgagaggctggcaagcatgtggtctgtttcctgggggtcactgactcactgagccccgcatttgttatctccaggatccagttcgatctgcccggtttatagtttcttt

SEQ ID NO: 44844 - DNA, 3594 bp, Zea Mays
gaacaagcccatgcaccaggcgtcttcgtctctcccccctgcgtagcgtgcgtaatggcatatcgtcctgttccttcctcgggcgtcgccggccgccgtttgcgcccggtctgatcaccgttcgtttctctcctccagcgaggagaggatagtccaaaccgaaagcagccaaacggtgaggagggagagaccgcgagagcgagagaatataaaaaggagtgggctttctttcgatcgctgcgctgcgtcccaggcagtcctccgagcagtgctagtccaccttgctagctcgcccgctcgtcgcgctccctcgatcagatctaatcattatttaatcctttttttttccagtctcacatgagcactccccactcgtcctccacctcctccgtcccaccacaccgcgcctcccctccccagatcccccaatccctaaccctagcacccacggcgtcctccgcctcgccctcctcctcctccgcgtccggtatgcgggacgcggcggaggacgactccgactcgccgccgtcgcagatgtcggaggacgaccccggcggagggggcggggaccggtgggagccggatctgcggggcggcaacggcggcggcggcggcggcgggaggtgggctccgccggaccaggtgctggagaacgtgctcgagaccgtgctcgagttcctcaccgccgcgcgggaccgcaacgccgcctcgctcgtctgccgctcctggtaccgcgccgaggcgcagacgcgccgcgagctcttcatcggcaactgctacgccgtctcgccgcgccgcgccgtcgagcgcttcggcggcctgcgcgccgtcgtgctcaagggcaagccccgcttcgcggacttcagcctcgtgccctacggctggggcgcctacgtctccccctgggtggccgcgctcggccccgcctacccgcggctccagcgcatctgcctcaagcggatggccgtatccgacgacgacctcgcgctcgtcgccagctccttccccttcctcagggacctctcgctcgtgtgctgcgatggcttcagcacgctcggtctcgccgtcatcgccgagcgctgccggcatcttcgtgtgctggatctgatcgaagattacgtagaggacgacgatgaggagctggtggattggatctccaagttcccagagtccaacacctctctggagtcgcttgtcttcgattgtgtcagctgcccgttcaactttgaggccctggaggcacttgttgcacgctcaccggctttgcgacggctgcgtgtgaaccaccatgtttcagtagagcagctgcgtcgtctcatggtctctggtttgtctatcaggtttccgggaggttgacccagaatacctcccggcgatctaccctgtctgtgccaacctcacgtcactaaacttcagctttgcaagcctaaccgctgcggaactgaagccagctattcgcaactgcacgaatcttcgcactttctgggtccttgatactgtgggtgatgaaggccttcgtgctgtggctgatgcatgctctgatctccgtgagctgagagtttttcctttggatgcctctgaagattccgagggttcggtctcagacgttggtcttcaggcaatctcagaaggctgccggaagctggaatcaatcctctacttttgccagaggatgacaaatgcagcagtaattgatatgtcgaagaactgtcctgagctcgtagtgttccgcctctgcattatgggccgccaccgacccgatcgggacactggggagcccatggacgaaggtttcggtgcaatcgtgatgaactgcaagaaactcaccaggctttcggtctccggcctgctcaccgataaggcctttgcgtacatcggaaaacacgggaagctaataaagaccctctccgtcgccttcgctgggaacagtgacatggccctccagtatgtattcgaggggtgcaccaagctgcagaagcttgaggtcagagatagccctttcagtgacaggggtttgctctcaggactggactacttgtacaacatgaggttcttgtggatgaactcgtgcaggctgacgatgaggggctgtagaggtgtagctcagcagatgcagaatctggtggtcgaagtaatcaaggaccactccgaagatgaaggggaggctgagaccgttgacaagctgtacttgtatcggtcactggcagggccaaggaatgatgctccgccgttcgtcaccctcttgtagtgctgctgccgccaccggaagaacacagccctgctgtacccacgaacatgtttgttgtattgttaacttaccaagttttcagagcaagcgaggggagcgtcctgcggatgattttcaaggtgctgcaggcgaggggagcgtcccatcgtaaaatcaatcaagtcagaacctgccgattattcttttccacacttgatctggcgtgggcggcatccagagttggggcagttgaggagcacatccagatccagagcgagagacatctgatggcctcctcattcatggcgccagcgcttacagtaatagcagtgatggatgggtagtgtctgattgcacaggaactgactgcacactgatggctccagtcagcaggcttgggggacggttctgtggcgctctcaagtctccagctacttgtgctttgtgccatctcccgttccatttttcagatcagaccaatgaattgggtggggcattgctgcctacgtccaaagcttcagtgctccaccaccggccattacttgtgttttagattactccaaaactcgaccactccgctatttttttccctcccttttcccccattgtttttttagcattcctgagctatatttttttttgtagacctgtagaccatcatgctatttttgaatgaagaatctattggaggaaatttgatcggctttgccccctcaccatcaccacagctctggccgccgcttgtcaacactactgttccatcgcttgccatcatcgtactcctagtcctactagatattacgaactcgactgcgacagctctatcgctgtcataaacggccgtagcctgctcgttgaaagtgtcatcatagcgataggccctaccaatgatttgctctggtagtggtcgtccttgttccatgtagtagagcctcacgagtcatgacatcaaactgtccctgatggccgtctgcttttttatatatataattctgctgcttttgcaggatcctggagggggtcgtcatggcagcccaacaccagccggcaccaactgggctgatatgctgagaaaggatcctgttgagctgagagcgccaccttcttccatccgcgtgctagccactcgcgtcgcgcgccggaaccaaaccctagtagctagccagccgtcccgaatagttaaacacggatgcggttgtctctttgtcatggacgaacgcattcttttataccactagtcctctgctgtggctgtggctgagaggctggcaagcatgtggtctgtttcctgggggtcactgactcactgagccccgcatttgttatctccaggatccagttcgatctgcccggtttatagtttcttt

SEQ ID NO: 44845 - DNA, 3580 bp, Zea Mays
ggaccggcgcgctcggcatctcctcgaagcggatctggacaatctcgtcagcgaccttgtggaagtctgccttcaccttgaggtggtaggtggccttgtagccgggggcctggtcgggcggaagctacgggtgcacctggtactcgtcgacgatccgcgcggcggcgtcctcgagcagggcgcacctgacctggctggtgacctccatgccctggcgctcggcggcgtcgaccatgcgcttgacgtcgtcgcgcttgctcttgaactcgttcatctcgttgcgcagcgcgtcgatgtagtcagtggtggagggaaacggctctccctcgaagacaggttcctcgtcaaagataggacctccatcgaaacctgggttgggcatttgatcaaacactttgagcgtggagtacgcgacaaaaacatcggcgacagcgcggtcgctgagcacgactaggtgtcgcaaccccggcatgtcctcgacgcgctcgaactctcctgcggagggcggcgtgcgcagagatcgggtgtccacagacgactgctcgatgtcgaactcggaggtggtgaggatgtcgagctcctcgccgaagaaggggtcagcgccgtcggagaagagggcctcgtggatgggcgtgaggtgatgcggtgccgattcgtcgttgaaggtcaactcgtcgaaccgcagttcccgatccaccatggaggcggagacagggccatccgcgtcggcctgctcgccatcacggccagccagagcagctgtcaagcgctgctccatcagtaccattgcatcaagcagcttgaggacgatagcatcttgatgatccatcgcggacaatcgggggcacctcgggagaacgaattcaggacgacctaatctgataccaaatgttagcgtcggtagtgggaagcttctagaagagagcaggatgaggattggggaagaagacttggaaacgaggaaagcagggaggaagacgaggctgagaaccagcgtctttgtctgttcattaattcttcgataccttcttacaatactagagagagcttataaactaccgaccagtccgaccaaatacacgacccattcgggcccaaatactcatgtgttgcctcgcctctaccgcttcgttggtgtgacaccgtcagtattgttggtcagcttttccatcttcagtgctccatcttcagtgctggtgagcttctgacgtctttcttgtattgttgctaacagtgcttctccgacggcacgtcggccgtgaacttggcgccctcgggcaggcaggccctccatgacgggcgggagtctggctacgttcctctgcatggagaggaaggtgacggcgcggccacctcgccgccaggcgcttggcaaactccatgagggcttgttcggttaggggtggattgaggggattggaggggattaaatccccttctatacaaatttaaataggaggggatttaatcccctccaatccccctcaaaccccttcaaaccgaacatgccctgaacgggatcacgcggccgaacgccaaccactgaaacagctccgcattcagcttgccggcggcggctgctcccacttccattgacgtggtcctgttcggctgttcctgttgctgcccaccagcaatttcgttacagagttttgggtatgggtatacgctgagtcgttgacccacgatccacatgagtgaatgagtgatgtgtcacgtgtgcatgagactagaaactaacccagctttacacgttcacaaaattgcagctcacattgatctgtatccacatacacttcagatctctggctagtagactcagtgatctacaattgacaatttgataacatacatggtgcaatgttagaaagctcaacaaggaaaacaatatgaactgatatttttagtttatgggacacaataaaaaaatgaggaaaataataatggactagaaagaaaaaaaaatatgaaatggtaccggaagttatttcagctcacattgatctgtacaaaaattgtaatcatttttttatttttaatcagcagatggttgtaaagaaaaataatttcaagaaaggacatagtggagcctaatcttacatctgaccataaaatgatgtaaagtagcagcaccctcaaagacatttctgaatatatctgaacaaatgatgtcactaaggtagggaatgtgaatattttatggcagtacaaatttgggtgttattaggaactgatgcagaaaacaaatatacttgcactggtacctttcactggtaagaacttgcatttgtgatgaccaaaaatacttgcaaacacgggtatggtaatgcaaagaaaccaaaaaaatcattctgaataaggaatagcatatccttgcatgacacaaatagcatagtggaaatttaatcaaaagtatgccaaagaaataaaagatgagtatgcattctaattgttattaaattatggtacctttctcttcttcatagttctttggttctaggaatgatgtcatgtagtgtctgcaaaatatttgtaagaaaacgaatatttgtatcagttgcacacagcaccattagtatatcaactgtatttacaagaaaacaatgcaacttgtacatgaaagattggggccacgttagcatcagtactgctagaaaacattaactgaaaatcagaaataagttgcatgtttggttcatttccacatatttccatgcctctttgagaaaccatgcctaaggtgtagccaacaatttgtttacaaagccttagggaatatttagcaaagaaatgagtctataaaggtgaggagaagatgtgaacagatacatttgtgccaggaaagcaaacacttgtccaagggactcttgtacctaacatttgacatcgtagtgtttgtcaaccaacaaaacgggcctgtttataccaagtcaacagaaaagtgtactaaagttcgacaccagaaaaacaagaactgtaattgttcagcattggtaaacagtgacaaacaaaatcaagcgaatgcataatatgacaaacatagtagcagaatgagtaaatgaattactcaacaaaaatgtggggagaatcaatagactgccaacaataacattcacagcttaaagtgaacagtgaaataattgaagtgggcatgagaacataaatgaagcagaaaaagaaacaaacataactgcttgtggaaccagctacatattcagccattggtggaacaaatcaaagatttagagataccatttaataatctacaattgttactagcgtacctctgttacaaccatgtgcattttgggggagggggtcaaattcactatcagaggtggaacatccttgcggaaaattttgctcaggatataattcttggggaacagaacttgtgatataactttactttcatcccctacagtgcactaaattgcctttccatctaaggaccaatggctcccatctccctcctctcttttctcctccgctctttgaaccatatgcagccctgactgtaagtcaaaccaacacaggttgtgtactctcccatttcctctagctttggatactgtacatc

SEQ ID NO: 44846 - DNA, 2073 bp, Zea Mays
gtcaatattgttggtcagcttttccatcttcagtgctccatcttcagtgctggtgagcttctgacgtctttcttgtattgttgctaacattccccactccttgaaatacagcttgttcccaagctgttcttcgcatgacccctaggatcccaaataaaaactgagaaattgccttggctcactagcaacagaattgacctgacacaaacttgtgcccattgcataagaattgatgatgcttttgctctactgccatgaatggacactggttcagctcttgcttttgaagcactcatcccttctctgcttctttcacccgaaccaggtccttgtttcttcgtgctgctcatgttgatctcgtgtaccggttgcttcctgcttgtaggagaagagacgatcttgatttccttccatgttgtcgactcatttgccatatcctcaaaaggagtccgtgacacagaagcaaactgtaacagcaacgactgagtttgtggatgatgagatggctgggaagactgctgggcctccgagtccaacgaccataactccacaattgtgccactcggtattgtctgggactgaccatataagattatgcttgagcctttgtagagaatagccaaccatttctgagcccaatccatgtctaccgccatatcagaactgggaagtggtaaaaagagtagatcagacacaaactcgtattcctgaatctgccagtgggcctgcaaccactgatatcgacctgaaacaatggggccattggccacttgaactttcgtaggataagagatggaccgaaccccagagagcaatggaattaatttgtcattgacaaatgtgtgtgtactaccactgtccagtaagatattcagagacttctcctgtattctccctttaagtttcagggtctgatgacaagttgtccctgaccaggccgagtagtatacagacatgaatagctgcttcagtccagaattaatgagaaaagtgtgagaggatccagaatcaatgagtaccagaatatcttgatgctgaatttgatcttgtaaatgccatgtggtagctgtcgcagtgccagaccatgctgaagatgacaacaccaccaggggctgctctataggttcgggcacaacttcagacacgtcatctgttccctgactgaacatctcacggaaaagctcttccggattgtgagtaccagagcagatgagaatgaagtgagcagagtggaatatgtaataaaaaatagattgcagccacaaccagtccgccctcggttgcttgatgcatatgtgtgaccagaccaatctgatatccaaaaacttcttgccataataaatgaggctatcccagaaaaaagacaacaaacctttatcctgcacaacgctctgaacattagacctggtgaacataaatggacaatcaaccattctgtatttatcctgtaacacatcaaaccttactgacaagaaaccacgttgtgtttgttcagagacggcaccaacatcatatgacaagttatctgagcagaagtttagagccgtaccactgatcctatctccatctgaaatttcatacaatgcatcatgcaacctccatgtgaaagatggccatgtgatcatccaaccgtcatacacaattactgtgacccaatatatgtggttgtagtaaaataggagctgccctcgacatgcacggacacacaccaaagctctcgttgctgccaatccagtttgtgccaataaattgttaacactaattgttgaaatacgcaaccatataagtaactcatgcaaagtgatagaagctctagtgaaccattgaagtgaccatggtggtttccaaacaaaacgagcatccaaattcatacggtaattaacgcttgatgtgaaactcggccagggcattggacgtatcataccacagacgggaaaaatctacaatggaatgaggataaagcgaacagtgtgggatatgaagatacccttcctctccactgtgttccatgccggcgcagcggaatccagcagcacatcgacgaggtggtcgtccagcaggttgacctcgtcg

SEQ ID NO: 44847 - DNA, 1432 bp, Zea Mays
cactcgttatggaaggtccaaatgacagcccttgccccaaaatactggttggaaacacagtggagatgaaagtaggggcagcttcttccagaaatgatgggagagctggccagttgaaatatgcaaacagcagggagactatcgccagcaaatacacttctattagggaacagaaccggcagtcagggaaggcagtgaaaaaggaaatttcatcaaactctgtatctttgcttgaagaaagaagttctgagcagtggtccaatactggtataccaccaactggtgtgtctgcaacatgggcctcgatgaagataggttttcaaaatttcaaagccaatttgggttcgaagaagtttcttcctttgcgccaggatccaggatttgttctaaatttgagtgtctcttcacctgaatctcttgatgacatattccaaaggttgaaacgacggcctgcaaatgtgcttgtggattaccttgatgacgatgacaacaacaacacacgagatatggatgtgcatttccaggatcaatgaaataggttgtgatattcttttaggttcagaatatgcatgcacagaaaaactaaaaggattggtatagcattagacgctcaaagaagatatagaggatgtatagatctgatgatggtttggtgtgattcctggaatctcaagacgcctgccatctgaaaaaacttcaaaatggaagtaagatatgatgacaagctgactgcctttgcagaaaggcttgagatttccccaccaagaaggtttgggacttctacttcactatatggggaaaatatcctatgcaatcacttatcctggtgcaaacatgcaatcaagcgatctgatgcatctgatctagatctaattatgactgttattttatatttaaccccttccacctaaaacatagtacctattttacttttaactccttccatgaaaccgttggatctagattggatgctctcgatagtttgattgcacgcttgtaccaaaatgagtgattgcacaggatatgtcctccactatatgcaggtaacattgttgacttgttgattatcttaccttttttgaatctgtattggagatgctgatctgtgatcgaagccaaaggatgtaaatgtgtacctaggattccatgtgaaggttaacgtgcctgagttgtaacctgtaaaaacgtactatcaaatatatacctaatcgggacaaaaaccccaagtgtttctgtgtagcagacgtcagacctgtatttgacggcaacttgtggacacttcttgtctactgcctgacataaaaaatgcacatttgtacttcattaactggttctttttttagggtgcacgtgttacagttggaataggcacgattaagggtacagcacgaattagtgaaaaccactgcgatcgggcatgaacataaataca

SEQ ID NO: 44848 - DNA, 6477 bp, Zea Mays
atcgtcaccttcctcttccttcttcggttcttcgccagccgtgcgcgcttctccactgccctggagacaaaggagcaccccgcgatctcccggcgggacccggccccacctccccgcccgcgtgcctctgaaacggagaagctgccggttcccagccggccaggctactccgactcttcctttccctccagccggcgaggcgtccaagcggattagcggagagcgtcggggcggcgacatgtgggtgttctacctgatatcgctgcctctgacgctgggcatggtcgtcgtcacgctccgctacttcgccggccctgccgtgccgcgctacgttgtcgccaccgtaggatacgcatggttctgctccctctccatcatcatcctcgtccccgccgacatctggcagacattaactgccagtgcgaaggggggcattggattcttttggagctggtcctattggagcacatttatcctaacatgggctgtagttcctactatccagggctatgaagacgcaggagatttcactgttaaagaaaggctgaaaactagcattcatatgaacctgcttttttattcaattgtgggagccattggccttattggtgtcatattactcttaatcatgcatagagcttgggatggtggtattgtgggatttgcaatggcatgctcaaatacctttggattggtgactggtgcttttcttcttggttttgggttaagcgaaattccaagaaacatttggaaaaatgcatactggtctcaccgccaaaaagtactttctcatagagttgccaaaatggctgtaaagcttgataatgcccatcaagaatattcaaatgcaattgttgttgctcaagctacatcaaatcaaatgtcaaaacgtgacattttgaggccttacatggatattattgataacatgctgtctcaaatgctgcgggaggatccatccttcaaaccttctggtggtagattcggtgaaaatgatatggactatgatacagatgataaatcgatggccacacttcgacgccaactcaggagggcccatgaggagtactataggggcaaaagtgagtatatgacttgtgtcatggaagccctcaaactagaagacaccataaaaaattatgaacgccgtgatgctagcggatggaaatatgtatcaagttttagagacagacgttcgggcacacttggaccaattttggatactattgagttcatttggcaatgtatactgagaaagcagcttcaaaaagcatttgctgttatccttggttgcatgtcagctgctatcttgttggctgaagctactttacttccaagtgttgatctatctctcttttctattcttataaaagttgtaggaaaacaagaggttttagttcaggtaaggaactgaacacttcatgtcgatttttttgtattttagcccattttttcaaaaaaaatcacgattagacccatggacgacttaatgtcgtttttggactctttgctcggcgccacatgccatggcgccgaggtaatattgctcgacgttataggttgtggcgctgaagtacgtgtcgcgctggcgactaagggctaacgtggccccgacgtggccccctagctcggcaccacagatcttggcgccgagctaggatttaggtgcgggcgccgtctcctttctccattctctcatttctcccttctttctccgagcccgcgccgctgccacccgagtcgtgccctgctgccgcctgctcttcgccgccggccatatggtagtaagctgcttttgccaaatctacagcctaggaaaatagctggtcctcaacttctgattcatcggccttttgcttgtaataagcggcctccgcttcatcggcggcctgagacataaacttgtcgtcctccttttctccatgtagtcctgcctcacctagcgcgatgagttcactcaaccttgatgtgttgtcctcctcttatccatgtaatcctggctcagctagcgcgcgatgagctcactcaaccttaatgtgtcctcccccatcagctccaccctcgccatttttcctgaatgtaccttgcacgagtctcgtctgcgatatagttcccggtgcatccaatctctgcaatatattaagacaaataagttagcaacaacaacaaaaattaaatgtgcaagagaaaacaacgcatgcttttctcactcgcactcagacgaccaacaagattccccaacatctatttctcgactctagccgcctccatttctttgcatcttgtgttctcttctcgtatgccgccttcaatctactccactcaacacgcatcgggctatcacaatcttgtgattcggcttacctacgcatctcctgtctgcgatatttaatgtaggaatcgacgagctgtgatccacactgcatcttctgtcccatgagcctcttcgaccttatcgtctgcatcacctcgtctttaccaaagaatgtctcccaagtgcatttcctggttttctacacaaaagaaacaataagtgaggacggatgcaactgtacatctcatgccatcaaaaacaaatatagtccacaccaacctcttcgtaatctaccatatggccacaaaaatagctgacaccaagctcggaaggaactagtccatacttagcttcaacactacatttgcatagtacaggaccagactcactgttccgcctcgttctttttcttctcctttgcctctggctcaggccaatgggacctagaaccatacaaccactctatgaaaatacacctacgtccactgtatggctgcaggagaatacattaataaatttgtggaaaaactagcaaagttgtggacatatgttatgcatttacataattattgttgggacacacgaagtactgctcgatatcctcacatatcacagcacgatttcctcaattgaaccaaagcagagactccggtcgtctatatgtggctaggttcttctcctcggtcattgctggcgggttcgggggaggaggcacccaacgcttaaaacgttcatgtgtattcttcccgctcaaccaattatcgaaaaggagataccgagggtcaaacttaccaggaccgtcgattcactagaaaaaaacacctcaagtgatcctacaaggatggaacaaaacatcattacacatctattaaacaacaagaacatacaagtaaaaaaactacgtacgttaatactgccacatgtgtagaagcagcgagcagccgtgtctggatgtttggattgaaatacccaagccaatctgccacagtcacaattaggcacaagaagatcaggaggaactggagtatccttgctagacgcattgggatataactctcgaggacgacctctcttctgccacaacatctctcgatacatatatttcatctccgaaatgattttatattaacaccactagagaaataacagaaatggtttcaacttataaataacatggtaatcatagtttcaaaaccctattttttaaaccaacaattaacaaactatttaaccatccgtaatcaccatatcaaccatatatcttataaatcgtaactaacaacaatatgttcaccaatcaaaactaattaatcaaaaccatactatgcaatatatgtaacaaatgaatcagtgagacaccataccttagtcttcaagctataaggatgaaatcaaagttttccaactcgaatacgaagattggagcaactctcggcggtatggatgaagagggaaacgagggagacaaatggttggtcgtagctctcggacagggaaggggagttttatagcactgcctagctcggcgccaagatctatggcgccgtgctaggtgccacgtcgactgccacgccagcccgctagtgccagcaatggacgttcctcggtgccataggccatggcgccgagaagtgttaccttgtcaccatggcttatagagccgagaaaagagtccaaaaacgacattaagtcctttagggggtctaaacgtgattttttttcaaaaagtgctaaaatacaaaaaaaatctgacactttatgtacttctaaccgattttctgcctctccagtttaccaaataagttttattgcttgtgaatttgactaccctctgcaatactattttgtctctctacaatacttgttgtcttgtgttagtgataacattagataatttatttgcatagaacacaacaattaggttcatctgccaccttttcattattcaaatttcaaacaaacacattcaatctttatatatgtgagtatagttactaggcaacacttggagcatgtaaaatgagtgacatcctttaactcctcactattgccataccggaaaaaaatcggtcttctgtttcactctgttataacttcataattttcagttttttggtcatctttatgaatttgggtttcttcacaggttgctgcttttgtacccttgatgtatatgttcatttgcacatattattcattattcaagattggtatgttgatgttctattccctgactccaagacaaaccagctctgtcagcttgcttatgatctgttcgtgagttttaatgcttcattttttatggttgacatgtttctattccaaagccacttgactcattgtagtcatgcaccaaatttggtttgcagaatggttgcaagatatgcacctcctatctcttataactttctgaatctcatccgccttggtggcaatgctaaaactacatttgagaagagaatggggaacattgatgatgcagttcctttctttggcagaggcttcaacaagatctacccactgattatggttgtttatacgctattggttgctagtaatttctttggccgtgtgattgactttttgggaagctggaaaaggttcaagttacaacaggaagaagagaatatagatggtttagatccctctggaatgattattgtacaaaaagagagatcttggatcgaacaagggtgcaaagtgggtgagcatgttattccattggcaaggaatttcaatggcgtgaacacagatattgaatcacaaaatgtgccattggttggaaacacagtggagatgaaagtaggggcagcttcttccagaaatgatgggagagctggccagttgaaatatgcaaacagcagggagactatcgccagcaaatacacttctattagggaacagaaccggcagtcagggaaggcagtgaaaaaggaaatttcatcaaactctgtatctttgcttgaagaaagaagttctgagcagtggtccaatactggtataccaccaactggtgtgtctgcaacatgggcctcgatgaagataggttttcaaaatttcaaagccaatttgggttcgaagaagtttcttcctttgcgccaggatccaggatttgttctaaatttgagtgtctcttcacctgaatctcttgatgacatattccaaaggttgaaacgacggcctgcaaatgtgcttgtggattaccttgatgacgatgacaacaacaacacacgagatatggatgtgcatttccaggatcaatgaaataggttgtgatattcttttaggttcagaatatgcatgcacagaaaaactaaaaggattggtatagcattagacgctcaaagaagatatagaggatgtatagatctgatgatggtttggtgtgattcctggaatctcaagacgcctgccatctgaaaaaacttcaaaatggaagtaagatatgatgacaagctgactgcctttgcagaaaggcttgagatttccccaccaagaaggtttgggacttctacttcactatatggggaaaatatcctatgcaatcacttatcctggtgcaaacatgcaatcaagcgatctgatgcatctgatctagatctaattatgactgttattttatatttaaccccttccacctaaaacatagtacctattttacttttaactccttccatgaaaccgttggatctagattggatgctctcgatagtttgattgcacgcttgtaccaaaatgagtgattgcacaggatatgtcctccactatatgcaggtaacattgttgacttgttgattatcttaccttttttgaatctgtattggagatgctgatctgtgatcgaagccaaaggatgtaaatgtgtacctaggattccatgtgaaggttaacgtgcctgagttgtaacctgtaaaaacgtactatcaaatatatacctaatcgggacaaaaaccccaagtgtttctgtgtagcagacgtcagacctgtatttgacggcaacttgtggacacttcttgtctactgcctgacataaaaaatgcacatttgtacttcattaactggttctttttttagggtgcacgtgttacagttggaataggcacgattaagggtacagcacgaattagtgaaaaccactgcgatcgggcatgaacataaataca

SEQ ID NO: 44849 - DNA, 3361 bp, Zea Mays
gaacgatcctgtttggtccatcgtcaccttcctcttccttcttcggttcttcgccagccgtgcgcgcttctccactgccctggagacaaaggagcaccccgcgatctcccggcgggacccggccccacctccccgcccgcgtgcctctgaaacggagaagctgccggttcccagccggccaggctactccgactcttcctttccctccagccggcgaggcgtccaagcggattagcggagagcgtcggggcggcgacatgtgggtgttctacctgatatcgctgcctctgacgctgggcatggtcgtcgtcacgctccgctacttcgccggccctgccgtgccgcgctacgttgtcgccaccgtaggatacgcatggttctgctccctctccatcatcatcctcgtccccgccgacatctggcagggctgtagttcctactatccagggctatgaagacgcaggagatttcactgttaaagaaaggctgaaaactagcattcatatgaacctgcttttttattcaattgtgggagccattggccttattggtgtcatattactcttaatcatgcatagagcttgggatggtggtattgtgggatttgcaatggcatgctcaaatacctttggattggtgactggtgcttttcttcttggttttgggttaagcgaaattccaagaaacatttggaaaaatgcatactggtctcaccgccaaaaagtactttctcatagagttgccaaaatggctgtaaagcttgataatgcccatcaagaatattcaaatgcaattgttgttgctcaagctacatcaaatcaaatgtcaaaacgtgacattttgaggccttacatggatattattgataacatgctgtctcaaatgctgcgggaggatccatccttcaaaccttctggtggtagattcggtgaaaatgatatggactatgatacagatgataaatcgatggccacacttcgacgccaactcaggagggcccatgaggagtactataggggcaaaagtgagtatatgacttgtgtcatggaagccctcaaactagaagacaccataaaaaattatgaacgccgtgatgctagcggatggaaatatgtatcaagttttagagacagacgttcgggcacacttggaccaattttggatactattgagttcatttggcaatgtatactgagaaagcagcttcaaaaagcatttgctgttatccttggttgcatgtcagctgctatcttgttggctgaagctactttacttccaagtgttgatctatctctcttttctattcttataaaagttgtaggaaaacaagaggttttagttcaggttgctgcttttgtacccttgatgtatatgttcatttgcacatattattcattattcaagattggtatgttgatgttctattccctgactccaagacaaaccagctctgtcagcttgcttatgatctgttcgtgagttttaatgcttcattttttatggttgacatgtttctattccaaagccacttgactcattgtagtcatgcaccaaatttggtttgcagaatggttgcaagatatgcacctcctatctcttataactttctgaatctcatccgccttggtggcaatgctaaaactacatttgagaagagaatggggaacattgatgatgcagttcctttctttggcagaggcttcaacaagatctacccactgattatggttgtttatacgctattggttgctagtaatttctttggccgtgtgattgactttttgggaagctggaaaaggttcaagttacaacaggaagaagagaatatagatggtttagatccctctggaatgattattgtacaaaaagagagatcttggatcgaacaagggtgcaaagtgggtgagcatgttattccattggcaaggaatttcaatggcgtgaacacagatattgaatcacaaaatgtgccattggttggaaacacagtggagatgaaagtaggggcagcttcttccagaaatgatgggagagctggccagttgaaatatgcaaacagcagggagactatcgccagcaaatacacttctattagggaacagaaccggcagtcagggaaggcagtgaaaaaggaaatttcatcaaactctgtatctttgcttgaagaaagaagttctgagcagtggtccaatactggtataccaccaactggtgtgtctgcaacatgggcctcgatgaagataggttttcaaaatttcaaagccaatttgggttcgaagaagtttcttcctttgcgccaggatccaggatttgttctaaatttgagtgtctcttcacctgaatctcttgatgacatattccaaaggttgaaacgacggcctgcaaatgtgcttgtggattaccttgatgacgatgacaacaacaacacacgagatatggatgtgcatttccaggatcaatgaaataggttgtgatattcttttaggttcagaatatgcatgcacagaaaaactaaaaggattggtatagcattagacgctcaaagaagatatagaggatgtatagatctgatgatggtttggtgtgattcctggaatctcaagacgcctgccatctgaaaaaacttcaaaatggaagtaagatatgatgacaagctgactgcctttgcagaaaggcttgagatttccccaccaagaaggtttgggacttctacttcactatatggggaaaatatcctatgcaatcacttatcctggtgcaaacatgcaatcaagcgatctgatgcatctgatctagatctaattatgactgttattttatatttaaccccttccacctaaaacatagtacctattttacttttaactccttccatgaaaccgttggatctagattggatgctctcgatagtttgattgcacgcttgtaccaaaatgagtgattgcacaggatatgtcctccactatatgcaggtaacattgttgacttgttgattatcttaccttttttgaatctgtattggagatgctgatctgtgatcgaagccaaaggatgtaaatgtgtacctaggattccatgtgaaggttaacgtgcctgagttgtaacctgtaaaaacgtactatcaaatatatacctaatcgggacaaaaaccccaagtgtttctgtgtagcagacgtcagacctgtatttgacggcaacttgtggacacttcttgtctactgcctgacataaaaaatgcacatttgtacttcattaactggttctttttttagggtgcacgtgttacagttggaataggcacgattaagggtacagcacgaattagtgaaaaccactgcgatcgggcatgaacataaataca

SEQ ID NO: 44850 - DNA, 3187 bp, Zea Mays
cgctttccgaactccaccgaacgatcctgtttggtccatcgtcaccttcctcttccttcttcggttcttcgccagccgtgcgcgcttctccactgccctggagacaaaggagcaccccgcgatctcccggcgggacccggccccacctccccgcccgcgtgcctctgaaacggagaagctgccggttcccagccggccaggctactccgactcttcctttccctccagccggcgaggcgtccaagcggattagcggagagcgtcggggcggcgacatgtgggtgttctacctgatatcgctgcctctgacgctgggcatggtcgtcgtcacgctccgctacttcgccggccctgccgtgccgcgctacgttgtcgccaccgtaggatacgcatggttctgctccctctccatcatcatcctcgtccccgccgacatctggcagacattaactgccagtgcgaaggggggcattggattcttttggagctggtcctattggagcacatttatcctaacatgggctgtagttcctactatccagggctatgaagacgcaggagatttcactgttaaagaaaggctgaaaactagcattcatatgaacctgcttttttattcaattgtgggagccattggccttattggtgtcatattactcttaatcatgcatagagcttgggatggtggtattgtgggatttgcaatggcatgctcaaatacctttggattggtgactggtgcttttcttcttggttttgggttaagcgaaattccaagaaacatttggaaaaatgcatactggtctcaccgccaaaaagtactttctcatagagttgccaaaatggctgtaaagcttgataatgcccatcaagaatattcaaatgcaattgttgttgctcaagctacatcaaatcaaatgtcaaaacgtgacattttgaggccttacatggatattattgataacatgctgtctcaaatgctgcgggaggatccatccttcaaaccttctggtggtagattcggtgaaaatgatatggactatgatacagatgataaatcgatggccacacttcgacgccaactcaggagggcccatgaggagtactataggggcaaaagtgagtatatgacttgtgtcatggaagccctcaaactagaagacaccataaaaaattatgaacgccgtgatgctagcggatggaaatatgtatcaagttttagagacagacgttcgggcacacttggaccaattttggatactattggttgctgcttttgtacccttgatgtatatgttcatttgcacatattattcattattcaagattggtatgttgatgttctattccctgactccaagacaaaccagctctgtcagcttgcttatgatctaatggttgcaagatatgcacctcctatctcttataactttctgaatctcatccgccttggtggcaatgctaaaactacatttgagaagagaatggggaacattgatgatgcagttcctttctttggcagaggcttcaacaagatctacccactgattatggttgtttatacgctattggttgctagtaatttctttggccgtgtgattgactttttgggaagctggaaaaggttcaagttacaacaggaagaagagaatatagatggtttagatccctctggaatgattattgtacaaaaagagagatcttggatcgaacaagggtgcaaagtgggtgagcatgttattccattggcaaggaatttcaatggcgtgaacacagatattgaatcacaaaatgtgccattggttggaaacacagtggagatgaaagtaggggcagcttcttccagaaatgatgggagagctggccagttgaaatatgcaaacagcagggagactatcgccagcaaatacacttctattagggaacagaaccggcagtcagggaaggcagtgaaaaaggaaatttcatcaaactctgtatctttgcttgaagaaagaagttctgagcagtggtccaatactggtataccaccaactggtgtgtctgcaacatgggcctcgatgaagataggttttcaaaatttcaaagccaatttgggttcgaagaagtttcttcctttgcgccaggatccaggatttgttctaaatttgagtgtctcttcacctgaatctcttgatgacatattccaaaggttgaaacgacggcctgcaaatgtgcttgtggattaccttgatgacgatgacaacaacaacacacgagatatggatgtgcatttccaggatcaatgaaataggttgtgatattcttttaggttcagaatatgcatgcacagaaaaactaaaaggattggtatagcattagacgctcaaagaagatatagaggatgtatagatctgatgatggtttggtgtgattcctggaatctcaagacgcctgccatctgaaaaaacttcaaaatggaagtaagatatgatgacaagctgactgcctttgcagaaaggcttgagatttccccaccaagaaggtttgggacttctacttcactatatggggaaaatatcctatgcaatcacttatcctggtgcaaacatgcaatcaagcgatctgatgcatctgatctagatctaattatgactgttattttatatttaaccccttccacctaaaacatagtacctattttacttttaactccttccatgaaaccgttggatctagattggatgctctcgatagtttgattgcacgcttgtaccaaaatgagtgattgcacaggatatgtcctccactatatgcaggtaacattgttgacttgttgattatcttaccttttttgaatctgtattggagatgctgatctgtgatcgaagccaaaggatgtaaatgtgtacctaggattccatgtgaaggttaacgtgcctgagttgtaacctgtaaaaacgtactatcaaatatatacctaatcgggacaaaaaccccaagtgtttctgtgtagcagacgtcagacctgtatttgacggcaacttgtggacacttcttgtctactgcctgacataaaaaatgcacatttgtacttcattaactggttctttttttagggtgcacgtgttacagttggaataggcacgattaagggtacagcacgaattagtgaaaaccactgcgatcgggcatgaacataaataca

SEQ ID NO: 44851 - DNA, 3621 bp, Zea Mays
cggagatgcaaccttggcgtgcgtgccagtacgctttccgaactccaccgaacgatcctgtttggtccatcgtcaccttcctcttccttcttcggttcttcgccagccgtgcgcgcttctccactgccctggagacaaaggagcaccccgcgatctcccggcgggacccggccccacctccccgcccgcgtgcctctgaaacggagaagctgccggttcccagccggccaggctactccgactcttcctttccctccagccggcgaggcgtccaagcggattagcggagagcgtcggggcggcgacatgtgggtgttctacctgatatcgctgcctctgacgctgggcatggtcgtcgtcacgctccgctacttcgccggccctgccgtgccgcgctacgttgtcgccaccgtaggatacgcatggttctgctccctctccatcatcatcctcgtccccgccgacatctggcagacattaactgccagtgcgaaggggggcattggattcttttggagctggtcctattggagcacatttatcctaacatgggctgtagttcctactatccagggctatgaagacgcaggagatttcactgttaaagaaaggctgaaaactagcattcatatgaacctgcttttttattcaattgtgggagccattggccttattggtgtcatattactcttaatcatgcatagagcttgggatggtggtattgtgggatttgcaatggcatgctcaaatacctttggattggtgactggtgcttttcttcttggttttgggttaagcgaaattccaagaaacatttggaaaaatgcatactggtctcaccgccaaaaagtactttctcatagagttgccaaaatggctgtaaagcttgataatgcccatcaagaatattcaaatgcaattgttgttgctcaagctacatcaaatcaaatgtcaaaacgtgacattttgaggccttacatggatattattgataacatgctgtctcaaatgctgcgggaggatccatccttcaaaccttctggtggtagattcggtgaaaatgatatggactatgatacagatgataaatcgatggccacacttcgacgccaactcaggagggcccatgaggagtactataggggcaaaagtgagtatatgacttgtgtcatggaagccctcaaactagaagacaccataaaaaattatgaacgccgtgatgctagcggatggaaatatgtatcaagttttagagacagacgttcgggcacacttggaccaattttggatactattgagttcatttggcaatgtatactgagaaagcagcttcaaaaagcatttgctgttatccttggttgcatgtcagctgctatcttgttggctgaagctactttacttccaagtgttgatctatctctcttttctattcttataaaagttgtaggaaaacaagaggttttagttcaggttgctgcttttgtacccttgatgtatatgttcatttgcacatattattcattattcaagattggtatgttgatgttctattccctgactccaagacaaaccagctctgtcagcttgcttatgatctgttcaatggttgcaagatatgcacctcctatctcttataactttctgaatctcatccgccttggtggcaatgctaaaactacatttgagaagagaatggggaacattgatgatgcagttcctttctttggcagaggcttcaacaagatctacccactgattatggttgtttatacgctattggttgctagtaatttctttggccgtgtgattgactttttgggaagctggaaaaggttcaagttacaacaggaagaagagaatatagatggtttagatccctctggaatgattattgtacaaaaagagagatcttggatcgaacaagggtgcaaagtgggtgagcatgttattccattggcaaggaatttcaatggcgtgaacacagatattgaatcacaaaatgtgccattgtcctgtgtcgactaggtgcgcgaaccatgtcaacatactctgaaaactgaattggatcagcacatcagttaaactaagggggcctttgagaagaggtttatttggtctttttgtccaagagagatcttggatggaacaagggtgcaatgtgggcgagcatgttatcccattggcaaggaatttcaatggcgtgaacacagatattgaatcacaaaatgtgccattggttggaaacacagtggagatgaaagtaggggcagcttcttccagaaatgatgggagagctggccagttgaaatatgcaaacagcagggagactatcgccagcaaatacacttctattagggaacagaaccggcagtcagggaaggcagtgaaaaaggaaatttcatcaaactctgtatctttgcttgaagaaagaagttctgagcagtggtccaatactggtataccaccaactggtgtgtctgcaacatgggcctcgatgaagataggttttcaaaatttcaaagccaatttgggttcgaagaagtttcttcctttgcgccaggatccaggatttgttctaaatttgagtgtctcttcacctgaatctcttgatgacatattccaaaggttgaaacgacggcctgcaaatgtgcttgtggattaccttgatgacgatgacaacaacaacacacgagatatggatgtgcatttccaggatcaatgaaataggttgtgatattcttttaggttcagaatatgcatgcacagaaaaactaaaaggattggtatagcattagacgctcaaagaagatatagaggatgtatagatctgatgatggtttggtgtgattcctggaatctcaagacgcctgccatctgaaaaaacttcaaaatggaagtaagatatgatgacaagctgactgcctttgcagaaaggcttgagatttccccaccaagaaggtttgggacttctacttcactatatggggaaaatatcctatgcaatcacttatcctggtgcaaacatgcaatcaagcgatctgatgcatctgatctagatctaattatgactgttattttatatttaaccccttccacctaaaacatagtacctattttacttttaactccttccatgaaaccgttggatctagattggatgctctcgatagtttgattgcacgcttgtaccaaaatgagtgattgcacaggatatgtcctccactatatgcaggtaacattgttgacttgttgattatcttaccttttttgaatctgtattggagatgctgatctgtgatcgaagccaaaggatgtaaatgtgtacctaggattccatgtgaaggttaacgtgcctgagttgtaacctgtaaaaacgtactatcaaatatatacctaatcgggacaaaaaccccaagtgtttctgtgtagcagacgtcagacctgtatttgacggcaacttgtggacacttcttgtctactgcctgacataaaaaatgcacatttgtacttcattaactggttctttttttagggtgcacgtgttacagttggaataggcacgattaagggtacagcacgaattagtgaaaaccactgcgatcgggcatgaacataaataca

SEQ ID NO: 44852 - DNA, 3250 bp, Zea Mays
gcttcttggtgcgcttcgtggtggacggcggagatgcaaccttggcgtgcgtgccagtacgctttccgaactccaccgaacgatcctgtttggtccatcgtcaccttcctcttccttcttcggttcttcgccagccgtgcgcgcttctccactgccctggagacaaaggagcaccccgcgatctcccggcgggacccggccccacctccccgcccgcgtgcctctgaaacggagaagctgccggttcccagccggccaggctactccgactcttcctttccctccagccggcgaggcgtccaagcggattagcggagagcgtcggggcggcgacatgtgggtgttctacctgatatcgctgcctctgacgctgggcatggtcgtcgtcacgctccgctacttcgccggccctgccgtgccgcgctacgttgtcgccaccgtaggatacgcatggttctgctccctctccatcatcatcctcgtccccgccgacatctggcagacattaactgccagtgcgaaggggggcattggattcttttggagctggtcctattggagcacatttatcctaacatgggctgtagttcctactatccagggctatgaagacgcaggagatttcactgttaaagaaaggctgaaaactagcattcatatgaacctgcttttttattcaattgtgggagccattggccttattggtgtcatattactcttaatcatgcatagagcttgggatggtggtattgtgggatttgcaatggcatgctcaaatacctttggattggtgactggtgcttttcttcttggttttgggttaagcgaaattccaagaaacatttggaaaaatgcatactggtctcaccgccaaaaagtactttctcatagagttgccaaaatggctgtaaagcttgataatgcccatcaagaatattcaaatgcaattgttgttgctcaagctacatcaaatcaaatgtcaaaacgtgacattttgaggccttacatggatattattgataacatgctgtctcaaatgctgcgggaggatccatccttcaaaccttctggtggtagattcggtgaaaatgatatggactatgatacagatgataaatcgatggccacacttcgacgccaactcaggagggcccatgaggagtactataggggcaaaagtgagtatatgacttgtgtcatggaagccctcaaactagaagacaccataaaaaattatgaacgccgtgatgctagcggatggaaatatgtatcaagttttagagacagacgttcgggcacacttggaccaattttggatactattggttgctgcttttgtacccttgatgtatatgttcatttgcacatattattcattattcaagattggtatgttgatgttctattccctgactccaagacaaaccagctctgtcagcttgcttatgatctgttcaatggttgcaagatatgcacctcctatctcttataactttctgaatctcatccgccttggtggcaatgctaaaactacatttgagaagagaatggggaacattgatgatgcagttcctttctttggcagaggcttcaacaagatctacccactgattatggttgtttatacgctattggttgctagtaatttctttggccgtgtgattgactttttgggaagctggaaaaggttcaagttacaacaggaagaagagaatatagatggtttagatccctctggaatgattattgtacaaaaagagagatcttggatcgaacaagggtgcaaagtgggtgagcatgttattccattggcaaggaatttcaatggcgtgaacacagatattgaatcacaaaatgtgccattggttggaaacacagtggagatgaaagtaggggcagcttcttccagaaatgatgggagagctggccagttgaaatatgcaaacagcagggagactatcgccagcaaatacacttctattagggaacagaaccggcagtcagggaaggcagtgaaaaaggaaatttcatcaaactctgtatctttgcttgaagaaagaagttctgagcagtggtccaatactggtataccaccaactggtgtgtctgcaacatgggcctcgatgaagataggttttcaaaatttcaaagccaatttgggttcgaagaagtttcttcctttgcgccaggatccaggatttgttctaaatttgagtgtctcttcacctgaatctcttgatgacatattccaaaggttgaaacgacggcctgcaaatgtgcttgtggattaccttgatgacgatgacaacaacaacacacgagatatggatgtgcatttccaggatcaatgaaataggttgtgatattcttttaggttcagaatatgcatgcacagaaaaactaaaaggattggtatagcattagacgctcaaagaagatatagaggatgtatagatctgatgatggtttggtgtgattcctggaatctcaagacgcctgccatctgaaaaaacttcaaaatggaagtaagatatgatgacaagctgactgcctttgcagaaaggcttgagatttccccaccaagaaggtttgggacttctacttcactatatggggaaaatatcctatgcaatcacttatcctggtgcaaacatgcaatcaagcgatctgatgcatctgatctagatctaattatgactgttattttatatttaaccccttccacctaaaacatagtacctattttacttttaactccttccatgaaaccgttggatctagattggatgctctcgatagtttgattgcacgcttgtaccaaaatgagtgattgcacaggatatgtcctccactatatgcaggtaacattgttgacttgttgattatcttaccttttttgaatctgtattggagatgctgatctgtgatcgaagccaaaggatgtaaatgtgtacctaggattccatgtgaaggttaacgtgcctgagttgtaacctgtaaaaacgtactatcaaatatatacctaatcgggacaaaaaccccaagtgtttctgtgtagcagacgtcagacctgtatttgacggcaacttgtggacacttcttgtctactgcctgacataaaaaatgcacatttgtacttcattaactggttctttttttagggtgcacgtgttacagttggaataggcacgattaagggtacagcacgaattagtgaaaaccactgcgatcgggcatgaacataaataca

SEQ ID NO: 44853 - DNA, 3420 bp, Zea Mays
cgcttcttggtgcgcttcgtggtggacggcggagatgcaaccttggcgtgcgtgccagtacgctttccgaactccaccgaacgatcctgtttggtccatcgtcaccttcctcttccttcttcggttcttcgccagccgtgcgcgcttctccactgccctggagacaaaggagcaccccgcgatctcccggcgggacccggccccacctccccgcccgcgtgcctctgaaacggagaagctgccggttcccagccggccaggctactccgactcttcctttccctccagccggcgaggcgtccaagcggattagcggagagcgtcggggcggcgacatgtgggtgttctacctgatatcgctgcctctgacgctgggcatggtcgtcgtcacgctccgctacttcgccggccctgccgtgccgcgctacgttgtcgccaccgtaggatacgcatggttctgctccctctccatcatcatcctcgtccccgccgacatctggcagacattaactgccagtgcgaaggggggcattggattcttttggagctggtcctattggagcacatttatcctaacatgggctgtagttcctactatccagggctatgaagacgcaggagatttcactgttaaagaaaggctgaaaactagcattcatatgaacctgcttttttattcaattgtgggagccattggccttattggtgtcatattactcttaatcatgcatagagcttgggatggtggtattgtgggatttgcaatggcatgctcaaatacctttggattggtgactggtgcttttcttcttggttttgggttaagcgaaattccaagaaacatttggaaaaatgcatactggtctcaccgccaaaaagtactttctcatagagttgccaaaatggctgtaaagcttgataatgcccatcaagaatattcaaatgcaattgttgttgctcaagctacatcaaatcaaatgtcaaaacgtgacattttgaggccttacatggatattattgataacatgctgtctcaaatgctgcgggaggatccatccttcaaaccttctggtggtagattcggtgaaaatgatatggactatgatacagatgataaatcgatggccacacttcgacgccaactcaggagggcccatgaggagtactataggggcaaaagtgagtatatgacttgtgtcatggaagccctcaaactagaagacaccataaaaaattatgaacgccgtgatgctagcggatggaaatatgtatcaagttttagagacagacgttcgggcacacttggaccaattttggatactattgagttcatttggcaatgtatactgagaaagcagcttcaaaaagcatttgctgttatccttggttgcatgtcagctgctatcttgttggctgaagctactttacttccaagtgttgatctatctctcttttctattcttataaaagttgtaggaaaacaagaggttttagttcaggttgctgcttttgtacccttgatgtatatgttcatttgcacatattattcattattcaagattggtatgttgatgttctattccctgactccaagacaaaccagctctgtcagcttgcttatgatctaatggttgcaagatatgcacctcctatctcttataactttctgaatctcatccgccttggtggcaatgctaaaactacatttgagaagagaatggggaacattgatgatgcagttcctttctttggcagaggcttcaacaagatctacccactgattatggttgtttatacgctattggttgctagtaatttctttggccgtgtgattgactttttgggaagctggaaaaggttcaagttacaacaggaagaagagaatatagatggtttagatccctctggaatgattattgtacaaaaagagagatcttggatcgaacaagggtgcaaagtgggtgagcatgttattccattggcaaggaatttcaatggcgtgaacacagatattgaatcacaaaatgtgccattggttggaaacacagtggagatgaaagtaggggcagcttcttccagaaatgatgggagagctggccagttgaaatatgcaaacagcagggagactatcgccagcaaatacacttctattagggaacagaaccggcagtcagggaaggcagtgaaaaaggaaatttcatcaaactctgtatctttgcttgaagaaagaagttctgagcagtggtccaatactggtataccaccaactggtgtgtctgcaacatgggcctcgatgaagataggttttcaaaatttcaaagccaatttgggttcgaagaagtttcttcctttgcgccaggatccaggatttgttctaaatttgagtgtctcttcacctgaatctcttgatgacatattccaaaggttgaaacgacggcctgcaaatgtgcttgtggattaccttgatgacgatgacaacaacaacacacgagatatggatgtgcatttccaggatcaatgaaataggttgtgatattcttttaggttcagaatatgcatgcacagaaaaactaaaaggattggtatagcattagacgctcaaagaagatatagaggatgtatagatctgatgatggtttggtgtgattcctggaatctcaagacgcctgccatctgaaaaaacttcaaaatggaagtaagatatgatgacaagctgactgcctttgcagaaaggcttgagatttccccaccaagaaggtttgggacttctacttcactatatggggaaaatatcctatgcaatcacttatcctggtgcaaacatgcaatcaagcgatctgatgcatctgatctagatctaattatgactgttattttatatttaaccccttccacctaaaacatagtacctattttacttttaactccttccatgaaaccgttggatctagattggatgctctcgatagtttgattgcacgcttgtaccaaaatgagtgattgcacaggatatgtcctccactatatgcaggtaacattgttgacttgttgattatcttaccttttttgaatctgtattggagatgctgatctgtgatcgaagccaaaggatgtaaatgtgtacctaggattccatgtgaaggttaacgtgcctgagttgtaacctgtaaaaacgtactatcaaatatatacctaatcgggacaaaaaccccaagtgtttctgtgtagcagacgtcagacctgtatttgacggcaacttgtggacacttcttgtctactgcctgacataaaaaatgcacatttgtacttcattaactggttctttttttagggtgcacgtgttacagttggaataggcacgattaagggtacagcacgaattagtgaaaaccactgcgatcgggcatgaacataaataca

SEQ ID NO: 44854 - DNA, 2106 bp, Zea Mays
atcgtcaccttcctcttccttcttcggttcttcgccagccgtgcgcgcttctccactgccctggagacaaaggagcaccccgcgatctcccggcgggacccggccccacctccccgcccgcgtgcctctgaaacggagaagctgccggttcccagccggccaggctactccgactcttcctttccctccagccggcgaggcgtccaagcggattagcggagagcgtcggggcggcgacatgtgggtgttctacctgatatcgctgcctctgacgctgggcatggtcgtcgtcacgctccgctacttcgccggccctgccgtgccgcgctacgttgtcgccaccgtaggatacgcatggttctgctccctctccatcatcatcctcgtccccgccgacatctggcagacattaactgccagtgcgaaggggggcattggattcttttggagctggtcctattggagcacatttatcctaacatgggctgtagttcctactatccagggctatgaagacgcaggagatttcactgttaaagaaaggctgaaaactagcattcatatgaacctgcttttttattcaattgtgggagccattggccttattggtgtcatattactcttaatcatgcatagagcttgggatggtggtattgtgggatttgcaatggcatgctcaaatacctttggattggtgactggtgcttttcttcttggttttgggttaagcgaaattccaagaaacatttggaaaaatgcatactggtctcaccgccaaaaagtactttctcatagagttgccaaaatggctgtaaagcttgataatgcccatcaagaatattcaaatgcaattgttgttgctcaagctacatcaaatcaaatgtcaaaacgtgacattttgaggccttacatggatattattgataacatgctgtctcaaatgctgcgggaggatccatccttcaaaccttctggtggtagattcggtgaaaatgatatggactatgatacagatgataaatcgatggccacacttcgacgccaactcaggagggcccatgaggagtactataggggcaaaagtgagtatatgacttgtgtcatggaagccctcaaactagaagacaccataaaaaattatgaacgccgtgatgctagcggatggaaatatgtatcaagttttagagacagacgttcgggcacacttggaccaattttggatactattgagttcatttggcaatgtatactgagaaagcagcttcaaaaagcatttgctgttatccttggttgcatgtcagctgctatcttgttggctgaagctactttacttccaagtgttgatctatctctcttttctattcttataaaagttgtaggaaaacaagaggttttagttcaggttgctgcttttgtacccttgatgtatatgttcatttgcacatattattcattattcaagattggtatgttgatgttctattccctgactccaagacaaaccagctctgtcagcttgcttatgatctgttcaatggttgcaagatatgcacctcctatctcttataactttctgaatctcatccgccttggtggcaatgctaaaactacatttgagaagagaatggggaacattgatgatgcagttcctttctttggcagaggcttcaacaagatctacccactgattatggttgtttatacgctattggttgctagtaatttctttggccgtgtgattgactttttgggaagctggaaaaggttcaagttacaacaggaagaagagaatatagatggtttagatccctctggaatgattattgtacaaaaagagagatcttggatcgaacaagggtgcaaagtgggtgagcatgttattccattggcaaggaatttcaatggcgtgaacacagatattgaatcacaaaatgtgccattgagaatttctgaaaattgcatgcatgatcttttttacccactggttatggaaggtccaaatgataacccttgcccttgccccaaaatcctgtcctgtgtcgactaggtgcgcgaaccatgtcaacatactctgaaaactgaattggatcagcacatcagttaaac

SEQ ID NO: 44855 - DNA, 1052 bp, Zea Mays
cgcaggatcttcgtgaaccttctgaattcttccccaagccgtgccccgccgcgccgctgtataaagctcgggccacttcctacggtattctcaccgcaaggatccaccacaacagcgaaggagaaagcagaccaacctagccacccagggagaaagaggccaaaagggaggggagagtgtcgtcatggcttccattgtcgcttccaggagggccgttcctctagttcgcgctctggagaagctcatcgcagcgtcctccgctcccgggactggctccgccctcaggccggtggcagtcgccggcggcctccgcggctacaacaccggcgctccgctccgacgctacgagggggccgagtcggaagacgatagcgtccgcgagtacgatgggcggcacggcggccgggactacgctgtgcccagcctgttctcaggtcgtgcggtgcgccgtggctggaacgcgaaggaggacgaggaggcgctgcacctgagggtggacatgccaggcctggggaaggagcacgtcaaggtgtgggcggagcagaacagcctggtgatcaagggcgagggcgagaaggaggatagcgaggacgaggccgccccgcctccgagatacagcggtcgcatcgagctcgcgccagaggtttacaggatggacaagatcaaggcggagatgaagaacggcgtgctcaaggtggtcgtgccgaaggtgaaggagcagcagcgcaaggacgtgttccaagtcaacgtcgagtagatgtttccaaatagaagcaagtgccggtacgggatggaggattggaggggcactgccaaactaggattcctctctctcaatctgatctggattctggaatcagatttctcttctttcatttttctcgtctatcttctatcagtatgaaataagcaacgtcgcttcagttttcgtgtcaaggccggtggagtcgcctatgtttattttattttctttgtatttcctacctggacacacgttctctatgccgtgtttggtttccgcagatttttaaaatatgcatgttcaaacccaa

SEQ ID NO: 44856 - DNA, 1223 bp, Zea Mays
gcggatttctattggtcgcaggcaagccacacacagggccacacagacagcgccatagccgccaaagatcgcaaaggctttagctcagatgaaaaactggtttactcgcttccccacaattcttcaaggttgcgaaagtatcattgaaaatttaaggggacaatatgcacattctgttggctgcttcgatgaagcagctttccactttcttgaagcaaaaaagctgacagagagtaaatcaatgcaatcgatgtgtgaaacctatgcagctgtgtcatatatttgtaagggtgatgcagagtcgtcttcacaggcactagaactggttggtcctgcctatagaacaatggactcatttgttggtgtgcgagagaaaacctgtatcatttttgtttatggactattacttatgagacagcataatccgcaggaagcacggaaccgccttgcaagtggtttgaaaatagcgcaccaacagttgggtaacatccagttagtttctcagtatttgacaatactgggcacattggcgcttcagctacatgacgcagcacaggctaaagagatcctgaagtcttcgttgaccttagctaagacgctatttgatattccaacccaaatctggatcttgtcagtatttacagagttatatcgtgaactggaagagaaggaaaatgaaatggagaactctgagtacgaaggaaagaaggaagacgatctgcagagaagactttctgaagcttattctcattcttttcaccatgagctggtggaaaaatcaagaatccagccgctgcacatgtcaagtaagcagccagagatggctgttccatcagctaatggtgatcttgacatcccagaatcagtggggctttccgctccccagccattcctcaaaagacttgttgaggccgagccgatgaggcgcagtaccaggaggcggcggtagtaatgaaactagtactgtaattaatagcgtagtgaatttgttggttaagtgttgttatgacttgtaacttttagcagtttaggtttttattttcttttgtttgttgtgttgattatgtgtatcttggtttagaatttatagatttggagaactgttggattgacaacattctgagtggtaaaataccaattattccactgtgttgggacggcgtgttacacctgcatctccaccatcagcacctgagggtcttcgttcggctcgcgtgcaaggg

SEQ ID NO: 44857 - DNA, 1388 bp, Zea Mays
ctggaatttgtgattctgagctcaacattatgttcaccaagacatataggttctttctttgatggtcgtaaccatatttgatgaacttgtgaagcttggcattgtggatggtgtgatggaggcagatttggaacactcaacaatatggacagcagggctgtacttgatccttttacttcagtttctggaaaacaaagttgctgtggaacttacaaggtcagaatttgttgaagcccaagaggctttagctcagatgaaaaactggtttactcgcttccccacaattcttcaaggttgcgaaagtatcattgaaaatttaaggggacaatatgcacattctgttggctgcttcgatgaagcagctttccactttcttgaagcaaaaaagctgacagagagtaaatcaatgcaatcgatgtgtgaaacctatgcagctgtgtcatatatttgtaagggtgatgcagagtcgtcttcacaggcactagaactggttggtcctgcctatagaacaatggactcatttgttggtgtgcgagagaaaacctgtatcatttttgtttatggactattacttatgagacagcataatccgcaggaagcacggaaccgccttgcaagtggtttgaaaatagcgcaccaacagttgggtaacatccagttagtttctcagtatttgacaatactgggcacattggcgcttcagctacatgacgcagcacaggctaaagagatcctgaagtcttcgttgaccttagctaagacgctatttgatattccaacccaaatctggatcttgtcagtatttacagagttatatcgtgaactggaagagaaggaaaatgaaatggagaactctgagtacgaaggaaagaaggaagacgatctgcagagaagactttctgaagcttattctcattcttttcaccatgagctggtggaaaaatcaagaatccagccgctgcacatgtcaagtaagcagccagagatggctgttccatcagctaatggtgatcttgacatcccagaatcagtggggctttccgctccccagccattcctcaaaagacttgttgaggccgagccgatgaggcgcagtaccaggaggcggcggtagtaatgaaactagtactgtaattaatagcgtagtgaatttgttggttaagtgttgttatgacttgtaacttttagcagtttaggtttttattttcttttgtttgttgtgttgattatgtgtatcttggtttagaatttatagatttggagaactgttggattgacaacattctgagtggtaaaataccaattattccactgtgttgggacggcgtgttacacctgcatctccaccatcagcacctgagggtcttcgttcggctcgcgtgcaaggg

SEQ ID NO: 44858 - DNA, 3714 bp, Zea Mays
cccgcccgcttgtttccccattcccttcctccttccgcagcaagctccagcctcccaaagcccccactcccccaatagaccatgccggccgctgcgctctagccgaccgccgcccctcccttccccctcctcgccgccatgtccatcgccgccgtgtccgcggatgggctcctcgcgttggccgacgaggctgagcgccggtatgacttttccgccgcggccgcttgcctcgagtccgcgctgcgtccgccctacgccgcagctctcctcccactcaccgaagcccgcgcgcggctccgcctcgcttcgctcctcctcgcgccccgcgggtcctcccgcgtcccgcgcgccggcgctcccgccgccgccaagacgcacctcgagcgcgcgctgctcatcctctcccctctcccctccgcgccaccgcggctcaagctgttggcccactcccacctcgcgggcgcctatgctgtcctgggggcgatcgcgtcgcagaagcacgtgctccaccgcggcctcggcctcctggattcggcttccgcctcggggctcctccagcgcgagccagcgcttctatggacttgcaacttccaggcgcagctcgggtccgttttcaccaatgacggggacgccgcgtcagcgctgtccgcactgtccgtgggagcatccgccgccgccgagctcgggagcccccagctcgagctcttcttcgccgcctccgagctccacgtccacctcctctgctgggaggacagcgctgccgttgagaacgctgtcactcgtgcctcgctgctctgggacgcactcacagccgagcagatggagcactgggttggactcttcttctacacgcagctgctgcagactttctacctgctcaggatctgcgactacaaggctgcctcacagcacgtagagaggttggatacagctgtgaagagtgagatgcagagaggacgccaaattacggcgcttgctaatgatctcagcacactggagaggacactagggcagtctgggctgaaggagcgggagatgctggcattatcgcacaagcaaaggcagctcaagggtcagctgcgagcattgtgtggctatgactcattgaatgatgtgttggattatggggataagctgcttttggcaccaccgctgatgcatggggagtggctcccacggacggcggtgtttgtgctcgtagatctcatggttgttatggtaggtcgcccgaaagggatatttaaggagtgcgggaagagaataaattcaggactccggctcatccatgatgaacttgtgaagcttggcattgtggatggtgtgatgggtatttatttcttataagtcctgttactcttttttagcatcacaactaggggtggtaatgggctctaaaatctacactacaaaatttaaagacccgatcgtatcaggatcgggctctatttctatacatttttgaattaaaattaattaagggctcaaacgaatcttgaaggaacatttgaatcgtgatccattaccacccacaatcacaactgtatgaattccctaatgcatcaccttgatgggtttctaatatccttgttattatttatggatcccaccctttatttcctttttgtgacgtaatgtgagctctgtatggttcatgagagctatttttttcaattcgtttgtttctctagtcttttatacgctatatgaactgaactggactagtaagtactacttctgttttatagaatataggaccatgttgcacttttcacacaaattaagtcctaaaaagaaaacaagaaaacatctacccttattggttagatcattggtagtagtggtagtgtggtaccattagtaaggatggattatggaataagataaacaaccttattaacgacatcaaccttgattttcgtactggcttaaaaacaagccaagatgggaaaggagccctgtaaatatcgaaggaatatgaatgagcaaatatgcatagaaatatatcagtcaaatgaagcataatttcatatggttgcccatttggcggcctgcatttattctacttgctaactggtgaacactaggtcagaaaatcagtaattaatacacagtttttgccattttatatgcatccatagttacatagccattgttttttttcctcaaacgacgtaggagagcggtgtatcattttattaaaataaaaatagaggaccatgtctttgattttcttcctcatgaaaccttatacttagttctttagttaaaaactgacagaaggaatggatccaacccattgttttatttcttttaattttgtaccttacagaaagaatggatttaaccaatttagtcctaacttgtgcacttttcctgtttcttcattttatatgacttgagtgtagtccgatttattttcattattcaactaccattgctacacagaggcagatttggaacactcaacaatatggacagcagggctgtacttgatccttttacttcagtttctggaaaacaaagttgctgtggaacttacaaggtcagaatttgttgaagcccaagaggctttagctcagatgaaaaactggtttactcgcttccccacaattcttcaaggttgcgaaagtatcattgaaaatttaaggggacaatatgcacattctgttggctgcttcgatgaagcagctttccactttcttgaagcaaaaaagctgacagagagtaaatcaatgcaatcgatgtgtgaaacctatgcagctgtgtcatatatttgtaagggtgatgcagagtcgtcttcacaggcactagaactggttggtcctgcctatagaacaatggactcatttgttggtgtgcgagagaaaacctgtatcatttttgtttatggactattacttatgagacagcataatccgcaggaagcacggaaccgccttgcaagtggtttgaaaatagcgcaccaacagttgggtaacatccagttagtttctcagtatttgacaatactgggcacattggcgcttcagctacatgacgcagcacaggctaaagagatcctgaagtcttcgttgaccttagctaagacgctatttgatattccaacccaaatctggatcttgtcagtatttacagagttatatcgtgaactggaagagaaggaaaatgaaatggagaactctgagtacgaaggaaagaaggaagacgatctgcagagaagactttctgaagcttattctcattcttttcaccatgagctggtggaaaaatcaagaatccagccgctgcacatgtcaagtaagcagccagagatggctgttccatcagctaatggtgatcttgacatcccagaatcagtggggctttccgctccccagccattcctcaaaagacttgttgaggccgagccgatgaggcgcagtaccaggaggcggcggtagtaatgaaactagtactgtaattaatagcgtagtgaatttgttggttaagtgttgttatgacttgtaacttttagcagtttaggtttttattttcttttgtttgttgtgttgattatgtgtatcttggtttagaatttatagatttggagaactgttggattgacaacattctgagtggtaaaataccaattattccactgtgttgggacggcgtgttacacctgcatctccaccatcagcacctgagggtcttcgttcggctcgcgtgcaaggg

SEQ ID NO: 44859 - DNA, 3785 bp, Zea Mays
caacagacgaccccgttgaacccgccgccgccccgcccgcttgtttccccattcccttcctccttccgcagcaagctccagcctcccaaagcccccactcccccaatagaccatgccggccgctgcgctctagccgaccgccgcccctcccttccccctcctcgccgccatgtccatcgccgccgtgtccgcggatgggctcctcgcgttggccgacgaggctgagcgccggtatgacttttccgccgcggccgcttgcctcgagtccgcgctgcgtccgccctacgccgcagctctcctcccactcaccgaagcccgcgcgcggctccgcctcgcttcgctcctcctcgcgccccgcgggtcctcccgcgtcccgcgcgccggcgctcccgccgccgccaagacgcacctcgagcgcgcgctgctcatcctctcccctctcccctccgcgccaccgcggctcaagctgttggcccactcccacctcgcgggcgcctatgctgtcctgggggcgatcgcgtcgcagaagcacgtgctccaccgcggcctcggcctcctggattcggcttccgcctcggggctcctccagcgcgagccagcgcttctatggacttgcaacttccaggcgcagctcgggtccgttttcaccaatgacggggacgccgcgtcagcgctgtccgcactgtccgtgggagcatccgccgccgccgagctcgggagcccccagctcgagctcttcttcgccgcctccgagctccacgtccacctcctctgctgggaggacagcgctgccgttgagaacgctgtcactcgtgcctcgctgctctgggacgcactcacagccgagcagatggagcactgggttggactcttcttctacacgcagctgctgcagactttctacctgctcaggatctgcgactacaaggctgcctcacagcacgtagagaggttggatacagctgtgaagagtgagatgcagagaggacgccaaattacggcgcttgctaatgatctcagcacactggagaggacactagggcagtctgggctgaaggagcgggagatgctggcattatcgcacaagcaaaggcagctcaagggtcagctgcgagcattgtgtggctatgactcattgaatgatgtgttggattatggggataagctgcttttggcaccaccgctgatgcatggggagtggctcccacggacggcggtgtttgtgctcgtagatctcatggttgttatggtaggtcgcccgaaagggatatttaaggagtgcgggaagagaataaattcaggactccggctcatccatgatgaacttgtgaagcttggcattgtggatggtgtgatgggtatttatttcttataagtcctgttactcttttttagcatcacaactaggggtggtaatgggctctaaaatctacactacaaaatttaaagacccgatcgtatcaggatcgggctctatttctatacatttttgaattaaaattaattaagggctcaaacgaatcttgaaggaacatttgaatcgtgatccattaccacccacaatcacaactgtatgaattccctaatgcatcaccttgatgggtttctaatatccttgttattatttatggatcccaccctttatttcctttttgtgacgtaatgtgagctctgtatggttcatgagagctatttttttcaattcgtttgtttctctagtcttttatacgctatatgaactgaactggactagtaagtactacttctgttttatagaatataggaccatgttgcacttttcacacaaattaagtcctaaaaagaaaacaagaaaacatctacccttattggttagatcattggtagtagtggtagtgtggtaccattagtaaggatggattatggaataagataaacaaccttattaacgacatcaaccttgattttcgtactggcttaaaaacaagccaagatgggaaaggagccctgtaaatatcgaaggaatatgaatgagcaaatatgcatagaaatatatcagtcaaatgaagcataatttcatatggttgcccatttggcggcctgcatttattctacttgctaactggtgaacactaggtcagaaaatcagtaattaatacacagtttttgccattttatatgcatccatagttacatagccattgttttttttcctcaaacgacgtaggagagcggtgtatcattttattaaaataaaaatagaggaccatgtctttgattttcttcctcatgaaaccttatacttagttctttagttaaaaactgacagaaggaatggatccaacccattgttttatttcttttaattttgtaccttacagaaagaatggatttaaccaatttagtcctaacttgtgcacttttcctgtttcttcattttatatgacttgagtgtagtccgatttattttcattattcaactaccattgctacacagaggcagatttggaacactcaacaatatggacagcagggctgtacttgatccttttacttcagtttctggaaaacaaagttgctgtggaacttacaaggtcagaatttgttgaagcccaagaggctttagctcagatgaaaaactggtttactcgcttccccacaattcttcaaggttgcgaaagtatcattgaaaatttaaggggacaatatgcacattctgttggctgcttcgatgaagcagctttccactttcttgaagcaaaaaaggccaagcctgttaatatttgtttgcctgtaatggtctcagctgacagagagtaaatcaatgcaatcgatgtgtgaaacctatgcagctgtgtcatatatttgtaagggtgatgcagagtcgtcttcacaggcactagaactggttggtcctgcctatagaacaatggactcatttgttggtgtgcgagagaaaacctgtatcatttttgtttatggactattacttatgagacagcataatccgcaggaagcacggaaccgccttgcaagtggtttgaaaatagcgcaccaacagttgggtaacatccagttagtttctcagtatttgacaatactgggcacattggcgcttcagctacatgacgcagcacaggctaaagagatcctgaagtcttcgttgaccttagctaagacgctatttgatattccaacccaaatctggatcttgtcagtatttacagagttatatcgtgaactggaagagaaggaaaatgaaatggagaactctgagtacgaaggaaagaaggaagacgatctgcagagaagactttctgaagcttattctcattcttttcaccatgagctggtggaaaaatcaagaatccagccgctgcacatgtcaagtaagcagccagagatggctgttccatcagctaatggtgatcttgacatcccagaatcagtggggctttccgctccccagccattcctcaaaagacttgttgaggccgagccgatgaggcgcagtaccaggaggcggcggtagtaatgaaactagtactgtaattaatagcgtagtgaatttgttggttaagtgttgttatgacttgtaacttttagcagtttaggtttttattttcttttgtttgttgtgttgattatgtgtatcttggtttagaatttatagatttggagaactgttggattgacaacattctgagtggtaaaataccaattattccactgtgttgggacggcgtgttacacctgcatctccaccatcagcacctgagggtcttcgttcggctcgcgtgcaaggg

SEQ ID NO: 44860 - DNA, 2600 bp, Zea Mays
ctgcgacctgaccaacagacgaccccgttgaacccgccgccgccccgcccgcttgtttccccattcccttcctccttccgcagcaagctccagcctcccaaagcccccactcccccaatagaccatgccggccgctgcgctctagccgaccgccgcccctcccttccccctcctcgccgccatgtccatcgccgccgtgtccgcggatgggctcctcgcgttggccgacgaggctgagcgccggtatgacttttccgccgcggccgcttgcctcgagtccgcgctgcgtccgccctacgccgcagctctcctcccactcaccgaagcccgcgcgcggctccgcctcgcttcgctcctcctcgcgccccgcgggtcctcccgcgtcccgcgcgccggcgctcccgccgccgccaagacgcacctcgagcgcgcgctgctcatcctctcccctctcccctccgcgccaccgcggctcaagctgttggcccactcccacctcgcgggcgcctatgctgtcctgggggcgatcgcgtcgcagaagcacgtgctccaccgcggcctcggcctcctggattcggcttccgcctcggggctcctccagcgcgagccagcgcttctatggacttgcaacttccaggcgcagctcgggtccgttttcaccaatgacggggacgccgcgtcagcgctgtccgcactgtccgtgggagcatccgccgccgccgagctcgggagcccccagctcgagctcttcttcgccgcctccgagctccacgtccacctcctctgctgggaggacagcgctgccgttgagaacgctgtcactcgtgcctcgctgctctgggacgcactcacagccgagcagatggagcactgggttggactcttcttctacacgcagctgctgcagactttctacctgctcaggatctgcgactacaaggctgcctcacagcacgtagagaggttggatacagctgtgaagagtgagatgcagagaggacgccaaattacggcgcttgctaatgatctcagcacactggagaggacactagggcagtctgggctgaaggagcgggagatgctggcattatcgcacaagcaaaggcagctcaagggtcagctgcgagcattgtgtggctatgactcattgaatgatgtgttggattatggggataagctgcttttggcaccaccgctgatgcatggggagtggctcccacggacggcggtgtttgtgctcgtagatctcatggttgttatggtaggtcgcccgaaagggatatttaaggagtgcgggaagagaataaattcaggactccggctcatccatgaggcagatttggaacactcaacaatatggacagcagggctgtacttgatccttttacttcagtttctggaaaacaaagttgctgtggaacttacaaggtcagaatttgttgaagcccaagaggctttagctcagatgaaaaactggtttactcgcttccccacaattcttcaaggttgcgaaagtatcattgaaaatttaaggggacaatatgcacattctgttggctgcttcgatgaagcagctttccactttcttgaagcaaaaaagctgacagagagtaaatcaatgcaatcgatgtgtgaaacctatgcagctgtgtcatatatttgtaagggtgatgcagagtcgtcttcacaggcactagaactggttggtcctgcctatagaacaatggactcatttgttggtgtgcgagagaaaacctgtatcatttttgtttatggactattacttatgagacagcataatccgcaggaagcacggaaccgccttgcaagtggtttgaaaatagcgcaccaacagttgggtaacatccagttagtttctcagtatttgacaatactgggcacattggcgcttcagctacatgacgcagcacaggctaaagagatcctgaagtcttcgttgaccttagctaagacgctatttgatattccaacccaaatctggatcttgtcagtatttacagagttatatcgtgaactggaagagaaggaaaatgaaatggagaactctgagtacgaaggaaagaaggaagacgatctgcagagaagactttctgaagcttattctcattcttttcaccatgagctggtggaaaaatcaagaatccagccgctgcacatgtcaagtaagcagccagagatggctgttccatcagctaatggtgatcttgacatcccagaatcagtggggctttccgctccccagccattcctcaaaagacttgttgaggccgagccgatgaggcgcagtaccaggaggcggcggtagtaatgaaactagtactgtaattaatagcgtagtgaatttgttggttaagtgttgttatgacttgtaacttttagcagtttaggtttttattttcttttgtttgttgtgttgattatgtgtatcttggtttagaatttatagatttggagaactgttggattgacaacattctgagtggtaaaataccaattattccactgtgttgggacggcgtgttacacctgcatctccaccatcagcacctgagggtcttcgttcggctcgcgtgcaaggg

SEQ ID NO: 44861 - DNA, 1594 bp, Zea Mays
gccgtgcaatatctgcggattgcagctgcatccactgcgcgccgcgcgtttttttttctctcctcctcgacaacgagaagtcgagaacacacacgcacatacggaacggaagctactagcccgcagccttcttcagtctcccgtcttcttctggtgcccaacacatcctcattctcagggtcgccctctcgattctccctcaagtccagtccagccggatcagtccccttcccctcctccacaaggtgccgcctcccgcagatccgaattggaatctgggccttcgtctccgcaccaccaatccgggaagggaagggaagtgatgggggagtgcgaggacggcaaggagtacaggtgctgggaggagctgctgccggacgcgctggggctcatcttccgcaacctgccgctccaggaggtgctcaccgtcctgccgcgggtgtgcaagtcctgggggcgggtggtcgccggcccctactgctggcaggagatcgacatcgaggagtggagccagcagcaaagcaagccggagcagatcggccgcatggtggagctgctcgtcggccgcagcggcggctcgtgccgccggatcagcgtctccgggctgccctgcgatccgctcttctcgttcatcgcagacaatgcgcgagctcttgggaccttggagatccccaggagtgagatcagcgactccgtagtggaagccgtggcgccgcggctatcgaacgtgacgttcctagacatcagcagctgcacgaagatcggggcccgcgcgctggaggcgttcggcaggcactgcaggtccctggtggggctccggcgggtgatgcacccgatcgacctggcggacaaggtgtgccagcacgacgaggcgcacgccatcgcgcgcagcatgccgaggctgcggcacctggagatggggtacatgctggtggcgacggaggcggtgctggagatcctggagcagtgcagcgagctcaagttcctggacctgcgcggctgctgggccgtggacgaccggttcctgcgggagcgccacccggggctgcgcgtcctgggcccgcgcgtcgtcgacgactgctacgagaacagctactgggaggagtgctccgactactactcggacgaggacgaggactacgacgacgacgtcgtctcgtgggggttgttcgtggacgacgacgacgactactactacgccgtcggcagcgacgacgacgaggctatctgggacgacgcgcagggcctggagaacctcgaggtgaggttctacggcggtggcggcttcggcgagagcttcgccggcttcgactggccgccgtcgccgtgacgcgtggcccgcgagagccgccgctgcgcttgcgttgcgcggaccgttttcggctcttgcttatataccgcgtgcgtgcctgagtcgttgtttgttgttcgtccccaagctttgcttgcagatgtaagctttcaatctttaagctctagcttgcagatatgtgaagtggactgctagtagtacactctagctgtaaactccggtgtttacctgaagcaaaccagcatgcaccggtgagatttcaccggcgccatccccatccta

SEQ ID NO: 44862 - DNA, 1937 bp, Zea Mays
gccgtgcaatatctgcggattgcagctgcatccactgcgcgccgcgcgtttttttttctctcctcctcgacaacgagaagtcgagaacacacacgcacatacggaacggaagctactagcccgcagccttcttcagtctcccgtcttcttctggtgcccaacacatcctcattctcagggtcgccctctcgattctccctcaagtccagtccagccggatcagtccccttcccctcctccacaaggtgccgcctcccgcagatccgaattggaatctgggccttcgtctccgcaccaccaatccggtaaatatacgcgggcaataaaaatccctccctcccccccgaaccgtaatgatagatagctgcttgcctgctccggagtttcttccgctgttctctctcgcgcaaatttttatgctgggcaaagacggtgttcttcagcttcgacccccaaaaagggcgaagctttcgcgtccttccccacacacacaaattacctgggagccgtagcttctgtttggtgcggccacggggtggaagaaatggtttgctcgcagggcacacaaagccatttttactgctggaagactgccgcttttagtatctctgggctctggctcttgagtgatctccaaggaaagggaagggaagggaagggaagtgatgggggagtgcgaggacggcaaggagtacaggtgctgggaggagctgctgccggacgcgctggggctcatcttccgcaacctgccgctccaggaggtgctcaccgtcctgccgcgggtgtgcaagtcctgggggcgggtggtcgccggcccctactgctggcaggagatcgacatcgaggagtggagccagcagcaaagcaagccggagcagatcggccgcatggtggagctgctcgtcggccgcagcggcggctcgtgccgccggatcagcgtctccgggctgccctgcgatccgctcttctcgttcatcgcagacaatgcgcgagctcttgggaccttggagatccccaggagtgagatcagcgactccgtagtggaagccgtggcgccgcggctatcgaacgtgacgttcctagacatcagcagctgcacgaagatcggggcccgcgcgctggaggcgttcggcaggcactgcaggtccctggtggggctccggcgggtgatgcacccgatcgacctggcggacaaggtgtgccagcacgacgaggcgcacgccatcgcgcgcagcatgccgaggctgcggcacctggagatggggtacatgctggtggcgacggaggcggtgctggagatcctggagcagtgcagcgagctcaagttcctggacctgcgcggctgctgggccgtggacgaccggttcctgcgggagcgccacccggggctgcgcgtcctgggcccgcgcgtcgtcgacgactgctacgagaacagctactgggaggagtgctccgactactactcggacgaggacgaggactacgacgacgacgtcgtctcgtgggggttgttcgtggacgacgacgacgactactactacgccgtcggcagcgacgacgacgaggctatctgggacgacgcgcagggcctggagaacctcgaggtgaggttctacggcggtggcggcttcggcgagagcttcgccggcttcgactggccgccgtcgccgtgacgcgtggcccgcgagagccgccgctgcgcttgcgttgcgcggaccgttttcggctcttgcttatataccgcgtgcgtgcctgagtcgttgtttgttgttcgtccccaagctttgcttgcagatgtaagctttcaatctttaagctctagcttgcagatatgtgaagtggactgctagtagtacactctagctgtaaactccggtgtttacctgaagcaaaccagcatgcaccggtgagatttcaccggcgccatccccatccta

SEQ ID NO: 44863 - DNA, 1695 bp, Zea Mays
gccgtgcaatatctgcggattgcagctgcatccactgcgcgccgcgcgtttttttttctctcctcctcgacaacgagaagtcgagaacacacacgcacatacggaacggaagctactagcccgcagccttcttcagtctcccgtcttcttctggtgcccaacacatcctcattctcagggtcgccctctcgattctccctcaagtccagtccagccggatcagtccccttcccctcctccacaaggtgccgcctcccgcagatccgaattggaatctgggccttcgtctccgcaccaccaatccggtttgctcgcagggcacacaaagccatttttactgctggaagactgccgcttttagtatctctgggctctggctcttgagtgatctccaaggaaagggaagggaagggaagggaagtgatgggggagtgcgaggacggcaaggagtacaggtgctgggaggagctgctgccggacgcgctggggctcatcttccgcaacctgccgctccaggaggtgctcaccgtcctgccgcgggtgtgcaagtcctgggggcgggtggtcgccggcccctactgctggcaggagatcgacatcgaggagtggagccagcagcaaagcaagccggagcagatcggccgcatggtggagctgctcgtcggccgcagcggcggctcgtgccgccggatcagcgtctccgggctgccctgcgatccgctcttctcgttcatcgcagacaatgcgcgagctcttgggaccttggagatccccaggagtgagatcagcgactccgtagtggaagccgtggcgccgcggctatcgaacgtgacgttcctagacatcagcagctgcacgaagatcggggcccgcgcgctggaggcgttcggcaggcactgcaggtccctggtggggctccggcgggtgatgcacccgatcgacctggcggacaaggtgtgccagcacgacgaggcgcacgccatcgcgcgcagcatgccgaggctgcggcacctggagatggggtacatgctggtggcgacggaggcggtgctggagatcctggagcagtgcagcgagctcaagttcctggacctgcgcggctgctgggccgtggacgaccggttcctgcgggagcgccacccggggctgcgcgtcctgggcccgcgcgtcgtcgacgactgctacgagaacagctactgggaggagtgctccgactactactcggacgaggacgaggactacgacgacgacgtcgtctcgtgggggttgttcgtggacgacgacgacgactactactacgccgtcggcagcgacgacgacgaggctatctgggacgacgcgcagggcctggagaacctcgaggtgaggttctacggcggtggcggcttcggcgagagcttcgccggcttcgactggccgccgtcgccgtgacgcgtggcccgcgagagccgccgctgcgcttgcgttgcgcggaccgttttcggctcttgcttatataccgcgtgcgtgcctgagtcgttgtttgttgttcgtccccaagctttgcttgcagatgtaagctttcaatctttaagctctagcttgcagatatgtgaagtggactgctagtagtacactctagctgtaaactccggtgtttacctgaagcaaaccagcatgcaccggtgagatttcaccggcgccatccccatccta

SEQ ID NO: 44864 - DNA, 3510 bp, Zea Mays
aggaggttgaggtggtgggtctccacggagcgagattatcagatgccgcggcggcctttgaggaggtagtggctgtgtggtcgtgtggagcgaacaactggcagcggcggcgggactggtggaggcagccctgttttttcagcaggctcgatgactcgcccatgttcaggaagcaggtgcaccttgtgttgttaggctatactgatacatacaaacatgtgtcgaactttggccggccctttgctgtgtttcttcttttgccaattctctatgaagatatgcaaggatgtggtgtctgcaatcacctctctctctttctttgtgctgaccataataagctactcccaggatggagtcactttgcgcaatttacaatagctctaattaataaagaccctaagaaatctaagtattcggaaagagcatgattgggggtggaaaaagtttatggagctgtcagaattacatcgatggctttattgcacaggatgttcttaccatcaaagccaaacttcaagtcattagggagaagatagaccgtccatttcgttgccttgatggccagtaccgaagggaactaattagggtgtatctatcaaatgtggaacaaatttatcggcgttttattgatgaaaaaagaaggacgttcagcaggctgattgaggataaactcgggtggtccaggccttttgcagtttcagtggattttggcgagccatttttcatctttgattttatctgaacagagacttgaactcgctatcaactttcagtagacctactaaggagcgatctccgtccaattatctgccaatgaatttatgcattgtaccatgaacagagatagtcaagaaattagactatttcaagttcagcgagagggactatatggcactggaggcgtctttcttagagattgcgatctcaacatatatttggatgcctaaatgtttagttagaaatttacaccatttctaataattctacagtgattgaaaatacaatctacctcaaaactaataacatcgttagagggaggaagagcagcttgtgtattggtggagagaggatccttggttgaaagtgatgtttctccatatctttataaggttaaggaagagcagttggggttcctgtgaaacatggattgtatgaggtctataatttttttatgctctatcattacttgaatgaatcatgtatcactggcaagcaacttcagctcatactatgtaggaattctaattcacattgcattctatttaattgtttgttttatgttccgttcacacgaccatgatttttgtttgcacaaatcactatatatatcctcgttgaattaaaagtctagctttgtgtcataagcatattgtctatttccccttttggctattgcaaatagcaagtatggtttgttgtttaaatgttagtctattctgtttcaagaaaaaaaagaatgcgccatcgctggggatgggtatgatgatcaagatcgtcgaacgacgaagggcaccaaggtgttcgttggcgggctgccaatgtcggccacagaaagcatgctcctctctcatcttcgcaccatgcagtagctgctgcccatagcatgtaatgcaatggaataagttatcaaggcaactaacaccgaacatagtaagaaaagaaaccaaacgtgaatatgtctcattttgtgttattggtctccctgggattctcgctcttattggtcacagtggcgggttcttgggctccttggcagcgtcgaggcacggtatctgcccacgccgttgtcggggcctcccgcgggtacccatgctcgacctacttcattgaaggtaaaactttgactatttgggatctccatttcattattcagatatgctcaattctgaactagaacagatgcataataacttttagaaaccagaacaatttcaagacatttcatcattctacttttttctatagcaccagcttattgagacttctgtcttagatgtggtatggacaaatatacatgccactttctagatgaagtgaagagaccaaatgtggatgtcaatcaatctctagatgaaggaatgaaaggaaggagctaagttattgcactggatgtacagggtctagaaaagatggcaagattgaatgaagggctgtcattatttgatgcaatactgattgttccaatgtttcaaattacttggaccttcttctctatttgtataggatttgtttactttcaagaatatcaagtatttgatacactcaggataattatgtttgtgttaggcatgacatttgtctttgttgggatctccttgctagcacccgatgatagtaaagaaatggaaagatgctgatggaggagacagacacagatgatagcatctcttttgttacttctgtaaaatctgcatgctccatgtcccttggccttggggagagcaccataagcgcttcatcggtgcttgccatgcctatggtctcgtcaagaacaaccggcttcagaggaatcgaaaatgaccgtccaaaaattttaaaaatgatgcacactattgcatctcacacttctgaaaatcgaatgactgcatcggcagttgctacctgtatggcgcctcttctgttgcgtccacttctagctggtgaatctgagatggatgaagtatttgatatggatggtgacgattctgcgcagcttcttgctgcagcaaacgcagcaaacagtgctcaaggaattgtcgcaactctcttggaggaatatgagggcatttttcatgatgaacacctcagatgttccttgtcacctgaatctcaaattgaagatagtggtattgaagcatcaactgttgatggtaatttggaagccaagggcaatggatttcatgatgtagatcaagaattggatgatgacaatggcgtggagcgtatacttagtgggaaattgagtgagagcagtggatatgctggcagtgacctctatgactacaagaatggcaatatcatgattgatgaaaagaccaacgtgctgaccatcattaaaatggccatcggtgtccctaaaaagcggaacgacaaatggatggctaatcagcttttgaagctacatctggagtaaaaagctttgaaggatgctcatcttcagtttatgcgctactatttgttgactgacatggacttgcaaaagcgcacttaatacttgtcagttttggatccatttgttgcattggtcgatgtcttcggcgaaacaatctcagttagggatatttccttctgatttgttagtgttcaacattataagaagtggtttattagttttgttcagatttttgtaattatttatgacatagtaaccttcatcaatcatacatgcatgtcatcgcttcgttcaactacacaacgtgcatctgttaagttctgtaagttttgaatgtgcacatcataaattgatcattgtcttatcttattgtgagcttgacagttttgaatgtgcagattaatgcacttttgtttcct

SEQ ID NO: 44865 - DNA, 3315 bp, Zea Mays
gtcggttctccggagaggaggtggaggaggttgaggtggtgggtctccacggagcgagattatcagatgccgcggcggcctttgaggaggtagtggctgtgtggtcgtgtggagcgaacaactggcagcggcggcgggactggtggaggcagccctgttttttcagcaggctcgatgactcgcccatgttcaggaagcaggtgcaccttgtgttgttaggctatactgatacatacaaacatgtgtcgaactttggccggccctttgctgtgtttcttcttttgccaattctctatgaagatatgcaaggatgtggtgtctgcaatcacctctctctctttctttgtgctgaccataataagctactcccaggatggagtcactttgcgcaatttacaatagctctaattaataaagaccctaagaaatctaagtattcggagcatgattgggggtggaaaaagtttatggagctgtcagaattacatcgatggctttattgcacaggatgttcttaccatcaaagccaaacttcaagtcattagggagaagatagaccgtccatttcgttgccttgatggccagtaccgaagggaactaattagggtgtatctatcaaatgtggaacaaatttatcggcgttttattgatgaaaaaagaaggacgttcagcaggctgattgaggataaactcgggtggtccagagacttgaactcgctatcaactttcagtagacctactaaggagcgatctccgtccaattatctgccaatgaatttatgcattgagggaggaagagcagcttgtgtattggtggagagaggatccttggttgaaagtgatgtttctccatatctttataaggttaaggaagagcagttggggttcctgtgaaacatggattgtatgaggtctataatttttttatgctctatcattacttgaatgaatcatgtatcactggcaagcaacttcagctcatactatgtaggaattctaattcacattgcattctatttaattgtttgttttatgttccgttcacacgaccatgatttttgtttgcacaaatcactatatatatcctcgttgaattaaaagtctagctttgtgtcataagcatattgtctatttccccttttggctattgcaaatagcaagtatggtttgttgtttaaatgttagtctattctgtttcaagaaaaaaaagaatgcgccatcgctggggatgggtatgatgatcaagtggcgggttcttgggctccttggcagcgtcgaggcacggtatctgcccacgccgttgtcggggcctcccgcgggtacccatgctcgacctacttcattgaaggtaaaactttgactatttgggatctccatttcattattcagatatgctcaattctgaactagaacagatgcataataacttttagaaaccagaacaatttcaagacatttcatcattctacttttttctatagcaccagcttattgagacttctgtcttagatgtggtatggacaaatatacatgccactttctagatgaagtgaagagaccaaatgtggatgtcaatcaatctctagatgaaggaatgaaaggaaggagctaagttattgcactggatgtacagggtctagaaaagatggcaagattgaatgaagggctgtcattatttgatgcaatactgattgttccaatgtttcaaattacttggaccttcttctctatttgtataggatttgtttactttcaagaatatcaagtatttgatacactcaggataattatgtttgtgttaggcatgacatttgtctttgttgggatctccttgctagcacccgatgatagtaaaggtgatacgaaagatggttcaagcaccgccgaggactccataattgacatagacatgttctattccacgaacttgtagaaagtttcaagatttgctctattgcattttgtgttcagtattgcattcagtgttttgatatataatctagacactgcagaaatggaaagatgctgatggaggagacagacacagatgatagcatctcttttgttacttctgtaaaagtaaatgcaaaacgtgtactttcaaaggcaaaggtcatttttgtttcttcctagatctgattgtaccatataaatctgtcacaagtcttgcctctctcacctgatcttatttgtagtctgcatgctccatgtcccttggccttggggagagcaccataagcgcttcatcggtgcttgccatgcctatggtctcgtcaagaacaaccggcttcagaggaatcgaaaatgaccgtccaaattgctacctgtatggcgcctcttctgttgcgtccacttctagctggtgaatctgagatggatgaagtatttgatatggatggtgacgattctgcgcagcttcttgctgcagcaaacgcagcaaacagtgctcaaggaattgtcgcaactctcttggaggaatatgagggcatttttcatgatgaacacctcagatgttccttgtcacctgaatctcaaattgaagatagtggtattgaagcatcaactgttgatggtaatttggaagccaagggcaatggatttcatgatgtagatcaagaattggatgatgacaatggcgtggagcgtatacttagtgggaaattgagtgagagcagtggatatgctggcagtgacctctatgactacaagtctcgagaaccagattactgcattggagaacaagtgctcaggtgattaccaatggattggtttctgtcacaatgatcttcagaatggcaatatcatgattgatgaaaagaccaacgtgctgaccatcattaaaatggccatcggtgtccctaaaaagcggaacgacaaatggatggctaatcagcttttgaagctacatctggagtaaaaagctttgaaggatgctcatcttcagtttatgcgctactatttgttgactgacatggacttgcaaaagcgcacttaatacttgtcagttttggatccatttgttgcattggtcgatgtcttcggcgaaacaatctcagttagggatatttccttctgatttgttagtgttcaacattataagaagtggtttattagttttgttcagatttttgtaattatttatgacatagtaaccttcatcaatcatacatgcatgtcatcgcttcgttcaactacacaacgtgcatctgttaagttctgtaagttttgaatgtgcacatcataaattgatcattgtcttatcttattgtgagcttgacagttttgaatgtgcagattaatgcacttttgtttcct

SEQ ID NO: 44866 - DNA, 3509 bp, Zea Mays
cgattcccggctgctgcctagggttttggtgccagcgcggtcggagggttgtgcctgtgggtcgcgttcccagtgtcgcgcgcggcggcagaaggtggagggagtgtcggttctccggagaggaggtggaggaggttgaggtggtgggtctccacggagcgagattatcagatgccgcggcggcctttgaggaggtagtggctgtgtggtcgtgtggagcgaacaactggcagcggcggcgggactggtggaggcagccctgttttttcagcaggctcgatgactcgcccatgttcaggaagcaggtgcaccttgtgttgttaggctatactgatacatacaaacatgtgtcgaactttggccggccctttgctgtgtttcttcttttgccaattctctatgaagatatgcaaggatgtggtgtctgcaatcacctctctctctttctttgtgctgaccataataagctactcccaggatggagtcactttgcgcaatttacaatagctctaattaataaagaccctaagaaatctaagtattcggaaagagcatgattgggggtggaaaaagtttatggagctgtcagaattacatcgatggctttattgcacaggatgttcttaccatcaaagccaaacttcaagtcattagggagaagatagaccgtccatttcgttgccttgatggccagtaccgaagggaactaattagggtgtatctatcaaatgtggaacaaatttatcggcgttttattgatgaaaaaagaaggacgttcagcaggctgattgaggataaactcgggtggtccaggccttttgcagtttcagtggattttggcgagccatttttcatctttgattttatctgaacagagacttgaactcgctatcaactttcagtagacctactaaggagcgatctccgtccaattatctgccaatgaatttatgcattgagggaggaagagcagcttgtgtattggtggagagaggatccttggttgaaagtgatgtttctccatatctttataaggttaaggaagagcagttggggttcctgtgaaacatggattgtatgaggtctataatttttttatgctctatcattacttgaatgaatcatgtatcactggcaagcaacttcagctcatactatgtaggaattctaattcacattgcattctatttaattgtttgttttatgttccgttcacacgaccatgatttttgtttgcacaaatcactatatatatcctcgttgaattaaaagtctagctttgtgtcataagcatattgtctatttccccttttggctattgcaaatagcaagtatggtttgttgtttaaatgttagtctattctgtttcaagaaaaaaaagaatgcgccatcgctggggatgggtatgatgatcaagatcgtcgaacgacgaagggcaccaaggtgttcgttggcgggctgccaatgtcggccacagaaagcatgctcctctctcatcttcgcaccatgcagtagctgctgcccatagcatgtaatgcaatggaataagttatcaaggcaactaacaccgaacatagtaagaaaagaaaccaaacgtgaatatgtctcattttgtgttattggtctccctgggattctcgctcttattggtcacagtggcgggttcttgggctccttggcagcgtcgaggcacggtatctgcccacgccgttgtcggggcctcccgcgggtacccatgctcgacctacttcattgaagcaccagcttattgagacttctgtcttagatgtggtatggacaaatatacatgccactttctagatgaagtgaagagaccaaatgtggatgtcaatcaatctctagatgaaggaatgaaaggaaggagctaagttattgcactggatgtacagggtctagaaaagatggcaagattgaatgaagggctgtcattatttgatgcaatactgattgttccaatgtttcaaattacttggaccttcttctctatttgtataggatttgtttactttcaagaatatcaagtatttgatacactcaggataattatgtttgtgttaggcatgacatttgtctttgttgggatctccttgctagcacccgatgatagtaaaggtgatacgaaagatggttcaagcaccgccgaggactccataattgacatagacatgttctattccacgaacttgtagaaagtttcaagatttgctctattgcattttgtgttcagtattgcattcagtgttttgatatataatctagacactgcagaaatggaaagatgctgatggaggagacagacacagatgatagcatctcttttgttacttctgtaaaagtaaatgcaaaacgtgtactttcaaaggcaaagtctgcatgctccatgtcccttggccttggggagagcaccataagcgcttcatcggtgcttgccatgcctatggtctcgtcaagaacaaccggcttcagaggaatcgaaaatgaccgtccaaattgctacctgtatggcgcctcttctgttgcgtccacttctagctggtgaatctgagatggatgaagtatttgatatggatggtgacgattctgcgcagcttcttgctgcagcaaacgcagcaaacagtgctcaaggaattgtcgcaactctcttggaggaatatgagggcatttttcatgatgaacacctcagatgttccttgtcacctgaatctcaaattgaagatagtggtattgaagcatcaactgttgatggtaatttggaagccaagggcaatggatttcatgatgtagatcaagaattggatgatgacaatggcgtggagcgtatacttagtgggaaattgagtgagagcagtggatatgctggcagtgacctctatgactacaagtctcgagaaccagattactgcattggagaacaagtgctcaggtgattaccaatggattggtttctgtcacaatgatcttcagaatggcaatatcatgattgatgaaaagaccaacgtgctgaccatcattaaaatggccatcggtgtccctaaaaagcggaacgacaaatggatggctaatcagcttttgaagctacatctggagtaaaaagctttgaaggatgctcatcttcagtttatgcgctactatttgttgactgacatggacttgcaaaagcgcacttaatacttgtcagttttggatccatttgttgcattggtcgatgtcttcggcgaaacaatctcagttagggatatttccttctgatttgttagtgttcaacattataagaagtggtttattagttttgttcagatttttgtaattatttatgacatagtaaccttcatcaatcatacatgcatgtcatcgcttcgttcaactacacaacgtgcatctgttaagttctgtaagttttgaatgtgcacatcataaattgatcattgtcttatcttattgtgagcttgacagttttgaatgtgcagattaatgcacttttgtttcct

SEQ ID NO: 44867 - DNA, 3156 bp, Zea Mays
cgattcccggctgctgcctagggttttggtgccagcgcggtcggagggttgtgcctgtgggtcgcgttcccagtgtcgcgcgcggcggcagaaggtggagggagtgtcggttctccggagaggaggtggaggaggttgaggtggtgggtctccacggagcgagattatcagatgccgcggcggcctttgaggaggtagtggctgtgtggtcgtgtggagcgaacaactggcagcggcggcgggactggtggaggcagccctgttttttcagcaggctcgatgactcgcccatgttcaggaagcaggtgcaccttgtgttgttaggctatactgatacatacaaacatgtgtcgaactttggccggccctttgctgtgtttcttcttttgccaattctctatgaagatatgcaaggatgtggtgtctgcaatcacctctctctctttctttgtgctgaccataataagctactcccaggatggagtcactttgcgcaatttacaatagctctaattaataaagaccctaagaaatctaagtattcggaaagagcatgattgggggtggaaaaagtttatggagctgtcagaattacatcgatggctttattgcacaggatgttcttaccatcaaagccaaacttcaagtcattagaagatagaccgtccatttcgttgccttgatggccagtaccgaagggaactaattagggtgtatctatcaaatgtggaacaaatttatcggcgttttattgatgaaaaaagaaggacgttcagcaggctgattgaggataaactcgggtggtccagagacttgaactcgctatcaactttcagtagacctactaaggagcgatctccgtccaattatctgccaatgaatttatgcattgagggaggaagagcagcttgtgtattggtggagagaggatccttggttgaaagtgatgtttctccatatctttataaggttaaggaagagcagttggggttcctgtgaaacatggattgtatgaggtctataatttttttatgctctatcattacttgaatgaatcatgtatcactggcaagcaacttcagctcatactatgtaggaattctaattcacattgcattctatttaattgtttgttttatgttccgttcacacgaccatgatttttgtttgcacaaatcactatatatatcctcgttgaattaaaagtctagctttgtgtcataagcatattgtctatttccccttttggctattgcaaatagcaagtatggtttgttgtttaaatgttagtctattctgtttcaagaaaaaaaagaatgcgccatcgctggggatgggtatgatgatcaagatcgtcgaacgacgaagggcaccaaggtgttcgttggcgggctgccaatgtcggccacagaaagcatgctcctctctcatcttcgcaccatgcagtagctgctgcccatagcatgtaatgcaatggaataagttatcaaggcaactaacaccgaacatacgtcgaggcacggtatctgcccacgccgttgtcggggcctcccgcgggtacccatgctcgacctacttcattgaagatggcaagattgaatgaagggctgtcattatttgatgcaatactgattgttccaatgtttcaaattacttggaccttcttctctatttgtataggatttgtttactttcaagaatatcaagtatttgatacactcaggataattatgtttgtgttaggcatgacatttgtctttgttgggatctccttgctagcacccgatgatagtaaaggtgatacgaaagatggttcaagcaccgccgaggactccataattgacatagacatgttctattccacgaacttgtagaaagtttcaagatttgctctattgcattttgtgttcagtattgcattcagtgttttgatatataatctagacactgcagaaatggaaagatgctgatggaggagacagacacagatgatagcatctcttttgttacttctgtaaaagtaaatgcaaaacgtgtactttcaaaggcaaagtctgcatgctccatgtcccttggccttggggagagcaccataagcgcttcatcggtgcttgccatgcctatggtctcgtcaagaacaaccggcttcagaggaatcgaaaatgaccgtccaaaaattttaaaaatgatgcacactattgcatctcacacttctgaaaatcgaatgactgcatcggcagttgctacctgtatggcgcctcttctgttgcgtccacttctagctggtgaatctgagatggatgaagtatttgatatggatggtgacgattctgcgcagcttcttgctgcagcaaacgcagcaaacagtgctcaaggaattgtcgcaactctcttggaggaatatgagggcatttttcatgatgaacacctcagatgttccttgtcacctgaatctcaaattgaagatagtggtattgaagcatcaactgttgatggtaatttggaagccaagggcaatggatttcatgatgtagatcaagaattggatgatgacaatggcgtggagcgtatacttagtgggaaattgagtgagagcagtggatatgctggcagtgacctctatgactacaagaatggcaatatcatgattgatgaaaagaccaacgtgctgaccatcattaaaatggccatcggtgtccctaaaaagcggaacgacaaatggatggctaatcagcttttgaagctacatctggagtaaaaagctttgaaggatgctcatcttcagtttatgcgctactatttgttgactgacatggacttgcaaaagcgcacttaatacttgtcagttttggatccatttgttgcattggtcgatgtcttcggcgaaacaatctcagttagggatatttccttctgatttgttagtgttcaacattataagaagtggtttattagttttgttcagatttttgtaattatttatgacatagtaaccttcatcaatcatacatgcatgtcatcgcttcgttcaactacacaacgtgcatctgttaagttctgtaagttttgaatgtgcacatcataaattgatcattgtcttatcttattgtgagcttgacagttttgaatgtgcagattaatgcacttttgtttcct

SEQ ID NO: 44868 - DNA, 3906 bp, Zea Mays
gccatttcgccgattcccggctgctgcctagggttttggtgccagcgcggtcggagggttgtgcctgtgggtcgcgttcccagtgtcgcgcgcggcggcagaaggtggagggagtgtcggttctccggagaggaggtggaggaggttgaggtggtgggtctccacggagcgagattatcagatgccgcggcggcctttgaggaggtagtggctgtgtggtcgtgtggagcgaacaactggcagcggcggcgggactggtggaggcagccctgttttttcagcaggctcgatgactcgcccatgttcaggaagcaggtgcaccttgtgttgttaggctatactgatacatacaaacatgtgtcgaactttggccggccctttgctgtgtttcttcttttgccaattctctatgaagatatgcaaggatgtggtgtctgcaatcacctctctctctttctttgtgctgaccataataagctactcccaggatggagtcactttgcgcaatttacaatagctctaattaataaagaccctaagaaatctaagtattcggaaagagcatgattgggggtggaaaaagtttatggagctgtcagaattacatcgatggctttattgcacaggatgttcttaccatcaaagccaaacttcaagtcattagaaggacgttcagcaggctgattgaggataaactcgggtggtccaggccttttgcagtttcagtggattttggcgagccatttttcatctttgattttatctgaacagagacttgaactcgctatcaactttcagtagacctactaaggagcgatctccgtccaattatctgccaatgaatttatgcattgtaccatgaacagagatagtcaagaaattagactatttcaagttcagcgagagggactatatggcactggaggcgtctttcttagagattgcgatctcaacatatatttggatgcctaaatgtttagttagaaatttacaccatttctaataattctacagtgattgaaaatacaatctacctcaaaactaataacatcgttagagggaggaagagcagcttgtgtattggtggagagaggatccttggttgaaagtgatgtttctccatatctttataaggttaaggaagagcagttggggttcctgtgaaacatggattgtatgaggtctataatttttttatgctctatcattacttgaatgaatcatgtatcactggcaagcaacttcagctcatactatgtaggaattctaattcacattgcattctatttaattgtttgttttatgttccgttcacacgaccatgatttttgtttgcacaaatcactatatatatcctcgttgaattaaaagtctagctttgtgtcataagcatattgtctatttccccttttggctattgcaaatagcaagtatggtttgttgtttaaatgttagtctattctgtttcaagaaaaaaaagaatgcgccatcgctggggatgggtatgatgatcaaggtcagtgtttatcgagaaatgctgttttgttttttatggattgtggagagaattttatgccagtgaccccgagttttgtgtgatgtgtggctacgcgcagatcgtcgaacgacgaagggcaccaaggtgttcgttggcgggctgccaatgtcggccacagaaagcatgctcctctctcatcttcgcaccatgcagtagctgctgcccatagcatgtaatgcaatggaataagttatcaaggcaactaacaccgaacatagtaagaaaagaaaccaaacgtgaatatgtctcattttgtgttattggtctccctgggattctcgctcttattggtcacagtggcgggttcttgggctccttggcagcgtcgaggcacggtatctgcccacgccgttgtcggggcctcccgcgggtacccatgctcgacctacttcattgaaggtaaaactttgactatttgggatctccatttcattattcagatatgctcaattctgaactagaacagatgcataataacttttagaaaccagaacaatttcaagacatttcatcattctacttttttctatagcaccagcttattgagacttctgtcttagatgtggtatggacaaatatacatgccactttctagatgaagtgaagagaccaaatgtggatgtcaatcaatctctagatgaaggaatgaaaggaaggagctaagttattgcactggatgtacagggtctagaaaagatggcaagattgaatgaagggctgtcattatttgatgcaatactgattgttccaatgtttcaaattacttggaccttcttctctatttgtataggatttgtttactttcaagaatatcaagtatttgatacactcaggataattatgtttgtgttaggcatgacatttgtctttgttgggatctccttgctagcacccgatgatagtaaaggtgatacgaaagatggttcaagcaccgccgaggactccataattgacatagacatgttctattccacgaacttgtagaaagtttcaagatttgctctattgcattttgtgttcagtattgcattcagtgttttgatatataatctagacactgcagaaatggaaagatgctgatggaggagacagacacagatgatagcatctcttttgttacttctgtaaaagtaaatgcaaaacgtgtactttcaaaggcaaagtctgcatgctccatgtcccttggccttggggagagcaccataagcgcttcatcggtgcttgccatgcctatggtctcgtcaagaacaaccggcttcagaggaatcgaaaatgaccgtccaaaaattttaaaaatgatgcacactattgcatctcacacttctgaaaatcgaatgactgcatcggcagttgctacctgtatggcgcctcttctgttgcgtccacttctagctggtgaatctgagatggatgaagtatttgatatggatggtgacgattctgcgcagcttcttgctgcagcaaacgcagcaaacagtgctcaaggaattgtcgcaactctcttggaggaatatgagggcatttttcatgatgaacacctcagatgttccttgtcacctgaatctcaaattgaagatagtggtattgaagcatcaactgttgatggtaatttggaagccaagggcaatggatttcatgatgtagatcaagaattggatgatgacaatggcgtggagcgtatacttagtgggaaattgagtgagagcagtggatatgctggcagtgacctctatgactacaagtctcgagaaccagattactgcattggagaacaagtgctcaggtgattaccaatggattggtttctgtcacaatgatcttcagaatggcaatatcatgattgatgaaaagaccaacgtgctgaccatcattaaaatggccatcggtgtccctaaaaagcggaacgacaaatggatggctaatcagcttttgaagctacatctggagtaaaaagctttgaaggatgctcatcttcagtttatgcgctactatttgttgactgacatggacttgcaaaagcgcacttaatacttgtcagttttggatccatttgttgcattggtcgatgtcttcggcgaaacaatctcagttagggatatttccttctgatttgttagtgttcaacattataagaagtggtttattagttttgttcagatttttgtaattatttatgacatagtaaccttcatcaatcatacatgcatgtcatcgcttcgttcaactacacaacgtgcatctgttaagttctgtaagttttgaatgtgcacatcataaattgatcattgtcttatcttattgtgagcttgacagttttgaatgtgcagattaatgcacttttgtttcct

SEQ ID NO: 44869 - DNA, 3516 bp, Zea Mays
catccacgaccgcgccccccaagcgagtcgccgccatttcgccgattcccggctgctgcctagggttttggtgccagcgcggtcggagggttgtgcctgtgggtcgcgttcccagtgtcgcgcgcggcggcagaaggtggagggagtgtcggttctccggagaggaggtggaggaggttgaggtggtgggtctccacggagcgagattatcagatgccgcggcggcctttgaggaggtagtggctgtgtggtcgtgtggagcgaacaactggcagcggcggcgggactggtggaggcagccctgttttttcagcaggctcgatgactcgcccatgttcaggaagcaggatggagtcactttgcgcaatttacaatagctctaattaataaagaccctaagaaatctaagtattcggaaagagcatgattgggggtggaaaaagtttatggagctgtcagaattacatcgatggctttattgcacaggatgttcttaccatcaaagccaaacttcaagtcattagaagatagaccgtccatttcgttgccttgatggccagtaccgaagggaactaattagggtgtatctatcaaatgtggaacaaatttatcggcgttttattgatgaaaaaagaaggacgttcagcaggctgattgaggataaactcgggtggtccaggccttttgcagtttcagtggattttggcgagccatttttcatctttgattttatctgaacagagacttgaactcgctatcaactttcagtagacctactaaggagcgatctccgtccaattatctgccaatgaatttatgcattgagggaggaagagcagcttgtgtattggtggagagaggatccttggttgaaagtgatgtttctccatatctttataaggttaaggaagagcagttggggttcctgtgaaacatggattgtatgaggtctataatttttttatgctctatcattacttgaatgaatcatgtatcactggcaagcaacttcagctcatactatgtaggaattctaattcacattgcattctatttaattgtttgttttatgttccgttcacacgaccatgatttttgtttgcacaaatcactatatatatcctcgttgaattaaaagtctagctttgtgtcataagcatattgtctatttccccttttggctattgcaaatagcaagtatggtttgttgtttaaatgttagtctattctgtttcaagaaaaaaaagaatgcgccatcgctggggatgggtatgatgatcaagatcgtcgaacgacgaagggcaccaaggtgttcgttggcgggctgccaatgtcggccacagaaagcatgctcctctctcatcttcgcaccatgcagtagctgctgcccatagcatgtaatgcaatggaataagttatcaaggcaactaacaccgaacatagtaagaaaagaaaccaaacgtgaatatgtctcattttgtgttattggtctccctgggattctcgctcttattggtcacagtggcgggttcttgggctccttggcagcgtcgaggcacggtatctgcccacgccgttgtcggggcctcccgcgggtacccatgctcgacctacttcattgaaggtaaaactttgactatttgggatctccatttcattattcagatatgctcaattctgaactagaacagatgcataataacttttagaaaccagaacaatttcaagacatttcatcattctacttttttctatagcaccagcttattgagacttctgtcttagatgtggtatggacaaatatacatgccactttctagatgaagtgaagagaccaaatgtggatgtcaatcaatctctagatgaaggaatgaaaggaaggagctaagttattgcactggatgtacagggtctagaaaagatggcaagattgaatgaagggctgtcattatttgatgcaatactgattgttccaatgtttcaaattacttggaccttcttctctatttgtataggatttgtttactttcaagaatatcaagtatttgatacactcaggataattatgtttgtgttaggcatgacatttgtctttgttgggatctccttgctagcacccgatgatagtaaaggtgatacgaaagatggttcaagcaccgccgaggactccataattgacatagacatgttctattccacgaacttgtagaaagtttcaagatttgctctattgcattttgtgttcagtattgcattcagtgttttgatatataatctagacactgcagaaatggaaagatgctgatggaggagacagacacagatgatagcatctcttttgttacttctgtaaaagtaaatgcaaaacgtgtactttcaaaggcaaagtctgcatgctccatgtcccttggccttggggagagcaccataagcgcttcatcggtgcttgccatgcctatggtctcgtcaagaacaaccggcttcagaggaatcgaaaatgaccgtccaaattgctacctgtatggcgcctcttctgttgcgtccacttctagctggtgaatctgagatggatgaagtatttgatatggatggtgacgattctgcgcagcttcttgctgcagcaaacgcagcaaacagtgctcaaggaattgtcgcaactctcttggaggaatatgagggcatttttcatgatgaacacctcagatgttccttgtcacctgaatctcaaattgaagatagtggtattgaagcatcaactgttgatggtaatttggaagccaagggcaatggatttcatgatgtagatcaagaattggatgatgacaatggcgtggagcgtatacttagtgggaaattgagtgagagcagtggatatgctggcagtgacctctatgactacaagtctcgagaaccagattactgcattggagaacaagtgctcaggtgattaccaatggattggtttctgtcacaatgatcttcagaatggcaatatcatgattgatgaaaagaccaacgtgctgaccatcattttcttcagaaaatggccatcggtgtccctaaaaagcggaacgacaaatggatggctaatcagcttttgaagctacatctggagtaaaaagctttgaaggatgctcatcttcagtttatgcgctactatttgttgactgacatggacttgcaaaagcgcacttaatacttgtcagttttggatccatttgttgcattggtcgatgtcttcggcgaaacaatctcagttagggatatttccttctgatttgttagtgttcaacattataagaagtggtttattagttttgttcagatttttgtaattatttatgacatagtaaccttcatcaatcatacatgcatgtcatcgcttcgttcaactacacaacgtgcatctgttaagttctgtaagttttgaatgtgcacatcataaattgatcattgtcttatcttattgtgagcttgacagttttgaatgtgcagattaatgcacttttgtttcct

SEQ ID NO: 44870 - DNA, 3698 bp, Zea Mays
ccctccgctccatccacgaccgcgccccccaagcgagtcgccgccatttcgccgattcccggctgctgcctagggttttggtgccagcgcggtcggagggttgtgcctgtgggtcgcgttcccagtgtcgcgcgcggcggcagaaggtggagggagtgtcggttctccggagaggaggtggaggaggttgaggtggtgggtctccacggagcgagattatcagatgccgcggcggcctttgaggaggtagtggctgtgtggtcgtgtggagcgaacaactggcagcggcggcgggactggtggaggcagccctgttttttcagcaggctcgatgactcgcccatgttcaggaagcaggtgcaccttgtgttgttaggctatactgatacatacaaacatgtgtcgaactttggccggccctttgctgtgtttcttcttttgccaattctctatgaagatatgcaaggatgtggtgtctgcaatcacctctctctctttctttgtgctgaccataataagctactcccaggatggagtcactttgcgcaatttacaatagctctaattaataaagaccctaagaaatctaagtattcggagcatgattgggggtggaaaaagtttatggagctgtcagaattacatcgatggctttattgcacaggatgttcttaccatcaaagccaaacttcaagtcattagggagaagatagaccgtccatttcgttgccttgatggccagtaccgaagggaactaattagggtgtatctatcaaatgtggaacaaatttatcggcgttttattgatgaaaaaagaaggacgttcagcaggctgattgaggataaactcgggtggtccaggccttttgcagtttcagtggattttggcgagccatttttcatctttgattttatctgaacagagacttgaactcgctatcaactttcagtagacctactaaggagcgatctccgtccaattatctgccaatgaatttatgcattgagggaggaagagcagcttgtgtattggtggagagaggatccttggttgaaagtgatgtttctccatatctttataaggttaaggaagagcagttggggttcctgtgaaacatggattgtatgaggtctataatttttttatgctctatcattacttgaatgaatcatgtatcactggcaagcaacttcagctcatactatgtaggaattctaattcacattgcattctatttaattgtttgttttatgttccgttcacacgaccatgatttttgtttgcacaaatcactatatatatcctcgttgaattaaaagtctagctttgtgtcataagcatattgtctatttccccttttggctattgcaaatagcaagtatggtttgttgtttaaatgttagtctattctgtttcaagaaaaaaaagaatgcgccatcgctggggatgggtatgatgatcaagatcgtcgaacgacgaagggcaccaaggtgttcgttggcgggctgccaatgtcggccacagaaagcatgctcctctctcatcttcgcaccatgcagtagctgctgcccatagcatgtaatgcaatggaataagttatcaaggcaactaacaccgaacatagtaagaaaagaaaccaaacgtgaatatgtctcattttgtgttattggtctccctgggattctcgctcttattggtcacagtggcgggttcttgggctccttggcagcgtcgaggcacggtatctgcccacgccgttgtcggggcctcccgcgggtacccatgctcgacctacttcattgaaggtaaaactttgactatttgggatctccatttcattattcagatatgctcaattctgaactagaacagatgcataataacttttagaaaccagaacaatttcaagacatttcatcattctacttttttctatagcaccagcttattgagacttctgtcttagatgtggtatggacaaatatacatgccactttctagatgaagtgaagagaccaaatgtggatgtcaatcaatctctagatgaaggaatgaaaggaaggagctaagttattgcactggatgtacagggtctagaaaagatggcaagattgaatgaagggctgtcattatttgatgcaatactgattgttccaatgtttcaaattacttggaccttcttctctatttgtataggatttgtttactttcaagaatatcaagtatttgatacactcaggataattatgtttgtgttaggcatgacatttgtctttgttgggatctccttgctagcacccgatgatagtaaaggtgatacgaaagatggttcaagcaccgccgaggactccataattgacatagacatgttctattccacgaacttgtagaaagtttcaagatttgctctattgcattttgtgttcagtattgcattcagtgttttgatatataatctagacactgcagaaatggaaagatgctgatggaggagacagacacagatgatagcatctcttttgttacttctgtaaaagtaaatgcaaaacgtgtactttcaaaggcaaagtctgcatgctccatgtcccttggccttggggagagcaccataagcgcttcatcggtgcttgccatgcctatggtctcgtcaagaacaaccggcttcagaggaatcgaaaatgaccgtccaaattgctacctgtatggcgcctcttctgttgcgtccacttctagctggtgaatctgagatggatgaagtatttgatatggatggtgacgattctgcgcagcttcttgctgcagcaaacgcagcaaacagtgctcaaggaattgtcgcaactctcttggaggaatatgagggcatttttcatgatgaacacctcagatgttccttgtcacctgaatctcaaattgaagatagtggtattgaagcatcaactgttgatggtaatttggaagccaagggcaatggatttcatgatgtagatcaagaattggatgatgacaatggcgtggagcgtatacttagtgggaaattgagtgagagcagtggatatgctggcagtgacctctatgactacaagtctcgagaaccagattactgcattggagaacaagtgctcaggtgattaccaatggattggtttctgtcacaatgatcttcagaatggcaatatcatgattgatgaaaagaccaacgtgctgaccatcattttcttcagaaaatggccatcggtgtccctaaaaagcggaacgacaaatggatggctaatcagcttttgaagctacatctggagtaaaaagctttgaaggatgctcatcttcagtttatgcgctactatttgttgactgacatggacttgcaaaagcgcacttaatacttgtcagttttggatccatttgttgcattggtcgatgtcttcggcgaaacaatctcagttagggatatttccttctgatttgttagtgttcaacattataagaagtggtttattagttttgttcagatttttgtaattatttatgacatagtaaccttcatcaatcatacatgcatgtcatcgcttcgttcaactacacaacgtgcatctgttaagttctgtaagttttgaatgtgcacatcataaattgatcattgtcttatcttattgtgagcttgacagttttgaatgtgcagattaatgcacttttgtttcct

SEQ ID NO: 44871 - DNA, 3324 bp, Zea Mays
atctgcgccccctgtgccccctccgctccatccacgaccgcgccccccaagcgagtcgccgccatttcgccgattcccggctgctgcctagggttttggtgccagcgcggtcggagggttgtgcctgtgggtcgcgttcccagtgtcgcgcgcggcggcagaaggtggagggagtgtcggttctccggagaggaggtggaggaggttgaggtggtgggtctccacggagcgagattatcagatgccgcggcggcctttgaggaggtagtggctgtgtggtcgtgtggagcgaacaactggcagcggcggcgggactggtggaggcagccctgttttttcagcaggctcgatgactcgcccatgttcaggaagcaggtgcaccttgtgttgttaggctatactgatacatacaaacatgtgtcgaactttggccggccctttgctgtgtttcttcttttgccaattctctatgaagatatgcaaggatgtggtgtctgcaatcacctctctctctttctttgtgctgaccataataagctactcccaggatggagtcactttgcgcaatttacaatagctctaattaataaagaccctaagaaatctaagtattcggaaagagcatgattgggggtggaaaaagtttatggagctgtcagaattacatcgatggctttattgcacaggatgttcttaccatcaaagccaaacttcaagtcattagggagaagatagaccgtccatttcgttgccttgatggccagtaccgaagggaactaattagggtgtatctatcaaatgtggaacaaatttatcggcgttttattgatgaaaaaagaaggacgttcagcaggctgattgaggataaactcgggtggtccaggccttttgcagtttcagtggattttggcgagccatttttcatctttgattttatctgaacagagacttgaactcgctatcaactttcagtagacctactaaggagcgatctccgtccaattatctgccaatgaatttatgcattgagggaggaagagcagcttgtgtattggtggagagaggatccttggttgaaagtgatgtttctccatatctttataaggttaaggaagagcagttggggttcctgtgaaacatggattgtatgagaaaaaaaagaatgcgccatcgctggggatgggtatgatgatcaagatcgtcgaacgacgaagggcaccaaggtgttcgttggcgggctgccaatgtcggccacagaaagcatgctcctctctcatcttcgcaccatgcagtagctgctgcccatagcatgtaatgcaatggaataagttatcaaggcaactaacaccgaacatacgtcgaggcacggtatctgcccacgccgttgtcggggcctcccgcgggtacccatgctcgacctacttcattgaaggtaaaactttgactatttgggatctccatttcattattcagatatgctcaattctgaactagaacagatgcataataacttttagaaaccagaacaatttcaagacatttcatcattctacttttttctatagcaccagcttattgagacttctgtcttagatgtggtatggacaaatatacatgccactttctagatgaagtgaagagaccaaatgtggatgtcaatcaatctctagatgaaggaatgaaaggaaggagctaagttattgcactggatgtacagggtctagaaaagatggcaagattgaatgaagggctgtcattatttgatgcaatactgattgttccaatgtttcaaattacttggaccttcttctctatttgtataggatttgtttactttcaagaatatcaagtatttgatacactcaggataattatgtttgtgttaggcatgacatttgtctttgttgggatctccttgctagcacccgatgatagtaaaggtgatacgaaagatggttcaagcaccgccgaggactccataattgacatagacatgttctattccacgaacttgtagaaagtttcaagatttgctctattgcattttgtgttcagtattgcattcagtgttttgatatataatctagacactgcagaaatggaaagatgctgatggaggagacagacacagatgatagcatctcttttgttacttctgtaaaagtaaatgcaaaacgtgtactttcaaaggcaaagtctgcatgctccatgtcccttggccttggggagagcaccataagcgcttcatcggtgcttgccatgcctatggtctcgtcaagaacaaccggcttcagaggaatcgaaaatgaccgtccaaattgctacctgtatggcgcctcttctgttgcgtccacttctagctggtgaatctgagatggatgaagtatttgatatggatggtgacgattctgcgcagcttcttgctgcagcaaacgcagcaaacagtgctcaaggaattgtcgcaactctcttggaggaatatgagggcatttttcatgatgaacacctcagatgttccttgtcacctgaatctcaaattgaagatagtggtattgaagcatcaactgttgatggtaatttggaagccaagggcaatggatttcatgatgtagatcaagaattggatgatgacaatggcgtggagcgtatacttagtgggaaattgagtgagagcagtggatatgctggcagtgacctctatgactacaagtctcgagaaccagattactgcattggagaacaagtgctcaggtgattaccaatggattggtttctgtcacaatgatcttcagaatggcaatatcatgattgatgaaaagaccaacgtgctgaccatcattttcttcagaaaatggccatcggtgtccctaaaaagcggaacgacaaatggatggctaatcagcttttgaagctacatctggagtaaaaagctttgaaggatgctcatcttcagtttatgcgctactatttgttgactgacatggacttgcaaaagcgcacttaatacttgtcagttttggatccatttgttgcattggtcgatgtcttcggcgaaacaatctcagttagggatatttccttctgatttgttagtgttcaacattataagaagtggtttattagttttgttcagatttttgtaattatttatgacatagtaaccttcatcaatcatacatgcatgtcatcgcttcgttcaactacacaacgtgcatctgttaagttctgtaagttttgaatgtgcacatcataaattgatcattgtcttatcttattgtgagcttgacagttttgaatgtgcagattaatgcacttttgtttcct

SEQ ID NO: 44872 - DNA, 3592 bp, Zea Mays
cgccctcgtacgagatctgcgccccctgtgccccctccgctccatccacgaccgcgccccccaagcgagtcgccgccatttcgccgattcccggctgctgcctagggttttggtgccagcgcggtcggagggttgtgcctgtgggtcgcgttcccagtgtcgcgcgcggcggcagaaggtggagggagtgtcggttctccggagaggaggtggaggaggttgaggtggtgggtctccacggagcgagattatcagatgccgcggcggcctttgaggaggtagtggctgtgtggtcgtgtggagcgaacaactggcagcggcggcgggactggtggaggcagccctgttttttcagcaggctcgatgactcgcccatgttcaggaagcaggtgcaccttgtgttgttaggctatactgatacatacaaacatgtgtcgaactttggccggccctttgctgtgtttcttcttttgccaattctctatgaagatatgcaaggatgtggtgtctgcaatcacctctctctctttctttgtgctgaccataataagctactcccaggatggagtcactttgcgcaatttacaatagctctaattaataaagaccctaagaaatctaagtattcggaaagagcatgattgggggtggaaaaagtttatggagctgtcagaattacatcgatggctttattgcacaggatgttcttaccatcaaagccaaacttcaagtcattagggagaagatagaccgtccatttcgttgccttgatggccagtaccgaagggaactaattagggtgtatctatcaaatgtggaacaaatttatcggcgttttattgatgaaaaaagaaggacgttcagcaggctgattgaggataaactcgggtggtccagagacttgaactcgctatcaactttcagtagacctactaaggagcgatctccgtccaattatctgccaatgaatttatgcattgagggaggaagagcagcttgtgtattggtggagagaggatccttggttgaaagtgatgtttctccatatctttataaggttaaggaagagcagttggggttcctgtgaaacatggattgtatgaggtctataatttttttatgctctatcattacttgaatgaatcatgtatcactggcaagcaacttcagctcatactatgtaggaattctaattcacattgcattctatttaattgtttgttttatgttccgttcacacgaccatgatttttgtttgcacaaatcactatatatatcctcgttgaattaaaagtctagctttgtgtcataagcatattgtctatttccccttttggctattgcaaatagcaagtatggtttgttgtttaaatgttagtctattctgtttcaagaaaaaaaagaatgcgccatcgctggggatgggtatgatgatcaagatcgtcgaacgacgaagggcaccaaggtgttcgttggcgggctgccaatgtcggccacagaaagcatgctcctctctcatcttcgcaccatgcagtagctgctgcccatagcatgtaatgcaatggaataagttatcaaggcaactaacaccgaacatatggcgggttcttgggctccttggcagcgtcgaggcacggtatctgcccacgccgttgtcggggcctcccgcgggtacccatgctcgacctacttcattgaaggtaaaactttgactatttgggatctccatttcattattcagatatgctcaattctgaactagaacagatgcataataacttttagaaaccagaacaatttcaagacatttcatcattctacttttttctatagcaccagcttattgagacttctgtcttagatgtggtatggacaaatatacatgccactttctagatgaagtgaagagaccaaatgtggatgtcaatcaatctctagatgaaggaatgaaaggaaggagctaagttattgcactggatgtacagggtctagaaaagatggcaagattgaatgaagggctgtcattatttgatgcaatactgattgttccaatgtttcaaattacttggaccttcttctctatttgtataggatttgtttactttcaagaatatcaagtatttgatacactcaggataattatgtttgtgttaggcatgacatttgtctttgttgggatctccttgctagcacccgatgatagtaaaggtgatacgaaagatggttcaagcaccgccgaggactccataattgacatagacatgttctattccacgaacttgtagaaagtttcaagatttgctctattgcattttgtgttcagtattgcattcagtgttttgatatataatctagacactgcagaaatggaaagatgctgatggaggagacagacacagatgatagcatctcttttgttacttctgtaaaagtaaatgcaaaacgtgtactttcaaaggcaaagtctgcatgctccatgtcccttggccttggggagagcaccataagcgcttcatcggtgcttgccatgcctatggtctcgtcaagaacaaccggcttcagaggaatcgaaaatgaccgtccaaattgctacctgtatggcgcctcttctgttgcgtccacttctagctggtgaatctgagatggatgaagtatttgatatggatggtgacgattctgcgcagcttcttgctgcagcaaacgcagcaaacagtgctcaaggaattgtcgcaactctcttggaggaatatgagggcatttttcatgatgaacacctcagatgttccttgtcacctgaatctcaaattgaagatagtggtattgaagcatcaactgttgatggtaatttggaagccaagggcaatggatttcatgatgtagatcaagaattggatgatgacaatggcgtggagcgtatacttagtgggaaattgagtgagagcagtggatatgctggcagtgacctctatgactacaagtctcgagaaccagattactgcattggagaacaagtgctcaggtgattaccaatggattggtttctgtcacaatgatcttcagaatggcaatatcatgattgatgaaaagaccaacgtgctgaccatcattttcttcagaaaatggccatcggtgtccctaaaaagcggaacgacaaatggatggctaatcagcttttgaagctacatctggagtaaaaagctttgaaggatgctcatcttcagtttatgcgctactatttgttgactgacatggacttgcaaaagcgcacttaatacttgtcagttttggatccatttgttgcattggtcgatgtcttcggcgaaacaatctcagttagggatatttccttctgatttgttagtgttcaacattataagaagtggtttattagttttgttcagatttttgtaattatttatgacatagtaaccttcatcaatcatacatgcatgtcatcgcttcgttcaactacacaacgtgcatctgttaagttctgtaagttttgaatgtgcacatcataaattgatcattgtcttatcttattgtgagcttgacagttttgaatgtgcagattaatgcacttttgtttcct

SEQ ID NO: 44873 - DNA, 3263 bp, Zea Mays
cgccctcgtacgagatctgcgccccctgtgccccctccgctccatccacgaccgcgccccccaagcgagtcgccgccatttcgccgattcccggctgctgcctagggttttggtgccagcgcggtcggagggttgtgcctgtgggtcgcgttcccagtgtcgcgcgcggcggcagaaggtggagggagtgtcggttctccggagaggaggtggaggaggttgaggtggtgggtctccacggagcgagattatcagatgccgcggcggcctttgaggaggtagtggctgtgtggtcgtgtggagcgaacaactggcagcggcggcgggactggtggaggcagccctgttttttcagcaggctcgatgactcgcccatgttcaggaagcaggtgcaccttgtgttgttaggctatactgatacatacaaacatgtgtcgaactttggccggccctttgctgtgtttcttcttttgccaattctctatgaagatatgcaaggatgtggtgtctgcaatcacctctctctctttctttgtgctgaccataataagctactcccaggatggagtcactttgcgcaatttacaatagctctaattaataaagaccctaagaaatctaagtattcggaaagagcatgattgggggtggaaaaagtttatggagctgtcagaattacatcgatggctttattgcacaggatgttcttaccatcaaagccaaacttcaagtcattagaagatagaccgtccatttcgttgccttgatggccagtaccgaagggaactaattagggtgtatctatcaaatgtggaacaaatttatcggcgttttattgatgaaaaaagaaggacgttcagcaggctgattgaggataaactcgggtggtccaggccttttgcagtttcagtggattttggcgagccatttttcatctttgattttatctgaacagagacttgaactcgctatcaactttcagtagacctactaaggagcgatctccgtccaattatctgccaatgaatttatgcattgagggaggaagagcagcttgtgtattggtggagagaggatccttggttgaaagtgatgtttctccatatctttataaggttaaggaagagcagttggggttcctgtgaaacatggattgtatgaggtctataatttttttatgctctatcattacttgaatgaatcatgtatcactggcaagcaacttcagctcatactataaaaaaaagaatgcgccatcgctggggatgggtatgatgatcaagatcgtcgaacgacgaagggcaccaaggtgttcgttggcgggctgccaatgtcggccacagaaagcatgctcctctctcatcttcgcaccatgcagtagctgctgcccatagcatgtaatgcaatggaataagttatcaaggcaactaacaccgaacatacgtcgaggcacggtatctgcccacgccgttgtcggggcctcccgcgggtacccatgctcgacctacttcattgaagcttattgagacttctgtcttagatgtggtatggacaaatatacatgccactttctagatgaagtgaagagaccaaatgtggatgtcaatcaatctctagatgaaggaatgaaaggaaggagctaagttattgcactggatgtacagggtctagaaaagatggcaagattgaatgaagggctgtcattatttgatgcaatactgattgttccaatgtttcaaattacttggaccttcttctctatttgtataggatttgtttactttcaagaatatcaagtatttgatacactcaggataattatgtttgtgttaggcatgacatttgtctttgttgggatctccttgctagcacccgatgatagtaaaggtgatacgaaagatggttcaagcaccgccgaggactccataattgacatagacatgttctattccacgaacttgtagaaagtttcaagatttgctctattgcattttgtgttcagtattgcattcagtgttttgatatataatctagacactgcagaaatggaaagatgctgatggaggagacagacacagatgatagcatctcttttgttacttctgtaaaagtaaatgcaaaacgtgtactttcaaaggcaaagtctgcatgctccatgtcccttggccttggggagagcaccataagcgcttcatcggtgcttgccatgcctatggtctcgtcaagaacaaccggcttcagaggaatcgaaaatgaccgtccaaattgctacctgtatggcgcctcttctgttgcgtccacttctagctggtgaatctgagatggatgaagtatttgatatggatggtgacgattctgcgcagcttcttgctgcagcaaacgcagcaaacagtgctcaaggaattgtcgcaactctcttggaggaatatgagggcatttttcatgatgaacacctcagatgttccttgtcacctgaatctcaaattgaagatagtggtattgaagcatcaactgttgatggtaatttggaagccaagggcaatggatttcatgatgtagatcaagaattggatgatgacaatggcgtggagcgtatacttagtgggaaattgagtgagagcagtggatatgctggcagtgacctctatgactacaagtctcgagaaccagattactgcattggagaacaagtgctcaggtgattaccaatggattggtttctgtcacaatgatcttcagaatggcaatatcatgattgatgaaaagaccaacgtgctgaccatcattaaaatggccatcggtgtccctaaaaagcggaacgacaaatggatggctaatcagcttttgaagctacatctggagtaaaaagctttgaaggatgctcatcttcagtttatgcgctactatttgttgactgacatggacttgcaaaagcgcacttaatacttgtcagttttggatccatttgttgcattggtcgatgtcttcggcgaaacaatctcagttagggatatttccttctgatttgttagtgttcaacattataagaagtggtttattagttttgttcagatttttgtaattatttatgacatagtaaccttcatcaatcatacatgcatgtcatcgcttcgttcaactacacaacgtgcatctgttaagttctgtaagttttgaatgtgcacatcataaattgatcattgtcttatcttattgtgagcttgacagttttgaatgtgcagattaatgcacttttgtttcct

SEQ ID NO: 44874 - DNA, 3920 bp, Zea Mays
ccgctctagacgctgacacgccctcgtacgagatctgcgccccctgtgccccctccgctccatccacgaccgcgccccccaagcgagtcgccgccatttcgccgattcccggctgctgcctagggttttggtgccagcgcggtcggagggttgtgcctgtgggtcgcgttcccagtgtcgcgcgcggcggcagaaggtggagggagtgtcggttctccggagaggaggtggaggaggttgaggtggtgggtctccacggagcgagattatcagatgccgcggcggcctttgaggaggtagtggctgtgtggtcgtgtggagcgaacaactggcagcggcggcgggactggtggaggcagccctgttttttcagcaggctcgatgactcgcccatgttcaggaagcaggtgcaccttgtgttgttaggctatactgatacatacaaacatgtgtcgaactttggccggccctttgctgtgtttcttcttttgccaattctctatgaagatatgcaaggatgtggtgtctgcaatcacctctctctctttctttgtgctgaccataataagctactcccaggatggagtcactttgcgcaatttacaatagctctaattaataaagaccctaagaaatctaagtattcggaaagagcatgattgggggtggaaaaagtttatggagctgtcagaattacatcgatggctttattgcacaggatgttcttaccatcaaagccaaacttcaagtcattagaagatagaccgtccatttcgttgccttgatggccagtaccgaagggaactaattagggtgtatctatcaaatgtggaacaaatttatcggcgttttattgatgaaaaaagaaggacgttcagcaggctgattgaggataaactcgggtggtccaggccttttgcagtttcagtggattttggcgagccatttttcatctttgattttatctgaacagagacttgaactcgctatcaactttcagtagacctactaaggagcgatctccgtccaattatctgccaatgaatttatgcattgtaccatgaacagagatagtcaagaaattagactatttcaagttcagcgagagggactatatggcactggaggcgtctttcttagagattgcgatctcaacatatatttggatgcctaaatgtttagttagaaatttacaccatttctaataattctacagtgattgaaaatacaatctacctcaaaactaataacatcgttagagggaggaagagcagcttgtgtattggtggagagaggatccttggttgaaagtgatgtttctccatatctttataaggttaaggaagagcagttggggttcctgtgaaacatggattgtatgaggtctataatttttttatgctctatcattacttgaatgaatcatgtatcactggcaagcaacttcagctcatactatgtaggaattctaattcacattgcattctatttaattgtttgttttatgttccgttcacacgaccatgatttttgtttgcacaaatcactatatatatcctcgttgaattaaaagtctagctttgtgtcataagcatattgtctatttccccttttggctattgcaaatagcaagtatggtttgttgtttaaatgttagtctattctgtttcaagaaaaaaaagaatgcgccatcgctggggatgggtatgatgatcaaggtcagtgtttatcgagaaatgctgttttgttttttatggattgtggagagaattttatgccagtgaccccgagttttgtgtgatgtgtggctacgcgcagatcgtcgaacgacgaagggcaccaaggtgttcgttggcgggctgccaatgtcggccacagaaagcatgctcctctctcatcttcgcaccatgcagtagctgctgcccatagcatgtaatgcaatggaataagttatcaaggcaactaacaccgaacatacgtcgaggcacggtatctgcccacgccgttgtcggggcctcccgcgggtacccatgctcgacctacttcattgaaggtaaaactttgactatttgggatctccatttcattattcagatatgctcaattctgaactagaacagatgcataataacttttagaaaccagaacaatttcaagacatttcatcattctacttttttctatagcaccagcttattgagacttctgtcttagatgtggtatggacaaatatacatgccactttctagatgaagtgaagagaccaaatgtggatgtcaatcaatctctagatgaaggaatgaaaggaaggagctaagttattgcactggatgtacagggtctagaaaagatggcaagattgaatgaagggctgtcattatttgatgcaatactgattgttccaatgtttcaaattacttggaccttcttctctatttgtataggatttgtttactttcaagaatatcaagtatttgatacactcaggataattatgtttgtgttaggcatgacatttgtctttgttgggatctccttgctagcacccgatgatagtaaaggtgatacgaaagatggttcaagcaccgccgaggactccataattgacatagacatgttctattccacgaacttgtagaaagtttcaagatttgctctattgcattttgtgttcagtattgcattcagtgttttgatatataatctagacactgcagaaatggaaagatgctgatggaggagacagacacagatgatagcatctcttttgttacttctgtaaaagtaaatgcaaaacgtgtactttcaaaggcaaagtctgcatgctccatgtcccttggccttggggagagcaccataagcgcttcatcggtgcttgccatgcctatggtctcgtcaagaacaaccggcttcagaggaatcgaaaatgaccgtccaaaaattttaaaaatgatgcacactattgcatctcacacttctgaaaatcgaatgactgcatcggcagttgctacctgtatggcgcctcttctgttgcgtccacttctagctggtgaatctgagatggatgaagtatttgatatggatggtgacgattctgcgcagcttcttgctgcagcaaacgcagcaaacagtgctcaaggaattgtcgcaactctcttggaggaatatgagggcatttttcatgatgaacacctcagatgttccttgtcacctgaatctcaaattgaagatagtggtattgaagcatcaactgttgatggtaatttggaagccaagggcaatggatttcatgatgtagatcaagaattggatgatgacaatggcgtggagcgtatacttagtgggaaattgagtgagagcagtggatatgctggcagtgacctctatgactacaagaatggcaatatcatgattgatgaaaagaccaacgtgctgaccatcattaaaatggccatcggtgtccctaaaaagcggaacgacaaatggatggctaatcagcttttgaagctacatctggagtaaaaagctttgaaggatgctcatcttcagtttatgcgctactatttgttgactgacatggacttgcaaaagcgcacttaatacttgtcagttttggatccatttgttgcattggtcgatgtcttcggcgaaacaatctcagttagggatatttccttctgatttgttagtgttcaacattataagaagtggtttattagttttgttcagatttttgtaattatttatgacatagtaaccttcatcaatcatacatgcatgtcatcgcttcgttcaactacacaacgtgcatctgttaagttctgtaagttttgaatgtgcacatcataaattgatcattgtcttatcttattgtgagcttgacagttttgaatgtgcagattaatgcacttttgtttcct

SEQ ID NO: 44875 - DNA, 3167 bp, Zea Mays
ccccgctctagacgctgacacgccctcgtacgagatctgcgccccctgtgccccctccgctccatccacgaccgcgccccccaagcgagtcgccgccatttcgccgattcccggctgctgcctagggttttggtgccagcgcggtcggagggttgtgcctgtgggtcgcgttcccagtgtcgcgcgcggcggcagaaggtggagggagtgtcggttctccggagaggaggtggaggaggttgaggtggtgggtctccacggagcgagattatcagatgccgcggcggcctttgaggaggtagtggctgtgtggtcgtgtggagcgaacaactggcagcggcggcgggactggtggaggcagccctgttttttcagcaggctcgatgactcgcccatgttcaggaagcaggtgcaccttgtgttgttaggctatactgatacatacaaacatgtgtcgaactttggccggccctttgctgtgtttcttcttttgccaattctctatgaagatatgcaaggatgtggtgtctgcaatcacctctctctctttctttgtgctgaccataataagctactcccaggatggagtcactttgcgcaatttacaatagctctaattaataaagaccctaagaaatctaagtattcggaaagagcatgattgggggtggaaaaagtttatggagctgtcagaattacatcgatggctttattgcacaggatgttcttaccatcaaagccaaacttcaagtcattagaaggacgttcagcaggctgattgaggataaactcgggtggtccagagacttgaactcgctatcaactttcagtagacctactaaggagcgatctccgtccaattatctgccaatgaatttatgcattgagggaggaagagcagcttgtgtattggtggagagaggatccttggttgaaagtgatgtttctccatatctttataaggttaaggaagagcagttggggttcctgtgaaacatggattgtatgaggtctataatttttttatgctctatcattacttgaatgaatcatgtatcactggcaagcaacttcagctcatactatgtaggaattctaattcacattgcattctatttaattgtttgttttatgttccgttcacacgaccatgatttttgtttgcacaaatcactatatatatcctcgttgaattaaaagtctagctttgtgtcataagcatattgtctatttccccttttggctattgcaaatagcaagtatggtttgttgtttaaatgttagtctattctgtttcaagaaaaaaaagaatgcgccatcgctggggatgggtatgatgatcaagatcgtcgaacgacgaagggcaccaaggtgttcgttggcgggctgccaatgtcggccacagaaagcatgctcctctctcatcttcgcaccatgcagtagctgctgcccatagcatgtaatgcaatggaataagttatcaaggcaactaacaccgaacatacgtcgaggcacggtatctgcccacgccgttgtcggggcctcccgcgggtacccatgctcgacctacttcattgaagatggcaagattgaatgaagggctgtcattatttgatgcaatactgattgttccaatgtttcaaattacttggaccttcttctctatttgtataggatttgtttactttcaagaatatcaagtatttgatacactcaggataattatgtttgtgttaggcatgacatttgtctttgttgggatctccttgctagcacccgatgatagtaaaggtgatacgaaagatggttcaagcaccgccgaggactccataattgacatagacatgttctattccacgaacttgtagaaagtttcaagatttgctctattgcattttgtgttcagtattgcattcagtgttttgatatataatctagacactgcagaaatggaaagatgctgatggaggagacagacacagatgatagcatctcttttgttacttctgtaaaagtaaatgcaaaacgtgtactttcaaaggcaaagtctgcatgctccatgtcccttggccttggggagagcaccataagcgcttcatcggtgcttgccatgcctatggtctcgtcaagaacaaccggcttcagaggaatcgaaaatgaccgtccaaattgctacctgtatggcgcctcttctgttgcgtccacttctagctggtgaatctgagatggatgaagtatttgatatggatggtgacgattctgcgcagcttcttgctgcagcaaacgcagcaaacagtgctcaaggaattgtcgcaactctcttggaggaatatgagggcatttttcatgatgaacacctcagatgttccttgtcacctgaatctcaaattgaagatagtggtattgaagcatcaactgttgatggtaatttggaagccaagggcaatggatttcatgatgtagatcaagaattggatgatgacaatggcgtggagcgtatacttagtgggaaattgagtgagagcagtggatatgctggcagtgacctctatgactacaagtctcgagaaccagattactgcattggagaacaagtgctcaggtgattaccaatggattggtttctgtcacaatgatcttcagaatggcaatatcatgattgatgaaaagaccaacgtgctgaccatcattaaaatggccatcggtgtccctaaaaagcggaacgacaaatggatggctaatcagcttttgaagctacatctggagtaaaaagctttgaaggatgctcatcttcagtttatgcgctactatttgttgactgacatggacttgcaaaagcgcacttaatacttgtcagttttggatccatttgttgcattggtcgatgtcttcggcgaaacaatctcagttagggatatttccttctgatttgttagtgttcaacattataagaagtggtttattagttttgttcagatttttgtaattatttatgacatagtaaccttcatcaatcatacatgcatgtcatcgcttcgttcaactacacaacgtgcatctgttaagttctgtaagttttgaatgtgcacatcataaattgatcattgtcttatcttattgtgagcttgacagttttgaatgtgcagattaatgcacttttgtttcct

SEQ ID NO: 44876 - DNA, 3355 bp, Zea Mays
ccccgctctagacgctgacacgccctcgtacgagatctgcgccccctgtgccccctccgctccatccacgaccgcgccccccaagcgagtcgccgccatttcgccgattcccggctgctgcctagggttttggtgccagcgcggtcggagggttgtgcctgtgggtcgcgttcccagtgtcgcgcgcggcggcagaaggtggagggagtgtcggttctccggagaggaggtggaggaggttgaggtggtgggtctccacggagcgagattatcagatgccgcggcggcctttgaggaggtagtggctgtgtggtcgtgtggagcgaacaactggcagcggcggcgggactggtggaggcagccctgttttttcagcaggctcgatgactcgcccatgttcaggaagcaggtgcaccttgtgttgttaggctatactgatacatacaaacatgtgtcgaactttggccggccctttgctgtgtttcttcttttgccaattctctatgaagatatgcaaggatgtggtgtctgcaatcacctctctctctttctttgtgctgaccataataagctactcccaggatggagtcactttgcgcaatttacaatagctctaattaataaagaccctaagaaatctaagtattcggaaagagcatgattgggggtggaaaaagtttatggagctgtcagaattacatcgatggctttattgcacaggatgttcttaccatcaaagccaaacttcaagtcattagggagaagatagaccgtccatttcgttgccttgatggccagtaccgaagggaactaattagggtgtatctatcaaatgtggaacaaatttatcggcgttttattgatgaaaaaagaaggacgttcagcaggctgattgaggataaactcgggtggtccaggccttttgcagtttcagtggattttggcgagccatttttcatctttgattttatctgaacagagacttgaactcgctatcaactttcagtagacctactaaggagcgatctccgtccaattatctgccaatgaatttatgcattgagggaggaagagcagcttgtgtattggtggagagaggatccttggttgaaagtgatgtttctccatatctttataaggttaaggaagagcagttggggttcctgtgaaacatggattgtatgaggtctataatttttttatgctctatcattacttgaatgaatcatgtatcactggcaagcaacttcagctcatactatgtaggaattctaattcacattgcattctatttaattgtttgttttatgttccgttcacacgaccatgatttttgtttgcacaaatcactatatatatcctcgttgaattaaaagtctagctttgtgtcataagcatattgtctatttccccttttggctattgcaaatagcaagtatggtttgttgtttaaatgttagtctattctgtttcaagaaaaaaaagaatgcgccatcgctggggatgggtatgatgatcaagatcgtcgaacgacgaagggcaccaaggtgttcgttggcgggctgccaatgtcggccacagaaagcatgctcctctctcatcttcgcaccatgcagtagctgctgcccatagcatgtaatgcaatggaataagttatcaaggcaactaacaccgaacatagtaagaaaagaaaccaaacgtgaatatgtctcattttgtgttattggtctccctgggattctcgctcttattggtcacagtggcgggttcttgggctccttggcagcgtcgaggcacggtatctgcccacgccgttgtcggggcctcccgcgggtacccatgctcgacctacttcattgaagatggcaagattgaatgaagggctgtcattatttgatgcaatactgattgttccaatgtttcaaattacttggaccttcttctctatttgtataggatttgtttactttcaagaatatcaagtatttgatacactcaggataattatgtttgtgttaggcatgacatttgtctttgttgggatctccttgctagcacccgatgatagtaaaggtgatacgaaagatggttcaagcaccgccgaggactccataattgacatagacatgttctattccacgaacttgtagaaagtttcaagatttgctctattgcattttgtgttcagtattgcattcagtgttttgatatataatctagacactgcagaaatggaaagatgctgatggaggagacagacacagatgatagcatctcttttgttacttctgtaaaagtaaatgcaaaacgtgtactttcaaaggcaaagtctgcatgctccatgtcccttggccttggggagagcaccataagcgcttcatcggtgcttgccatgcctatggtctcgtcaagaacaaccggcttcagaggaatcgaaaatgaccgtccaaattgctacctgtatggcgcctcttctgttgcgtccacttctagctggtgaatctgagatggatgaagtatttgatatggatggtgacgattctgcgcagcttcttgctgcagcaaacgcagcaaacagtgctcaaggaattgtcgcaactctcttggaggaatatgagggcatttttcatgatgaacacctcagatgttccttgtcacctgaatctcaaattgaagatagtggtattgaagcatcaactgttgatggtaatttggaagccaagggcaatggatttcatgatgtagatcaagaattggatgatgacaatggcgtggagcgtatacttagtgggaaattgagtgagagcagtggatatgctggcagtgacctctatgactacaagtctcgagaaccagattactgcattggagaacaagtgctcaggtgattaccaatggattggtttctgtcacaatgatcttcagaatggcaatatcatgattgatgaaaagaccaacgtgctgaccatcattaaaatggccatcggtgtccctaaaaagcggaacgacaaatggatggctaatcagcttttgaagctacatctggagtaaaaagctttgaaggatgctcatcttcagtttatgcgctactatttgttgactgacatggacttgcaaaagcgcacttaatacttgtcagttttggatccatttgttgcattggtcgatgtcttcggcgaaacaatctcataaccttcatcaatcatacatgcatgtcatcgcttcgttcaactacacaacgtgcatctgttaagttctgtaagttttgaatgtgcacatcataaattgatcattgtcttatcttattgtgagcttgacagttttgaatgtgcagattaatgcacttttgtttcct

SEQ ID NO: 44877 - DNA, 2226 bp, Zea Mays
gactcgcccatgttcaggaagcaggatggagtcactttgcgcaatttacaatagctctaattaataaagaccctaagaaatctaagtattcggaaagagcatgattgggggtggaaaaagtttatggagctgtcagaattacatcgatggctttattgcacaggatgttcttaccatcaaagccaaacttcaagtcattagggagaagatagaccgtccatttcgttgccttgatggccagtaccgaagggaactaattagggtgtatctatcaaatgtggaacaaatttatcggcgttttattgatgaaaaaagaaggacgttcagcaggctgattgaggataaactcgggtggtccaggccttttgcagtttcagtggattttggcgagccatttttcatctttgattttatctgaacagagacttgaactcgctatcaactttcagtagacctactaaggagcgatctccgtccaattatctgccaatgaatttatgcattgagggaggaagagcagcttgtgtattggtggagagaggatccttggttgaaagtgatgtttctccatatctttataaggttaaggaagagcagttggggttcctgtgaaacatggattgtatgagaatgcgccatcgctggggatgggtatgatgatcaagatcgtcgaacgacgaagggcaccaaggtgttcgttggcgggctgccaatgtcggccacagaaagcatgctcctctctcatcttcgcaccatgcagtagctgctgcccatagcatgtaatgcaatggaataagttatcaaggcaactaacaccgaacatacgtcgaggcacggtatctgcccacgccgttgtcggggcctcccgcgggtacccatgctcgacctacttcattgaaggtaaaactttgactatttgggatctccatttcattattcagatatgctcaattctgaactagaacagatgcataataacttttagaaaccagaacaatttcaagacatttcatcattctacttttttctatagcaccagcttattgagacttctgtcttagatgtggtatggacaaatatacatgccactttctagatgaagtgaagagaccaaatgtggatgtcaatcaatctctagatgaaggaatgaaaggaaggagctaagttattgcactggatgtacagggtctagaaaagatggcaagattgaatgaagggctgtcattatttgatgcaatactgattgttccaatgtttcaaattacttggaccttcttctctatttgtataggatttgtttactttcaagaatatcaagtatttgatacactcaggataattatgtttgtgttaggcatgacatttgtctttgttgggatctccttgctagcacccgatgatagtaaaggtgatacgaaagatggttcaagcaccgccgaggactccataattgacatagacatgttctattccacgaacttgtagaaagtttcaagatttgctctattgcattttgtgttcagtattgcattcagtgttttgatatataatctagacactgcagaaatggaaagatgctgatggaggagacagacacagatgatagcatctcttttgttacttctgtaaaagtaaatgcaaaacgtgtactttcaaaggcaaagtctgcatgctccatgtcccttggccttggggagagcaccataagcgcttcatcggtgcttgccatgcctatggtctcgtcaagaacaaccggcttcagaggaatcgaaaatgaccgtccaaattgctacctgtatggcgcctcttctgttgcgtccacttctagctggtgaatctgagatggatgaagtatttgatatggatggtgacgattctgcgcagcttcttgctgcagcaaacgcagcaaacagtgctcaaggaattgtcgcaactctcttggaggaatatgagggcatttttcatgatgaacacctcagatgttccttgtcacctgaatctcaaattgaagatagtggtattgaagcatcaactgttgatggtaatttggaagccaagggcaatggatttcatgatgtagatcaagaattggatgatgacaatggcgtggagcgtatacttagtgggaaattgagtgagagcagtggatatgctggcagtgacctctatgactacaagaatggcaatatcatgattgatgaaaagaccaacgtgctgaccatcatt

SEQ ID NO: 44878 - DNA, 2480 bp, Zea Mays
atcagatgccgcggcggcctttgaggaggtagtggctgtgtggtcgtgtggagcgaacaactggcagcggcggcgggactggtggaggcagccctgttttttcagcaggctcgatgactcgcccatgttcaggaagcaggtgcaccttgtgttgttaggctatactgatacatacaaacatgtgtcgaactttggccggccctttgctgtgtttcttcttttgccaattctctatgaagatatgcaaggatgtggtgtctgcaatcacctctctctctttctttgtgctgaccataataagctactcccaggatggagtcactttgcgcaatttacaatagctctaattaataaagaccctaagaaatctaagtattcggagcatgattgggggtggaaaaagtttatggagctgtcagaattacatcgatggctttattgcacaggatgttcttaccatcaaagccaaacttcaagtcattagggagaagatagaccgtccatttcgttgccttgatggccagtaccgaagggaactaattagggtgtatctatcaaatgtggaacaaatttatcggcgttttattgatgaaaaaagaaggacgttcagcaggctgattgaggataaactcgggtggtccagagacttgaactcgctatcaactttcagtagacctactaaggagcgatctccgtccaattatctgccaatgaatttatgcattgagggaggaagagcagcttgtgtattggtggagagaggatccttggttgaaagtgatgtttctccatatctttataaggttaaggaagagcagttggggttcctgtgaaacatggattgtatgaggtctataatttttttatgctctatcattacttgaatgaatcatgtatcactggcaagcaacttcagctcatactatgtaggaattctaattcacattgcattctatttaattgtttgttttatgttccgttcacacgaccatgatttttgtttgcacaaatcactatatatatcctcgttgaattaaaagtctagctttgtgtcataagcatattgtctatttccccttttggctattgcaaatagcaagtatggtttgttgtttaaatgttagtctattctgtttcaagaaaaaaaagaatgcgccatcgctggggatgggtatgatgatcaagtggcgggttcttgggctccttggcagcgtcgaggcacggtatctgcccacgccgttgtcggggcctcccgcgggtacccatgctcgacctacttcattgaagcaccagcttattgagacttctgtcttagatgtggtatggacaaatatacatgccactttctagatgaagtgaagagaccaaatgtggatgtcaatcaatctctagatgaaggaatgaaaggaaggagctaagttattgcactggatgtacagggtctagaaaagatggcaagattgaatgaagggctgtcattatttgatgcaatactgattgttccaatgtttcaaattacttggaccttcttctctatttgtataggatttgtttactttcaagaatatcaagtatttgatacactcaggataattatgtttgtgttaggcatgacatttgtctttgttgggatctccttgctagcacccgatgatagtaaaggtgatacgaaagatggttcaagcaccgccgaggactccataattgacatagacatgttctattccacgaacttgtagaaagtttcaagatttgctctattgcattttgtgttcagtattgcattcagtgttttgatatataatctagacactgcagaaatggaaagatgctgatggaggagacagacacagatgatagcatctcttttgttacttctgtaaaagtaaatgcaaaacgtgtactttcaaaggcaaagtctgcatgctccatgtcccttggccttggggagagcaccataagcgcttcatcggtgcttgccatgcctatggtctcgtcaagaacaaccggcttcagaggaatcgaaaatgaccgtccaaattgctacctgtatggcgcctcttctgttgcgtccacttctagctggtgaatctgagatggatgaagtatttgatatggatggtgacgattctgcgcagcttcttgctgcagcaaacgcagcaaacagtgctcaaggaattgtcgcaactctcttggaggaatatgagggcatttttcatgatgaacacctcagatgttccttgtcacctgaatctcaaattgaagatagtggtattgaagcatcaactgttgatggtaatttggaagccaagggcaatggatttcatgatgtagatcaagaattggatgatgacaatggcgtggagcgtatacttagtgggaaattgagtgagagcagtggatatgctggcagtgacctctatgactacaagaatggcaatatcatgattgatgaaaagaccaacgtgctgaccatcatt

SEQ ID NO: 44879 - DNA, 2649 bp, Zea Mays
ggttgaggtggtgggtctccacggagcgagattatcagatgccgcggcggcctttgaggaggtagtggctgtgtggtcgtgtggagcgaacaactggcagcggcggcgggactggtggaggcagccctgttttttcagcaggctcgatgactcgcccatgttcaggaagcaggtgcaccttgtgttgttaggctatactgatacatacaaacatgtgtcgaactttggccggccctttgctgtgtttcttcttttgccaattctctatgaagatatgcaaggatgtggtgtctgcaatcacctctctctctttctttgtgctgaccataataagctactcccaggatggagtcactttgcgcaatttacaatagctctaattaataaagaccctaagaaatctaagtattcggagcatgattgggggtggaaaaagtttatggagctgtcagaattacatcgatggctttattgcacaggatgttcttaccatcaaagccaaacttcaagtcattagaagatagaccgtccatttcgttgccttgatggccagtaccgaagggaactaattagggtgtatctatcaaatgtggaacaaatttatcggcgttttattgatgaaaaaagaaggacgttcagcaggctgattgaggataaactcgggtggtccaggccttttgcagtttcagtggattttggcgagccatttttcatctttgattttatctgaacagagacttgaactcgctatcaactttcagtagacctactaaggagcgatctccgtccaattatctgccaatgaatttatgcattgagggaggaagagcagcttgtgtattggtggagagaggatccttggttgaaagtgatgtttctccatatctttataaggttaaggaagagcagttggggttcctgtgaaacatggattgtatgaggtctataatttttttatgctctatcattacttgaatgaatcatgtatcactggcaagcaacttcagctcatactatgtaggaattctaattcacattgcattctatttaattgtttgttttatgttccgttcacacgaccatgatttttgtttgcacaaatcactatatatatcctcgttgaattaaaagtctagctttgtgtcataagcatattgtctatttccccttttggctattgcaaatagcaagtatggtttgttgtttaaatgttagtctattctgtttcaagaaaaaaaagaatgcgccatcgctggggatgggtatgatgatcaagatcgtcgaacgacgaagggcaccaaggtgttcgttggcgggctgccaatgtcggccacagaaagcatgctcctctctcatcttcgcaccatgcagtagctgctgcccatagcatgtaatgcaatggaataagttatcaaggcaactaacaccgaacatatggcgggttcttgggctccttggcagcgtcgaggcacggtatctgcccacgccgttgtcggggcctcccgcgggtacccatgctcgacctacttcattgaagatggcaagattgaatgaagggctgtcattatttgatgcaatactgattgttccaatgtttcaaattacttggaccttcttctctatttgtataggatttgtttactttcaagaatatcaagtatttgatacactcaggataattatgtttgtgttaggcatgacatttgtctttgttgggatctccttgctagcacccgatgatagtaaaggtgatacgaaagatggttcaagcaccgccgaggactccataattgacatagacatgttctattccacgaacttgtagaaagtttcaagatttgctctattgcattttgtgttcagtattgcattcagtgttttgatatataatctagacactgcagaaatggaaagatgctgatggaggagacagacacagatgatagcatctcttttgttacttctgtaaaagtaaatgcaaaacgtgtactttcaaaggcaaaggtcatttttgtttcttcctagatctgattgtaccatataaatctgtcacaagtcttgcctctctcacctgatcttatttgtagtctgcatgctccatgtcccttggccttggggagagcaccataagcgcttcatcggtgcttgccatgcctatggtctcgtcaagaacaaccggcttcagaggaatcgaaaatgaccgtccaaattgctacctgtatggcgcctcttctgttgcgtccacttctagctggtgaatctgagatggatgaagtatttgatatggatggtgacgattctgcgcagcttcttgctgcagcaaacgcagcaaacagtgctcaaggaattgtcgcaactctcttggaggaatatgagggcatttttcatgatgaacacctcagatgttccttgtcacctgaatctcaaattgaagatagtggtattgaagcatcaactgttgatggtaatttggaagccaagggcaatggatttcatgatgtagatcaagaattggatgatgacaatggcgtggagcgtatacttagtgggaaattgagtgagagcagtggatatgctggcagtgacctctatgactacaagaatggcaatatcatgattgatgaaaagaccaacgtgctgaccatcatt

SEQ ID NO: 44880 - DNA, 2547 bp, Zea Mays
cacgaccgcgccccccaagcgagtcgccgccatttcgccgattcccggctgctgcctagggttttggtgccagcgcggtcggagggttgtgcctgtgggtcgcgttcccagtgtcgcgcgcggcggcagaaggtggagggagtgtcggttctccggagaggaggtggaggaggttgaggtggtgggtctccacggagcgagattatcagatgccgcggcggcctttgaggaggtagtggctgtgtggtcgtgtggagcgaacaactggcagcggcggcgggactggtggaggcagccctgttttttcagcaggctcgatgactcgcccatgttcaggaagcaggatggagtcactttgcgcaatttacaatagctctaattaataaagaccctaagaaatctaagtattcggaaagagcatgattgggggtggaaaaagtttatggagctgtcagaattacatcgatggctttattgcacaggatgttcttaccatcaaagccaaacttcaagtcattagggagaagatagaccgtccatttcgttgccttgatggccagtaccgaagggaactaattagggtgtatctatcaaatgtggaacaaatttatcggcgttttattgatgaaaaaagaaggacgttcagcaggctgattgaggataaactcgggtggtccaggccttttgcagtttcagtggattttggcgagccatttttcatctttgattttatctgaacagagacttgaactcgctatcaactttcagtagacctactaaggagcgatctccgtccaattatctgccaatgaatttatgcattgagggaggaagagcagcttgtgtattggtggagagaggatccttggttgaaagtgatgtttctccatatctttataaggttaaggaagagcagttggggttcctgtgaaacatggattgtatgaggtctataatttttttatgctctatcattacttgaatgaatcatgtatcactggcaagcaacttcagctcatactatgtaggaattctaattcacattgcattctatttaattgtttgttttatgttccgttcacacgaccatgatttttgtttgcacaaatcactatatatatcctcgttgaattaaaagtctagctttgtgtcataagcatattgtctatttccccttttggctattgcaaatagcaagtatggtttgttgtttaaatgttagtctattctgtttcaagaaaaaaaagaatgcgccatcgctggggatgggtatgatgatcaagatcgtcgaacgacgaagggcaccaaggtgttcgttggcgggctgccaatgtcggccacagaaagcatgctcctctctcatcttcgcaccatgcagtagctgctgcccatagcatgtaatgcaatggaataagttatcaaggcaactaacaccgaacatacgtcgaggcacggtatctgcccacgccgttgtcggggcctcccgcgggtacccatgctcgacctacttcattgaagatggcaagattgaatgaagggctgtcattatttgatgcaatactgattgttccaatgtttcaaattacttggaccttcttctctatttgtataggatttgtttactttcaagaatatcaagtatttgatacactcaggataattatgtttgtgttaggcatgacatttgtctttgttgggatctccttgctagcacccgatgatagtaaaggtgatacgaaagatggttcaagcaccgccgaggactccataattgacatagacatgttctattccacgaacttgtagaaagtttcaagatttgctctattgcattttgtgttcagtattgcattcagtgttttgatatataatctagacactgcagaaatggaaagatgctgatggaggagacagacacagatgatagcatctcttttgttacttctgtaaaagtaaatgcaaaacgtgtactttcaaaggcaaagtctgcatgctccatgtcccttggccttggggagagcaccataagcgcttcatcggtgcttgccatgcctatggtctcgtcaagaacaaccggcttcagaggaatcgaaaatgaccgtccaaattgctacctgtatggcgcctcttctgttgcgtccacttctagctggtgaatctgagatggatgaagtatttgatatggatggtgacgattctgcgcagcttcttgctgcagcaaacgcagcaaacagtgctcaaggaattgtcgcaactctcttggaggaatatgagggcatttttcatgatgaacacctcagatgttccttgtcacctgaatctcaaattgaagatagtggtattgaagcatcaactgttgatggtaatttggaagccaagggcaatggatttcatgatgtagatcaagaattggatgatgacaatggcgtggagcgtatacttagtgggaaattgagtgagagcagtggatatgctggcagtgacctctatgactacaagaatggcaatatcatgattgatgaaaagaccaacgtgctgaccatcatt

SEQ ID NO: 44881 - DNA, 2710 bp, Zea Mays
cacgaccgcgccccccaagcgagtcgccgccatttcgccgattcccggctgctgcctagggttttggtgccagcgcggtcggagggttgtgcctgtgggtcgcgttcccagtgtcgcgcgcggcggcagaaggtggagggagtgtcggttctccggagaggaggtggaggaggttgaggtggtgggtctccacggagcgagattatcagatgccgcggcggcctttgaggaggtagtggctgtgtggtcgtgtggagcgaacaactggcagcggcggcgggactggtggaggcagccctgttttttcagcaggctcgatgactcgcccatgttcaggaagcaggtgcaccttgtgttgttaggctatactgatacatacaaacatgtgtcgaactttggccggccctttgctgtgtttcttcttttgccaattctctatgaagatatgcaaggatgtggtgtctgcaatcacctctctctctttctttgtgctgaccataataagctactcccaggatggagtcactttgcgcaatttacaatagctctaattaataaagaccctaagaaatctaagtattcggagcatgattgggggtggaaaaagtttatggagctgtcagaattacatcgatggctttattgcacaggatgttcttaccatcaaagccaaacttcaagtcattagggagaagatagaccgtccatttcgttgccttgatggccagtaccgaagggaactaattagggtgtatctatcaaatgtggaacaaatttatcggcgttttattgatgaaaaaagaaggacgttcagcaggctgattgaggataaactcgggtggtccagagacttgaactcgctatcaactttcagtagacctactaaggagcgatctccgtccaattatctgccaatgaatttatgcattgagggaggaagagcagcttgtgtattggtggagagaggatccttggttgaaagtgatgtttctccatatctttataaggttaaggaagagcagttggggttcctgtgaaacatggattgtatgaggtctataatttttttatgctctatcattacttgaatgaatcatgtatcactggcaagcaacttcagctcatactatgtaggaattctaattcacattgcattctatttaattgtttgttttatgttccgttcacacgaccatgatttttgtttgcacaaatcactatatatatcctcgttgaattaaaagtctagctttgtgtcataagcatattgtctatttccccttttggctattgcaaatagcaagtatggtttgttgtttaaatgttagtctattctgtttcaagaaaaaaaagaatgcgccatcgctggggatgggtatgatgatcaagatcgtcgaacgacgaagggcaccaaggtgttcgttggcgggctgccaatgtcggccacagaaagcatgctcctctctcatcttcgcaccatgcagtagctgctgcccatagcatgtaatgcaatggaataagttatcaaggcaactaacaccgaacatacgtcgaggcacggtatctgcccacgccgttgtcggggcctcccgcgggtacccatgctcgacctacttcattgaagcttattgagacttctgtcttagatgtggtatggacaaatatacatgccactttctagatgaagtgaagagaccaaatgtggatgtcaatcaatctctagatgaaggaatgaaaggaaggagctaagttattgcactggatgtacagggtctagaaaagatggcaagattgaatgaagggctgtcattatttgatgcaatactgattgttccaatgtttcaaattacttggaccttcttctctatttgtataggatttgtttactttcaagaatatcaagtatttgatacactcaggataattatgtttgtgttaggcatgacatttgtctttgttgggatctccttgctagcacccgatgatagtaaaggtgatacgaaagatggttcaagcaccgccgaggactccataattgacatagacataaatggaaagatgctgatggaggagacagacacagatgatagcatctcttttgttacttctgtaaaagtaaatgcaaaacgtgtactttcaaaggcaaagtctgcatgctccatgtcccttggccttggggagagcaccataagcgcttcatcggtgcttgccatgcctatggtctcgtcaagaacaaccggcttcagaggaatcgaaaatgaccgtccaaattgctacctgtatggcgcctcttctgttgcgtccacttctagctggtgaatctgagatggatgaagtatttgatatggatggtgacgattctgcgcagcttcttgctgcagcaaacgcagcaaacagtgctcaaggaattgtcgcaactctcttggaggaatatgagggcatttttcatgatgaacacctcagatgttccttgtcacctgaatctcaaattgaagatagtggtattgaagcatcaactgttgatggtaatttggaagccaagggcaatggatttcatgatgtagatcaagaattggatgatgacaatggcgtggagcgtatacttagtgggaaattgagtgagagcagtggatatgctggcagtgacctctatgactacaagaatggcaatatcatgattgatgaaaagaccaacgtgctgaccatcatt

SEQ ID NO: 44882 - DNA, 2759 bp, Zea Mays
ctccgctccatccacgaccgcgccccccaagcgagtcgccgccatttcgccgattcccggctgctgcctagggttttggtgccagcgcggtcggagggttgtgcctgtgggtcgcgttcccagtgtcgcgcgcggcggcagaaggtggagggagtgtcggttctccggagaggaggtggaggaggttgaggtggtgggtctccacggagcgagattatcagatgccgcggcggcctttgaggaggtagtggctgtgtggtcgtgtggagcgaacaactggcagcggcggcgggactggtggaggcagccctgttttttcagcaggctcgatgactcgcccatgttcaggaagcaggtgcaccttgtgttgttaggctatactgatacatacaaacatgtgtcgaactttggccggccctttgctgtgtttcttcttttgccaattctctatgaagatatgcaaggatgtggtgtctgcaatcacctctctctctttctttgtgctgaccataataagctactcccaggatggagtcactttgcgcaatttacaatagctctaattaataaagaccctaagaaatctaagtattcggaaagagcatgattgggggtggaaaaagtttatggagctgtcagaattacatcgatggctttattgcacaggatgttcttaccatcaaagccaaacttcaagtcattagggagaagatagaccgtccatttcgttgccttgatggccagtaccgaagggaactaattagggtgtatctatcaaatgtggaacaaatttatcggcgttttattgatgaaaaaagaaggacgttcagcaggctgattgaggataaactcgggtggtccagagacttgaactcgctatcaactttcagtagacctactaaggagcgatctccgtccaattatctgccaatgaatttatgcattgagggaggaagagcagcttgtgtattggtggagagaggatccttggttgaaagtgatgtttctccatatctttataaggttaaggaagagcagttggggttcctgtgaaacatggattgtatgaggtctataatttttttatgctctatcattacttgaatgaatcatgtatcactggcaagcaacttcagctcatactatgtaggaattctaattcacattgcattctatttaattgtttgttttatgttccgttcacacgaccatgatttttgtttgcacaaatcactatatatatcctcgttgaattaaaagtctagctttgtgtcataagcatattgtctatttccccttttggctattgcaaatagcaagtatggtttgttgtttaaatgttagtctattctgtttcaagaaaaaaaagaatgcgccatcgctggggatgggtatgatgatcaagtggcgggttcttgggctccttggcagcgtcgaggcacggtatctgcccacgccgttgtcggggcctcccgcgggtacccatgctcgacctacttcattgaagcttattgagacttctgtcttagatgtggtatggacaaatatacatgccactttctagatgaagtgaagagaccaaatgtggatgtcaatcaatctctagatgaaggaatgaaaggaaggagctaagttattgcactggatgtacagggtctagaaaagatggcaagattgaatgaagggctgtcattatttgatgcaatactgattgttccaatgtttcaaattacttggaccttcttctctatttgtataggatttgtttactttcaagaatatcaagtatttgatacactcaggataattatgtttgtgttaggcatgacatttgtctttgttgggatctccttgctagcacccgatgatagtaaaggtgatacgaaagatggttcaagcaccgccgaggactccataattgacatagacatgttctattccacgaacttgtagaaagtttcaagatttgctctattgcattttgtgttcagtattgcattcagtgttttgatatataatctagacactgcagaaatggaaagatgctgatggaggagacagacacagatgatagcatctcttttgttacttctgtaaaagtaaatgcaaaacgtgtactttcaaaggcaaagtctgcatgctccatgtcccttggccttggggagagcaccataagcgcttcatcggtgcttgccatgcctatggtctcgtcaagaacaaccggcttcagaggaatcgaaaatgaccgtccaaaaattttaaaaatgatgcacactattgcatctcacacttctgaaaatcgaatgactgcatcggcagttgctacctgtatggcgcctcttctgttgcgtccacttctagctggtgaatctgagatggatgaagtatttgatatggatggtgacgattctgcgcagcttcttgctgcagcaaacgcagcaaacagtgctcaaggaattgtcgcaactctcttggaggaatatgagggcatttttcatgatgaacacctcagatgttccttgtcacctgaatctcaaattgaagatagtggtattgaagcatcaactgttgatggtaatttggaagccaagggcaatggatttcatgatgtagatcaagaattggatgatgacaatggcgtggagcgtatacttagtgggaaattgagtgagagcagtggatatgctggcagtgacctctatgactacaagaatggcaatatcatgattgatgaaaagaccaacgtgctgaccatcatt

SEQ ID NO: 44883 - DNA, 2839 bp, Zea Mays
cgccctcgtacgagatctgcgccccctgtgccccctccgctccatccacgaccgcgccccccaagcgagtcgccgccatttcgccgattcccggctgctgcctagggttttggtgccagcgcggtcggagggttgtgcctgtgggtcgcgttcccagtgtcgcgcgcggcggcagaaggtggagggagtgtcggttctccggagaggaggtggaggaggttgaggtggtgggtctccacggagcgagattatcagatgccgcggcggcctttgaggaggtagtggctgtgtggtcgtgtggagcgaacaactggcagcggcggcgggactggtggaggcagccctgttttttcagcaggctcgatgactcgcccatgttcaggaagcaggtgcaccttgtgttgttaggctatactgatacatacaaacatgtgtcgaactttggccggccctttgctgtgtttcttcttttgccaattctctatgaagatatgcaaggatgtggtgtctgcaatcacctctctctctttctttgtgctgaccataataagctactcccaggatggagtcactttgcgcaatttacaatagctctaattaataaagaccctaagaaatctaagtattcggaaagagcatgattgggggtggaaaaagtttatggagctgtcagaattacatcgatggctttattgcacaggatgttcttaccatcaaagccaaacttcaagtcattagggagaagatagaccgtccatttcgttgccttgatggccagtaccgaagggaactaattagggtgtatctatcaaatgtggaacaaatttatcggcgttttattgatgaaaaaagaaggacgttcagcaggctgattgaggataaactcgggtggtccagagacttgaactcgctatcaactttcagtagacctactaaggagcgatctccgtccaattatctgccaatgaatttatgcattgagggaggaagagcagcttgtgtattggtggagagaggatccttggttgaaagtgatgtttctccatatctttataaggttaaggaagagcagttggggttcctgtgaaacatggattgtatgaggtctataatttttttatgctctatcattacttgaatgaatcatgtatcactggcaagcaacttcagctcatactatgtaggaattctaattcacattgcattctatttaattgtttgttttatgttccgttcacacgaccatgatttttgtttgcacaaatcactatatatatcctcgttgaattaaaagtctagctttgtgtcataagcatattgtctatttccccttttggctattgcaaatagcaagtatggtttgttgtttaaatgttagtctattctgtttcaagaaaaaaaagaatgcgccatcgctggggatgggtatgatgatcaagatcgtcgaacgacgaagggcaccaaggtgttcgttggcgggctgccaatgtcggccacagaaagcatgctcctctctcatcttcgcaccatgcagtagctgctgcccatagcatgtaatgcaatggaataagttatcaaggcaactaacaccgaacatacgtcgaggcacggtatctgcccacgccgttgtcggggcctcccgcgggtacccatgctcgacctacttcattgaagatgtggtatggacaaatatacatgccactttctagatgaagtgaagagaccaaatgtggatgtcaatcaatctctagatgaaggaatgaaaggaaggagctaagttattgcactggatgtacagggtctagaaaagatggcaagattgaatgaagggctgtcattatttgatgcaatactgattgttccaatgtttcaaattacttggaccttcttctctatttgtataggatttgtttactttcaagaatatcaagtatttgatacactcaggataattatgtttgtgttaggcatgacatttgtctttgttgggatctccttgctagcacccgatgatagtaaaggtgatacgaaagatggttcaagcaccgccgaggactccataattgacatagacatgttctattccacgaacttgtagaaagtttcaagatttgctctattgcattttgtgttcagtattgcattcagtgttttgatatataatctagacactgcagaaatggaaagatgctgatggaggagacagacacagatgatagcatctcttttgttacttctgtaaaagtaaatgcaaaacgtgtactttcaaaggcaaagtctgcatgctccatgtcccttggccttggggagagcaccataagcgcttcatcggtgcttgccatgcctatggtctcgtcaagaacaaccggcttcagaggaatcgaaaatgaccgtccaaattgctacctgtatggcgcctcttctgttgcgtccacttctagctggtgaatctgagatggatgaagtatttgatatggatggtgacgattctgcgcagcttcttgctgcagcaaacgcagcaaacagtgctcaaggaattgtcgcaactctcttggaggaatatgagggcatttttcatgatgaacacctcagatgttccttgtcacctgaatctcaaattgaagatagtggtattgaagcatcaactgttgatggtaatttggaagccaagggcaatggatttcatgatgtagatcaagaattggatgatgacaatggcgtggagcgtatacttagtgggaaattgagtgagagcagtggatatgctggcagtgacctctatgactacaagaatggcaatatcatgattgatgaaaagaccaacgtgctgaccatcatt

SEQ ID NO: 44884 - DNA, 2766 bp, Zea Mays
cgccctcgtacgagatctgcgccccctgtgccccctccgctccatccacgaccgcgccccccaagcgagtcgccgccatttcgccgattcccggctgctgcctagggttttggtgccagcgcggtcggagggttgtgcctgtgggtcgcgttcccagtgtcgcgcgcggcggcagaaggtggagggagtgtcggttctccggagaggaggtggaggaggttgaggtggtgggtctccacggagcgagattatcagatgccgcggcggcctttgaggaggtagtggctgtgtggtcgtgtggagcgaacaactggcagcggcggcgggactggtggaggcagccctgttttttcagcaggctcgatgactcgcccatgttcaggaagcaggtgcaccttgtgttgttaggctatactgatacatacaaacatgtgtcgaactttggccggccctttgctgtgtttcttcttttgccaattctctatgaagatatgcaaggatgtggtgtctgcaatcacctctctctctttctttgtgctgaccataataagctactcccaggatggagtcactttgcgcaatttacaatagctctaattaataaagaccctaagaaatctaagtattcggaaagagcatgattgggggtggaaaaagtttatggagctgtcagaattacatcgatggctttattgcacaggatgttcttaccatcaaagccaaacttcaagtcattagggagaagatagaccgtccatttcgttgccttgatggccagtaccgaagggaactaattagggtgtatctatcaaatgtggaacaaatttatcggcgttttattgatgaaaaaagaaggacgttcagcaggctgattgaggataaactcgggtggtccagagacttgaactcgctatcaactttcagtagacctactaaggagcgatctccgtccaattatctgccaatgaatttatgcattgagggaggaagagcagcttgtgtattggtggagagaggatccttggttgaaagtgatgtttctccatatctttataaggttaaggaagagcagttggggttcctgtgaaacatggattgtatgaggtctataatttttttatgctctatcattacttgaatgaatcatgtatcactggcaagcaacttcagctcatactatgtaggaattctaattcacattgcattctatttaattgtttgttttatgttccgttcacacgaccatgatttttgtttgcacaaatcactatatatatcctcgttgaattaaaagtctagctttgtgtcataagcatattgtctatttccccttttggctattgcaaatagcaagtatggtttgttgtttaaatgttagtctattctgtttcaagaaaaaaaagaatgcgccatcgctggggatgggtatgatgatcaagatcgtcgaacgacgaagggcaccaaggtgttcgttggcgggctgccaatgtcggccacagaaagcatgctcctctctcatcttcgcaccatgcagtagctgctgcccatagcatgtaatgcaatggaataagttatcaaggcaactaacaccgaacatacgtcgaggcacggtatctgcccacgccgttgtcggggcctcccgcgggtacccatgctcgacctacttcattgaagcaccagcttattgagacttctgtcttagatgtggtatggacaaatatacatgccactttctagatgaagtgaagagaccaaatgtggatgtcaatcaatctctagatgaaggaatgaaaggaaggagctaagttattgcactggatgtacagggtctagaaaagatggcaagattgaatgaagggctgtcattatttgatgcaatactgattgttccaatgtttcaaattacttggaccttcttctctatttgtataggatttgtttactttcaagaatatcaagtatttgatacactcaggataattatgtttgtgttaggcatgacatttgtctttgttgggatctccttgctagcacccgatgatagtaaaggtgatacgaaagatggttcaagcaccgccgaggactccataattgacatagacataaatggaaagatgctgatggaggagacagacacagatgatagcatctcttttgttacttctgtaaaagtaaatgcaaaacgtgtactttcaaaggcaaagtctgcatgctccatgtcccttggccttggggagagcaccataagcgcttcatcggtgcttgccatgcctatggtctcgtcaagaacaaccggcttcagaggaatcgaaaatgaccgtccaaattgctacctgtatggcgcctcttctgttgcgtccacttctagctggtgaatctgagatggatgaagtatttgatatggatggtgacgattctgcgcagcttcttgctgcagcaaacgcagcaaacagtgctcaaggaattgtcgcaactctcttggaggaatatgagggcatttttcatgatgaacacctcagatgttccttgtcacctgaatctcaaattgaagatagtggtattgaagcatcaactgttgatggtaatttggaagccaagggcaatggatttcatgatgtagatcaagaattggatgatgacaatggcgtggagcgtatacttagtgggaaattgagtgagagcagtggatatgctggcagtgacctctatgactacaagaatggcaatatcatgattgatgaaaagaccaacgtgctgaccatcatt

SEQ ID NO: 44885 - DNA, 2719 bp, Zea Mays
ccccgctctagacgctgacacgccctcgtacgagatctgcgccccctgtgccccctccgctccatccacgaccgcgccccccaagcgagtcgccgccatttcgccgattcccggctgctgcctagggttttggtgccagcgcggtcggagggttgtgcctgtgggtcgcgttcccagtgtcgcgcgcggcggcagaaggtggagggagtgtcggttctccggagaggaggtggaggaggttgaggtggtgggtctccacggagcgagattatcagatgccgcggcggcctttgaggaggtagtggctgtgtggtcgtgtggagcgaacaactggcagcggcggcgggactggtggaggcagccctgttttttcagcaggctcgatgactcgcccatgttcaggaagcaggtgcaccttgtgttgttaggctatactgatacatacaaacatgtgtcgaactttggccggccctttgctgtgtttcttcttttgccaattctctatgaagatatgcaaggatgtggtgtctgcaatcacctctctctctttctttgtgctgaccataataagctactcccaggatggagtcactttgcgcaatttacaatagctctaattaataaagaccctaagaaatctaagtattcggagcatgattgggggtggaaaaagtttatggagctgtcagaattacatcgatggctttattgcacaggatgttcttaccatcaaagccaaacttcaagtcattagggagaagatagaccgtccatttcgttgccttgatggccagtaccgaagggaactaattagggtgtatctatcaaatgtggaacaaatttatcggcgttttattgatgaaaaaagaaggacgttcagcaggctgattgaggataaactcgggtggtccagagacttgaactcgctatcaactttcagtagacctactaaggagcgatctccgtccaattatctgccaatgaatttatgcattgagggaggaagagcagcttgtgtattggtggagagaggatccttggttgaaagtgatgtttctccatatctttataaggttaaggaagagcagttggggttcctgtgaaacatggattgtatgaggtctataatttttttatgctctatcattacttgaatgaatcatgtatcactggcaagcaacttcagctcatactatgtaggaattctaattcacattgcattctatttaattgtttgttttatgttccgttcacacgaccatgatttttgtttgcacaaatcactatatatatcctcgttgaattaaaagtctagctttgtgtcataagcatattgtctatttccccttttggctattgcaaatagcaagtatggtttgttgtttaaatgttagtctattctgtttcaagaaaaaaaagaatgcgccatcgctggggatgggtatgatgatcaagatcgtcgaacgacgaagggcaccaaggtgttcgttggcgggctgccaatgtcggccacagaaagcatgctcctctctcatcttcgcaccatgcagtagctgctgcccatagcatgtaatgcaatggaataagttatcaaggcaactaacaccgaacatacgtcgaggcacggtatctgcccacgccgttgtcggggcctcccgcgggtacccatgctcgacctacttcattgaagatggcaagattgaatgaagggctgtcattatttgatgcaatactgattgttccaatgtttcaaattacttggaccttcttctctatttgtataggatttgtttactttcaagaatatcaagtatttgatacactcaggataattatgtttgtgttaggcatgacatttgtctttgttgggatctccttgctagcacccgatgatagtaaaggtgatacgaaagatggttcaagcaccgccgaggactccataattgacatagacatgttctattccacgaacttgtagaaagtttcaagatttgctctattgcattttgtgttcagtattgcattcagtgttttgatatataatctagacactgcagaaatggaaagatgctgatggaggagacagacacagatgatagcatctcttttgttacttctgtaaaagtaaatgcaaaacgtgtactttcaaaggcaaagtctgcatgctccatgtcccttggccttggggagagcaccataagcgcttcatcggtgcttgccatgcctatggtctcgtcaagaacaaccggcttcagaggaatcgaaaatgaccgtccaaattgctacctgtatggcgcctcttctgttgcgtccacttctagctggtgaatctgagatggatgaagtatttgatatggatggtgacgattctgcgcagcttcttgctgcagcaaacgcagcaaacagtgctcaaggaattgtcgcaactctcttggaggaatatgagggcatttttcatgatgaacacctcagatgttccttgtcacctgaatctcaaattgaagatagtggtattgaagcatcaactgttgatggtaatttggaagccaagggcaatggatttcatgatgtagatcaagaattggatgatgacaatggcgtggagcgtatacttagtgggaaattgagtgagagcagtggatatgctggcagtgacctctatgactacaagaatggcaatatcatgattgatgaaaagaccaacgtgctgaccatcatt

SEQ ID NO: 44886 - DNA, 3268 bp, Zea Mays
ccccgctctagacgctgacacgccctcgtacgagatctgcgccccctgtgccccctccgctccatccacgaccgcgccccccaagcgagtcgccgccatttcgccgattcccggctgctgcctagggttttggtgccagcgcggtcggagggttgtgcctgtgggtcgcgttcccagtgtcgcgcgcggcggcagaaggtggagggagtgtcggttctccggagaggaggtggaggaggttgaggtggtgggtctccacggagcgagattatcagatgccgcggcggcctttgaggaggtagtggctgtgtggtcgtgtggagcgaacaactggcagcggcggcgggactggtggaggcagccctgttttttcagcaggctcgatgactcgcccatgttcaggaagcaggtgcaccttgtgttgttaggctatactgatacatacaaacatgtgtcgaactttggccggccctttgctgtgtttcttcttttgccaattctctatgaagatatgcaaggatgtggtgtctgcaatcacctctctctctttctttgtgctgaccataataagctactcccaggatggagtcactttgcgcaatttacaatagctctaattaataaagaccctaagaaatctaagtattcggagcatgattgggggtggaaaaagtttatggagctgtcagaattacatcgatggctttattgcacaggatgttcttaccatcaaagccaaacttcaagtcattagggagaagatagaccgtccatttcgttgccttgatggccagtaccgaagggaactaattagggtgtatctatcaaatgtggaacaaatttatcggcgttttattgatgaaaaaagaaggacgttcagcaggctgattgaggataaactcgggtggtccagagacttgaactcgctatcaactttcagtagacctactaaggagcgatctccgtccaattatctgccaatgaatttatgcattgtaccatgaacagagatagtcaagaaattagactatttcaagttcagcgagagggactatatggcactggaggcgtctttcttagagattgcgatctcaacatatatttggatgcctaaatgtttagttagaaatttacaccatttctaataattctacagtgattgaaaatacaatctacctcaaaactaataacatcgttagagggaggaagagcagcttgtgtattggtggagagaggatccttggttgaaagtgatgtttctccatatctttataaggttaaggaagagcagttggggttcctgtgaaacatggattgtatgaggtctataatttttttatgctctatcattacttgaatgaatcatgtatcactggcaagcaacttcagctcatactatgtaggaattctaattcacattgcattctatttaattgtttgttttatgttccgttcacacgaccatgatttttgtttgcacaaatcactatatatatcctcgttgaattaaaagtctagctttgtgtcataagcatattgtctatttccccttttggctattgcaaatagcaagtatggtttgttgtttaaatgttagtctattctgtttcaagaaaaaaaagaatgcgccatcgctggggatgggtatgatgatcaagatcgtcgaacgacgaagggcaccaaggtgttcgttggcgggctgccaatgtcggccacagaaagcatgctcctctctcatcttcgcaccatgcagtagctgctgcccatagcatgtaatgcaatggaataagttatcaaggcaactaacaccgaacatacgtcgaggcacggtatctgcccacgccgttgtcggggcctcccgcgggtacccatgctcgacctacttcattgaaggtaaaactttgactatttgggatctccatttcattattcagatatgctcaattctgaactagaacagatgcataataacttttagaaaccagaacaatttcaagacatttcatcattctacttttttctatagcaccagcttattgagacttctgtcttagatgtggtatggacaaatatacatgccactttctagatgaagtgaagagaccaaatgtggatgtcaatcaatctctagatgaaggaatgaaaggaaggagctaagttattgcactggatgtacagggtctagaaaagatggcaagattgaatgaagggctgtcattatttgatgcaatactgattgttccaatgtttcaaattacttggaccttcttctctatttgtataggatttgtttactttcaagaatatcaagtatttgatacactcaggataattatgtttgtgttaggcatgacatttgtctttgttgggatctccttgctagcacccgatgatagtaaaggtgatacgaaagatggttcaagcaccgccgaggactccataattgacatagacatgttctattccacgaacttgtagaaagtttcaagatttgctctattgcattttgtgttcagtattgcattcagtgttttgatatataatctagacactgcagaaatggaaagatgctgatggaggagacagacacagatgatagcatctcttttgttacttctgtaaaatctgcatgctccatgtcccttggccttggggagagcaccataagcgcttcatcggtgcttgccatgcctatggtctcgtcaagaacaaccggcttcagaggaatcgaaaatgaccgtccaaattgctacctgtatggcgcctcttctgttgcgtccacttctagctggtgaatctgagatggatgaagtatttgatatggatggtgacgattctgcgcagcttcttgctgcagcaaacgcagcaaacagtgctcaaggaattgtcgcaactctcttggaggaatatgagggcatttttcatgatgaacacctcagatgttccttgtcacctgaatctcaaattgaagatagtggtattgaagcatcaactgttgatggtaatttggaagccaagggcaatggatttcatgatgtagatcaagaattggatgatgacaatggcgtggagcgtatacttagtgggaaattgagtgagagcagtggatatgctggcagtgacctctatgactacaagtctcgagaaccagattactgcattggagaacaagtgctcaggtgattaccaatggattggtttctgtcacaatgatcttcagaatggcaatatcatgattgatgaaaagaccaacgtgctgaccatcatt

SEQ ID NO: 44887 - DNA, 2712 bp, Zea Mays
ccatccacgaccgcgccccccaagcgagtcgccgccatttcgccgattcccggctgctgcctagggttttggtgccagcgcggtcggagggttgtgcctgtgggtcgcgttcccagtgtcgcgcgcggcggcagaaggtggagggagtgtcggttctccggagaggaggtggaggaggttgaggtggtgggtctccacggagcgagattatcagatgccgcggcggcctttgaggaggtagtggctgtgtggtcgtgtggagcgaacaactggcagcggcggcgggactggtggaggcagccctgttttttcagcaggctcgatgactcgcccatgttcaggaagcaggatggagtcactttgcgcaatttacaatagctctaattaataaagaccctaagaaatctaagtattcggaaagagcatgattgggggtggaaaaagtttatggagctgtcagaattacatcgatggctttattgcacaggatgttcttaccatcaaagccaaacttcaagtcattagggagaagatagaccgtccatttcgttgccttgatggccagtaccgaagggaactaattagggtgtatctatcaaatgtggaacaaatttatcggcgttttattgatgaaaaaagaaggacgttcagcaggctgattgaggataaactcgggtggtccagagacttgaactcgctatcaactttcagtagacctactaaggagcgatctccgtccaattatctgccaatgaatttatgcattgagggaggaagagcagcttgtgtattggtggagagaggatccttggttgaaagtgatgtttctccatatctttataaggttaaggaagagcagttggggttcctgtgaaacatggattgtatgaggtctataatttttttatgctctatcattacttgaatgaatcatgtatcactggcaagcaacttcagctcatactatgtaggaattctaattcacattgcattctatttaattgtttgttttatgttccgttcacacgaccatgatttttgtttgcacaaatcactatatatatcctcgttgaattaaaagtctagctttgtgtcataagcatattgtctatttccccttttggctattgcaaatagcaagtatggtttgttgtttaaatgttagtctattctgtttcaagaaaaaaaagaatgcgccatcgctggggatgggtatgatgatcaagatcgtcgaacgacgaagggcaccaaggtgttcgttggcgggctgccaatgtcggccacagaaagcatgctcctctctcatcttcgcaccatgcagtagctgctgcccatagcatgtaatgcaatggaataagttatcaaggcaactaacaccgaacatacgtcgaggcacggtatctgcccacgccgttgtcggggcctcccgcgggtacccatgctcgacctacttcattgaagcaccagcttattgagacttctgtcttagatgtggtatggacaaatatacatgccactttctagatgaagtgaagagaccaaatgtggatgtcaatcaatctctagatgaaggaatgaaaggaaggagctaagttattgcactggatgtacagggtctagaaaagatggcaagattgaatgaagggctgtcattatttgatgcaatactgattgttccaatgtttcaaattacttggaccttcttctctatttgtataggatttgtttactttcaagaatatcaagtatttgatacactcaggataattatgtttgtgttaggcatgacatttgtctttgttgggatctccttgctagcacccgatgatagtaaaggtgatacgaaagatggttcaagcaccgccgaggactccataattgacatagacatgttctattccacgaacttgtagaaagtttcaagatttgctctattgcattttgtgttcagtattgcattcagtgttttgatatataatctagacactgcagaaatggaaagatgctgatggaggagacagacacagatgatagcatctcttttgttacttctgtaaaagtaaatgcaaaacgtgtactttcaaaggcaaaggtcatttttgtttcttcctagatctgattgtaccatataaatctgtcacaagtcttgcctctctcacctgatcttatttgtagtctgcatgctccatgtcccttggccttggggagagcaccataagcgcttcatcggtgcttgccatgcctatggtctcgtcaagaacaaccggcttcagaggaatcgaaaatgaccgtccaaattgctacctgtatggcgcctcttctgttgcgtccacttctagctggtgaatctgagatggatgaagtatttgatatggatggtgacgattctgcgcagcttcttgctgcagcaaacgcagcaaacagtgctcaaggaattgtcgcaactctcttggaggaatatgagggcatttttcatgatgaacacctcagatgttccttgtcacctgaatctcaaattgaagatagtggtattgaagcatcaactgttgatggtaatttggaagccaagggcaatggatttcatgatgtagatcaagaattggatgatgacaatggcgtggagcgtatacttagtgggaaattgagtgagagcagtggatatgctggcagtgacctctatgactacaagctgctcctcctaaagaagccaag

SEQ ID NO: 44888 - DNA, 1729 bp, Zea Mays
ctttgtgctgaccataataagctactcccaggatggagtcactttgcgcaatttacaatagctctaattaataaagaccctaagaaatctaagtattcggatacactgcatcggttttggaagaaagagcatgattgggggtggaaaaagtttatggagctgtcagaattacatcgatggctttattgcacaggatgttcttaccatcaaagccaaacttcaagtcattagaagatagaccgtccatttcgttgccttgatggccagtaccgaagggaactaattagggtgtatctatcaaatgtggaacaaatttatcggcgttttattgatgaaaaaagaaggacgttcagcaggctgattgaggataaactcgggtggtccaggttagataaacttatgaatgtttcagtggattttggcgagccatttttcatctttgattttatctgaacagagacttgaactcgctatcaactttcagtagacctactaaggagcgatctccgtccaattatctgccaatgaatttatgcattgagggaggaagagcagcttgtgtattggtggagagaggatccttggttgaaagtgatgtttctccatatctttataaggttaaggaagagcagttggggttcctgtgaaacatggattgtatgaggtctataatttttttatgctctatcattacttgaatgaatcatgtatcactggcaagcaacttcagctcatactatgtaggaattctaattcacattgcattctatttaattgtttgttttatgttccgttcacacgaccatgatttttgtttgcacaaatcactatatatatcctcgttgaattaaaagtctagctttgtgtcataagcatattgtctatttccccttttggctattgcaaatagcaagtatggtttgttgtttaaatgttagtctattctgtttcaagaaaaaaaagaatgcgccatcgctggggatgggtatgatgatcaagtggcgggttcttgggctccttggcagcgtcgaggcacggtatctgcccacgccgttgtcggggcctcccgcgggtacccatgctcgacctacttcattgaagatggcaagattgaatgaagggctgtcattatttgatgcaatactgattgttccaatgtttcaaattacttggaccttcttctctatttgtataggatttgtttactttcaagaatatcaagtatttgatacactcaggataattatgtttgtgttaggcatgacatttgtctttgttgggatctccttgctagcacccgatgatagtaaaggtgatacgaaagatggttcaagcaccgccgaggactccataattgacatagacataaatggaaagatgctgatggaggagacagacacagatgatagcatctcttttgttacttctgtaaaagtaaatgcaaaacgtgtactttcaaaggcaaagtctgcatgctccatgtcccttggccttggggagagcaccataagcgcttcatcggtgcttgccatgcctatggtctcgtcaagaacaaccggcttcagaggaatcgaaaatgaccgtccaaagtatgtccctttaagaaccactgattggagtaacctatagctgatggtaatatataggtacacaggaaaggtctttgtttttttatgttgcctagcggatggcagtgaagttttttgttgcttccagaggcgcaactgtt

SEQ ID NO: 44889 - DNA, 2577 bp, Zea Mays
cacgaccgcgccccccaagcgagtcgccgccatttcgccgattcccggctgctgcctagggttttggtgccagcgcggtcggagggttgtgcctgtgggtcgcgttcccagtgtcgcgcgcggcggcagaaggtggagggagtgtcggttctccggagaggaggtggaggaggttgaggtggtgggtctccacggagcgagattatcagatgccgcggcggcctttgaggaggtagtggctgtgtggtcgtgtggagcgaacaactggcagcggcggcgggactggtggaggcagccctgttttttcagcaggctcgatgactcgcccatgttcaggaagcaggtgcaccttgtgttgttaggctatactgatacatacaaacatgtgtcgaactttggccggccctttgctgtgtttcttcttttgccaattctctatgaagatatgcaaggatgtggtgtctgcaatcacctctctctctttctttgtgctgaccataataagctactcccaggatggagtcactttgcgcaatttacaatagctctaattaataaagaccctaagaaatctaagtattcggaaagagcatgattgggggtggaaaaagtttatggagctgtcagaattacatcgatggctttattgcacaggatgttcttaccatcaaagccaaacttcaagtcattagggagaagatagaccgtccatttcgttgccttgatggccagtaccgaagggaactaattagggtgtatctatcaaatgtggaacaaatttatcggcgttttattgatgaaaaaagaaggacgttcagcaggctgattgaggataaactcgggtggtccagagacttgaactcgctatcaactttcagtagacctactaaggagcgatctccgtccaattatctgccaatgaatttatgcattgtaccatgaacagagatagtcaagaaattagactatttcaagttcagcgagagggactatatggcactggaggcgtctttcttagagattgcgatctcaacatatatttggatgcctaaatgtttagttagaaatttacaccatttctaataattctacagtgattgaaaatacaatctacctcaaaactaataacatcgttagagggaggaagagcagcttgtgtattggtggagagaggatccttggttgaaagtgatgtttctccatatctttataaggttaaggaagagcagttggggttcctgtgaaacatggattgtatgaggtctataatttttttatgctctatcattacttgaatgaatcatgtatcactggcaagcaacttcagctcatactatgtaggaattctaattcacattgcattctatttaattgtttgttttatgttccgttcacacgaccatgatttttgtttgcacaaatcactatatatatcctcgttgaattaaaagtctagctttgtgtcataagcatattgtctatttccccttttggctattgcaaatagcaagtatggtttgttgtttaaatgttagtctattctgtttcaagaaaaaaaagaatgcgccatcgctggggatgggtatgatgatcaagatcgtcgaacgacgaagggcaccaaggtgttcgttggcgggctgccaatgtcggccacagaaagcatgctcctctctcatcttcgcaccatgcagtagctgctgcccatagcatgtaatgcaatggaataagttatcaaggcaactaacaccgaacatacgtcgaggcacggtatctgcccacgccgttgtcggggcctcccgcgggtacccatgctcgacctacttcattgaagcaccagcttattgagacttctgtcttagatgtggtatggacaaatatacatgccactttctagatgaagtgaagagaccaaatgtggatgtcaatcaatctctagatgaaggaatgaaaggaaggagctaagttattgcactggatgtacagggtctagaaaagatggcaagattgaatgaagggctgtcattatttgatgcaatactgattgttccaatgtttcaaattacttggaccttcttctctatttgtataggatttgtttactttcaagaatatcaagtatttgatacactcaggataattatgtttgtgttaggcatgacatttgtctttgttgggatctccttgctagcacccgatgatagtaaagacactgcagaaatggaaagatgctgatggaggagacagacacagatgatagcatctcttttgttacttctgtaaaagtaaatgcaaaacgtgtactttcaaaggcaaagtctgcatgctccatgtcccttggccttggggagagcaccataagcgcttcatcggtgcttgccatgcctatggtctcgtcaagaacaaccggcttcagaggaatcgaaaatgaccgtccaaagtatgtccctttaagaaccactgattggagtaacctatagctgatggtaatatataggtacacaggaaaggtctttgtttttttatgttgcctagcggatggcagtgaagttttttgttgcttccagaggcgcaactgtt

SEQ ID NO: 44890 - DNA, 2176 bp, Zea Mays
agacgctgacacgccctcgtacgagatctgcgccccctgtgccccctccgctccatccacgaccgcgccccccaagcgagtcgccgccatttcgccgattcccggctgctgcctagggttttggtgccagcgcggtcggagggttgtgcctgtgggtcgcgttcccagtgtcgcgcgcggcggcagaaggtggagggagtgtcggttctccggagaggaggtggaggaggttgaggtggtgggtctccacggagcgagattatcagatgccgcggcggcctttgaggaggtagtggctgtgtggtcgtgtggagcgaacaactggcagcggcggcgggactggtggaggcagccctgttttttcagcaggctcgatgactcgcccatgttcaggaagcaggtgcaccttgtgttgttaggctatactgatacatacaaacatgtgtcgaactttggccggccctttgctgtgtttcttcttttgccaattctctatgaagatatgcaaggatgtggtgtctgcaatcacctctctctctttctttgtgctgaccataataagctactcccaggatggagtcactttgcgcaatttacaatagctctaattaataaagaccctaagaaatctaagtattcggaaagagcatgattgggggtggaaaaagtttatggagctgtcagaattacatcgatggctttattgcacaggatgttcttaccatcaaagccaaacttcaagtcattagaagatagaccgtccatttcgttgccttgatggccagtaccgaagggaactaattagggtgtatctatcaaatgtggaacaaatttatcggcgttttattgatgaaaaaagaaggacgttcagcaggctgattgaggataaactcgggtggtccagagacttgaactcgctatcaactttcagtagacctactaaggagcgatctccgtccaattatctgccaatgaatttatgcattgagggaggaagagcagcttgtgtattggtggagagaggatccttggttgaaagtgatgtttctccatatctttataaggttaaggaagagcagttggggttcctgtgaaacatggattgtatgaggtctataatttttttatgctctatcattacttgaatgaatcatgtatcactggcaagcaacttcagctcatactatgtaggaattctaattcacattgcattctatttaattgtttgttttatgttccgttcacacgaccatgatttttgtttgcacaaatcactatatatatcctcgttgaattaaaagtctagctttgtgtcataagcatattgtctatttccccttttggctattgcaaatagcaagtatggtttgttgtttaaatgttagtctattctgtttcaagaaaaaaaagaatgcgccatcgctggggatgggtatgatgatcaagtggcgggttcttgggctccttggcagcgtcgaggcacggtatctgcccacgccgttgtcggggcctcccgcgggtacccatgctcgacctacttcattgaagatggcaagattgaatgaagggctgtcattatttgatgcaatactgattgttccaatgtttcaaattacttggaccttcttctctatttgtataggatttgtttactttcaagaatatcaagtatttgatacactcaggataattatgtttgtgttaggcatgacatttgtctttgttgggatctccttgctagcacccgatgatagtaaaggtgatacgaaagatggttcaagcaccgccgaggactccataattgacatagacataaatggaaagatgctgatggaggagacagacacagatgatagcatctcttttgttacttctgtaaaagtaaatgcaaaacgtgtactttcaaaggcaaagtctgcatgctccatgtcccttggccttggggagagcaccataagcgcttcatcggtgcttgccatgcctatggtctcgtcaagaacaaccggcttcagaggaatcgaaaatgaccgtccaaagtatgtccctttaagaaccactgattggagtaacctatagctgatggtaatatataggtacacaggaaaggtctttgtttttttatgttgcctagcggatggcagtgaagttttttgttgcttccagaggcgcaactgtt

SEQ ID NO: 44891 - DNA, 2233 bp, Zea Mays
ctagacgctgacacgccctcgtacgagatctgcgccccctgtgccccctccgctccatccacgaccgcgccccccaagcgagtcgccgccatttcgccgattcccggctgctgcctagggttttggtgccagcgcggtcggagggttgtgcctgtgggtcgcgttcccagtgtcgcgcgcggcggcagaaggtggagggagtgtcggttctccggagaggaggtggaggaggttgaggtggtgggtctccacggagcgagattatcagatgccgcggcggcctttgaggaggtagtggctgtgtggtcgtgtggagcgaacaactggcagcggcggcgggactggtggaggcagccctgttttttcagcaggctcgatgactcgcccatgttcaggaagcaggtgcaccttgtgttgttaggctatactgatacatacaaacatgtgtcgaactttggccggccctttgctgtgtttcttcttttgccaattctctatgaagatatgcaaggatgtggtgtctgcaatcacctctctctctttctttgtgctgaccataataagctactcccaggatggagtcactttgcgcaatttacaatagctctaattaataaagaccctaagaaatctaagtattcggaaagagcatgattgggggtggaaaaagtttatggagctgtcagaattacatcgatggctttattgcacaggatgttcttaccatcaaagccaaacttcaagtcattagggagaagatagaccgtccatttcgttgccttgatggccagtaccgaagggaactaattagggtgtatctatcaaatgtggaacaaatttatcggcgttttattgatgaaaaaagaaggacgttcagcaggctgattgaggataaactcgggtggtccagtttcagtggattttggcgagccatttttcatctttgattttatctgaacagagacttgaactcgctatcaactttcagtagacctactaaggagcgatctccgtccaattatctgccaatgaatttatgcattgagggaggaagagcagcttgtgtattggtggagagaggatccttggttgaaagtgatgtttctccatatctttataaggttaaggaagagcagttggggttcctgtgaaacatggattgtatgaggtctataatttttttatgctctatcattacttgaatgaatcatgtatcactggcaagcaacttcagctcatactatgtaggaattctaattcacattgcattctatttaattgtttgttttatgttccgttcacacgaccatgatttttgtttgcacaaatcactatatatatcctcgttgaattaaaagtctagctttgtgtcataagcatattgtctatttccccttttggctattgcaaatagcaagtatggtttgttgtttaaatgttagtctattctgtttcaagaaaaaaaagaatgcgccatcgctggggatgggtatgatgatcaagtggcgggttcttgggctccttggcagcgtcgaggcacggtatctgcccacgccgttgtcggggcctcccgcgggtacccatgctcgacctacttcattgaagatggcaagattgaatgaagggctgtcattatttgatgcaatactgattgttccaatgtttcaaattacttggaccttcttctctatttgtataggatttgtttactttcaagaatatcaagtatttgatacactcaggataattatgtttgtgttaggcatgacatttgtctttgttgggatctccttgctagcacccgatgatagtaaaggtgatacgaaagatggttcaagcaccgccgaggactccataattgacatagacataaatggaaagatgctgatggaggagacagacacagatgatagcatctcttttgttacttctgtaaaagtaaatgcaaaacgtgtactttcaaaggcaaagtctgcatgctccatgtcccttggccttggggagagcaccataagcgcttcatcggtgcttgccatgcctatggtctcgtcaagaacaaccggcttcagaggaatcgaaaatgaccgtccaaagtatgtccctttaagaaccactgattggagtaacctatagctgatggtaatatataggtacacaggaaaggtctttgtttttttatgttgcctagcggatggcagtgaagttttttgttgcttccagaggcgcaactgtt

SEQ ID NO: 44892 - DNA, 2449 bp, Zea Mays
ccgctctagacgctgacacgccctcgtacgagatctgcgccccctgtgccccctccgctccatccacgaccgcgccccccaagcgagtcgccgccatttcgccgattcccggctgctgcctagggttttggtgccagcgcggtcggagggttgtgcctgtgggtcgcgttcccagtgtcgcgcgcggcggcagaaggtggagggagtgtcggttctccggagaggaggtggaggaggttgaggtggtgggtctccacggagcgagattatcagatgccgcggcggcctttgaggaggtagtggctgtgtggtcgtgtggagcgaacaactggcagcggcggcgggactggtggaggcagccctgttttttcagcaggctcgatgactcgcccatgttcaggaagcaggtgcaccttgtgttgttaggctatactgatacatacaaacatgtgtcgaactttggccggccctttgctgtgtttcttcttttgccaattctctatgaagatatgcaaggatgtggtgtctgcaatcacctctctctctttctttgtgctgaccataataagctactcccaggatggagtcactttgcgcaatttacaatagctctaattaataaagaccctaagaaatctaagtattcggatacactgcatcggttttggaagaaagagcatgattgggggtggaaaaagtttatggagctgtcagaattacatcgatggctttattgcacaggatgttcttaccatcaaagccaaacttcaagtcattagggagaagatagaccgtccatttcgttgccttgatggccagtaccgaagggaactaattagggtgtatctatcaaatgtggaacaaatttatcggcgttttattgatgaaaaaagaaggacgttcagcaggctgattgaggataaactcgggtggtccagagacttgaactcgctatcaactttcagtagacctactaaggagcgatctccgtccaattatctgccaatgaatttatgcattgagggaggaagagcagcttgtgtattggtggagagaggatccttggttgaaagtgatgtttctccatatctttataaggttaaggaagagcagttggggttcctgtgaaacatggattgtatgaggtctataatttttttatgctctatcattacttgaatgaatcatgtatcactggcaagcaacttcagctcatactatgtaggaattctaattcacattgcattctatttaattgtttgttttatgttccgttcacacgaccatgatttttgtttgcacaaatcactatatatatcctcgttgaattaaaagtctagctttgtgtcataagcatattgtctatttccccttttggctattgcaaatagcaagtatggtttgttgtttaaatgttagtctattctgtttcaagaaaaaaaagaatgcgccatcgctggggatgggtatgatgatcaagatcgtcgaacgacgaagggcaccaaggtgttcgttggcgggctgccaatgtcggccacagaaagcatgctcctctctcatcttcgcaccatgcagtagctgctgcccatagcatgtaatgcaatggaataagttatcaaggcaactaacaccgaacatagtaagaaaagaaaccaaacgtgaatatgtctcattttgtgttattggtctccctgggattctcgctcttattggtcacagtggcgggttcttgggctccttggcagcgtcgaggcacggtatctgcccacgccgttgtcggggcctcccgcgggtacccatgctcgacctacttcattgaagatggcaagattgaatgaagggctgtcattatttgatgcaatactgattgttccaatgtttcaaattacttggaccttcttctctatttgtataggatttgtttactttcaagaatatcaagtatttgatacactcaggataattatgtttgtgttaggcatgacatttgtctttgttgggatctccttgctagcacccgatgatagtaaaggtgatacgaaagatggttcaagcaccgccgaggactccataattgacatagacataaatggaaagatgctgatggaggagacagacacagatgatagcatctcttttgttacttctgtaaaagtaaatgcaaaacgtgtactttcaaaggcaaagtctgcatgctccatgtcccttggccttggggagagcaccataagcgcttcatcggtgcttgccatgcctatggtctcgtcaagaacaaccggcttcagaggaatcgaaaatgaccgtccaaagtatgtccctttaagaaccactgattggagtaacctatagctgatggtaatatataggtacacaggaaaggtctttgtttttttatgttgcctagcggatggcagtgaagttttttgttgcttccagaggcgcaactgtt

SEQ ID NO: 44893 - DNA, 2257 bp, Zea Mays
ccccgctctagacgctgacacgccctcgtacgagatctgcgccccctgtgccccctccgctccatccacgaccgcgccccccaagcgagtcgccgccatttcgccgattcccggctgctgcctagggttttggtgccagcgcggtcggagggttgtgcctgtgggtcgcgttcccagtgtcgcgcgcggcggcagaaggtggagggagtgtcggttctccggagaggaggtggaggaggttgaggtggtgggtctccacggagcgagattatcagatgccgcggcggcctttgaggaggtagtggctgtgtggtcgtgtggagcgaacaactggcagcggcggcgggactggtggaggcagccctgttttttcagcaggctcgatgactcgcccatgttcaggaagcaggtgcaccttgtgttgttaggctatactgatacatacaaacatgtgtcgaactttggccggccctttgctgtgtttcttcttttgccaattctctatgaagatatgcaaggatgtggtgtctgcaatcacctctctctctttctttgtgctgaccataataagctactcccaggatggagtcactttgcgcaatttacaatagctctaattaataaagaccctaagaaatctaagtattcggaaagagcatgattgggggtggaaaaagtttatggagctgtcagaattacatcgatggctttattgcacaggatgttcttaccatcaaagccaaacttcaagtcattagggagaagatagaccgtccatttcgttgccttgatggccagtaccgaagggaactaattagggtgtatctatcaaatgtggaacaaatttatcggcgttttattgatgaaaaaagaaggacgttcagcaggctgattgaggataaactcgggtggtccagagacttgaactcgctatcaactttcagtagacctactaaggagcgatctccgtccaattatctgccaatgaatttatgcattgagggaggaagagcagcttgtgtattggtggagagaggatccttggttgaaagtgatgtttctccatatctttataaggttaaggaagagcagttggggttcctgtgaaacatggattgtatgaggtctataatttttttatgctctatcattacttgaatgaatcatgtatcactggcaagcaacttcagctcatactatgtaggaattctaattcacattgcattctatttaattgtttgttttatgttccgttcacacgaccatgatttttgtttgcacaaatcactatatatatcctcgttgaattaaaagtctagctttgtgtcataagcatattgtctatttccccttttggctattgcaaatagcaagtatggtttgttgtttaaatgttagtctattctgtttcaagaaaaaaaagaatgcgccatcgctggggatgggtatgatgatcaagtggcgggttcttgggctccttggcagcgtcgaggcacggtatctgcccacgccgttgtcggggcctcccgcgggtacccatgctcgacctacttcattgaagatggcaagattgaatgaagggctgtcattatttgatgcaatactgattgttccaatgtttcaaattacttggaccttcttctctatttgtataggatttgtttactttcaagaatatcaagtatttgatacactcaggataattatgtttgtgttaggcatgacatttgtctttgttgggatctccttgctagcacccgatgatagtaaaggtgatacgaaagatggttcaagcaccgccgaggactccataattgacatagacatgttctattccacgaacttgtagaaagtttcaagatttgctctattgcattttgtgttcagtattgcattcagtgttttgatatataatctagacactgcagaaatggaaagatgctgatggaggagacagacacagatgatagcatctcttttgttacttctgtaaaatctgcatgctccatgtcccttggccttggggagagcaccataagcgcttcatcggtgcttgccatgcctatggtctcgtcaagaacaaccggcttcagaggaatcgaaaatgaccgtccaaagtatgtccctttaagaaccactgattggagtaacctatagctgatggtaatatataggtacacaggaaaggtctttgtttttttatgttgcctagcggatggcagtgaagttttttgttgcttccagaggcgcaactgtt

SEQ ID NO: 44894 - DNA, 1181 bp, Zea Mays
ctcatgccccttctgctgggcgcccattaaatttgggccgatgggagggaaacagcagctcagcatgtgcattctactctggtactggtacccacctgattattcataccaacaggtgctacaacattactaccctcagatgtatggtccagcctctcattcagtaccaccctaccaatacatggggtatatgcctagtggcccaagtccaagtgctggattctcaccgatgcagcaacccatgcgaccagcgttctttcagcagccaacggcacagatggatggttctttcccaccagggcattcgcttccgcctaatttcagactccagctgccctctcatgcagtctcaaaggaatctgacgatgcatctggctatcagtcagctcagccaacttcaactccagatacaatcgcaaacaaccaggaagattcgaggcctgtagtgtcagattcagatacaaacacaccaaattgactttctaaaaatcctggcaacacgatctgatgtcaatctgatgcagactattggtggtctgtaacagagtcctcatgatactctcacatcttgactgaaaaagtttcccaaatatttgttctttcattatttctaattccttttctaattcttgcactgcatttcttcaccgaatccattgtatcgctgactgaacttcaagttcaaacttcagtaattcgctagcataagttccggtggcatgttagtgttcaaagtactaccgtgctgttagttcgtgtctcaaatatgcagtacagtttttcattgaggagccacccagttttattgcagcaagaacattttttctcttcgatgtagagacggcaccaatttcaactgctgttctattgctcacagaatcataaaatggttcgcagttcgctctgtagcatggcaggtgaagccacagctgacaggcctacctgaaaatactgacagcaagcttgcatcttcactctgaattctgaaattgtcatgttcatgcgacaccatattttctactgtgaagctgaccgtcatgaaagaaacaaattcagtatttatacttatatattacaaatttgctggtaacattatacttcggttttcatatgcacgtactgttcatattattagcctgcagctgtaggaacgtttccttcaagcaggaactcgaccaaac

SEQ ID NO: 44895 - DNA, 1320 bp, Zea Mays
aactgttctcgcaagcagtgctcccctctccgtaatatatgcatgcatgcatacgcctgctctgctctgcactgttctggagaggaggaggaggaggtgccgtccgcgagccgcacgggccggatcagccgccgcaggggtcgccttacagctacaggttgccgtcgcagatgaccccgcctcaggccgccgcggtgttctacagtccccagtacggcgggtactggtacccacctgattattcataccaacaggtgctacaacattactaccctcagatgtatggtccagcctctcattcagtaccaccctaccaatacatggggtatatgcctagtggcccaagtccaagtgctggattctcaccgatgcagcaacccatgcgaccagcgttctttcagcagccaacggcacagatggatggttctttcccaccagggcattcgcttccgcctaatttcagactccagctgccctctcatgcagtctcaaaggaatctgacgatgcatctggctatcagtcagctcagccaacttcaactccagatacaatcgcaaacaaccaggaagattcgaggcctgtagtgtcagattcagatacaaacacaccaaattgactttctaaaaatcctggcaacacgatctgatgtcaatctgatgcagactattggtggtctgtaacagagtcctcatgatactctcacatcttgactgaaaaagtttcccaaatatttgttctttcattatttctaattccttttctaattcttgcactgcatttcttcaccgaatccattgtatcgctgactgaacttcaagttcaaacttcagtaattcgctagcataagttccggtggcatgttagtgttcaaagtactaccgtgctgttagttcgtgtctcaaatatgcagtacagtttttcattgaggagccacccagttttattgcagcaagaacattttttctcttcgatgtagagacggcaccaatttcaactgctgttctattgctcacagaatcataaaatggttcgcagttcgctctgtagcatggcaggtgaagccacagctgacaggcctacctgaaaatactgacagcaagcttgcatcttcactctgaattctgaaattgtcatgttcatgcgacaccatattttctactgtgaagctgaccgtcatgaaagaaacaaattcagtatttatacttatatattacaaatttgctggtaacattatacttcggttttcatatgcacgtactgttcatattattagcctgcagctgtaggaacgtttccttcaagcaggaactcgaccaaac

SEQ ID NO: 44896 - DNA, 2319 bp, Zea Mays
ctccacctctcccgagtggagtccttcctgactcctgagacctgaggtggaggaacatggaagtggagaagccgcatactaggaaacccaaggggagggagttgtgaggtagagggacatggaagtggtggtgacaagtatactaggaacgccaaggggagggagctaggaggaaccgcaggaggtccggactttctacgacacaagcagacggctaggccggaaccgccagcaaggatccaggagtccgggtccgcttttctcgtcccgcccgcaaagatcgatcggaacaactagcctagccctaggccctagcccagagccctgccctgcgcaccaaagcggaggggagagacgggagactagagagagcaaatacggtacggtgcttgcgttgcggcggatggcgacctcgtcgtcgtcctctggccccggcgggccgtaccaccaccaccggtcgcggttcggcgacacgacgctgaccaaggtgttcgtgggcgggctggcgtgggagacgccgtccgaggggctgcgccaccacttcgaggcctacggcgacatactcgaggccgtcgtcatcaccgatcgcgagaccggccgctcaaagggctacggcttcgtgattttccgggaccccggtgcggcggcgctggcggtgcagaacccgaacccggtgatcgccggccgtcgcgccaactgcaacattgcggcgttcggcccgccgcggaccgcgcagccgagagggagaggaggaggaggaggtgccgtccgcgagccgcacgggccggatcagccgccgcaggggtcgccttacagctacaggttgccgtcgcagatgaccccgcctcaggccgccgcggtgttctacagtccccagtacggcgggtactggtacccacctgattattcataccaacaggcaagcaattcagtctccatttgatctctcgtgccattcaatgtcatttctgttgtttttacagtaactggcagtactgtatgaattatttggctaaatcacactgtttgcttgcgatgatctgaagctctgaattcagtattgaaacgaaacttctcatctttgaatacaaagtatttttgactaataaaacctggcgatgtctgcatggcagggccttttgtttattggccatcatgcgttttgtaccagaacgagacaccagaacaaactagcaatctaaccgaaaccatgaaacctgaaaattgatgagcagccattgtacaattctcaggtgctacaacattactaccctcagatgtatggtccagcctctcattcagtaccaccctaccaatacatggggtatatgcctagtggcccaagtccaagtgctggattctcaccgatgcagcaacccatgcgaccagcgttctttcagcagccaacggcacagatggatggttctttcccaccagggcattcgcttccgcctaatttcagactccagctgccctctcatgcagtctcaaaggaatctgacgatgcatctggctatcagtcagctcagccaacttcaactccagatacaatcgcaaacaaccaggaagattcgaggcctgtagtgtcagattcagatacaaacacaccaaattgactttctaaaaatcctggcaacacgatctgatgtcaatctgatgcagactattggtggtctgtaacagagtcctcatgatactctcacatcttgactgaaaaagtttcccaaatatttgttctttcattatttctaattccttttctaattcttgcactgcatttcttcaccgaatccattgtatcgctgactgaacttcaagttcaaacttcagtaattcgctagcataagttccggtggcatgttagtgttcaaagtactaccgtgctgttagttcgtgtctcaaatatgcagtacagtttttcattgaggagccacccagttttattgcagcaagaacattttttctcttcgatgtagagacggcaccaatttcaactgctgttctattgctcacagaatcataaaatggttcgcagttcgctctgtagcatggcaggtgaagccacagctgacaggcctacctgaaaatactgacagcaagcttgcatcttcactctgaattctgaaattgtcatgttcatgcgacaccatattttctactgtgaagctgaccgtcatgaaagaaacaaattcagtatttatacttatatattacaaatttgctggtaacattatacttcggttttcatatgcacgtactgttcatattattagcctgcagctgtaggaacgtttccttcaagcaggaactcgaccaaac

SEQ ID NO: 44897 - DNA, 2105 bp, Zea Mays
ctccacctctcccgagtggagtccttcctgactcctgagacctgaggtggaggaacatggaagtggagaagccgcatactaggaaacccaaggggagggagttgtgaggtagagggacatggaagtggtggtgacaagtatactaggaacgccaaggggagggagctaggaggaaccgcaggaggtccggactttctacgacacaagcagacggctaggccggaaccgccagcaaggatccaggagtccgggtccgcttttctcgtcccgcccgcaaagatcgatcggaacaactagcctagccctaggccctagcccagagccctgccctgcgcaccaaagcggaggggagagacgggagactagagagagcaaatacggtacggtgcttgcgttgcggcggatggcgacctcgtcgtcgtcctctggccccggcgggccgtaccaccaccaccggtcgcggttcggcgacacgacgctgaccaaggtgttcgtgggcgggctggcgtgggagacgccgtccgaggggctgcgccaccacttcgaggcctacggcgacatactcgaggccgtcgtcatcaccgatcgcgagaccggccgctcaaagggctacggcttcgtgattttccgggaccccggtgcggcggcgctggcggtgcagaacccgaacccggtgatcgccggccgtcgcgccaactgcaacattgcggcgttcggcccgccgcggaccgcgcagccgagagggagaggaggaggaggaggtgccgtccgcgagccgcacgggccggatcagccgccgcaggggtcgccttacagctacaggttgccgtcgcagatgaccccgcctcaggccgccgcggtgttctacagtccccagtacggcgggtactggtacccacctgattattcataccaacagggccttttgtttattggccatcatgcgttttgtaccagaacgagacaccagaacaaactagcaatctaaccgaaaccatgaaacctgaaaattgatgagcagccattgtacaattctcaggtgctacaacattactaccctcagatgtatggtccagcctctcattcagtaccaccctaccaatacatggggtatatgcctagtggcccaagtccaagtgctggattctcaccgatgcagcaacccatgcgaccagcgttctttcagcagccaacggcacagatggatggttctttcccaccagggcattcgcttccgcctaatttcagactccagctgccctctcatgcagtctcaaaggaatctgacgatgcatctggctatcagtcagctcagccaacttcaactccagatacaatcgcaaacaaccaggaagattcgaggcctgtagtgtcagattcagatacaaacacaccaaattgactttctaaaaatcctggcaacacgatctgatgtcaatctgatgcagactattggtggtctgtaacagagtcctcatgatactctcacatcttgactgaaaaagtttcccaaatatttgttctttcattatttctaattccttttctaattcttgcactgcatttcttcaccgaatccattgtatcgctgactgaacttcaagttcaaacttcagtaattcgctagcataagttccggtggcatgttagtgttcaaagtactaccgtgctgttagttcgtgtctcaaatatgcagtacagtttttcattgaggagccacccagttttattgcagcaagaacattttttctcttcgatgtagagacggcaccaatttcaactgctgttctattgctcacagaatcataaaatggttcgcagttcgctctgtagcatggcaggtgaagccacagctgacaggcctacctgaaaatactgacagcaagcttgcatcttcactctgaattctgaaattgtcatgttcatgcgacaccatattttctactgtgaagctgaccgtcatgaaagaaacaaattcagtatttatacttatatattacaaatttgctggtaacattatacttcggttttcatatgcacgtactgttcatattattagcctgcagctgtaggaacgtttccttcaagcaggaactcgaccaaac

SEQ ID NO: 44898 - DNA, 894 bp, Zea Mays
aatcttgaactcacgcttcaagattggtgcgagcaccccactacgacaaaaccggatagaccaacccttatcctcgagcccaaactgcggtagcgaaaacgcgagcgctgcggaacaacgatggcgacgatgtctcttgccgcggcgtcacccctcgcctccattccccgcggcatcgccgctcaggctccttgcgcggcattcctgtccatccgcttaggtggcgcgacggcgacgcggttcgctggactggcggtggcctcgcagccagcggagcgtcgcgccgcggcgatggtcgcgatggcgaagagggagcaggagctggaggagatccgggccatgacgacggaacagatggaagaggaggtggtagacctcaagggggagcttttcctgctccgccttaagcgctcggcgcgccaggagttcaagaacagcgagttcagccgcatgcgcaagaggattgctcgtatgctaaccgtgaaaagagagcgggaaattgaacaaggaatcaataaaagattgtctaggaagcttgataggaaatggaagcagagcattgtggtcagaccaccaccatctctaagggggaacaaagaggagtagaaagccgcaaaaagagggcaatgtgcaaaagtcgtttcatgcgagtgttgcaggaagtaattgaggatggccagtcatttgcacctgaaggtgcatgcttccttgccatgctgaatcaaatcaaattgatgtcttatgaaggctttcatacctctatttgaatgaacacgaaaaatagttttcaatatagtttttaagttctgatagtccattatactgtcggtgtgtaactctgttgctggactgtaagaataacctttgccgacctccaatatcttcagaaatcag

SEQ ID NO: 44899 - DNA, 2016 bp, Zea Mays
taatagtgatattttactgtacacttttttttttctacatagcaccgttttcttatattgaatatttttctatataaaactcactcgcagtaatcaagtcgagttgtaccttttcatttttaataaaatttctcagtagcctcctgatcttttaaaaaaaactcactcgcaaaaaaaaactttagaactcggatgtcggaatggctaaccatccactgactggtagggccgcataggatggtcgacttcggctctacatgtcgcctcccccgcgcacggtgagccgctgctgccggcgttgcgtacccgctaaccgccgcggacaaggccaccacgacgtcacagaaaaagggaaggggtcgaaatatccaatcgagacccaccaccgaacgagtccaaatccgctcgtctcccctcgaagtcactccctccagccctcgccggctccgcgtcctccggctctcccacccgagccgagaccacccatccaagcgcgcgcagctccggaagcgacagggccggacgagcgcctcccaaatttagcagccgcggagcgcgtgggcgtgggtccgtaaggagggtcgatggggtacctgccgtccctgagcagcaaggcggcgcacttcgtgtccgacctcaccaccgtcatcctcagccccgtctccgagcgcgagacgtcccacctccccgaggttgacgaagtgctagaaaatttggacgatgataaagattccgagcacaattccgatagccttgatggccctgacacatcttcctttagagcattcttgatctcatttttgtcatcatcgagctctaataacgattcaatggagataattcctgagcagaatggggacatgggttaccctactttaacacccatggggaagggaagcaagggaagaacgggtctgttaagtagggggaagcattccatcggaaaaatcattaacaaggcggcaaggattagtggtttcaaacaaacaactgcagagcctaaaattgacagggaggcagtaactcatactgaaccagatgcacctgtactggagcaccaggaaccaaaggaagttgcttccttcggtagtttgccaactatgtcggaaccatctgttcttttgtcagaactgatgcaaaggattctttatgcctctctcccggctcttgcccagggaaggaactgggtcttgctatacagtacatggaggcatggcatatctttatctactttatatagaaggagcatgctttgccctggtttctcactcttggttgttggggataaaaaaggcacagtttttggtggtttagttgaggccccattgcagccatctagttcaaagaagggaccaataattcctttgttttcactaatttacacaatcgccctgtcatctatcgaccgacaggtgcaaataactactttacgatgtgctctaccgactatttggctctggggggaggaggtcatttcgcactttatcttgacgcagaccttttgattggttcaagttctaattcagagacttttaacaacgggtgtttatcgcattcttcagacttctcagtgaaagatgttgagctttggggcttcgtctacccttccaaatacgaggagatgctgacactctgccggactgagaaaccaggaatctgtcgatggtgagtggtgaccaatcccatagccagttgaacagacaaatggacatgtcgcgtctgtacagtttttagtaggctttgagagttgcgagcatttttgtgcgccggtagtactggagacttgctttttctcaagcgacttcgctcagatttgtaaatagtgtacttttgttactgtcacatggcgaaacatgtacgctactagttgttccagtgatgggcactttgaggtaaactgtcactggtggatcaggcttctacccaggactcgtgaaacagcatcaacctgttcaaagacagccttttagatccggaagcaatcaaattaagcgtccactgatgaatgctcctcat

SEQ ID NO: 44900 - DNA, 2031 bp, Zea Mays
taatagtgatattttactgtacacttttttttttctacatagcaccgttttcttatattgaatatttttctatataaaactcactcgcagtaatcaagtcgagttgtaccttttcatttttaataaaatttctcagtagcctcctgatcttttaaaaaaaactcactcgcaaaaaaaaactttagaactcggatgtcggaatggctaaccatccactgactggtagggccgcataggatggtcgacttcggctctacatgtcgcctcccccgcgcacggtgagccgctgctgccggcgttgcgtacccgctaaccgccgcggacaaggccaccacgacgtcacagaaaaagggaaggggtcgaaatatccaatcgagacccaccaccgaacgagtccaaatccgctcgtctcccctcgaagtcactccctccagccctcgccggctccgcgtcctccggctctcccacccgagccgagaccacccatccaagcgcgcgcagctccggaagcgacagggccggacgagcgcctcccaaatttagcagccgcggagcgcgtgggcgtgggtccgtaaggagggtcgatggggtacctgccgtccctgagcagcaaggcggcgcacttcgtgtccgacctcaccaccgtcatcctcagccccgtctccgagcgcgagacgtcccacctccccgaggttgacgaagtgctagaaaatttggacgatgataaagattccgagcacaattccgatagccttgatggccctgacacatcttcctttagagcattcttgatctcatttttgtcatcatcgagctctaataacgattcaatggagataattcctgagcagaatggggacatgggttaccctactttaacacccatggggaagggaagcaagggaagaacgggtctgttaagtagggggaagcattccatcggaaaaatcattaacaaggcggcaaggattagtggtttcaaacaaacaactgcagagcctaaaattgacagggaggcagtaactcatactgaaccagatgcacctgtactggagcaccaggaaccaaaggaagttgcttccttcggtagtttgccaactatgtcggaaccatctgttcttttgtcagaactgatgcaaaggattctttatgcctctctcccggctcttgcccagggaaggaactgggtcttgctatacagttgtgcagtacatggaggcatggcatatctttatctactttatatagaaggagcatgctttgccctggtttctcactcttggttgttggggataaaaaaggcacagtttttggtggtttagttgaggccccattgcagccatctagttcaaagaagtatcaggggaccaataattcctttgttttcactaatttacacaatcgccctgtcatctatcgaccgacaggtgcaaataactactttacgatgtgctctaccgactatttggctctggggggaggaggtcatttcgcactttatcttgacgcagaccttttgattggttcaagttctaattcagagacttttaacaacgggtgtttatcgcattcttcagacttctcagtgaaagatgttgagctttggggcttcgtctacccttccaaatacgaggagatgctgacactctgccggactgagaaaccaggaatctgtcgatggtgagtggtgaccaatcccatagccagttgaacagacaaatggacatgtcgcgtctgtacagtttttagtaggctttgagagttgcgagcatttttgtgcgccggtagtactggagacttgctttttctcaagcgacttcgctcagatttgtaaatagtgtacttttgttactgtcacatggcgaaacatgtacgctactagttgttccagtgatgggcactttgaggtaaactgtcactggtggatcaggcttctacccaggactcgtgaaacagcatcaacctgttcaaagacagccttttagatccggaagcaatcaaattaagcgtccactgatgaatgctcctcat

SEQ ID NO: 44901 - DNA, 422 bp, Zea Mays
ctttgcgtcgtcgtcttcgacaacccacagcctctgctccgatctcgtcgcacttcgcactcctcacacccggcaagccgtcgtgctcggcgtgttttctctgtgcggccttacgggttcctctcgcttcattggcttgtcgcgtgttagagcaggtatggttcagatatatgtgtaaatttaagagaaagtccaaaagaattggttcttgtgtgattgcggtcggctatggttagcgccatcatccttatcccatgtttatgcgtgatgattggagaagaaaggatctctcgcttcatcggcttgtcgcgtgttagagcagagctccctgaagaagtggacatcaaagagaaatttgctccattacctgaatacccattggtgaggttccatctaactggtgatctggtagaagaattttg

SEQ ID NO: 44902 - DNA, 1666 bp, Zea Mays
ctccggtcgctctcccggtcgcagccaccgtttataaaaaaaaaacccgaccgagcagcgccgcaccagaagtcgggagcacgacccactggagccagcaaacaacaacgagtcccttttcgcctcttgcccgttgcccctcggtttcgtcgccgctacccggcgatctccgcgacagcgacccggtgccgccgccgcagatctcgccgagaagacaggtatcggtgccgccgccagatcaactggacctgtaaaacgagggcctgcgctacctgtggctgtggagttcccgaggcgctgttctgccaggattcggcatcctttgttgcccacggcgtcgctgccccagtgcccgcaatttgggtctactttgtgcttcaaactctcaatcttcagtgattgagccggtccagctaccgaggagccctaaaagtggcgtagctccaaagaaatcaggtgaaagtgcactcattctgatacggcatggagaatcgttgtggaacgagaagaacctgttcactggatgtgtcgatgttcccctgacccctaagggcgttgacgaggcaattgaggcggggaaaaggatatgcaatatcccagtcgatgtaatatacacttcgtcgctgattcgggctcagatgaccgctatgcttgccatgatgcagcatcgccgaaagaaggttccaatcattttgcacaacgagagtgaacaagctcacatgtggagtcagatatacagtgaagagacaaagaagcagtccattcctgtcataacagcttggcaattgaatgaacggatgtatggtgagcttcaaggccttaacaaacaagaaactgccgatcgatttggtaaagaacaagttcatgaatggcgtcgcagttatgatattcctcccccaaatggcgagagccttgagatgtgtgcagagagagcagttgcttatttcaaagaccaaattatacctaaacttgtggatggaaagcatgtaatgatcgctgcccatgggaattcacttcgttcaatcataatgcatttggacaagctgacttctcaagaggttatcagccttgagttgtctactggcattcctatgctgtatatatttaaggaagggaaattcatcaggcgaggaagccccgctggaccttctgaagcaggtgtctatgcttataccaagaatttggctcagtacagacagaagcttgatggcatagttcagtagccatctgcaggcttttcctttgctactcatccgtcgaacatgcatttggtcccggaaaacaaggggccaagctcctaccatctcatcgacattcaactgccaagtagtccattcctgtcacaagtttgtagcggctcatttatctcttcagaaacctcccaccacgtggtagtaaaatatacggagtagatgccaattttaggtggtgagctgtagatacaaatggagatatactggatggcagttgtgttatctttccgctttccccagtcacttagatctcagatgtttgtaatggtgcagtaataaacacttgtagcgaactgcatggaacgagacgctgttatcgaatgcttgttccccgtctcatcaattctttgtgtgccccggtgtgtgatcggaatgttatgccctagcttggcagacattccttttcggatcct

SEQ ID NO: 44903 - DNA, 638 bp, Zea Mays
atgcatctgttacaaattattgtatttgtgatcaatccaaagggtacgacatataattcccaagcgacacaccccttggaaactcaacccttcatatttatataaacataacccctgcaataaaggacagtccggtcatttgtcgtttctctttgtctctctccactgggttagccactgagttataacacgttatcagcactgtctcaagaaatcagagaattttttttttcctgttagagggaacaagtgctcgctgttggtgaaagaagtagaagggctatcgcggccacggtgagcaccggtcgtctcgggcacggatctggccacgccggctgtgggcgcggcacgaccggctcacagcgcaggcgcggcggcgcgactcagccccggcgcgggcgcgtttcgggcgcgcacgaacgtcggacaacgcccggacaccagacgcggcgcagacaccgcccgcggcgtcggtcttcggctcgtgcatgggcgcagcgaggcggcccaaggcggcggggatggccctctgcacgggcgcggtctcctgtgcaggcacgggctcggccggatctgcccacgacgggcgcgtagcgcgggagcccggcgctggcgcgtctcggccatgcgggccgcgg

SEQ ID NO: 44904 - DNA, 4722 bp, Zea Mays
gataccgtctccgacctcctcccttttgcgctagcttcagagcatcatcaccactccacaccaccgccccagctcgcttccctccccgctacacggtcgctcaccagtcaccacccaccactgcttccatgctcctcgcctcgtttccagctcgcgaaacttagctccagatcctctcccccccccccccccatccaccgcgccgcattaacctcagatccacccggcgagctcatttcagatccatccatgcgcttcccgttccttttcgccctccagctggtcgccttggcggcggcagcgtcggcggccgaggtcgcggtgacgcgctcttcgaggatggtgcaccgtctgtcagacgaggcccggctggaggtgggcccgcgtgtggggtggtggccgcagcgaggaagcggggagtactaccgcgcgctagtgaggagcgatatccagcggcagaagcggcggctcgcggtcctctcgctctcaaagggcggcagcaccttctccccgggcaacgacttaggctggctatattacgcttgggtggatgttgggacgcctgctacctcctttttggttgcattggatactggtagtgaccttttctgggttccctgtgactgtatccagtgtgctcccttgtctggctaccgtggaaatctggtatgcacccccttagttcagtaactttgatgttaatatctgaagatgtcgtattgtcaagcggctgtcagcttgagttgggacctacgagaatcttttttttcccaaagacatatttgcttggttcatgccaaattactgatgcagatgatgacctgaatcttgacatttttattacctaagacacaaatcttggttgaagaaactaatacattgcatgcggtttgctctaattccattgactattggatatcgtaggaaaaaaaatgcaaactgatttctaaacttggaaagtggaaagtaacatgactgatctgtaaacttcccaccatgtctctgggtcattttcagtttaaatttcactataatcactgttcttggctgcgttcaagttgtggtgcaaagtatgtacaccattatgtgaccataaaatatcacacggacaagaacaatccatctatgttttgatggaaattaatttctccactgttcagctgcaattgtaagttgcacaggcacaccgcacacctacatttcattgtcatggcttgcaagtttgatactggccaggtttttatttaggagtacaagtggtggtgtcatgtgtgaactttggttctcttctgttttgttcattttaagtttcttctatttcttcctaacaagtgcagaataagaggaggctaccatgattttaagcagtttagtgcttatttccagtgattgattggcaggtgctccatcataaatggagcatctattatgcaggatagagatcttagaatatacaggcctgctgaatcgacaacaagtcggcatcttccttgcagccatgagctatgccaatcggttccaggctgcacaaacccaaagcagccttgcccatacaacattgactacttttcagaaaatactaccagctctggtttgctaattgaggatacactacacttgaactacagggaggaccatgtacccgtgaatgcttcagttattattggctgtggtcaaaagcaaagtggtgattatctggatggtattgcaccggatggactccttggccttggaatggcagatatttcagttcctagtttccttgctagagctggactagttcagaattccttctcgatgtgctttaaggaagatagttctgggagaattttctttggagaccaaggagtgccctctcaacagtctacaccgtttgttcctctgtatggcaaacttcaaacttatgctgttaatgtcgacaaatcttgtattggacataaatgtcttgagggtactagcttcaaggctttagtcgatagtggaacatcatttacttctcttcctttcgacgtttacaaggctttcacaatggagtttgacaaacaaatgaatgctacaagggtgccttatgaagacactacctggaaatattgctacagtgctagtcctcttgagatgcctgatgtgccaaccataaccctgacatttgctgcggacaagagcttgcaagctgttaatcctatcttgccatttaatgacaaacagggggcacttgccgggttctgcttagctgtgctgccatcaacagaacccattggaattattgcccagaatttcctggttggataccatgttgttttcgacagagaaagcatgaagctgggctggtaccgctccgaatgtcgctacgttgaggacagcacgacagtgccgttgggcccatcgcagcacgacagtccagaggacccgttgccgtcgaacgagcagcagacttccccggccgtgacgcctgcgacggcaggcacggctccgctctcctgtgcgacgacgaatctgcagatgctccttgctagctcttacccattgctgttgctgacgatgtcgagtgtgttcttcgtctcgtgaacaaccgatatactactaatcgatagccttgtatattgtatgtgctttatttatggtgtttttttctttatgtgttgctctagaggtttatagatcagctgtattttgcctccgttgttggtccctgggatagcctagcaatagcaatcccccgactcgaaatgcagaagtttcagaaatggtgcggaaacgagcatatgccctcgcagtctgctactctgcttgcacatcatctatcgtctttgacacgcatgggctgatgggcgtggccaaatccacttagcaaaagctgcagcgaagcaggcgatttttacccgtcccccggaacgccggtgcgtgctccgctactcagattaacctactgcaacgcacaacagcagcaccattccactgcgctgcacagcacaaccgtcacacgagacgagacctcgcaccagccacgactactcgcctcccctttttccccctcgtcgtgctctcttgtcaacccccaatgcagcacgcacaccctctcctctctcccgtcccctcacgcagtcacagtccatctcgccatcgcattgcctagttcaaaaggcctccgaaatcgaacagtccctgccgggtgccggcctcgtacaagcaaaagacagacagttcccgcatcaaccggctagctagctagcccttcaggacctcgctgcattccccatgggaggcgccatgaggcagctgcttagctttctgggagcgatcaatggccgccccaccccagggagaagacgaacgacgacgctgcggcggcgcctggtgcgggacggtggagctgagggtcaggatgaactgcgagcgcgaggtcaagaatgctttctccggcatgcatgagaggttggtcatccgtcactctggtcccctggcctggcctggcccctacgcgttcgcgtcaagttttcgttgctcgccagcattgcgcccacgaccatcgcatggtggcatcactcttctcgtctgtgccctgatgatgagcctctctgcagtctgcacccactgagtcagtcagtaatagtataatgagggggtgtttggttctatggactaaagtttagtccgggtcacatcaagcgtttgactttcaaataggagtatgaaatatagacccaaccaactgtactagattcgtctcactttttaatcttcggctgagaaattagttttataatccgactacatttaataccccgaacggaggttcaaacattcgatgtgataggggctaaattttagcaggggcaaatcaaacaccccctgactaatgaccatcgtgtcctttcagaacaagcttttttttactgctgcagtagtgcagcacagcagcagcatatgccggcggcatccaacaatagcgaaagttccacttgaccacttcgaatcgaactatcgaagtgatttcctgaagaggagcccaagtttaccgtggcgattaataactctgatgaagctgcccgcctgcctgcaggagcagtggcgaatctagccgaaaatatgatcggagtcatcaagagcagctttgctatatcatacaaatttttatgaactttaacagtattttgctaaaatatttataaaatttatcggggtcggctgaccccgataaccccctagattcgcccctgtgcaggagtgcagcatgtggaggtgaaccggctgcagcagaaggtgacggtgacggtgacggtgactggcgaggtggacccggtcgtggtgctgcggcctgcggagggcccagcccacggggaagaaggcggcggagccgtggactggcccccataacactgccggctgctacgccccggcggccgtggccctctaccgcgtcgggccggcccagctgcaggcccacgacggcaggtgggcagacccgtacctggtctcggtgaggagcgtggaggcggacataggcgccgagcatatcagcaggttgttcagcgacggcaaccgcaacgcctgctcccagtgggtgagctccgtaaaaattgttgagaactacgttaccgcggatcaccagatccgctcccttttttcccgtcagcagtagagacgcgagaagttatagagaactcgtcttccttcccagaaacacgacagaggaacacacgagacacagaatatataattgag

SEQ ID NO: 44905 - DNA, 3988 bp, Zea Mays
gataccgtctccgacctcctcccttttgcgctagcttcagagcatcatcaccactccacaccaccgccccagctcgcttccctccccgctacacggtcgctcaccagtcaccacccaccactgcttccatgctcctcgcctcgtttccagctcgcgaaacttagctccagatcctctcccccccccccccccatccaccgcgccgcattaacctcagatccacccggcgagctcatttcagatccatccatgcgcttcccgttccttttcgccctccagctggtcgccttggcggcggcagcgtcggcggccgaggtcgcggtgacgcgctcttcgaggatggtgcaccgtctgtcagacgaggcccggctggaggtgggcccgcgtgtggggtggtggccgcagcgaggaagcggggagtactaccgcgcgctagtgaggagcgatatccagcggcagaagcggcggctcgcggtcctctcgctctcaaagggcggcagcaccttctccccgggcaacgacttaggctggctatattacgcttgggtggatgttgggacgcctgctacctcctttttggttgcattggatactggtagtgaccttttctgggttccctgtgactgtatccagtgtgctcccttgtctggctaccgtggaaatctggtgctccatcataaatggagcatctattatgcaggatagagatcttagaatatacaggcctgctgaatcgacaacaagtcggcatcttccttgcagccatgagctatgccaatcggttccaggctgcacaaacccaaagcagccttgcccatacaacattgactacttttcagaaaatactaccagctctggtttgctaattgaggatacactacacttgaactacagggaggaccatgtacccgtgaatgcttcagttattattggctgtggtcaaaagcaaagtggtgattatctggatggtattgcaccggatggactccttggccttggaatggcagatatttcagttcctagtttccttgctagagctggactagttcagaattccttctcgatgtgctttaaggaagatagttctgggagaattttctttggagaccaaggagtgccctctcaacagtctacaccgtttgttcctctgtatggcaaacttcaaacttatgctgttaatgtcgacaaatcttgtattggacataaatgtcttgagggtactagcttcaaggctttagtcgatagtggaacatcatttacttctcttcctttcgacgtttacaaggctttcacaatggagtttgacaaacaaatgaatgctacaagggtgccttatgaagacactacctggaaatattgctacagtgctagtcctcttgagatgcctgatgtgccaaccataaccctgacatttgctgcggacaagagcttgcaagctgttaatcctatcttgccatttaatgacaaacagggggcacttgccgggttctgcttagctgtgctgccatcaacagaacccattggaattattgcccagaatttcctggttggataccatgttgttttcgacagagaaagcatgaagctgggctggtaccgctccgaatgtcgctacgttgaggacagcacgacagtgccgttgggcccatcgcagcacgacagtccagaggacccgttgccgtcgaacgagcagcagacttccccggccgtgacgcctgcgacggcaggcacggctccgctctcctgtgcgacgacgaatctgcagatgctccttgctagctcttacccattgctgttgctgacgatgtcgagtgtgttcttcgtctcgtgaacaaccgatatactactaatcgatagccttgtatattgtatgtgctttatttatggtgtttttttctttatgtgttgctctagaggtttatagatcagctgtattttgcctccgttgttggtccctgggatagcctagcaatagcaatcccccgactcgaaatgcagaagtttcagaaatggtgcggaaacgagcatatgccctcgcagtctgctactctgcttgcacatcatctatcgtctttgacacgcatgggctgatgggcgtggccaaatccacttagcaaaagctgcagcgaagcaggcgatttttacccgtcccccggaacgccggtgcgtgctccgctactcagattaacctactgcaacgcacaacagcagcaccattccactgcgctgcacagcacaaccgtcacacgagacgagacctcgcaccagccacgactactcgcctcccctttttccccctcgtcgtgctctcttgtcaacccccaatgcagcacgcacaccctctcctctctcccgtcccctcacgcagtcacagtccatctcgccatcgcattgcctagttcaaaaggcctccgaaatcgaacagtccctgccgggtgccggcctcgtacaagcaaaagacagacagttcccgcatcaaccggctagctagctagcccttcaggacctcgctgcattccccatgggaggcgccatgaggcagctgcttagctttctgggagcgatcaatggccgccccaccccagggagaagacgaacgacgacgctgcggcggcgcctggtgcgggacggtggagctgagggtcaggatgaactgcgagcgcgaggtcaagaatgctttctccggcatgcatgagaggttggtcatccgtcactctggtcccctggcctggcctggcccctacgcgttcgcgtcaagttttcgttgctcgccagcattgcgcccacgaccatcgcatggtggcatcactcttctcgtctgtgccctgatgatgagcctctctgcagtctgcacccactgagtcagtcagtaatagtataatgagggggtgtttggttctatggactaaagtttagtccgggtcacatcaagcgtttgactttcaaataggagtatgaaatatagacccaaccaactgtactagattcgtctcactttttaatcttcggctgagaaattagttttataatccgactacatttaataccccgaacggaggttcaaacattcgatgtgataggggctaaattttagcaggggcaaatcaaacaccccctgactaatgaccatcgtgtcctttcagaacaagcttttttttactgctgcagtagtgcagcacagcagcagcatatgccggcggcatccaacaatagcgaaagttccacttgaccacttcgaatcgaactatcgaagtgatttcctgaagaggagcccaagtttaccgtggcgattaataactctgatgaagctgcccgcctgcctgcaggagcagtggcgaatctagccgaaaatatgatcggagtcatcaagagcagctttgctatatcatacaaatttttatgaactttaacagtattttgctaaaatatttataaaatttatcggggtcggctgaccccgataaccccctagattcgcccctgtgcaggagtgcagcatgtggaggtgaaccggctgcagcagaaggtgacggtgacggtgacggtgactggcgaggtggacccggtcgtggtgctgcggcctgcggagggcccagcccacggggaagaaggcggcggagccgtggactggcccccataacactgccggctgctacgccccggcggccgtggccctctaccgcgtcgggccggcccagctgcaggcccacgacggcaggtgggcagacccgtacctggtctcggtgaggagcgtggaggcggacataggcgccgagcatatcagcaggttgttcagcgacggcaaccgcaacgcctgctcccagtgggtgagctccgtaaaaattgttgagaactacgttaccgcggatcaccagatccgctcccttttttcccgtcagcagtagagacgcgagaagttatagagaactcgtcttccttcccagaaacacgacagaggaacacacgagacacagaatatataattgag

SEQ ID NO: 44906 - DNA, 1537 bp, Zea Mays
gactgaactggtctgtattaaactctgcctggttgcatcggttcatattattgtaacaaaattgtaaaatcacgcgtattttaacacggataccgacacttgcagtggaaatatgcccccctctctctctttttttttaaaaaaaaacagttccatgataataaactgctgtgcgcctgtgcccctcttgggtcctggctgatgaagcggttggcctgaattttcttttcgggatgactgcttctgtaaaatccccaggccccaaggcccaagcgcagcgcagacgcacaatcatccgtttcttatccacctcatcccaccactggccacacgtctccggccacgcgacgccctccagccccaccgtcgtgcgatccgtcggccacccaatcccgtacgtccgtccgctcccaccccaagtccccaaccccctcagtcctctccgccctggacctttccaagtctcaaaccagagcgaggccgcactgcccgcgagtcctccactccgaccgcacgatggctgcgctgcgcctcgcctccttcaccctccgccccgccgctgccgcggcctccgcctcctccggcgcgaccccagccgcgtccggctccgtctccgtctccttcacccgcgcggcgcgggggctgccctccctccgcctggccccgccccgccgccgcggggacctcgccaggccccgcgccgcggccgaggccgcggcggagagctacgcgtccgcgctgtcggaggtggccgtcgagaacggcaccctcgagcagacggtctccgacctggagaagctggagaaggtcttcgcggacgaggccgtcgccgagttcttcgacaaccccaccgtcccgcgcgaggagaaggccgagctcatcgacgagatcgccagatcgtcgccgagttcgagaacgtctacaactcgctcacgggcaccgaggtcgccaccgtcacctccgtcgtgcagctcgagtcgcaggacctggcgcagatcgcgcagcacgtccagaagatgaccggcgcccagaacgtccgcatcaagacgcagctcgacccggagctcatcgccggcttcaccgtgcagtacggccgcgacggctccagcttaatcgacatgagcgtccggaagcagatcgaggagatcgcgtccgagttcgagttgcccgccgtcccgctcgaagtctgaccggcccgaggcgtcctccatcctcgcccatgagatgctttgttgctactgtctgaaaggtatggcaagaatcaagcgggaatgtcgttggtcctgtccccttcaggcctgcggatcagtggtggtggctccggatctgcaatacatatcaacggacattcttctgtgcgtttctgttttccattttttggcgggaacctgtgtaaaagtttctcctttttgattgtggttgagagacactgtaatatggttaaaacacacatatgtagctgggtctgcacctcctctctccgatagagtcgcgaagaattgtataggatgagtttgcgctcccttaacctcgccga

SEQ ID NO: 44907 - DNA, 1389 bp, Zea Mays
cgcacccgtcactattttacgtgcccacatttccgccaccgccaccgccaccggctaccacctgccgcctgcgccctgccctccctctgtttttctagacccccggatcgctcagagattgagtcgtagtcgtacccgactagtcgccgcgtcctcctttccccgcgcagcagcagagcaccacccggtgaccgagcaatggaggcggggggcgtgggcctggcgctgcagacgcgggcggcggccttcggctccggccagcgccggggcggcctacagtcgcccatcgggaggctgagagtcgctgaaccggcgggagctgcggttgccgtgcgggttcgcgggtccaagcccgtcgtaccgctccgtgcgaagaaatcatccggaggtcatgaaaacttgcataactccgttgacgaagctctcctgttgaagagaaaatcagaagaagttctgttctacttaaacgggaggtgtatttacttagaatgatgggttctggaaaaagtactgtggggaagatcatgtctgaagtcttgggttattcgttctttgatagtgacaaattagtggagcaagctgttggaatgccttcagttgctcaaatattcaaagttcacagtgaagccttctttcgggataatgagagtagcgtcttgagggatctgtcctccatgcgacgattagttgttgccaccggaggtggtgctgtcatccgaccagttaactggaaatatatgaagaagggcctatccgtttggttagatgtgcccttggatgctcttgctaggcgcattgctaaagtgggaaccgcttctcgtcctcttctggaccaaccgtccggtgatccatacacaatggccttttctaagctcagcatgcttgcagagcaaaggggtgatgcttatgcaaatgcggatgtaagggtttctctggaagagattgcatctaaacaaggtcatggcgatgtctctaagctgatgccgactgatatcgcaattgagtcacttcataagatcgagagtttcgtcatcgagcacgctgctgataatccagctagcgactcgcaagctgagtcacagatccaaaggatacagaccttgtaatatcttaatccttctgttttgtaccgaagcgtaccccctagagcatcgttggtttatttgttcgttgaagtgtcacgagggagagaaaaaaaaccctgaagtatttcttcttgtaagttgtaaaggaatggaataaaggagctaataatccgaagtgtaccgttggctgaaacatcagtttgatactttggtgaacacctatgctggttgctggacatctcatctcagcaaaacgtaaacaacgtggacttgttgaaccggcgtgggctggaggctggaatcg

SEQ ID NO: 44908 - DNA, 2497 bp, Zea Mays
cttagcccctccttattgataccttgagatagggtgaagtatgttggaacctctgcagtcgttgaagcagatcagaggatcattttggggaaaatacctactcaagatggctcaaggagtgcctatacttttattagtggaaggggtctatcaaatggacagcgtggggaggtatatgaggttaatggggatcaggttgctgtcatatttgatccttctatagagaaatcacacaatgcccatgaagatgtaactaacaaggaggaaaatggatcagcaactgtttactgggttgattgatattgcacatgatcatgataccgaatcagacgattggcatattgcacttgaagcactttgtgaggttttgccatctctacagccaataattgtctactttccagacagttctcaatggttatctagagcagtttcaaaatcagatcgcagagagtttgtgcaaagagttgagaaaatgtttgaccggcttaccggaccggtagtattgatatgtggccagaacttactggcagcagcacccaaggataaggaacaaccatccccactgaagcggttggtagggggcctgaagggagaaagatattcaaggtccagtgacatatcaaagctcttcaccaatagtctaactgttcctcttccagaggaagatgaacaactacaactttttaataatcagattgaagaggatagaaaaattatgatttcgaggcataaccttgttaaattgcacaaggtgcttgaggagcatgatctttcttgtgtggagcttttggatgtgaagttggatggtattgttttaacaaaacaaaaagcggagaaggccgttggttgggctagaaaccactatctgtcatcaacaactcttccttctatcaaaggtgacaggttaatcattccccgtgagagtctggatatatcaatcgagaggctgaaggaacagggtataacagctaagaaatcctctcaaaatctgaaggttttggctaaagatgagtatgagcgcaatttcatttctgctgttgtgcctccgaatgaaattggagtgaaatttgacgacatcggtgcacttgaggacgtgaagagaacattggatgagcttgttacacttccaatgaggagacctgaacttttttcgcgtggaaatttgttaaggccctgtaaaggtgttttgctttttgggcctcctgggacaggaaaaacactcttggcaaaagcccttgcaacagaagctggagcaaattttatcagtataactggttctacactcacatcaaagtggtttggagacgcagagaagctcacaaaggcccttttctcctttgcgactcgactagctcctgttatcatatttgtggacgaggttgacagcttacttggtgcaagaggtggtgcatttgagcatgaagcaacaagaaggatgcgcaatgaattcatggcagcttgggatggtctcaggtccaaagagaaccaacggatccttattcttggtgcaacaaatcgtccatttgatctggatgatgctgtgatacggcgtttacctagacggatatatgttgaccttccggatgcgcagaaccgaatgaaaattctaaagattttacttgcgaaggaaaaactagaatctgattttaagttcgatgagcttgcaaatgccacagaaggctattcagggagcgacctaaagaacctatgtgtagctgcagcatataggccagtccatgaactactagaagaagagaaaaagggacgtgtgagtaacgaaaacagttatctgagacccctttgcttggatgattttatccaagcaaaagctaaggttagctcgtctgtttcttatgatgcaacaagtatgaatgaattgagaaaatggaacgagcagtatggggaaggtggcagcaggactaaatcaccatttgggtttggcaactgacactacagtagagatttaccaatactgtatctttgtaacatttaggctgcctcttgttggtagattagggagtcagttccatttttttaccatgagcttatttgaacaacctcgtaatcacctcgtgcaaacaaaaaagaatctagttaaacgccaattttgcctactagttaatggtcggaaataccagtgtagaatcagaaatcggctacacactacaaaataatgtatctgagctactctgggtaagcattaagctttaacaagatgtaaacggcttaagaattttcagttaattcatactagttctcagcatggaattcagtagaactaatttagtattgatagctagtcgatggctggaatcttcaggatgtctcctattgcccagaaactttgttcgtatcaaaagaatggaagagaatagcttgctagtagtattgtatttttggtccttacatgtataaaatgtgtcggttacttttccttcacacatgcgaatcatgtgtagaaatcaactggcataaaactgaactattatctgag

SEQ ID NO: 44909 - DNA, 2561 bp, Zea Mays
ccggagcataattgaggcttagcccctccttattgataccttgagatagggtgaagtatgttggaacctctgcagtcgttgaagcagatcagaggatcattttggggaaaatacctactcaagatggctcaaggagtgcctatacttttattagtggaaggggtctatcaaatggacagcgtggggaggtatatgaggttaatggggatcaggttgctgtcatatttgatccttctatagagaaatcacacaatgcccatgaagatgtaactaacaaggaggaaaatggatcagcaactgtttactgggttgattctcaggatattgcacatgatcatgataccgaatcagacgattggcatattgcacttgaagcactttgtgaggttttgccatctctacagccaataattgtctactttccagacagttctcaatggttatctagagcagtttcaaaatcagatcgcagagagtttgtgcaaagagttgagaaaatgtttgaccggcttaccggaccggtagtattgatatgtggccagaacttactggcagcagcacccaaggataaggaacaacctgcactgatgttccacaatctctctcgcctgtcttcactgccatccccactgaagcggttggtagggggcctgaagggagaaagatattcaaggtccagtgacatatcaaagctcttcaccaatagtctaactgttcctcttccagaggaagatgaacaactacaactttttaataatcagattgaagaggatagaaaaattatgatttcgaggcataaccttgttaaattgcacaaggtgcttgaggagcatgatctttcttgtgtggagcttttggatgtgaagttggatggtattgttttaacaaaacaaaaagcggagaaggccgttggttgggctagaaaccactatctgtcatcaacaactcttccttctatcaaaggtgacaggttaatcattccccgtgagagtctggatatatcaatcgagaggctgaaggaacagggtataacagctaagaaatcctctcaaaatctgaaggttttggctaaagatgagtatgagcgcaatttcatttctgctgttgtgcctccgaatgaaattggagtgaaatttgacgacatcggtgcacttgaggacgtgaagagaacattggatgagcttgttacacttccaatgaggagacctgaacttttttcgcgtggaaatttgttaaggccctgtaaaggtgttttgctttttgggcctcctgggacaggaaaaacactcttggcaaaagcccttgcaacagaagctggagcaaattttatcagtataactggttctacactcacatcaaagtggtttggagacgcagagaagctcacaaaggcccttttctcctttgcgactcgactagctcctgttatcatatttgtggacgaggttgacagcttacttggtgcaagaggtggtgcatttgagcatgaagcaacaagaaggatgcgcaatgaattcatggcagcttgggatggtctcaggtccaaagagaaccaacggatccttattcttggtgcaacaaatcgtccatttgatctggatgatgctgtgatacggcgtttacctagacggatatatgttgaccttccggatgcgcagaaccgaatgaaaattctaaagattttacttgcgaaggaaaaactagaatctgattttaagttcgatgagcttgcaaatgccacagaaggctattcagggagcgacctaaagaacctatgtgtagctgcagcatataggccagtccatgaactactagaagaagagaaaaagggacgtgtgagtaacgaaaacagttatctgagacccctttgcttggatgattttatccaagcaaaagctaaggttagctcgtctgtttcttatgatgcaacaagtatgaatgaattgagaaaatggaacgagcagtatggggaaggtggcagcaggactaaatcaccatttgggtttggcaactgacactacagtagagatttaccaatactgtatctttgtaacatttaggctgcctcttgttggtagattagggagtcagttccatttttttaccatgagcttatttgaacaacctcgtaatcacctcgtgcaaacaaaaaagaatctagttaaacgccaattttgcctactagttaatggtcggaaataccagtgtagaatcagaaatcggctacacactacaaaataatgtatctgagctactctgggtaagcattaagctttaacaagatgtaaacggcttaagaattttcagttaattcatactagttctcagcatggaattcagtagaactaatttagtattgatagctagtcgatggctggaatcttcaggatgtctcctattgcccagaaactttgttcgtatcaaaagaatggaagagaatagcttgctagtagtattgtatttttggtccttacatgtataaaatgtgtcggttacttttccttcacacatgcgaatcatgtgtagaaatcaactggcataaaactgaactattatctgag

SEQ ID NO: 44910 - DNA, 2491 bp, Zea Mays
gaaaataagcttttgttgttttaacttaacccatgagtccatgactgcctgtgccggagcataattgaggcttagcccctccttattgataccttgagatagggtgaagtatgttggaacctctgcagtcgttgaagcagatcagaggatcattttggggaaaatacctactcaagatggctcaaggagtgcctatacttttattagtggaaggggtctatcaaatggacagcgtggggaggtatatgaggttaatggggatcaggttgctgtcatatttgatccttctatagagaaatcacacaatgcccatgaagatgtaactaacaaggaggaaaatggatcagcaactgtttactgggttgattctcaggatattgcacatgatcatgataccgaatcagacgattggcatattgcacttgaagcactttgtgaggttttgccatctctacagccaataattgtctactttccagacagttctcaatggttatctagagcagtttcaaaatcagatcgcagagagtttgtgcaaagagttgagaaaatgtttgaccggcttaccggaccggtagtattgatatgtggccagaacttactggcagcagcacccaaggataaggaacaacctgcactgatgttccacaatctctctcgcctgtcttcactgccatccccactgaagcggttggtagggggcctgaagggagaaagatattcaaggtccagtgacatatcaaagctcttcaccaatagtctaactgttcctcttccagaggaagatgaacaactacaactttttaataatcagattgaagaggatagaaaaattatgatttcgaggcataaccttgttaaattgcacaaggtgcttgaggagcatgatctttcttgtgtggagcttttggatgtgaagttggatggtattgttttaacaaaacaaaaagcggagaaggccgttggttgggctagaaaccactatctgtcatcaacaactcttccttctatcaaaggtgacaggttaatcattccccgtgagagtctggatatatcaatcgagaggctgaaggaacagggtataacagctaagaaatcctctcaaaatctgaaggttttggctaaagatgagtatgagcgcaatttcatttctgctgttgtgcctccgaatgaaattggagtgaaatttgacgacatcggtgcacttgaggacgtgaagagaacattggatgagcttgttacacttccaatgaggagacctgaacttttttcgcgtggaaatttgttaaggtggtttggagacgcagagaagctcacaaaggcccttttctcctttgcgactcgactagctcctgttatcatatttgtggacgaggttgacagcttacttggtgcaagaggtggtgcatttgagcatgaagcaacaagaaggatgcgcaatgaattcatggcagcttgggatggtctcaggtccaaagagaaccaacggatccttattcttggtgcaacaaatcgtccatttgatctggatgatgctgtgatacggcgtttacctagacggatatatgttgaccttccggatgcgcagaaccgaatgaaaattctaaagattttacttgcgaaggaaaaactagaatctgattttaagttcgatgagcttgcaaatgccacagaaggctattcagggagcgacctaaagaacctatgtgtagctgcagcatataggccagtccatgaactactagaagaagagaaaaagggacgtgtgagtaacgaaaacagttatctgagacccctttgcttggatgattttatccaagcaaaagctaaggttagctcgtctgtttcttatgatgcaacaagtatgaatgaattgagaaaatggaacgagcagtatggggaaggtggcagcaggactaaatcaccatttgggtttggcaactgacactacagtagagatttaccaatactgtatctttgtaacatttaggctgcctcttgttggtagattagggagtcagttccatttttttaccatgagcttatttgaacaacctcgtaatcacctcgtgcaaacaaaaaagaatctagttaaacgccaattttgcctactagttaatggtcggaaataccagtgtagaatcagaaatcggctacacactacaaaataatgtatctgagctactctgggtaagcattaagctttaacaagatgtaaacggcttaagaattttcagttaattcatactagttctcagcatggaattcagtagaactaatttagtattgatagctagtcgatggctggaatcttcaggatgtctcctattgcccagaaactttgttcgtatcaaaagaatggaagagaatagcttgctagtagtattgtatttttggtccttacatgtataaaatgtgtcggttacttttccttcacacatgcgaatcatgtgtagaaatcaactggcataaaactgaactattatctgag

SEQ ID NO: 44911 - DNA, 3692 bp, Zea Mays
gaaacctggagcggagcggtggtgccttggcgtctccctcctctccgtcgcccgcaggcgtgcgccaccatctacgccgcgccgcccgccatcctgccgcccgagatgtaccacgcgatgcggctgcgctgcctcctcctgcaccctccgatgtggagtaattcgagctccctcggcatctctgccagcggcgtcagtagaggttccttcgtcaggaggttcagcgcgctcggggcgccgcggccgcctggtcctgcccgacggctgtgtcggttttacggctccaagggcggcgtcgggagcgctgaggcgaggggcgccgctgcgtccccggcggcggcggggagcagcggcaggtgcttcgagcaggagcacgcgcggctcggggaaagggaccagcaggagtggctgagcggcgagaggtttctcaccggctgcaagcgacgggagtcgacgttcctcaccaggcgggagaggttccgcagagagttcctgcgccgcgtcgtgccgtgggagaaggggtcgctctcgtggcagaatttcccctactacgtcaatgacaatgcgaggcagctgctgagtgagtgtgtggcgtcccacctgcgtcacaagagtgtcacatcagaatatggctcacgtttggaatcctctggagggcggatattgctccaaagttctccaggtataaagccactaggatgaaaatagttagtgccgctatgctctaaatgcttgggttgtgaaatttgtttaatgcaggaactgagctttacagggagagatttgttagagctcttgcacatgagttgcaagtgccgctattggttctggacagcagtgttcttgcaccatatgattatggggaggattactcagaaagtgaggaggaggatgagcatgctgagtcagaggatgaaggttcagaatctgaaatggaagacgatggtgatgaagattggacaagcaacaatggaaaatctggtgaaagtgacgatgaggatgctctcaaatctgtggaagatctgaagaaatctgtggatgacctaaaaaagttggttccttgtactatcgaggaatttgccaagagaattgctggtgctgaagaaagtacggcgtcagaatcttctgaaactcctgagtcaccagaagaagagaaaaggcctttccaaaggggagatagggtgaagtatgttggaacctctgcagtcgttgaagcagatcagaggatcattttggggaaaatacctactcaagatggctcaaggagtgcctatacttttattagtggaaggggtctatcaaatggacagcgtggggaggtatatgaggttaatggggatcaggttgctgtcatatttgatccttctatagagaaatcacacaatgcccatgaagatgtaactaacaaggaggaaaatggatcagcaactgtttactgggttgattctcaggatattgcacatgatcatgataccgaatcagacgattggcatattgcacttgaagcactttgtgaggttttgccatctctacagccaataattgtctactttccagacagttctcaatggttatctagagcagtttcaaaatcagatcgcagagagtttgtgcaaagagttgagaaaatgtttgaccggcttaccggaccggtagtattgatatgtggccagaacttactggcagcagcacccaaggataaggaacaacctgcactgatgttccacaatctctctcgcctgtcttcactgccatccccactgaagcggttggtagggggcctgaagggagaaagatattcaaggtccagtgacatatcaaagctcttcaccaatagtctaactgttcctcttccagaggaagatgaacaactacaactttttaataatcagattgaagaggatagaaaaattatgatttcgaggcataaccttgttaaattgcacaaggtgcttgaggagcatgatctttcttgtgtggagcttttggatgtgaagttggatggtattgttttaacaaaacaaaaagcggagaaggccgttggttgggctagaaaccactatctgtcatcaacaactcttccttctatcaaaggtgacaggttaatcattccccgtgagagtctggatatatcaatcgagaggctgaaggaacagggtataacagctaagaaatcctctcaaaatctgaaggttttggctaaagatgagtatgagcgcaatttcatttctgctgttgtgcctccgaatgaaattggagtgaaatttgacgacatcggtgcacttgaggacgtgaagagaacattggatgagcttgttacacttccaatgaggagacctgaacttttttcgcgtggaaatttgttaaggccctgtaaaggtgttttgctttttgggcctcctgggacaggaaaaacactcttggcaaaagcccttgcaacagaagctggagcaaattttatcagtataactggttctacactcacatcaaagtggtttggagacgcagagaagctcacaaaggcccttttctcctttgcgactcgactagctcctgttatcatatttgtggacgaggttgacagcttacttggtgcaagaggtggtgcatttgagcatgaagcaacaagaaggatgcgcaatgaattcatggcagcttgggatggtctcaggtccaaagagaaccaacggatccttattcttggtgcaacaaatcgtccatttgatctggatgatgctgtgatacggcgtttacctagacggatatatgttgaccttccggatgcgcagaaccgaatgaaaattctaaagattttacttgcgaaggaaaaactagaatctgattttaagttcgatgagcttgcaaatgccacagaaggctattcagggagcgacctaaagaacctatgtgtagctgcagcatataggccagtccatgaactactagaagaagagaaaaagggacgtgtgagtaacgaaaacagttatctgagacccctttgcttggatgattttatccaagcaaaagctaaggttagctcgtctgtttcttatgatgcaacaagtatgaatgaattgagaaaatggaacgagcagtatggggaaggtggcagcaggactaaatcaccatttgggtttggcaactgacactacagtagagatttaccaatactgtatctttgtaacatttaggctgcctcttgttggtagattagggagtcagttccatttttttaccatgagcttatttgaacaacctcgtaatcacctcgtgcaaacaaaaaagaatctagttaaacgccaattttgcctactagttaatggtcggaaataccagtgtagaatcagaaatcggctacacactacaaaataatgtatctgagctactctgggtaagcattaagctttaacaagatgtaaacggcttaagaattttcagttaattcatactagttctcagcatggaattcagtagaactaatttagtattgatagctagtcgatggctggaatcttcaggatgtctcctattgcccagaaactttgttcgtatcaaaagaatggaagagaatagcttgctagtagtattgtatttttggtccttacatgtataaaatgtgtcggttacttttccttcacacatgcgaatcatgtgtagaaatcaactggcataaaactgaactattatctgag

SEQ ID NO: 44912 - DNA, 3613 bp, Zea Mays
cgaaacctggagcggagcggtggtgccttggcgtctccctcctctccgtcgcccgcaggcgtgcgccaccatctacgccgcgccgcccgccatcctgccgcccgagatgtaccacgcgatgcggctgcgctgcctcctcctgcaccctccgatgtggagtaattcgagctccctcggcatctctgccagcggcgtcagtagaggttccttcgtcaggaggttcagcgcgctcggggcgccgcggccgcctggtcctgcccgacggctgtgtcggttttacggctccaagggcggcgtcgggagcgctgaggcgaggggcgccgctgcgtccccggcggcggcggggagcagcggcaggtgcttcgagcaggagcacgcgcggctcggggaaagggaccagcaggagtggctgagcggcgagaggtttctcaccggctgcaagcgacgggagtcgacgttcctcaccaggcgggagaggttccgcagagagttcctgcgccgcgtcgtgccgtgggagaaggggtcgctctcgtggcagaatttcccctactacgtcaatgacaatgcgaggcagctgctgagtgagtgtgtggcgtcccacctgcgtcacaagagtgtcacatcagaatatggctcacgtttggaatcctctggagggcggatattgctccaaagttctccaggaactgagctttacagggagagatttgttagagctcttgcacatgagttgcaagtgccgctattggttctggacagcagtgttcttgcaccatatgattatggggaggattactcagaaagtgaggaggaggatgagcatgctgagtcagaggatgaaggttcagaatctgaaatggaagacgatggtgatgaagattggacaagcaacaatggaaaatctggtgaaagtgacgatgaggatgctctcaaatctgtggaagatctgaagaaatctgtggatgacctaaaaaagttggttccttgtactatcgaggaatttgccaagagaattgctggtgctgaagaaagtacggcgtcagaatcttctgaaactcctgagtcaccagaagaagagaaaaggcctttccaaaggggagatagggtgaagtatgttggaacctctgcagtcgttgaagcagatcagaggaaggtgaagcacaaagtcaagatgaaccattggatgaggatcattttggggaaaatacctactcaagatggctcaaggagtgcctatacttttattagtggaaggggtctatcaaatggacagcgtggggaggtatatgaggttaatggggatcaggttgctgtcatatttgatccttctatagagaaatcacacaatgcccatgaagatgtaactaacaaggaggaaaatggatcagcaactgtttactgggttgattctcaggatattgcacatgatcatgataccgaatcagacgattggcatattgcacttgaagcactttgtgaggttttgccatctctacagccaataattgtctactttccagacagttctcaatggttatctagagcagtttcaaaatcagatcgcagagagtttgtgcaaagagttgagaaaatgtttgaccggcttaccggaccggtagtattgatatgtggccagaacttactggcagcagcacccaaggataaggaacaaccatccccactgaagcggttggtagggggcctgaagggagaaagatattcaaggtccagtgacatatcaaagctcttcaccaatagtctaactgttcctcttccagaggaagatgaacaactacaactttttaataatcagattgaagaggatagaaaaattatgatttcgaggcataaccttgttaaattgcacaaggtgcttgaggagcatgatctttcttgtgtggagcttttggatgtgaagttggatggtattgttttaacaaaacaaaaagcggagaaggccgttggttgggctagaaaccactatctgtcatcaacaactcttccttctatcaaaggtgacaggttaatcattccccgtgagagtctggatatatcaatcgagaggctgaaggaacagggtataacagctaagaaatcctctcaaaatctgaaggttttggctaaagatgagtatgagcgcaatttcatttctgctgttgtgcctccgaatgaaattggagtgaaatttgacgacatcggtgcacttgaggacgtgaagagaacattggatgagcttgttacacttccaatgaggagacctgaacttttttcgcgtggaaatttgttaaggccctgtaaaggtgttttgctttttgggcctcctgggacaggaaaaacactcttggcaaaagcccttgcaacagaagctggagcaaattttatcagtataactggttctacactcacatcaaagtggtttggagacgcagagaagctcacaaaggcccttttctcctttgcgactcgactagctcctgttatcatatttgtggacgaggttgacagcttacttggtgcaagaggtggtgcatttgagcatgaagcaacaagaaggatgcgcaatgaattcatggcagcttgggatggtctcaggtccaaagagaaccaacggatccttattcttggtgcaacaaatcgtccatttgatctggatgatgctgtgatacggcgtttacctagacggatatatgttgaccttccggatgcgcagaaccgaatgaaaattctaaagattttacttgcgaaggaaaaactagaatctgattttaagttcgatgagcttgcaaatgccacagaaggctattcagggagcgacctaaagaacctatgtgtagctgcagcatataggccagtccatgaactactagaagaagagaaaaagggacgtgtgagtaacgaaaacagttatctgagacccctttgcttggatgattttatccaagcaaaagctaaggttagctcgtctgtttcttatgatgcaacaagtatgaatgaattgagaaaatggaacgagcagtatggggaaggtggcagcaggactaaatcaccatttgggtttggcaactgacactacagtagagatttaccaatactgtatctttgtaacatttaggctgcctcttgttggtagattagggagtcagttccatttttttaccatgagcttatttgaacaacctcgtaatcacctcgtgcaaacaaaaaagaatctagttaaacgccaattttgcctactagttaatggtcggaaataccagtgtagaatcagaaatcggctacacactacaaaataatgtatctgagctactctgggtaagcattaagctttaacaagatgtaaacggcttaagaattttcagttaattcatactagttctcagcatggaattcagtagaactaatttagtattgatagctagtcgatggctggaatcttcaggatgtctcctattgcccagaaactttgttcgtatcaaaagaatggaagagaatagcttgctagtagtattgtatttttggtccttacatgtataaaatgtgtcggttacttttccttcacacatgcgaatcatgtgtagaaatcaactggcataaaactgaactattatctgag

SEQ ID NO: 44913 - DNA, 3513 bp, Zea Mays
cgaaacctggagcggagcggtggtgccttggcgtctccctcctctccgtcgcccgcaggcgtgcgccaccatctacgccgcgccgcccgccatcctgagccgcccgagatgtaccacgcgatgcggctgcgctgcctcctcctgcaccctccgatgtggagtaattcgagctccctcggcatctctgccagcggcgtcagtagaggttccgcagagagttcctgcgccgcgtcgtgccgtgggagaaggggtcgctctcgtggcagaatttcccctactacgtcaatgacaatgcgaggcagctgctgagtgagtgtgtggcgtcccacctgcgtcacaagagtgtcacatcagaatatggctcacgtttggaatcctctggagggcggatattgctccaaagttctccaggaactgagctttacagggagagatttgttagagctcttgcacatgagttgcaagtgccgctattggttctggacagcagtgttcttgcaccatatgattatggggaggattactcagaaagtgaggaggaggatgagcatgctgagtcagaggatgaaggttcagaatctgaaatggaagacgatggtgatgaagattggacaagcaacaatggaaaatctggtgaaagtgacgatgaggatgctctcaaatctgtggaagatctgaagaaatctgtggatgacctaaaaaagttggttccttgtactatcgaggaatttgccaagagaattgctggtgctgaagaaagtacggcgtcagaatcttctgaaactcctgagtcaccagaagaagagaaaaggcctttccaaaggggagatagggtgaagtatgttggaacctctgcagtcgttgaagcagatcagaggaaggtgaagcacaaagtcaagatgaaccattggatgaggatcattttggggaaaatacctactcaagatggctcaaggagtgcctatacttttattagtggaaggtggattacgaagaggaacatttctaactcgaataatcacaggggtctatcaaatggacagcgtggggaggtatatgaggttaatggggatcaggttgctgtcatatttgatccttctatagagaaatcacacaatgcccatgaagatgtaactaacaaggaggaaaatggatcagcaactgtttactgggttgattgtatgcctctactctgtagcctgatggctgtttgattttatttgacaattccattactttgattccatctgatttctttgtgccttagctcaggatattgcacatgatcatgataccgaatcagacgattggcatattgcacttgaagcactttgtgaggttttgccatctctacagccaataattgtctactttccagacagttctcaatggttatctagagcagtttcaaaatcagatcgcagagagtttgtgcaaagagttgagaaaatgtttgaccggcttaccggaccggtagtattgatatgtggccagaacttactggcagcagcacccaaggataaggaacaacctgcactgatgttccacaatctctctcgcctgtcttcactgccatccccactgaagcggttggtagggggcctgaagggagaaagatattcaaggtccagtgacatatcaaagctcttcaccaatagtctaactgttcctcttccagaggaagatgaacaactacaactttttaataatcagattgaagaggatagaaaaattatgatttcgaggcataaccttgttaaattgcacaaggtgcttgaggagcatgatctttcttgtgtggagcttttggatgtgaagttggatggtattgttttaacaaaacaaaaagcggagaaggccgttggttgggctagaaaccactatctgtcatcaacaactcttccttctatcaaaggtgacaggttaatcattccccgtgagagtctggatatatcaatcgagaggctgaaggaacagggtataacagctaagaaatcctctcaaaatctgaaggttttggctaaagatgagtatgagcgcaatttcatttctgctgttgtgcctccgaatgaaattggagtgaaatttgacgacatcggtgcacttgaggacgtgaagagaacattggatgagcttgttacacttccaatgaggagacctgaacttttttcgcgtggaaatttgttaaggccctgtaaaggtgttttgctttttgggcctcctgggacaggaaaaacactcttggcaaaagcccttgcaacagaagctggagcaaattttatcagtataactggttctacactcacatcaaagtggtttggagacgcagagaagctcacaaaggcccttttctcctttgcgactcgactagctcctgttatcatatttgtggacgaggttgacagcttacttggtgcaagaggtggtgcatttgagcatgaagcaacaagaaggatgcgcaatgaattcatggcagcttgggatggtctcaggtccaaagagaaccaacggatccttattcttggtgcaacaaatcgtccatttgatctggatgatgctgtgatacggcgtttacctagacggatatatgttgaccttccggatgcgcagaaccgaatgaaaattctaaagattttacttgcgaaggaaaaactagaatctgattttaagttcgatgagcttgcaaatgccacagaaggctattcagggagcgacctaaagaacctatgtgtagctgcagcatataggccagtccatgaactactagaagaagagaaaaagggacgtgtgagtaacgaaaacagttatctgagacccctttgcttggatgattttatccaagcaaaagctaaggttagctcgtctgtttcttatgatgcaacaagtatgaatgaattgagaaaatggaacgagcagtatggggaaggtggcagcaggactaaatcaccatttgggtttggcaactgacactacagtagagatttaccaatactgtatctttgtaacatttaggctgcctcttgttggtagattagggagtcagttccatttttttaccatgagcttatttgaacaacctcgtaatcacctcgtgcaaacaaaaaagaatctagttaaacgccaattttgcctactagttaatggtcggaaataccagtgtagaatcagaaatcggctacacactacaaaataatgtatctgagctactctgggtaagcattaagctttaacaagatgtaaacggcttaagaattttcagttaattcatactagttctcagcatggaattcagtagaactaatttagtattgatagctagtcgatggctggaatcttcaggatgtctcctattgcccagaaactttgttcgtatcaaaagaatggaagagaatagcttgctagtagtattgtatttttggtccttacatgtataaaatgtgtcggttacttttccttcacacatgcgaatcatgtgtagaaatcaactggcataaaactgaactattatctgag

SEQ ID NO: 44914 - DNA, 3517 bp, Zea Mays
acggcgtgagaagaggattacccgaaacctggagcggagcggtggtgccttggcgtctccctcctctccgtcgcccgcaggcgtgcgccaccatctacgccgcgccgcccgccatcctgagccgcccgagatgtaccacgcgatgcggctgcgctgcctcctcctgcaccctccgatgtggagtaattcgagctccctcggcatctctgccagcggcgtcagtagaggttccttcgtcaggaggttcagcgcgctcggggcgccgcggccgcctggtcctgcccgacggctgtgtcggttttacggctccaagggcggcgtcgggagcgctgaggcgaggggcgccgctgcgtccccggcggcggcggggagcagcggcaggtgcttcgagcaggagcacgcgcggctcggggaaagggaccagcaggagtggctgagcggcgagaggtttctcaccggctgcaagcgacgggagtcgacgttcctcaccaggcgggagaggttccgcagagagttcctgcgccgcgtcgtgccgtgggagaaggggtcgctctcgtggcagaatttcccctactacgtcaatgacaatgcgaggcagctgctgagtgagtgtgtggcgtcccacctgcgtcacaagagtgtcacatcagaatatggctcacgtttggaatcctctggagggcggatattgctccaaagttctccaggaactgagctttacagggagagatttgttagagctcttgcacatgagttgcaagtgccgctattggttctggacagcagtgttcttgcaccatatgattatggggaggattactcagaaagtgaggaggaggatgagcatgctgagtcagaggatgaaggttcagaatctgaaatggaagacgatggtgatgaagattggacaagcaacaatggaaaatctggtgaaagtgacgatgaggatgctctcaaatctgtggaagatctgaagaaatctgtggatgacctaaaaaagttggttccttgtactatcgaggaatttgccaagagaattgctggtgctgaagaaagtacggcgtcagaatcttctgaaactcctgagtcaccagaagaagagaaaaggcctttccaaaggggagatagggtgaagtatgttggaacctctgcagtcgttgaagcagatcagaggatcattttggggaaaatacctactcaagatggctcaaggagtgcctatacttttattagtggaaggggtctatcaaatggacagcgtggggaggtatatgaggttaatggggatcaggttgctgtcatatttgatccttctatagagaaatcacacaatgcccatgaagatgtaactaacaaggaggaaaatggatcagcaactgtttactgggttgattctcaggatattgcacatgatcatgataccgaatcagacgattggcatattgcacttgaagcactttgtgaggttttgccatctctacagccaataattgtctactttccagacagttctcaatggttatctagagcagtttcaaaatcagatcgcagagagtttgtgcaaagagttgagaaaatgtttgaccggcttaccggaccggtagtattgatatgtggccagaacttactggcagcagcacccaaggataaggaacaacctgcactgatgttccacaatctctctcgcctgtcttcactgccatccccactgaagcggttggtagggggcctgaagggagaaagatattcaaggtccagtgacatatcaaagctcttcaccaatagtctaactgttcctcttccagaggaagatgaacaactacaactttttaataatcagattgaagaggatagaaaaattatgatttcgaggcataaccttgttaaattgcacaaggtgcttgaggagcatgatctttcttgtgtggagcttttggatgtgaagttggatggtattgttttaacaaaacaaaaagcggagaaggccgttggttgggctagaaaccactatctgtcatcaacaactcttccttctatcaaaggtgacaggttaatcattccccgtgagagtctggatatatcaatcgagaggctgaaggaacagggtataacagctaagaaatcctctcaaaatctgaaggttttggctaaagatgagtatgagcgcaatttcatttctgctgttgtgcctccgaatgaaattggagtgaaatttgacgacatcggtgcacttgaggacgtgaagagaacattggatgagcttgttacacttccaatgaggagacctgaacttttttcgcgtggaaatttgttaaggtggtttggagacgcagagaagctcacaaaggcccttttctcctttgcgactcgactagctcctgttatcatatttgtggacgaggttgacagcttacttggtgcaagaggtggtgcatttgagcatgaagcaacaagaaggatgcgcaatgaattcatggcagcttgggatggtctcaggtccaaagagaaccaacggatccttattcttggtgcaacaaatcgtccatttgatctggatgatgctgtgatacggcgtttacctagacggatatatgttgaccttccggatgcgcagaaccgaatgaaaattctaaagattttacttgcgaaggaaaaactagaatctgattttaagttcgatgagcttgcaaatgccacagaaggctattcagggagcgacctaaagaacctatgtgtagctgcagcatataggccagtccatgaactactagaagaagagaaaaagggacgtgtgagtaacgaaaacagttatctgagacccctttgcttggatgattttatccaagcaaaagctaaggttagctcgtctgtttcttatgatgcaacaagtatgaatgaattgagaaaatggaacgagcagtatggggaaggtggcagcaggactaaatcaccatttgggtttggcaactgacactacagtagagatttaccaatactgtatctttgtaacatttaggctgcctcttgttggtagattagggagtcagttccatttttttaccatgagcttatttgaacaacctcgtaatcacctcgtgcaaacaaaaaagaatctagttaaacgccaattttgcctactagttaatggtcggaaataccagtgtagaatcagaaatcggctacacactacaaaataatgtatctgagctactctgggtaagcattaagctttaacaagatgtaaacggcttaagaattttcagttaattcatactagttctcagcatggaattcagtagaactaatttagtattgatagctagtcgatggctggaatcttcaggatgtctcctattgcccagaaactttgttcgtatcaaaagaatggaagagaatagcttgctagtagtattgtatttttggtccttacatgtataaaatgtgtcggttacttttccttcacacatgcgaatcatgtgtagaaatcaactggcataaaactgaactattatctgag

SEQ ID NO: 44915 - DNA, 3638 bp, Zea Mays
cacggcgtgagaagaggattacccgaaacctggagcggagcggtggtgccttggcgtctccctcctctccgtcgcccgcaggcgtgcgccaccatctacgccgcgccgcccgccatcctgagccgcccgagatgtaccacgcgatgcggctgcgctgcctcctcctgcaccctccgatgtggagtaattcgagctccctcggcatctctgccagcggcgtcagtagaggttccttcgtcaggaggttcagcgcgctcggggcgccgcggccgcctggtcctgcccgacggctgtgtcggttttacggctccaagggcggcgtcgggagcgctgaggcgaggggcgccgctgcgtccccggcggcggcggggagcagcggcaggtgcttcgagcaggagcacgcgcggctcggggaaagggaccagcaggagtggctgagcggcgagaggtttctcaccggctgcaagcgacgggagtcgacgttcctcaccaggcgggagaggttccgcagagagttcctgcgccgcgtcgtgccgtgggagaaggggtcgctctcgtggcagaatttcccctactacgtcaatgacaatgcgaggcagctgctgagtgagtgtgtggcgtcccacctgcgtcacaagagtgtcacatcagaatatggctcacgtttggaatcctctggagggcggatattgctccaaagttctccaggaactgagctttacagggagagatttgttagagctcttgcacatgagttgcaagtgccgctattggttctggacagcagtgttcttgcaccatatgattatggggaggattactcagaaagtgaggaggaggatgagcatgctgagtcagaggatgaaggttcagaatctgaaatggaagacgatggtgatgaagattggacaagcaacaatggaaaatctggtgaaagtgacgatgaggatgctctcaaatctgtggaagatctgaagaaatctgtggatgacctaaaaaagttggttccttgtactatcgaggaatttgccaagagaattgctggtgctgaagaaagtacggcgtcagaatcttctgaaactcctgagtcaccagaagaagagaaaaggcctttccaaaggggagatagggtgaagtatgttggaacctctgcagtcgttgaagcagatcagaggaaggtgaagcacaaagtcaagatgaaccattggatgaggatcattttggggaaaatacctactcaagatggctcaaggagtgcctatacttttattagtggaaggggtctatcaaatggacagcgtggggaggtatatgaggttaatggggatcaggttgctgtcatatttgatccttctatagagaaatcacacaatgcccatgaagatgtaactaacaaggaggaaaatggatcagcaactgtttactgggttgattctcaggatattgcacatgatcatgataccgaatcagacgattggcatattgcacttgaagcactttgtgaggttttgccatctctacagccaataattgtctactttccagacagttctcaatggttatctagagcagtttcaaaatcagatcgcagagagtttgtgcaaagagttgagaaaatgtttgaccggcttaccggaccggtagtattgatatgtggccagaacttactggcagcagcacccaaggataaggaacaaccatccccactgaagcggttggtagggggcctgaagggagaaagatattcaaggtccagtgacatatcaaagctcttcaccaatagtctaactgttcctcttccagaggaagatgaacaactacaactttttaataatcagattgaagaggatagaaaaattatgatttcgaggcataaccttgttaaattgcacaaggtgcttgaggagcatgatctttcttgtgtggagcttttggatgtgaagttggatggtattgttttaacaaaacaaaaagcggagaaggccgttggttgggctagaaaccactatctgtcatcaacaactcttccttctatcaaaggtgacaggttaatcattccccgtgagagtctggatatatcaatcgagaggctgaaggaacagggtataacagctaagaaatcctctcaaaatctgaaggttttggctaaagatgagtatgagcgcaatttcatttctgctgttgtgcctccgaatgaaattggagtgaaatttgacgacatcggtgcacttgaggacgtgaagagaacattggatgagcttgttacacttccaatgaggagacctgaacttttttcgcgtggaaatttgttaaggccctgtaaaggtgttttgctttttgggcctcctgggacaggaaaaacactcttggcaaaagcccttgcaacagaagctggagcaaattttatcagtataactggttctacactcacatcaaagtggtttggagacgcagagaagctcacaaaggcccttttctcctttgcgactcgactagctcctgttatcatatttgtggacgaggttgacagcttacttggtgcaagaggtggtgcatttgagcatgaagcaacaagaaggatgcgcaatgaattcatggcagcttgggatggtctcaggtccaaagagaaccaacggatccttattcttggtgcaacaaatcgtccatttgatctggatgatgctgtgatacggcgtttacctagacggatatatgttgaccttccggatgcgcagaaccgaatgaaaattctaaagattttacttgcgaaggaaaaactagaatctgattttaagttcgatgagcttgcaaatgccacagaaggctattcagggagcgacctaaagaacctatgtgtagctgcagcatataggccagtccatgaactactagaagaagagaaaaagggacgtgtgagtaacgaaaacagttatctgagacccctttgcttggatgattttatccaagcaaaagctaaggttagctcgtctgtttcttatgatgcaacaagtatgaatgaattgagaaaatggaacgagcagtatggggaaggtggcagcaggactaaatcaccatttgggtttggcaactgacactacagtagagatttaccaatactgtatctttgtaacatttaggctgcctcttgttggtagattagggagtcagttccatttttttaccatgagcttatttgaacaacctcgtaatcacctcgtgcaaacaaaaaagaatctagttaaacgccaattttgcctactagttaatggtcggaaataccagtgtagaatcagaaatcggctacacactacaaaataatgtatctgagctactctgggtaagcattaagctttaacaagatgtaaacggcttaagaattttcagttaattcatactagttctcagcatggaattcagtagaactaatttagtattgatagctagtcgatggctggaatcttcaggatgtctcctattgcccagaaactttgttcgtatcaaaagaatggaagagaatagcttgctagtagtattgtatttttggtccttacatgtataaaatgtgtcggttacttttccttcacacatgcgaatcatgtgtagaaatcaactggcataaaactgaactattatctgag

SEQ ID NO: 44916 - DNA, 3678 bp, Zea Mays
cacggcgtgagaagaggattacccgaaacctggagcggagcggtggtgccttggcgtctccctcctctccgtcgcccgcaggcgtgcgccaccatctacgccgcgccgcccgccatcctgccgcccgagatgtaccacgcgatgcggctgcgctgcctcctcctgcaccctccgatgtggagtaattcgagctccctcggcatctctgccagcggcgtcagtagaggttccttcgtcaggaggttcagcgcgctcggggcgccgcggccgcctggtcctgcccgacggctgtgtcggttttacggctccaagggcggcgtcgggagcgctgaggcgaggggcgccgctgcgtccccggcggcggcggggagcagcggcaggtgcttcgagcaggagcacgcgcggctcggggaaagggaccagcaggagtggctgagcggcgagaggtttctcaccggctgcaagcgacgggagtcgacgttcctcaccaggcgggagaggttccgcagagagttcctgcgccgcgtcgtgccgtgggagaaggggtcgctctcgtggcagaatttcccctactacgtcaatgacaatgcgaggcagctgctgagtgagtgtgtggcgtcccacctgcgtcacaagagtgtcacatcagaatatggctcacgtttggaatcctctggagggcggatattgctccaaagttctccaggaactgagctttacagggagagatttgttagagctcttgcacatgagttgcaagtgccgctattggttctggacagcagtgttcttgcaccatatgattatggggaggattactcagaaagtgaggaggaggatgagcatgctgagtcagaggatgaaggttcagaatctgaaatggaagacgatggtgatgaagattggacaagcaacaatggaaaatctggtgaaagtgacgatgaggatgctctcaaatctgtggaagatctgaagaaatctgtggatgacctaaaaaagttggttccttgtactatcgaggaatttgccaagagaattgctggtgctgaagaaagtacggcgtcagaatcttctgaaactcctgagtcaccagaagaagagaaaaggcctttccaaaggggagatagggtgaagtatgttggaacctctgcagtcgttgaagcagatcagaggaaggtgaagcacaaagtcaagatgaaccattggatgaggatcattttggggaaaatacctactcaagatggctcaaggagtgcctatacttttattagtggaaggggtctatcaaatggacagcgtggggaggtatatgaggttaatggggatcaggttgctgtcatatttgatccttctatagagaaatcacacaatgcccatgaagatgtaactaacaaggaggaaaatggatcagcaactgtttactgggttgattctcaggatattgcacatgatcatgataccgaatcagacgattggcatattgcacttgaagcactttgtgaggttttgccatctctacagccaataattgtctactttccagacagttctcaatggttatctagagcagtttcaaaatcagatcgcagagagtttgtgcaaagagttgagaaaatgtttgaccggcttaccggaccggtagtattgatatgtggccagaacttactggcagcagcacccaaggataaggaacaacctgcactgatgttccacaatctctctcgcctgtcttcactgccatccccactgaagcggttggtagggggcctgaagggagaaagatattcaaggtccagtgacatatcaaagctcttcaccaatagtctaactgttcctcttccagaggaagatgaacaactacaactttttaataatcagattgaagaggatagaaaaattatgatttcgaggcataaccttgttaaattgcacaaggtgcttgaggagcatgatctttcttgtgtggagcttttggatgtgaagttggatggtattgttttaacaaaacaaaaagcggagaaggccgttggttgggctagaaaccactatctgtcatcaacaactcttccttctatcaaaggtgacaggttaatcattccccgtgagagtctggatatatcaatcgagaggctgaaggaacagggtataacagctaagaaatcctctcaaaatctgaaggttttggctaaagatgagtatgagcgcaatttcatttctgctgttgtgcctccgaatgaaattggagtgaaatttgacgacatcggtgcacttgaggacgtgaagagaacattggatgagcttgttacacttccaatgaggagacctgaacttttttcgcgtggaaatttgttaaggccctgtaaaggtgttttgctttttgggcctcctgggacaggaaaaacactcttggcaaaagcccttgcaacagaagctggagcaaattttatcagtataactggttctacactcacatcaaagtggtttggagacgcagagaagctcacaaaggcccttttctcctttgcgactcgactagctcctgttatcatatttgtggacgaggttgacagcttacttggtgcaagaggtggtgcatttgagcatgaagcaacaagaaggatgcgcaatgaattcatggcagcttgggatggtctcaggtccaaagagaaccaacggatccttattcttggtgcaacaaatcgtccatttgatctggatgatgctgtgatacggcgtttacctagacggatatatgttgaccttccggatgcgcagaaccgaatgaaaattctaaagattttacttgcgaaggaaaaactagaatctgattttaagttcgatgagcttgcaaatgccacagaaggctattcagggagcgacctaaagaacctatgtgtagctgcagcatataggccagtccatgaactactagaagaagagaaaaagggacgtgtgagtaacgaaaacagttatctgagacccctttgcttggatgattttatccaagcaaaagctaaggttagctcgtctgtttcttatgatgcaacaagtatgaatgaattgagaaaatggaacgagcagtatggggaaggtggcagcaggactaaatcaccatttgggtttggcaactgacactacagtagagatttaccaatactgtatctttgtaacatttaggctgcctcttgttggtagattagggagtcagttccatttttttaccatgagcttatttgaacaacctcgtaatcacctcgtgcaaacaaaaaagaatctagttaaacgccaattttgcctactagttaatggtcggaaataccagtgtagaatcagaaatcggctacacactacaaaataatgtatctgagctactctgggtaagcattaagctttaacaagatgtaaacggcttaagaattttcagttaattcatactagttctcagcatggaattcagtagaactaatttagtattgatagctagtcgatggctggaatcttcaggatgtctcctattgcccagaaactttgttcgtatcaaaagaatggaagagaatagcttgctagtagtattgtatttttggtccttacatgtataaaatgtgtcggttacttttccttcacacatgcgaatcatgtgtagaaatcaactggcataaaactgaactattatctgag

SEQ ID NO: 44917 - DNA, 3497 bp, Zea Mays
cacggcgtgagaagaggattacccgaaacctggagcggagcggtggtgccttggcgtctccctcctctccgtcgcccgcaggcgtgcgccaccatctacgccgcgccgcccgccatcctgccgcccgagatgtaccacgcgatgcggctgcgctgcctcctcctgcaccctccgatgtggagtaattcgagctccctcggcatctctgccagcggcgtcagtagaggttccttcgtcaggaggttcagcgcgctcggggcgccgcggccgcctggtcctgcccgacggctgtgtcggttttacggctccaagggcggcgtcgggagcgctgaggcgaggggcgccgctgcgtccccggcggcggcggggagcagcggcaggtgcttcgagcaggagcacgcgcggctcggggaaagggaccagcaggagtggctgagcggcgagaggtttctcaccggctgcaagcgacgggagtcgacgttcctcaccaggcgggagaggttccgcagagagttcctgcgccgcgtcgtgccgtgggagaaggggtcgctctcgtggcagaatttcccctactacgtcaatgacaatgcgaggcagctgctgagtgagtgtgtggcgtcccacctgcgtcacaagagtgtcacatcagaatatggctcacgtttggaatcctctggagggcggatattgctccaaagttctccaggaactgagctttacagggagagatttgttagagctcttgcacatgagttgcaagtgccgctattggttctggacagcagtgttcttgcaccatatgattatggggaggattactcagaaagtgaggaggaggatgagcatgctgagtcagaggatgaaggttcagaatctgaaatggaagacgatggtgatgaagattggacaagcaacaatggaaaatctggtgaaagtgacgatgaggatgctctcaaatctgtggaagatctgaagaaatctgtggatgacctaaaaaagttggttccttgtactatcgaggaatttgccaagagaattgctggtgctgaagaaagtacggcgtcagaatcttctgaaactcctgagtcaccagaagaagagaaaaggcctttccaaaggggagatagggtgaagtatgttggaacctctgcagtcgttgaagcagatcagaggatcattttggggaaaatacctactcaagatggctcaaggagtgcctatacttttattagtggaagcgtggggaggtatatgaggttaatggggatcaggttgctgtcatatttgatccttctatagagaaatcacacaatgcccatgaagatgtaactaacaaggaggaaaatggatcagcaactgtttactgggttgattctcaggatattgcacatgatcatgataccgaatcagacgattggcatattgcacttgaagcactttgtgaggttttgccatctctacagccaataattgtctactttccagacagttctcaatggttatctagagcagtttcaaaatcagatcgcagagagtttgtgcaaagagttgagaaaatgtttgaccggcttaccggaccggtagtattgatatgtggccagaacttactggcagcagcacccaaggataaggaacaacctgcactgatgttccacaatctctctcgcctgtcttcactgccatccccactgaagcggttggtagggggcctgaagggagaaagatattcaaggtccagtgacatatcaaagctcttcaccaatagtctaactgttcctcttccagaggaagatgaacaactacaactttttaataatcagattgaagaggatagaaaaattatgatttcgaggcataaccttgttaaattgcacaaggtgcttgaggagcatgatctttcttgtgtggagcttttggatgtgaagttggatggtattgttttaacaaaacaaaaagcggagaaggccgttggttgggctagaaaccactatctgtcatcaacaactcttccttctatcaaaggtgacaggttaatcattccccgtgagagtctggatatatcaatcgagaggctgaaggaacagggtataacagctaagaaatcctctcaaaatctgaaggttttggctaaagatgagtatgagcgcaatttcatttctgctgttgtgcctccgaatgaaattggagtgaaatttgacgacatcggtgcacttgaggacgtgaagagaacattggatgagcttgttacacttccaatgaggagacctgaacttttttcgcgtggaaatttgttaaggtggtttggagacgcagagaagctcacaaaggcccttttctcctttgcgactcgactagctcctgttatcatatttgtggacgaggttgacagcttacttggtgcaagaggtggtgcatttgagcatgaagcaacaagaaggatgcgcaatgaattcatggcagcttgggatggtctcaggtccaaagagaaccaacggatccttattcttggtgcaacaaatcgtccatttgatctggatgatgctgtgatacggcgtttacctagacggatatatgttgaccttccggatgcgcagaaccgaatgaaaattctaaagattttacttgcgaaggaaaaactagaatctgattttaagttcgatgagcttgcaaatgccacagaaggctattcagggagcgacctaaagaacctatgtgtagctgcagcatataggccagtccatgaactactagaagaagagaaaaagggacgtgtgagtaacgaaaacagttatctgagacccctttgcttggatgattttatccaagcaaaagctaaggttagctcgtctgtttcttatgatgcaacaagtatgaatgaattgagaaaatggaacgagcagtatggggaaggtggcagcaggactaaatcaccatttgggtttggcaactgacactacagtagagatttaccaatactgtatctttgtaacatttaggctgcctcttgttggtagattagggagtcagttccatttttttaccatgagcttatttgaacaacctcgtaatcacctcgtgcaaacaaaaaagaatctagttaaacgccaattttgcctactagttaatggtcggaaataccagtgtagaatcagaaatcggctacacactacaaaataatgtatctgagctactctgggtaagcattaagctttaacaagatgtaaacggcttaagaattttcagttaattcatactagttctcagcatggaattcagtagaactaatttagtattgatagctagtcgatggctggaatcttcaggatgtctcctattgcccagaaactttgttcgtatcaaaagaatggaagagaatagcttgctagtagtattgtatttttggtccttacatgtataaaatgtgtcggttacttttccttcacacatgcgaatcatgtgtagaaatcaactggcataaaactgaactattatctgag

SEQ ID NO: 44918 - DNA, 4077 bp, Zea Mays
atggactatgtcgcgtacacctatacgtcgagctgctcggccaagatcgatgccagagatgcttcctccgcgccgtccaagccagaggggattcccagaaggggggatttgttgcgtgatctcggggtgggagggcaggggcagttgggtgggaaatgggctagtttgggaaccacaatttttcttgggaaaatagaaatcccttgggaaattggggttcccaaactagccctaaaggagcctaaagagatacacacatccagacgtttgaaatggtcgtgggccgttatgcaaatcccggatcctattcacgggctaggaatgagtaaacaatttttctctggtgatgccagaaaaaagcggccccttataatgactgcaaattctatcaaggccgacagcccactaggtattcgccatggcttgttggtgttggtatccaactggggcccaacgccccaacccagcgcaggagtggcacggcgtgagaagaggattacccgaaacctggagcggagcggtggtgccttggcgtctccctcctctccgtcgcccgcaggcgtgcgccaccatctacgccgcgccgcccgccatcctgagccgcccgagatgtaccacgcgatgcggctgcgctgcctcctcctgcaccctccgatgtggagtaattcgagctccctcggcatctctgccagcggcgtcagtagaggttccttcgtcaggaggttcagcgcgctcggggcgccgcggccgcctggtcctgcccgacggctgtgtcggttttacggctccaagggcggcgtcgggagcgctgaggcgaggggcgccgctgcgtccccggcggcggcggggagcagcggcaggtgcttcgagcaggagcacgcgcggctcggggaaagggaccagcaggagtggctgagcggcgagaggtttctcaccggctgcaagcgacgggagtcgacgttcctcaccaggcgggagaggttccgcagagagttcctgcgccgcgtcgtgccgtgggagaaggggtcgctctcgtggcagaatttcccctactacgtcaatgacaatgcgaggcagctgctgagtgagtgtgtggcgtcccacctgcgtcacaagagtgtcacatcagaatatggctcacgtttggaatcctctggagggcggatattgctccaaagttctccaggaactgagctttacagggagagatttgttagagctcttgcacatgagttgcaagtgccgctattggttctggacagcagtgttcttgcaccatatgattatggggaggattactcagaaagtgaggaggaggatgagcatgctgagtcagaggatgaaggttcagaatctgaaatggaagacgatggtgatgaagattggacaagcaacaatggaaaatctggtgaaagtgacgatgaggatgctctcaaatctgtggaagatctgaagaaatctgtggatgacctaaaaaagttggttccttgtactatcgaggaatttgccaagagaattgctggtgctgaagaaagtacggcgtcagaatcttctgaaactcctgagtcaccagaagaagagaaaaggcctttccaaaggggagatagggtgaagtatgttggaacctctgcagtcgttgaagcagatcagaggatcattttggggaaaatacctactcaagatggctcaaggagtgcctatacttttattagtggaaggggtctatcaaatggacagcgtggggaggtatatgaggttaatggggatcaggttgctgtcatatttgatccttctatagagaaatcacacaatgcccatgaagatgtaactaacaaggaggaaaatggatcagcaactgtttactgggttgattctcaggatattgcacatgatcatgataccgaatcagacgattggcatattgcacttgaagcactttgtgaggttttgccatctctacagccaataattgtctactttccagacagttctcaatggttatctagagcagtttcaaaatcagatcgcagagagtttgtgcaaagagttgagaaaatgtttgaccggcttaccggaccggtagtattgatatgtggccagaacttactggcagcagcacccaaggataaggaacaaccatccccactgaagcggttggtagggggcctgaagggagaaagatattcaaggtccagtgacatatcaaagctcttcaccaatagtctaactgttcctcttccagaggaagatgaacaactacaactttttaataatcagattgaagaggatagaaaaattatgatttcgaggcataaccttgttaaattgcacaaggtgcttgaggagcatgatctttcttgtgtggagcttttggatgtgaagttggatggtattgttttaacaaaacaaaaagcggagaaggccgttggttgggctagaaaccactatctgtcatcaacaactcttccttctatcaaaggtgacaggttaatcattccccgtgagagtctggatatatcaatcgagaggctgaaggaacagggtataacagctaagaaatcctctcaaaatctgaaggttttggctaaagatgagtatgagcgcaatttcatttctgctgttgtgcctccgaatgaaattggagtgaaatttgacgacatcggtgcacttgaggacgtgaagagaacattggatgagcttgttacacttccaatgaggagacctgaacttttttcgcgtggaaatttgttaaggccctgtaaaggtgttttgctttttgggcctcctgggacaggaaaaacactcttggcaaaagcccttgcaacagaagctggagcaaattttatcagtataactggttctacactcacatcaaagtggtttggagacgcagagaagctcacaaaggcccttttctcctttgcgactcgactagctcctgttatcatatttgtggacgaggttgacagcttacttggtgcaagaggtggtgcatttgagcatgaagcaacaagaaggatgcgcaatgaattcatggcagcttgggatggtctcaggtccaaagagaaccaacggatccttattcttggtgcaacaaatcgtccatttgatctggatgatgctgtgatacggcgtttacctagacggatatatgttgaccttccggatgcgcagaaccgaatgaaaattctaaagattttacttgcgaaggaaaaactagaatctgattttaagttcgatgagcttgcaaatgccacagaaggctattcagggagcgacctaaagaacctatgtgtagctgcagcatataggccagtccatgaactactagaagaagagaaaaagggacgtgtgagtaacgaaaacagttatctgagacccctttgcttggatgattttatccaagcaaaagctaaggttagctcgtctgtttcttatgatgcaacaagtatgaatgaattgagaaaatggaacgagcagtatggggaaggtggcagcaggactaaatcaccatttgggtttggcaactgacactacagtagagatttaccaatactgtatctttgtaacatttaggctgcctcttgttggtagattagggagtcagttccatttttttaccatgagcttatttgaacaacctcgtaatcacctcgtgcaaacaaaaaagaatctagttaaacgccaattttgcctactagttaatggtcggaaataccagtgtagaatcagaaatcggctacacactacaaaataatgtatctgagctactctgggtaagcattaagctttaacaagatgtaaacggcttaagaattttcagttaattcatactagttctcagcatggaattcagtagaactaatttagtattgatagctagtcgatggctggaatcttcaggatgtctcctattgcccagaaactttgttcgtatcaaaagaatggaagagaatagcttgctagtagtattgtatttttggtccttacatgtataaaatgtgtcggttacttttccttcacacatgcgaatcatgtgtagaaatcaactggcataaaactgaactattatctgag

SEQ ID NO: 44919 - DNA, 3888 bp, Zea Mays
atggactatgtcgcgtacacctatacgtcgagctgctcggccaagatcgatgccagagatgcttcctccgcgccgtccaagccagaggggattcccagaaggggggatttgttgcgtgatctcggggtgggagggcaggggcagttgggtgggaaatgggctagtttgggaaccacaatttttcttgggaaaatagaaatcccttgggaaattggggttcccaaactagccctaaaggagcctaaagagatacacacatccagacgtttgaaatggtcgtgggccgttatgcaaatcccggatcctattcacgggctaggaatgagtaaacaatttttctctggtgatgccagaaaaaagcggccccttataatgactgcaaattctatcaaggccgacagcccactagagccgcccgagatgtaccacgcgatgcggctgcgctgcctcctcctgcaccctccgatgtggagtaattcgagctccctcggcatctctgccagcggcgtcagtagaggttccttcgtcaggaggttcagcgcgctcggggcgccgcggccgcctggtcctgcccgacggctgtgtcggttttacggctccaagggcggcgtcgggagcgctgaggcgaggggcgccgctgcgtccccggcggcggcggggagcagcggcaggtgcttcgagcaggagcacgcgcggctcggggaaagggaccagcaggagtggctgagcggcgagaggtttctcaccggctgcaagcgacgggagtcgacgttcctcaccaggcgggagaggttccgcagagagttcctgcgccgcgtcgtgccgtgggagaaggggtcgctctcgtggcagaatttcccctactacgtcaatgacaatgcgaggcagctgctgagtgagtgtgtggcgtcccacctgcgtcacaagagtgtcacatcagaatatggctcacgtttggaatcctctggagggcggatattgctccaaagttctccaggaactgagctttacagggagagatttgttagagctcttgcacatgagttgcaagtgccgctattggttctggacagcagtgttcttgcaccatatgattatggggaggattactcagaaagtgaggaggaggatgagcatgctgagtcagaggatgaaggttcagaatctgaaatggaagacgatggtgatgaagattggacaagcaacaatggaaaatctggtgaaagtgacgatgaggatgctctcaaatctgtggaagatctgaagaaatctgtggatgacctaaaaaagttggttccttgtactatcgaggaatttgccaagagaattgctggtgctgaagaaagtacggcgtcagaatcttctgaaactcctgagtcaccagaagaagagaaaaggcctttccaaaggggagatagggtgaagtatgttggaacctctgcagtcgttgaagcagatcagaggatcattttggggaaaatacctactcaagatggctcaaggagtgcctatacttttattagtggaaggggtctatcaaatggacagcgtggggaggtatatgaggttaatggggatcaggttgctgtcatatttgatccttctatagagaaatcacacaatgcccatgaagatgtaactaacaaggaggaaaatggatcagcaactgtttactgggttgattctcaggatattgcacatgatcatgataccgaatcagacgattggcatattgcacttgaagcactttgtgaggttttgccatctctacagccaataattgtctactttccagacagttctcaatggttatctagagcagtttcaaaatcagatcgcagagagtttgtgcaaagagttgagaaaatgtttgaccggcttaccggaccggtagtattgatatgtggccagaacttactggcagcagcacccaaggataaggaacaaccatccccactgaagcggttggtagggggcctgaagggagaaagatattcaaggtccagtgacatatcaaagctcttcaccaatagtctaactgttcctcttccagaggaagatgaacaactacaactttttaataatcagattgaagaggatagaaaaattatgatttcgaggcataaccttgttaaattgcacaaggtgcttgaggagcatgatctttcttgtgtggagcttttggatgtgaagttggatggtattgttttaacaaaacaaaaagcggagaaggccgttggttgggctagaaaccactatctgtcatcaacaactcttccttctatcaaaggtgacaggttaatcattccccgtgagagtctggatatatcaatcgagaggctgaaggaacagggtataacagctaagaaatcctctcaaaatctgaaggttttggctaaagatgagtatgagcgcaatttcatttctgctgttgtgcctccgaatgaaattggagtgaaatttgacgacatcggtgcacttgaggacgtgaagagaacattggatgagcttgttacacttccaatgaggagacctgaacttttttcgcgtggaaatttgttaaggccctgtaaaggtgttttgctttttgggcctcctgggacaggaaaaacactcttggcaaaagcccttgcaacagaagctggagcaaattttatcagtataactggttctacactcacatcaaagtggtttggagacgcagagaagctcacaaaggcccttttctcctttgcgactcgactagctcctgttatcatatttgtggacgaggttgacagcttacttggtgcaagaggtggtgcatttgagcatgaagcaacaagaaggatgcgcaatgaattcatggcagcttgggatggtctcaggtccaaagagaaccaacggatccttattcttggtgcaacaaatcgtccatttgatctggatgatgctgtgatacggcgtttacctagacggatatatgttgaccttccggatgcgcagaaccgaatgaaaattctaaagattttacttgcgaaggaaaaactagaatctgattttaagttcgatgagcttgcaaatgccacagaaggctattcagggagcgacctaaagaacctatgtgtagctgcagcatataggccagtccatgaactactagaagaagagaaaaagggacgtgtgagtaacgaaaacagttatctgagacccctttgcttggatgattttatccaagcaaaagctaaggttagctcgtctgtttcttatgatgcaacaagtatgaatgaattgagaaaatggaacgagcagtatggggaaggtggcagcaggactaaatcaccatttgggtttggcaactgacactacagtagagatttaccaatactgtatctttgtaacatttaggctgcctcttgttggtagattagggagtcagttccatttttttaccatgagcttatttgaacaacctcgtaatcacctcgtgcaaacaaaaaagaatctagttaaacgccaattttgcctactagttaatggtcggaaataccagtgtagaatcagaaatcggctacacactacaaaataatgtatctgagctactctgggtaagcattaagctttaacaagatgtaaacggcttaagaattttcagttaattcatactagttctcagcatggaattcagtagaactaatttagtattgatagctagtcgatggctggaatcttcaggatgtctcctattgcccagaaactttgttcgtatcaaaagaatggaagagaatagcttgctagtagtattgtatttttggtccttacatgtataaaatgtgtcggttacttttccttcacacatgcgaatcatgtgtagaaatcaactggcataaaactgaactattatctgag

SEQ ID NO: 44920 - DNA, 3872 bp, Zea Mays
atggactatgtcgcgtacacctatacgtcgagctgctcggccaagatcgatgccagagatgcttcctccgcgccgtccaagccagaggggattcccagaaggggggatttgttgcgtgatctcggggtgggagggcaggggcagttgggtgggaaatgggctagtttgggaaccacaatttttcttgggaaaatagaaatcccttgggaaattggggttcccaaactagccctaaaggagcctaaagagatacacacatccagacgtttgaaatggtcgtgggccgttatgcaaatcccggatcctattcacgggctaggaatgagtaaacaatttttctctggtgatgccagaaaaaagcggccccttataatgactgcaaattctatcaaggccgacagcccactagagccgcccgagatgtaccacgcgatgcggctgcgctgcctcctcctgcaccctccgatgtggagtaattcgagctccctcggcatctctgccagcggcgtcagtagaggttccttcgtcaggaggttcagcgcgctcggggcgccgcggccgcctggtcctgcccgacggctgtgtcggttttacggctccaagggcggcgtcgggagcgctgaggcgaggggcgccgctgcgtccccggcggcggcggggagcagcggcaggtgcttcgagcaggagcacgcgcggctcggggaaagggaccagcaggagtggctgagcggcgagaggtttctcaccggctgcaagcgacgggagtcgacgttcctcaccaggcgggagaggttccgcagagagttcctgcgccgcgtcgtgccgtgggagaaggggtcgctctcgtggcagaatttcccctactacgtcaatgacaatgcgaggcagctgctgagtgagtgtgtggcgtcccacctgcgtcacaagagtgtcacatcagaatatggctcacgtttggaatcctctggagggcggatattgctccaaagttctccagggagagatttgttagagctcttgcacatgagttgcaagtgccgctattggttctggacagcagtgttcttgcaccatatgattatggggaggattactcagaaagtgaggaggaggatgagcatgctgagtcagaggatgaaggttcagaatctgaaatggaagacgatggtgatgaagattggacaagcaacaatggaaaatctggtgaaagtgacgatgaggatgctctcaaatctgtggaagatctgaagaaatctgtggatgacctaaaaaagttggttccttgtactatcgaggaatttgccaagagaattgctggtgctgaagaaagtacggcgtcagaatcttctgaaactcctgagtcaccagaagaagagaaaaggcctttccaaaggggagatagggtgaagtatgttggaacctctgcagtcgttgaagcagatcagaggatcattttggggaaaatacctactcaagatggctcaaggagtgcctatacttttattagtggaaggggtctatcaaatggacagcgtggggaggtatatgaggttaatggggatcaggttgctgtcatatttgatccttctatagagaaatcacacaatgcccatgaagatgtaactaacaaggaggaaaatggatcagcaactgtttactgggttgattctcaggatattgcacatgatcatgataccgaatcagacgattggcatattgcacttgaagcactttgtgaggttttgccatctctacagccaataattgtctactttccagacagttctcaatggttatctagagcagtttcaaaatcagatcgcagagagtttgtgcaaagagttgagaaaatgtttgaccggcttaccggaccggtagtattgatatgtggccagaacttactggcagcagcacccaaggataaggaacaaccatccccactgaagcggttggtagggggcctgaagggagaaagatattcaaggtccagtgacatatcaaagctcttcaccaatagtctaactgttcctcttccagaggaagatgaacaactacaactttttaataatcagattgaagaggatagaaaaattatgatttcgaggcataaccttgttaaattgcacaaggtgcttgaggagcatgatctttcttgtgtggagcttttggatgtgaagttggatggtattgttttaacaaaacaaaaagcggagaaggccgttggttgggctagaaaccactatctgtcatcaacaactcttccttctatcaaaggtgacaggttaatcattccccgtgagagtctggatatatcaatcgagaggctgaaggaacagggtataacagctaagaaatcctctcaaaatctgaaggttttggctaaagatgagtatgagcgcaatttcatttctgctgttgtgcctccgaatgaaattggagtgaaatttgacgacatcggtgcacttgaggacgtgaagagaacattggatgagcttgttacacttccaatgaggagacctgaacttttttcgcgtggaaatttgttaaggccctgtaaaggtgttttgctttttgggcctcctgggacaggaaaaacactcttggcaaaagcccttgcaacagaagctggagcaaattttatcagtataactggttctacactcacatcaaagtggtttggagacgcagagaagctcacaaaggcccttttctcctttgcgactcgactagctcctgttatcatatttgtggacgaggttgacagcttacttggtgcaagaggtggtgcatttgagcatgaagcaacaagaaggatgcgcaatgaattcatggcagcttgggatggtctcaggtccaaagagaaccaacggatccttattcttggtgcaacaaatcgtccatttgatctggatgatgctgtgatacggcgtttacctagacggatatatgttgaccttccggatgcgcagaaccgaatgaaaattctaaagattttacttgcgaaggaaaaactagaatctgattttaagttcgatgagcttgcaaatgccacagaaggctattcagggagcgacctaaagaacctatgtgtagctgcagcatataggccagtccatgaactactagaagaagagaaaaagggacgtgtgagtaacgaaaacagttatctgagacccctttgcttggatgattttatccaagcaaaagctaaggttagctcgtctgtttcttatgatgcaacaagtatgaatgaattgagaaaatggaacgagcagtatggggaaggtggcagcaggactaaatcaccatttgggtttggcaactgacactacagtagagatttaccaatactgtatctttgtaacatttaggctgcctcttgttggtagattagggagtcagttccatttttttaccatgagcttatttgaacaacctcgtaatcacctcgtgcaaacaaaaaagaatctagttaaacgccaattttgcctactagttaatggtcggaaataccagtgtagaatcagaaatcggctacacactacaaaataatgtatctgagctactctgggtaagcattaagctttaacaagatgtaaacggcttaagaattttcagttaattcatactagttctcagcatggaattcagtagaactaatttagtattgatagctagtcgatggctggaatcttcaggatgtctcctattgcccagaaactttgttcgtatcaaaagaatggaagagaatagcttgctagtagtattgtatttttggtccttacatgtataaaatgtgtcggttacttttccttcacacatgcgaatcatgtgtagaaatcaactggcataaaactgaactattatctgag

SEQ ID NO: 44921 - DNA, 3890 bp, Zea Mays
atggactatgtcgcgtacacctatacgtcgagctgctcggccaagatcgatgccagagatgcttcctccgcgccgtccaagccagaggggattcccagaaggggggatttgttgcgtgatctcggggtgggagggcaggggcagttgggtgggaaatgggctagtttgggaaccacaatttttcttgggaaaatagaaatcccttgggaaattggggttcccaaactagccctaaaggagcctaaagagatacacacatccagacgtttgaaatggtcgtgggccgttatgcaaatcccggatcctattcacgggctaggaatgagtaaacaatttttctctggtgatgccagaaaaaagcggccccttataatgactgcaaattctatcaaggccgacagcccactagagccgcccgagatgtaccacgcgatgcggctgcgctgcctcctcctgcaccctccgatgtggagtaattcgagctccctcggcatctctgccagcggcgtcagtagaggttccttcgtcaggaggttcagcgcgctcggggcgccgcggccgcctggtcctgcccgacggctgtgtcggttttacggctccaagggcggcgtcgggagcgctgaggcgaggggcgccgctgcgtccccggcggcggcggggagcagcggcaggtgcttcgagcaggagcacgcgcggctcggggaaagggaccagcaggagtggctgagcggcgagaggtttctcaccggctgcaagcgacgggagtcgacgttcctcaccaggcgggagaggttccgcagagagttcctgcgccgcgtcgtgccgtgggagaaggggtcgctctcgtggcagaatttcccctactacgtcaatgacaatgcgaggcagctgctgagtgagtgtgtggcgtcccacctgcgtcacaagagtgtcacatcagaatatggctcacgtttggaatcctctggagggcggatattgctccaaagttctccaggaactgagctttacagggagagatttgttagagctcttgcacatgagttgcaagtgccgctattggttctggacagcagtgttcttgcaccatatgattatggggaggattactcagaaagtgaggaggaggatgagcatgctgagtcagaggatgaaggttcagaatctgaaatggaagacgatggtgatgaagattggacaagcaacaatggaaaatctggtgaaagtgacgatgaggatgctctcaaatctgtggaagatctgaagaaatctgtggatgacctaaaaaagttggttccttgtactatcgaggaatttgccaagagaattgctggtgctgaagaaagtacggcgtcagaatcttctgaaactcctgagtcaccagaagaagagaaaaggcctttccaaaggggagatagggtgaagtatgttggaacctctgcagtcgttgaagcagatcagaggatcattttggggaaaatacctactcaagatggctcaaggagtgcctatacttttattagtggaaggggtctatcaaatggacagcgtggggaggtatatgaggttaatggggatcaggttgctgtcatatttgatccttctatagagaaatcacacaatgcccatgaagatgtaactaacaaggaggaaaatggatcagcaactgtttactgggttgattctcaggatattgcacatgatcatgataccgaatcagacgattggcatattgcacttgaagcactttgtgaggttttgccatctctacagccaataattgtctactttccagacagttctcaatggttatctagagcagtttcaaaatcagatcgcagagagtttgtgcaaagagttgagaaaatgtttgaccggcttaccggaccggtagtattgatatgtggccagaacttactggcagcagcacccaaggataaggaacaacctgcactgatgttccacaatctctctcgcctgtcttcactgccatccccactgaagcggttggtagggggcctgaagggagaaagatattcaaggtccagtgacatatcaaagctcttcaccaatagtctaactgttcctcttccagaggaagatgaacaactacaactttttaataatcagattgaagaggatagaaaaattatgatttcgaggcataaccttgttaaattgcacaaggtgcttgaggagcatgatctttcttgtgtggagcttttggatgtgaagttggatggtattgttttaacaaaacaaaaagcggagaaggccgttggttgggctagaaaccactatctgtcatcaacaactcttccttctatcaaaggtgacaggttaatcattccccgtgagagtctggatatatcaatcgagaggctgaaggaacagggtataacagctaagaaatcctctcaaaatctgaaggttttggctaaagatgagtatgagcgcaatttcatttctgctgttgtgcctccgaatgaaattggagtgaaatttgacgacatcggtgcacttgaggacgtgaagagaacattggatgagcttgttacacttccaatgaggagacctgaacttttttcgcgtggaaatttgttaagggaaaaacactcttggcaaaagcccttgcaacagaagctggagcaaattttatcagtataactggttctacactcacatcaaagtggtttggagacgcagagaagctcacaaaggcccttttctcctttgcgactcgactagctcctgttatcatatttgtggacgaggttgacagcttacttggtgcaagaggtggtgcatttgagcatgaagcaacaagaaggatgcgcaatgaattcatggcagcttgggatggtctcaggtccaaagagaaccaacggatccttattcttggtgcaacaaatcgtccatttgatctggatgatgctgtgatacggcgtttacctagacggatatatgttgaccttccggatgcgcagaaccgaatgaaaattctaaagattttacttgcgaaggaaaaactagaatctgattttaagttcgatgagcttgcaaatgccacagaaggctattcagggagcgacctaaagaacctatgtgtagctgcagcatataggccagtccatgaactactagaagaagagaaaaagggacgtgtgagtaacgaaaacagttatctgagacccctttgcttggatgattttatccaagcaaaagctaaggttagctcgtctgtttcttatgatgcaacaagtatgaatgaattgagaaaatggaacgagcagtatggggaaggtggcagcaggactaaatcaccatttgggtttggcaactgacactacagtagagatttaccaatactgtatctttgtaacatttaggctgcctcttgttggtagattagggagtcagttccatttttttaccatgagcttatttgaacaacctcgtaatcacctcgtgcaaacaaaaaagaatctagttaaacgccaattttgcctactagttaatggtcggaaataccagtgtagaatcagaaatcggctacacactacaaaataatgtatctgagctactctgggtaagcattaagctttaacaagatgtaaacggcttaagaattttcagttaattcatactagttctcagcatggaattcagtagaactaatttagtattgatagctagtcgatggctggaatcttcaggatgtctcctattgcccagaaactttgttcgtatcaaaagaatggaagagaatagcttgctagtagtattgtatttttggtccttacatgtataaaatgtgtcggttacttttccttcacacatgcgaatcatgtgtagaaatcaactggcataaaactgaactattatctgag

SEQ ID NO: 44922 - DNA, 4265 bp, Zea Mays
atggactatgtcgcgtacacctatacgtcgagctgctcggccaagatcgatgccagagatgcttcctccgcgccgtccaagccagaggggattcccagaaggggggatttgttgcgtgatctcggggtgggagggcaggggcagttgggtgggaaatgggctagtttgggaaccacaatttttcttgggaaaatagaaatcccttgggaaattggggttcccaaactagccctaaaggagcctaaagagatacacacatccagacgtttgaaatggtcgtgggccgttatgcaaatcccggatcctattcacgggctaggaatgagtaaacaatttttctctggtgatgccagaaaaaagcggccccttataatgactgcaaattctatcaaggccgacagcccactaggtattcgccatggcttgttggtgttggtatccaactggggcccaacgccccaacccagcgcaggagtggcacggcgtgagaagaggattacccgaaacctggagcggagcggtggtgccttggcgtctccctcctctccgtcgcccgcaggcgtgcgccaccatctacgccgcgccgcccgccatcctggtccggttttgttccaatcctcacaggatctgataccacgattgtagcttcgcttcacatgctcaagtaaacgatctaggctgacgattcctcaccatttggtcctagagccgcccgagatgtaccacgcgatgcggctgcgctgcctcctcctgcaccctccgatgtggagtaattcgagctccctcggcatctctgccagcggcgtcagtagaggttccttcgtcaggaggttcagcgcgctcggggcgccgcggccgcctggtcctgcccgacggctgtgtcggttttacggctccaagggcggcgtcgggagcgctgaggcgaggggcgccgctgcgtccccggcggcggcggggagcagcggcaggtgcttcgagcaggagcacgcgcggctcggggaaagggaccagcaggagtggctgagcggcgagaggtttctcaccggctgcaagcgacgggagtcgacgttcctcaccaggcgggagaggttccgcagagagttcctgcgccgcgtcgtgccgtgggagaaggggtcgctctcgtggcagaatttcccctactacgtcaatgacaatgcgaggcagctgctgagtgagtgtgtggcgtcccacctgcgtcacaagagtgtcacatcagaatatggctcacgtttggaatcctctggagggcggatattgctccaaagttctccaggaactgagctttacagggagagatttgttagagctcttgcacatgagttgcaagtgccgctattggttctggacagcagtgttcttgcaccatatgattatggggaggattactcagaaagtgaggaggaggatgagcatgctgagtcagaggatgaaggttcagaatctgaaatggaagacgatggtgatgaagattggacaagcaacaatggaaaatctggtgaaagtgacgatgaggatgctctcaaatctgtggaagatctgaagaaatctgtggatgacctaaaaaagttggttccttgtactatcgaggaatttgccaagagaattgctggtgctgaagaaagtacggcgtcagaatcttctgaaactcctgagtcaccagaagaagagaaaaggcctttccaaaggggagatagggtgaagtatgttggaacctctgcagtcgttgaagcagatcagaggatcattttggggaaaatacctactcaagatggctcaaggagtgcctatacttttattagtggaagattacgaagaggaacatttctaactcgaataatcacaggggtctatcaaatggacagcgtggggaggtatatgaggttaatggggatcaggttgctgtcatatttgatccttctatagagaaatcacacaatgcccatgaagatgtaactaacaaggaggaaaatggatcagcaactgtttactgggttgattctcaggatattgcacatgatcatgataccgaatcagacgattggcatattgcacttgaagcactttgtgaggttttgccatctctacagccaataattgtctactttccagacagttctcaatggttatctagagcagtttcaaaatcagatcgcagagagtttgtgcaaagagttgagaaaatgtttgaccggcttaccggaccggtagtattgatatgtggccagaacttactggcagcagcacccaaggataaggaacaacctgcactgatgttccacaatctctctcgcctgtcttcactgccatccccactgaagcggttggtagggggcctgaagggagaaagatattcaaggtccagtgacatatcaaagctcttcaccaatagtctaactgttcctcttccagaggaagatgaacaactacaactttttaataatcagattgaagaggatagaaaaattatgatttcgaggcataaccttgttaaattgcacaaggtgcttgaggagcatgatctttcttgtgtggagcttttggatgtgaagttggatggtattgttttaacaaaacaaaaagcggagaaggccgttggttgggctagaaaccactatctgtcatcaacaactcttccttctatcaaaggtgacaggttaatcattccccgtgagagtctggatatatcaatcgagaggctgaaggaacagggtataacagctaagaaatcctctcaaaatctgaaggttttggctaaagatgagtatgagcgcaatttcatttctgctgttgtgcctccgaatgaaattggagtgaaatttgacgacatcggtgcacttgaggacgtgaagagaacattggatgagcttgttacacttccaatgaggagacctgaacttttttcgcgtggaaatttgttaaggccctgtaaaggtgttttgctttttgggcctcctgggacaggaaaaacactcttggcaaaagcccttgcaacagaagctggagcaaattttatcagtataactggttctacactcacatcaaagtggtttggagacgcagagaagctcacaaaggcccttttctcctttgcgactcgactagctcctgttatcatatttgtggacgaggttgacagcttacttggtgcaagaggtggtgcatttgagcatgaagcaacaagaaggatgcgcaatgaattcatggcagcttgggatggtctcaggtccaaagagaaccaacggatccttattcttggtgcaacaaatcgtccatttgatctggatgatgctgtgatacggcgtttacctagacggatatatgttgaccttccggatgcgcagaaccgaatgaaaattctaaagattttacttgcgaaggaaaaactagaatctgattttaagttcgatgagcttgcaaatgccacagaaggctattcagggagcgacctaaagaacctatgtgtagctgcagcatataggccagtccatgaactactagaagaagagaaaaagggacgtgtgagtaacgaaaacagttatctgagacccctttgcttggatgattttatccaagcaaaagctaaggttagctcgtctgtttcttatgatgcaacaagtatgaatgaattgagaaaatggaacgagcagtatggggaaggtggcagcaggactaaatcaccatttgggtttggcaactgacactacagtagagatttaccaatactgtatctttgtaacatttaggctgcctcttgttggtagattagggagtcagttccatttttttaccatgagcttatttgaacaacctcgtaatcacctcgtgcaaacaaaaaagaatctagttaaacgccaattttgcctactagttaatggtcggaaataccagtgtagaatcagaaatcggctacacactacaaaataatgtatctgagctactctgggtaagcattaagctttaacaagatgtaaacggcttaagaattttcagttaattcatactagttctcagcatggaattcagtagaactaatttagtattgatagctagtcgatggctggaatcttcaggatgtctcctattgcccagaaactttgttcgtatcaaaagaatggaagagaatagcttgctagtagtattgtatttttggtccttacatgtataaaatgtgtcggttacttttccttcacacatgcgaatcatgtgtagaaatcaactggcataaaactgaactattatctgag

SEQ ID NO: 44923 - DNA, 2625 bp, Zea Mays
atggactatgtcgcgtacacctatacgtcgagctgctcggccaagatcgatgccagagatgcttcctccgcgccgtccaagccagaggggattcccagaaggggggatttgttgcgtgatctcggggtgggagggcaggggcagttgggtgggaaatgggctagtttgggaaccacaatttttcttgggaaaatagaaatcccttgggaaattggggttcccaaactagccctaaaggagcctaaagagatacacacatccagacgtttgaaatggtcgtgggccgttatgcaaatcccggatcctattcacgggctaggaatgagtaaacaatttttctctggtgatgccagaaaaaagcggccccttataatgactgcaaattctatcaaggccgacagcccactagagccgcccgagatgtaccacgcgatgcggctgcgctgcctcctcctgcaccctccgatgtggagtaattcgagctccctcggcatctctgccagcggcgtcagtagaggttccttcgtcaggaggttcagcgcgctcggggcgccgcggccgcctggtcctgcccgacggctgtgtcggttttacggctccaagggcggcgtcgggagcgctgaggcgaggggcgccgctgcgtccccggcggcggcggggagcagcggcaggtgcttcgagcaggagcacgcgcggctcggggaaagggaccagcaggagtggctgagcggcgagaggtttctcaccggctgcaagcgacgggagtcgacgttcctcaccaggcgggagaggttccgcagagagttcctgcgccgcgtcgtgccgtgggagaaggggtcgctctcgtggcagaatttcccctactacgtcaatgacaatgcgaggcagctgctgagtgagtgtgtggcgtcccacctgcgtcacaagagtgtcacatcagaatatggctcacgtttggaatcctctggagggcggatattgctccaaagttctccaggaactgagctttacagggagagatttgttagagctcttgcacatgagttgcaagtgccgctattggttctggacagcagtgttcttgcaccatatgattatggggaggattactcagaaagtgaggaggaggatgagcatgctgagtcagaggatgaaggttcagaatctgaaatggaagacgatggtgatgaagattggacaagcaacaatggaaaatctggtgaaagtgacgatgaggatgctctcaaatctgtggaagatctgaagaaatctgtggatgacctaaaaaagttggttccttgtactatcgaggaatttgccaagagaattgctggtgctgaagaaagtacggcgtcagaatcttctgaaactcctgagtcaccagaagaagagaaaaggcctttccaaaggggagatagggtgaagtatgttggaacctctgcagtcgttgaagcagatcagaggatcattttggggaaaatacctactcaagatggctcaaggagtgcctatacttttattagtggaaggtggattacgaagaggaacatttctaactcgaataatcacaggggtctatcaaatggacagcgtggggaggtatatgaggttaatggggatcaggttgctgtcatatttgatccttctatagagaaatcacacaatgcccatgaagatgtaactaacaaggaggaaaatggatcagcaactgtttactgggttgattctcaggatattgcacatgatcatgataccgaatcagacgattggcatattgcacttgaagcactttgtgaggttttgccatctctacagccaataattgtctactttccagacagttctcaatggttatctagagcagtttcaaaatcagatcgcagagagtttgtgcaaagagttgagaaaatgtttgaccggcttaccggaccggtagtattgatatgtggccagaacttactggcagcagcacccaaggataaggaacaaccatccccactgaagcggttggtagggggcctgaagggagaaagatattcaaggtccagtgacatatcaaagctcttcaccaatagtctaactgttcctcttccagaggaagatgaacaactacaactttttaataatcagattgaagaggatagaaaaattatgatttcgaggcataaccttgttaaattgcacaaggtgcttgaggagcatgatctttcttgtgtggagcttttggatgtgaagttggatggtattgttttaacaaaacaaaaagcggagaaggccgttggttgggctagaaaccactatctgtcatcaacaactcttccttctatcaaaggtgacaggttaatcattccccgtgagagtctggatatatcaatcgagaggctgaaggaacagggtataacagctaagaaatcctctcaaaatctgaaggttttggctaaagatgagtatgagcgcaatttcatttctgctgttgtgcctccgaatgaaattggagtgaaatttgacgacatcggtgcacttgaggacgtgaagagaacattggatgagcttgttacacttccaatgaggagacctgaacttttttcgcgtggaaatttgttaagggtatggcttttctgctag

SEQ ID NO: 44924 - DNA, 1170 bp, Zea Mays
gaatacagcccctctgtacacatcctaaatctgcaacagataaaaaaaaggcaaacatgtcactagaaattgcaacgaagcaaagtatttacccaaacaaataactgaaatttgtaagctattacaagtattaaccatcttaatcaattctcatgattacagttgaggggaaagcctgatcaaacagcactaaatcagtaagtggtgcacaattaaaattctggaaagatctctttgaaccaaaagcaaaaatctcaaccaaataaacgtagaaacagaaacaaaagtaagatttctctagaaacttaaaaaaacaattataagcaaataaattaagtttaggtaacagatagcatatctatgtagggttcagtctggtgtacagaagcactggtccttttcccatccccttctcattacatacagtaccatctgtgtcattacatgttcattacatattgtgcttgttactactatgcaattcaaactaatgaaaagttacctgatttatacaggagtattacatagtcccagattgtgcatctagtagtttatattgacaaaagaaaggtgccaatatcttcaccgctcaattaaggaccttttccttttccactccattactttatcagcctaatttggcttattagcaattaagtagctatattccgttttggtacgactaaagcataaaccaaaaggtatctccttgaagggtaatcttcatagacgacaaaggaaaacctggggcggccttggcatggagcatgaggattcagtaaaaactgcgaattatcctatgtttaggaataaatgtgctcccgcagcttggcaaggcgtcaacatcaactgaggcgatcctacacgcacggcagaagagaaactgaaacgggactagtaaaccagaaccatggatggacggatactccactgtgaagcaagcaatgtaatccaatagtactaatcaagaataaggacgatatgggttcccttgctcacatcgcacaatagatctcctagaacaaaagcccgctccaggaaaattcctccaagcaagtagggatccttaacaaggaaagaaacctatcaagtctggatgaatctcctattccacgccgtcatggcataccagataagggaggggaggcgccggtagcatcagcaaccaca

SEQ ID NO: 44925 - DNA, 159 bp, Zea Mays
caaaaaaaagaatgcagagattacccgtcaggcggaattaatcagtgctttatgccatttgataataaaaaaaaacccaatatcacaatctttcgtgtgtcgtcgacggtatgttttgaggggcgcacgtatcagcaccccatgacagcacagttatag

SEQ ID NO: 44926 - DNA, 1565 bp, Zea Mays
acgcaaaccacagcgaccgaacaaacaacatgtatgatttcacaagccgcccgctgaaaccaaagccttttgccctgtcgtcaggggcgaggtttcatcaacctcagtacctcaccctcctctcccggagagcctctcgcctccgctccgctcctctgccctgccctgcccttccccgccacaccaaccaaggcgccaaaaataaacgccgcgccactgcgtggcgagggagcctgtcacattgcttgccgctgcgccctgccgcctcgtcttcgcggaggcctcgtcgcgcgacgatatggagctcgccgaggcgccggcgcccgtgcccgacgaggacgggctggacgaacgcggcgtggcgctgcacctcccgaggctgctggccggcgtcgtctccggcgccctcactggcatcttcgctctcgctggagctctgaccggggcagtcaccggcgcggtggcgggcagggcttccgacagcggcggcgtcctgcggggagctggactgggggcggtcgccggagctgtcctctccattgaggtccttgaggcttctcgcgcttactggtgctcgtcggaccggctgggctcgcacggcggagcatcgtccatggctgatttcattgagcagcttcttcgtgcccggtttgtgcaagagcaatttactgcttcaggatatgcatcatatcgctggcagcatatcatattttggtcaggatgacctatacgacatctttggggacatttcatctgaagggctctcgcaagagtcactgaagaaactaccacatcatgtggtcagtgaccaccagacgcgggacttactcggcgaaatcctgtgttgtcctatctgtctacaggtacggtctgagcaagcgcgatcctaccactacagagtaactgtcaaagaaaccttctgccacaatgcatgtatacagtatgcactttgtttacgttcaaataagagagagaaaactatatgctaaaaagtaagtaatcagcaattttctaggctacaactggtttcttcaaaaatggtttccgagcgagatagtagatgagaccatgaatgcaagtccaggcgcacgcaatggttggacaacgagacaatgaatgcatggacattgtggccggtgagacagcgaggaggctgcccggctgctctcacgccttccaccagccttgcgtggacagatggctcgtcggccatggctcgtgccccgtctgcaggcaacgcgtgtaaaagatatataggcgacctgtgtctgtgtacgtagatagacgtggagtgaagagaaacgaccgtgcgcatctggcaatctcacttcgtttcttgcaccccggttccaacatgtaatggcaatggaataagattgctgtcggagcagttcctgtttctgtagaatttgtttgtccgcttggcgctccgatccgcgtgatttctgaacaggctccgggcgctgttccgcccgtgtcggcgatattcttgctgtcctcgttcttgcggatgcagaccctgggtttggcatcaggtgttggtgagcagtatgtttcagtcctca

SEQ ID NO: 44927 - DNA, 1712 bp, Zea Mays
acgcaaaccacagcgaccgaacaaacaacatgtatgatttcacaagccgcccgctgaaaccaaagccttttgccctgtcgtcaggggcgaggtttcatcaacctcagtacctcaccctcctctcccggagagcctctcgcctccgctccgctcctctgccctgccctgcccttccccgccacaccaaccaaggcgccaaaaataaacgccgcgccactgcgtggcgagggagcctgtcacattgcttgccgctgcgccctgccgcctcgtcttcgcggaggcctcgtcgcgcgacgatatggagctcgccgaggcgccggcgcccgtgcccgacgaggacgggctggacgaacgcggcgtggcgctgcacctcccgaggctgctggccggcgtcgtctccggcgccctcactggcatcttcgctctcggtacttgcacagttgcacttacttgcgcaagctcctttcgcctcccttttgccctgttgttagctgtcctgagatcgagctcgatcgacgttggctctgtgtggtgcgtgcgtgcatgtgccgcgtacgtccgcgtgtaaagctggagctctgaccggggcagtcaccggcgcggtggcgggcagggcttccgacagcggcggcgtcctgcggggagctggactgggggcggtcgccggagctgtcctctccattgaggtccttgaggcttctcgcgcttactggtgctcgtcggaccggctgggctcgcacggcggagcatcgtccatggctgatttcattgagcagcttcttcgtgcccggtttgtgcaagagcaatttactgcttcaggatatgcatcatatcgctggcagctcagcatatcatattttggtcaggatgacctatacgacatctttggggacatttcatctgaagggctctcgcaagagtcactgaagaaactaccacatcatgtggtcagtgaccaccagacgcgggacttactcggcgaaatcctgtgttgtcctatctgtctacaggtacggtctgagcaagcgcgatcctaccactacagagtaactgtcaaagaaaccttctgccacaatgcatgtatacagtatgcactttgtttacgttcaaataagagagagaaaactatatgctaaaaagtaagtaatcagcaattttctaggctacaactggtttcttcaaaaatggtttccgagcgagatagtagatgagaccatgaatgcaagtccaggcgcacgcaatggttggacaacgagacaatgaatgcatggacattgtggccggtgagacagcgaggaggctgcccggctgctctcacgccttccaccagccttgcgtggacagatggctcgtcggccatggctcgtgccccgtctgcaggcaacgcgtgtaaaagatatataggcgacctgtgtctgtgtacgtagatagacgtggagtgaagagaaacgaccgtgcgcatctggcaatctcacttcgtttcttgcaccccggttccaacatgtaatggcaatggaataagattgctgtcggagcagttcctgtttctgtagaatttgtttgtccgcttggcgctccgatccgcgtgatttctgaacaggctccgggcgctgttccgcccgtgtcggcgatattcttgctgtcctcgttcttgcggatgcagaccctgggtttggcatcaggtgttggtgagcagtatgtttcagtcctca

SEQ ID NO: 44928 - DNA, 1311 bp, Zea Mays
cacgcaaaccacagcgaccgaacaaacaacatgtatgatttcacaagccgcccgctgaaaccaaagccttttgccctgtcgtcaggggcgaggtttcatcaacctcagtacctcaccctcctctcccggagagcctctcgcctccgctccgctcctctgccctgccctgcccttccccgccacaccaaccaaggcgccaaaaataaacgccgcgccactgcgtggcgagggagcctgtcacattgcttgccgctgcgccctgccgcctcgtcttcgcggaggcctcgtcgcgcgacgatatggagctcgccgaggcgccggcgcccgtgcccgacgaggacgggctggacgaacgcggcgtggcgctgcacctcccgaggctgctggccggcgtcgtctccggcgccctcactggcatcttcgctctcgctggagctctgaccggggcagtcaccggcgcggtggcgggcagggcttccgacagcggcggcgtcctgcggggagctggactgggggcggtcgccggagctgtcctctccattgaggtccttgaggcttctcgcgcttactggtgctcgtcggaccggctgggctcgcacggcggagcatcgtccatggctgatttcattgagcagcttcttcgtgcccggtttgtgcaagagcaatttactgcttcaggatatgcatcatatcgctggcagctcagcatatcatattttggtcaggatgacctatacgacatctttggggacatttcatctgaagggctctcgcaagagtcactgaagaaactaccacatcatgtggtcagtgaccaccagacgcgggacttactcggcgaaatcctgtgttgtcctatctgtctacaggacattgtggccggtgagacagcgaggaggctgcccggctgctctcacgccttccaccagccttgcgtggacagatggctcgtcggccatggctcgtgccccgtctgcaggcaacgcgtgtaaaagatatataggcgacctgtgtctgtgtacgtagatagacgtggagtgaagagaaacgaccgtgcgcatctggcaatctcacttcgtttcttgcaccccggttccaacatgtaatggcaatggaataagattgctgtcggagcagttcctgtttctgtagaatttgtttgtccgcttggcgctccgatccgcgtgatttctgaacaggctccgggcgctgttccgcccgtgtcggcgatattcttgctgtcctcgttcttgcggatgcagaccctgggtttggcatcaggtgttggtgagcagtatgtttcagtcctca

SEQ ID NO: 44929 - DNA, 153 bp, Zea Mays
atggcgacgtgcagcagcgtgccgcggaggcccacggcgaaggacgcggccgccatgacggccgggccggtcaggaagcgcaccgccatggcgaacgtggccaccttgttcccgcacgcgatgatccgcggctgcagcgccatgaacagccct

SEQ ID NO: 44930 - DNA, 867 bp, Zea Mays
atttcggtcattgcagtagtacgccatctgcgtgcggtcgtgtggaactgtagtgctggacatcctcgccttccagccttctcgaaaatcgaaaccctagaccgcgcgccccctcgccctccggccttccacgtccgatccgatccaaaatgcataagctaggcagaggaagccgggacaaggtgcaacagttcatggcaattaccggcgcaagtgagaaagctgcccttcaggctcttaaagctagtgattggcacttggaaggagcttttgatgttttctacagccagccacaaattgctgttgctaatactcgacatctggaagagctctacaacagatataaagaaccagatgctgatatgataatggtggaaggcatatcacagatctgcaatgatttacaggtggatcctcaggatattgttatgcttgtcatatcgtggcatatgaaagcttccactatgtgtgaattcactcgccaggagttcattggtggactgcagtcaataggagtggattcaatagagaagcttcaggcgaagttaccttcattgcgagctgagcttaaagatgatcagaagttccatgaaatatacaactttgcatttgcctgggcaagggagaagggccagaaatctctcgcattggagactgctattggcatgtggcagttgctatttgctgaaaggagctggcctctcattgactactggtgccaatttctacaggtaaggcataataaagcaatctccagggatacatgggcacagttattggagtttgttaaggttgacgatccattgaagccggtcagcagaagctggaatctaccacaccacggaactgagcattcggagcactggc

SEQ ID NO: 44931 - DNA, 1563 bp, Zea Mays
attgcagtagtacgccatctgcgtgcggtcgtgtggaactgtagtgctggacatcctcgccttccagccttctcgaaaatcgaaaccctagaccgcgcgccccctcgccctccggccttccacgtccgatccgatccaaaatgcataagctaggcagaggaagccgggacaaggtgcaacagttcatggcaattaccggcgcaaggctcttaaagctagtgattggcacttggaaggagcttttgatgttttctacagccagccacaaattgctgttgctaatactcgacatctggaagagctctacaacagatataaagaaccagatgctgatatgataatggtggaaggcatatcacagatctgcaatgatttacaggcccgcacatcatttattttggttggctatcttgtcttcatctatgtgtcctgatataagattctgatacgcaaatcatgtgtgtttccctttgtcaggtggatcctcaggatattgttatgcttgtcatatcgtggcatatgaaagcttccactatgtgtgaattcactcgccaggagttcattggtggactgcagtcaataggagtggattcaatagagaagcttcaggcgaagttaccttcattgcgagctgagcttaaagatgatcagaagttccatgaaatatacaactttgcatttgcctgggcaagggagaagggccagaaatctctcgcattggagactgctattggcatgtggcagttgctatttgctgaaaggagctggcctctcattgactactggtgccaatttctacaggtaaggcataataaagcaatctccagggatacatgggcacagttattggagtttgttaaggtaacctcaccctgactttttccctggaatacaatcacgagcgaaatgcatacccatcatatttggagaccatgccatactgtagctttgcttagcttatctgtaacccttcacctgcttttcatttgttgatgctgttgggtagtgtcagagcatgttcttcgctgctagtcgagcctgcttgtcgcgtaatgcatttctactcttatgttgttgcttcagacaattgatcctcagctaaccaactatgacgaagaaggtgcttggccctacctaatcgatgaatttgtggactacttgaaagagaacggtcttgcctagcatagaaggtgtacggaattgggctgtaggggggagaatttgtcacccacaaggccaccatcattgtataacttaatggtcggatgcttgtattcattgcactaccaatagctaatgcggctcgtgcgtctggggatggagtttatcctctatatagacaaaacttgttgaatgatgtgggtgtaaaacgaaggctagaatggaagtcaagccctggttatcgccattttgaattcctcatcacgtgcctcgcctacgtcattgtgactttgccatcctgagctcgttgcttgaatgatcttgagtattactgcccccgttcgcttatatttatcgctgtttgaactaagcagcgtcaaaatcaaaaaaaaataaaaaatc

SEQ ID NO: 44932 - DNA, 1459 bp, Zea Mays
attgcagtagtacgccatctgcgtgcggtcgtgtggaactgtagtgctggacatcctcgccttccagccttctcgaaaatcgaaaccctagaccgcgcgccccctcgccctccggccttccacgtccgatccgatccaaaatgcataagctaggcagaggaagccgggacaaggtgcaacagttcatggcaattaccggcgcaaggctcttaaagctagtgattggcacttggaaggagcttttgatgttttctacagccagccacaaattgctgttgctaatactcgacatctggaagagctctacaacagatataaagatgctgatatgataatggtggaaggcatatcacagatctgcaatgatttacaggtggatcctcaggatattgttatgcttgtcatatcgtggcatatgaaagcttccactatgtgtgaattcactcgccaggagttcattggtggactgcagtcaataggagtggattcaatagagaagcttcaggcgaagttaccttcattgcgagctgagcttaaagatgatcagaagttccatgaaatatacaactttgcatttgcctgggcaagggagaagggccagaaatctctcgcattggagactgctattggcatgtggcagttgctatttgctgaaaggagctggcctctcattgactactggtgccaatttctacaggtaaggcataataaagcaatctccagggatacatgggcacagttattggagtttgttaaggtaacctcaccctgactttttccctggaatacaatcacgagcgaaatgcatacccatcatatttggagaccatgccatactgtagctttgcttagcttatctgtaacccttcacctgcttttcatttgttgatgctgttgggtagtgtcagagcatgttcttcgctgctagtcgagcctgcttgtcgcgtaatgcatttctactcttatgttgttgcttcagacaattgatcctcagctaaccaactatgacgaagaaggtgcttggccctacctaatcgatgaatttgtggactacttgaaagagaacggtcttgcctagcatagaaggtgtacggaattgggctgtaggggggagaatttgtcacccacaaggccaccatcattgtataacttaatggtcggatgcttgtattcattgcactaccaatagctaatgcggctcgtgcgtctggggatggagtttatcctctatatagacaaaacttgttgaatgatgtgggtgtaaaacgaaggctagaatggaagtcaagccctggttatcgccattttgaattcctcatcacgtgcctcgcctacgtcattgtgactttgccatcctgagctcgttgcttgaatgatcttgagtattactgcccccgttcgcttatatttatcgctgtttgaactaagcagcgtcaaaatcaaaaaaaaataaaaaatc

SEQ ID NO: 44933 - DNA, 1800 bp, Zea Mays
gtcattgcagtagtacgccatctgcgtgcggtcgtgtggaactgtagtgctggacatcctcgccttccagccttctcgaaaatcgaaaccctagaccgcgcgccccctcgccctccggccttccacgtccgatccgatccaaaatgcataagctaggcagaggaagccgggacaaggtgcaacagttcatggcaattaccggcgcaaggtacatatatttttttaaacttttcgatttgttcggagagaccggtgttcagtgctaaattgtggtttggttggttagtggccgtagtatgtcaattttgcgagctgttgggagaacttgtttgtagtgcagcaacagcattcgtgttctgcaatttggcaataatatcatgctagaaagtaagaagttcttttggttgcaggaacatggaattttgtactgtcttttatgtggaaacatgtgttactgcctaatcttgatttgtaattttgtaatggaattctccaacacactggtagcattatactccccctttgtttgggatggaccactttttcatcttttaccaaaagttaacttttttttttggtgctgcaagagtgatccattgtcattgtcctgaaaaatcactagggttgtacattacagtcagtcatcggaccaactgaacctccgaggactactgtacactttagacactgctatcccaattttatttctgttaattttgtcaagcattgcatatttcacacagtgagaaagctgcccttcaggctcttaaagctagtgattggcacttggaaggagcttttgatgttttctacagccagccacaaattgctgttgctaatactcgacatctggaagagctctacaacagatataaagaaccagatgctgatatgataatggtggaaggcatatcacagatctgcaatgatttacaggtggatcctcaggatattgttatgcttgtcatatcgtggcatatgaaagcttccactatgtgtgaattcactcgccaggagttcattggtggactgcagtcaataggagtggattcaatagagaagcttcaggcgaagttaccttcattgcgagctgagcttaaagatgatcagaagttccatgaaatatacaactttgcatttgcctgggcaagggagaagggccagaaatctctcgcattggagactgctattggcatgtggcagttgctatttgctgaaaggagctggcctctcattgactactggtgccaatttctacaggtaaggcataataaagcaatctccagggatacatgggcacagttattggagtttgttaagacaattgatcctcagctaaccaactatgacgaagaaggtgcttggccctacctaatcgatgaatttgtggactacttgaaagagaacggtcttgcctagcatagaaggtgtacggaattgggctgtaggggggagaatttgtcacccacaaggccaccatcattgtataacttaatggtcggatgcttgtattcattgcactaccaatagctaatgcggctcgtgcgtctggggatggagtttatcctctatatagacaaaacttgttgaatgatgtgggtgtaaaacgaaggctagaatggaagtcaagccctggttatcgccattttgaattcctcatcacgtgcctcgcctacgtcattgtgactttgccatcctgagctcgttgcttgaatgatcttgagtattactgcccccgttcgcttatatttatcgctgtttgaactaagcagcgtcaaaatcaaaaaaaaataaaaaatc

SEQ ID NO: 44934 - DNA, 1268 bp, Zea Mays
cggccgtccgggtggcatttcggtcattgcagtagtacgccatctgcgtgcggtcgtgtggaactgtagtgctggacatcctcgccttccagccttctcgaaaatcgaaaccctagaccgcgcgccccctcgccctccggccttccacgtccgatccgatccaaaatgcataagctaggcagaggaagccgggacaaggtgcaacagttcatggcaattaccggcgcaaggctcttaaagctagtgattggcacttggaaggagcttttgatgttttctacagccagccacaaattgctgttgctaatactcgacatctggaagagctctacaacagatataaagaaccagatgctgatatgataatggtggaaggcatatcacagatctgcaatgatttacaggtggatcctcaggatattgttatgcttgtcatatcgtggcatatgaaagcttccactatgtgtgaattcactcgccaggagttcattggtggactgcagtcaataggagtggattcaatagagaagcttcaggcgaagttaccttcattgcgagctgagcttaaagatgatcagaagttccatgaaatatacaactttgcatttgcctgggcaagggagaagggccagaaatctctcgcattggagactgctattggcatgtggcagttgctatttgctgaaaggagctggcctctcattgactactggtgccaatttctacaggtaaggcataataaagcaatctccagggatacatgggcacagttattggagtttgttaagacaattgatcctcagctaaccaactatgacgaagaaggtgcttggccctacctaatcgatgaatttgtggactacttgaaagagaacggtcttgcctagcatagaaggtgtacggaattgggctgtaggggggagaatttgtcacccacaaggccaccatcattgtataacttaatggtcggatgcttgtattcattgcactaccaatagctaatgcggctcgtgcgtctggggatggagtttatcctctatatagacaaaacttgttgaatgatgtgggtgtaaaacgaaggctagaatggaagtcaagccctggttatcgccattttgaattcctcatcacgtgcctcgcctacgtcattgtgactttgccatcctgagctcgttgcttgaatgatcttgagtattactgcccccgttcgcttatatttatcgctgtttgaactaagcagcgtcaaaatcaaaaaaaaataaaaaatc

SEQ ID NO: 44935 - DNA, 1706 bp, Zea Mays
acaacctgagtctattaatacaactcccaaatcctgagttagggttagggtttccaatacagacaaattacaggagccctatgattggtatcttcagttggctcacaaaagacttcgaaaagctagtagcctcattttgggttcaagacaaacaacatccttcatgatgatagcaaaagaaaaaaaagtgacggaggaaactcaaaactaaaaatcactttaagtacattttgattaacttcataacttatctcatctcagttgtcctttaagagcatgctaatgtttaaagacttatagtccactgccactggtatggcatatgcatgacagtaaaaaattaggacaacagatgataactataaacatcaaggtggacaccactgataccagcatggaaaaagagaagatttagaggcctcaattcctcaaaaaaaaatgccagcttagtatcttttactcacgccagttacattacatgagaaacaaactatgcagacccagttgatacaaacatgaaaaaaaagaaagaaaagccatcttcaatgctctactgaattccaaaatttatatgcaatatgctatgctagtcacacagtttactaggttttttttttacataacgatgtatcgctcaatttcatgcaaagttatgagtgctgctttagttattaccatccccaaaggacttccagagaaactatcaaaaatcaagactgctgagaatcccagcttccaaagaaaagagcaacatcagccacacccacacatactagaccttacacaagatggctactatctagaaacaggcacctttcatgccctctgcttctttacacaaatctggaatgaccataaaaaatgatcatgcccaccaatcttcaaaaaaaaacacccatctggttgcagggatagactgatagagcttgtaggccaacaattcgcagcaggttgaaccagaaagttcttgcaaaaacagaagaggtgggcaagtggtttattgtttcttcatgttggtcacatagtcggcaatgttctgggtgtggaagaccatgccacaaattgttctgacgtgttgtgtgcaggtgcaaccaaccacatgaagaaacaacatttatctggagtccaagacttccaattattttccatggaccgaaaagaactgaccaaatcatgataggagagctccaaagcccacgagtatacatcttccacaaaatataaactattttccttggttactaaattcaaaccgttactactatatatctatcccattaagactaagaggatgtttccttatttccaatatgttggcatatctttggtgttgccatttgttctaatggtaaaaggccagggtctgcgctgcagacccacacaaacaatctgaactatatcactatagcttatagagttccgtctagctttcttatctgcaggcatggatttgctcccccttcaattgctacaaatctgcagtaacactgttattgtttcgacatggtcacatcaaataatgtcgctttaaccagctataaaagagttaggcctaactgagtcgcacaagttcagcaataatcagtttaggccacagatcgaaaggtaattctagattccttttccttttgctcgggcatgagttcacatttgcacaagcaagctagtattgaaacaaaataaatgtcaattagtacttgtttccc

SEQ ID NO: 44936 - DNA, 1004 bp, Zea Mays
aacaatataatctgttatctgaaagcatatgcccttactgtcgtaatgccatatagaatctccaacaaagataacataaatggtataatactttagcaaattgtatgaaagaaaccaaattgtcatggacaaatcagagctaggcacatagggagaaatcaaattgctgcaataaactagagagccacatggagagaaaataatagcgatgagaaagtagaaggtgctgcaatcaccccttgcatgcagacaacttcccaattgccattggtcttacataaggagcatccctttgccatagtcaaatatttatcgagtgtataacttgttgttgatccagttatcacggtatagaacattagaactcattttgaaatattttcatgtttgtaaagtttccagtgaacagagtaactttaaactgcatttgtggagtatgtgtttcataatatcaaattgtgcatgcagaaaaaccaaaaacatagttgcagtgacaaaccgtaatgtctgacctgaaattatgtgtagaacattatcaaaagcacacaagtgaagttaacttacgtcttggacagcgcatcaaatatactttgagcttctggggtgacaccaacaccaattctctcagcttcaatctctgcttgcctacattcacacgtggtatgacaagtgaattggcagagtcgacaataatagcatgaaagataatcttatgttgatagaatggtaataagctaatacatgacatctacatactaacagtctcctgcataaggaggacaaaacacagtaataactaatataagtaagatggatatttgaagttcagaagaagtatggggatgttttggccaaggtactggtcacactaatgaatatagtcaaaaacatcatctctaagaaacttaaattacaattaaaagcaatgaccagactgttagagtacccgtttagggttttggggttagcccctagtaattactgttttaccactatgtaatggg

SEQ ID NO: 44937 - DNA, 181 bp, Zea Mays
cggatgaacgctgagaatctagtcttatatatttaaaagttatttggtagatgcaatcatgcatctgcacatgtgaacagtagcagcgtcatgggtgcaataacaaaccgtaggatttttttaggaatttaaacaaagtctctagtctccaaggaatttaagttgttttcgtctaaaatac

SEQ ID NO: 44938 - DNA, 1516 bp, Zea Mays
cactattttacattgacatatcggaggaagtacaccacctatctgcatctcccttcgcggcgcgaacggttcctctgacgtccggccgctgccatgtggggcatgccatccccgatcctgccggctttgcggtctgctcactcgatcgtcgaatagtgcgtcccttcggctcatcgcgcaaagcaaggaggcatggcagctagggttcgtgcgccactcatccccatctccctccgccgtcgactcccttcataccagtagcgccgcccaccccatccgccgaatagtagcgctgcccattccatccgctcggaagaaccgccgccctcctcccttcaccatccaccgcacctatccaaggtaaaagcacaatctgcgtattcgccgaaaagtagcgctgcccactccatccgttcggaagacccgccgccctcctcccctcaccatccaccgcccctatccaaggacattctccgtgcaccgcccttctatccccgtgcggaggttaggcctccacgccgaagcttgtttcaggcttgtcctagtacataatattgctcgcctctcctgtctcctctcctcgtcgagcggttgtgggtggtcgatccataaggccggaatggcaaaccaccaggagaagcccaccacgtccccaccgccccagccggcggagggcagcgtcgctcgcccccgcttgcccggcgtcggcaacgcacacccgggcagtgccggatacccaaacccgccagatgccgcgatccccgatgcggcgactcttcgggaccagtggcggtttgccgtgcggcagtacagccgctggtactcccacgcctggggcaccgccatccttgccggcgccgccttcttcgcgcttgggtggcttgtcaaggggtcaaacccgctcccgtcccgggccgagccacaacacggcgccattggcaaatccgtcgctaaggaggacaattgaccggcttaggtgaaccaccttgagttacgagctacagttttagtacaggatttcaagccgttcggttgctggtcatggtgttggctgttggtacagtatttggtgagagcttgatgtcacagcagcagtagaagcggtgctgtaaaacctggcagccgaacagcgtgaaaggaaggtcttctccaccccgccctgctgcttgccgctgcggtccagacggccccgcgcgcgggggatcgcctcctgtgatgacttttgctccgcgaataaaatatctatacggaagatgcagcatttccctctgtcaatgatccccgtgattatacccattttgtttcctgaaaagtcaggaacctcgccagcctttcagaaatggtgtaaacaaatgtaccacgtagttttgtgagttgtgaccctagccggatcccggatactgttgtatttaatctcaagttggacaatgaatgatgaatatatatgtacattagagatcgtggtgtgctggctaaaatcccaattcagatttattcaatttatttgatgatgtct

SEQ ID NO: 44939 - DNA, 1468 bp, Zea Mays
cactattttacattgacatatcggaggaagtacaccacctatctgcatctcccttcgcggcgcgaacggttcctctgacgtccggccgctgccatgtggggcatgccatccccgatcctgccggctttgcggtctgctcactcgatcgtcgaatagtgcgtcccttcggctcatcgcgcaaagcaaggaggcatggcagctagggttcgtgcgccactcatccccatctccctccgccgtcgactcccttcataccagtagcgccgcccaccccatccgccgaatagtagcgctgcccattccatccgctcggaagaaccgccgccctcctcccttcaccatccaccgcacctatccaaggtaaaagcacaatctgcgtattcgccgaaaagtagcgctgcccactccatccgttcggaagacccgccgccctcctcccctcaccatccaccgcccctatccaaggcttaggtgaaccaccttgagttacgagctacagttttagtacaggatttcaagccgttcggttgctggtcatggtgttggctgttggtacagtatttggtgagagcttgatgtcacagcagcagtagaagcggtgctgtaaaacctggcagccgaacagcgtgaaaggaaggtcttctccaccccgccctgctgcttgccgctgcggtccagacggccccgcgcgcgggggatcgcctcctgtgatgacttttgctccgcgaataaaatatctatacggtgggttcttctttcgtcagtgcttataaggccattctcatttctcaatgggacttttatattcattaaatgcgataacacataatcacacctggttatattgcagtgtgatattgcactgcaattaataggggacacacacacacattagggttttataaaaactgagttggttctaaacatactagtttatgctccaatttatataaactagagtctcaatttcttaaaatcaagaaactattctcacttagttaaaggcactttatgaaaattaatgttgttccaaacaccattaaccagtttgtttttttataaatcagtttctagaaattggagatagaaactagattattaaaaactaggttgcttccaaacaagtttatagaaggtggtagagttccatgaccatgaaattctgcacacaagatgattataatcgtcatttgacctccaggaagatgcagcatttccctctgtcaatgatccccgtgattatacccattttgtttcctgaaaagtcaggaacctcgccagcctttcagaaatggtgtaaacaaatgtaccacgtagttttgtgagttgtgaccctagccggatcccggatactgttgtatttaatctcaagttggacaatgaatgatgaatatatatgtacattagagatcgtggtgtgctggctaaaatcccaattcagatttattcaatttatttgatgatgtct

SEQ ID NO: 44940 - DNA, 1011 bp, Zea Mays
cactattttacattgacatatcggaggaagtacaccacctatctgcatctcccttcgcggcgcgaacggttcctctgacgtccggccgctgccatgtggggcatgccatccccgatcctgccggctttgcggtctgctcactcgatcgtcgaatagtgcgtcccttcggctcatcgcgcaaagcaaggaggcatggcagctagggttcgtgcgccactcatccccatctccctccgccgtcgactcccttcataccagtagcgccgcccaccccatccgccgaatagtagcgctgcccattccatccgctcggaagaaccgccgccctcctcccttcaccatccaccgcacctatccaaggtaaaagcacaatctgcgtattcgccgaaaagtagcgctgcccactccatccgttcggaagacccgccgccctcctcccctcaccatccaccgcccctatccaaggcttaggtgaaccaccttgagttacgagctacagttttagtacaggatttcaagccgttcggttgctggtcatggtgttggctgttggtacagtatttggtgagagcttgatgtcacagcagcagtagaagcggtgctgtaaaacctggcagccgaacagcgtgaaaggaaggtcttctccaccccgccctgctgcttgccgctgcggtccagacggccccgcgcgcgggggatcgcctcctgtgatgacttttgctccgcgaataaaatatctatacggaagatgcagcatttccctctgtcaatgatccccgtgattatacccattttgtttcctgaaaagtcaggaacctcgccagcctttcagaaatggtgtaaacaaatgtaccacgtagttttgtgagttgtgaccctagccggatcccggatactgttgtatttaatctcaagttggacaatgaatgatgaatatatatgtacattagagatcgtggtgtgctggctaaaatcccaattcagatttattcaatttatttgatgatgtct

SEQ ID NO: 44941 - DNA, 1207 bp, Zea Mays
cactattttacattgacatatcggaggaagtacaccacctatctgcatctcccttcgcggcgcgaacggttcctctgacgtccggccgctgccatgtggggcatgccatccccgatcctgccggctttgcggtctgctcactcgatcgtcgaatagtgcgtcccttcggctcatcgcgcaaagcaaggaggcatggcagctagggcttaggtgaaccaccttgagttacgagctacagttttagtacaggatttcaagccgttcggttgctggtcatggtgttggctgttggtacagtatttggtgagagcttgatgtcacagcagcagtagaagcggtgctgtaaaacctggcagccgaacagcgtgaaaggaaggtcttctccaccccgccctgctgcttgccgctgcggtccagacggccccgcgcgcgggggatcgcctcctgtgatgacttttgctccgcgaataaaatatctatacggtgggttcttctttcgtcagtgcttataaggccattctcatttctcaatgggacttttatattcattaaatgcgataacacataatcacacctggttatattgcagtgtgatattgcactgcaattaataggggacacacacacacattagggttttataaaaactgagttggttctaaacatactagtttatgctccaatttatataaactagagtctcaatttcttaaaatcaagaaactattctcacttagttaaaggcactttatgaaaattaatgttgttccaaacaccattaaccagtttgtttttttataaatcagtttctagaaattggagatagaaactagattattaaaaactaggttgcttccaaacaagtttatagaaggtggtagagttccatgaccatgaaattctgcacacaagatgattataatcgtcatttgacctccaggaagatgcagcatttccctctgtcaatgatccccgtgattatacccattttgtttcctgaaaagtcaggaacctcgccagcctttcagaaatggtgtaaacaaatgtaccacgtagttttgtgagttgtgaccctagccggatcccggatactgttgtatttaatctcaagttggacaatgaatgatgaatatatatgtacattagagatcgtggtgtgctggctaaaatcccaattcagatttattcaatttatttgatgatgtct

SEQ ID NO: 44942 - DNA, 2606 bp, Zea Mays
cactattttacattgacatatcggaggaagtacaccacctatctgcatctcccttcgcggcgcgaacggttcctctgacgtccggccgctgccatgtggggcatgccatccccgatcctgccggctttgcggtctgctcactcgatcgtcgaatagtgcgtcccttcggctcatcgcgcaaagcaaggaggcatggcagctagggttcgtgcgccactcatccccatctccctccgccgtcgactcccttcataccagtagcgccgcccaccccatccgccgaatagtagcgctgcccattccatccgctcggaagaaccgccgccctcctcccttcaccatccaccgcacctatccaaggtaaaagcacaatctgcgtattcgccgaaaagtagcgctgcccactccatccgttcggaagacccgccgccctcctcccctcaccatccaccgcccctatccaaggacattctccgtgcaccgcccttctatccccgtgcggaggttaggcctccacgccgaagcttgtttcaggcttgtcctagtacataatattgctcgcctctcctgtctcctctcctcgtcgagcggttgtgggtggtcgatccataaggccggaatggcaaaccaccaggagaagcccaccacgtccccaccgccccagccggcggagggcagcgtcgctcgcccccgcttgcccggcgtcggcaacgcacacccgggcagtgccggatacccaaacccgccagatgccgcgatccccgatgcggcgactcttcgggaccagtggcggtttgccgtgcggcagtacagccgctggtactcccacgcctggggcaccgccatccttgccggcgccgccttcttcgcgcttgggtggcttgtcaaggggtcaaacccgctcccgtcccgggccgagccacaacacggcgccattggcaaatccgtcgctaaggaggacaattgaccggcttaggtgaaccaccttgagttacgagctacagttttagtacaggatttcaagccgttcggttgctggtcatggtgttggctgttggtacagtatttggtgagagcttgatgtcacagcagcagtagaagcggtgctgtaaaacctggcagccgaacagcgtgaaaggaaggtttgtatttcaaaggatctataacaatcaaattctgcggttttgattatgtccgttctatcgttgagctgatattgtagttcagttctttcttgtgcttggagtattattacatacatgtatgacaatatgagttaataaacttggagcgctttgaattatgctatccgatgtagcatcataagagtcattataccttgaattagggtctgtttggatcaatagtgctaaactttagcaatacacttaaactttatcacttggagatccaaaatatgagtgctaaaaggtgctaaaaactgaagtgctaaactttagcactcaatagcagttgagctcttcaagatgtgctaaactttagtactctgttaaaattaagcacatgagatccaaacagtctcttagtagatggctgtagctttaatggatgcatatatgtatttactagataagaaattgcacatatcacttgttttgtacgagggcaacaccgattctagatttttccccgatttttttattttttagctgtcccagattttaatcagtgtagcttccaattagccatccagcttccgtcacccggtgggaaaagaggatgacatgtgcaggttacagacttccttcgcttaggtcttctccaccccgccctgctgcttgccgctgcggtccagacggccccgcgcgcgggggatcgcctcctgtgatgacttttgctccgcgaataaaatatctatacggtgggttcttctttcgtcagtgcttataaggccattctcatttctcaatgggacttttatattcattaaatgcgataacacataatcacacctggttatattgcagtgtgatattgcactgcaattaataggggacacacacacacattagggttttataaaaactgagttggttctaaacatactagtttatgctccaatttatataaactagagtctcaatttcttaaaatcaagaaactattctcacttagttaaaggcactttatgaaaattaatgttgttccaaacaccattaaccagtttgtttttttataaatcagtttctagaaattggagatagaaactagattattaaaaactaggttgcttccaaacaagtttatagaaggtggtagagttccatgaccatgaaattctgcacacaagatgattataatcgtcatttgacctccaggaagatgcagcatttccctctgtcaatgatccccgtgattatacccattttgtttcctgaaaagtcaggaacctcgccagcctttcagaaatggtgtaaacaaatgtaccacgtagttttgtgagttgtgaccctagccggatcccggatactgttgtatttaatctcaagttggacaatgaatgatgaatatatatgtacattagagatcgtggtgtgctggctaaaatcccaattcagatttattcaatttatttgatgatgtct

SEQ ID NO: 44943 - DNA, 1383 bp, Zea Mays
cactattttacattgacatatcggaggaagtacaccacctatctgcatctcccttcgcggcgcgaacggttcctctgacgtccggccgctgccatgtggggcatgccatccccgatcctgccggctttgcggtctgctcactcgatcgtcgaatagtgcgtcccttcggctcatcgcgcaaagcaaggaggcatggcagctagggcttaggtgaaccaccttgagttacgagctacagttttagtacaggatttcaagccgttcggttgctggtcatggtgttggctgttggtacagtatttggtgagagcttgatgtcacagcagcagtagaagcggtgctgtaaaacctggcagccgaacagcgtgaaaggaaggtttgtatttcaaaggatctataacaatcaaattctgcggttttgattatgtccgttctatcgttgagctgatattgtagttcagttctttcttgtgcttggagtattattacatacatgtatgacaatatgagttaataaacttggagcgctttgaattatgctatccgatgtagcatcataagagtcattataccttgaattagggtctgtttggatcaatagtgctaaactttagcaatacacttaaactttatcacttggagatccaaaatatgagtgctaaaaggtgctaaaaactgaagtgctaaactttagcactcaatagcagttgagctcttcaagatgtgctaaactttagtactctgttaaaattaagcacatgagatccaaacagtctcttagtagatggctgtagctttaatggatgcatatatgtatttactagataagaaattgcacatatcacttgttttgtacgagggcaacaccgattctagatttttccccgatttttttattttttagctgtcccagattttaatcagtgtagcttccaattagccatccagcttccgtcacccggtgggaaaagaggatgacatgtgcaggttacagacttccttcgcttaggtcttctccaccccgccctgctgcttgccgctgcggtccagacggccccgcgcgcgggggatcgcctcctgtgatgacttttgctccgcgaataaaatatctatacggaagatgcagcatttccctctgtcaatgatccccgtgattatacccattttgtttcctgaaaagtcaggaacctcgccagcctttcagaaatggtgtaaacaaatgtaccacgtagttttgtgagttgtgaccctagccggatcccggatactgttgtatttaatctcaagttggacaatgaatgatgaatatatatgtacattagagatcgtggtgtgctggctaaaatcccaattcagatttattcaatttatttgatgatgtct

SEQ ID NO: 44944 - DNA, 1746 bp, Zea Mays
cggaccgacgccgacagttgccggacggacctaacactaacagcaagccttaccagccgcgggatcggactaggcttgttggcctcgcgtcgcgtctcggtccccttgccgcggagtcgccaccatcggcatccagcaccttcccccagcagcagagcagtctccggccgcagccatggcgccgcccatctccacctccgaccccgcgctccccaacactaccacaaccacctcgtcggcccccaagtcgtcgtctcgccccttcctcgccccgctcgcagcctccgcgcgctccctcctcgcctcggcgcgccgctccccggtcaccacgctcgccgccgccttcttcctcctcgcgctcgtcatgtacggcgaggacgcccgcaccatcgccgagctctccatcgacgactacctctacccggacgctgacctctacaacgtctccggcctgccgcccctcgcgctgcccccgctcacctgcgacctctcccgcggccgatgggtcttcgacaacgtctccgttccggcgtaccgggagaaagactgcaccttcctcaccaagcaggtctcctgcctcgccaacggccgccccgacgacatgtggcagtactggagatggcagcccaacgagtgttccctccccacgttcgacgctcggagattcatggaggcgatgcgtgggaagcgcctcatgttcgtgggggactcactgaaccgcaaccagtgggagtcgctggtgtgcctggtgcagcccatcctgtccaagggcaggaagaagatcgtcaagcggggctccctcaacaccttctacgccaaggacatcaaggaatggatcatcagtcccgagcggatcgaggcgcacaccaagcactggaaggacgttgactaccttatattcaacacctacatctggtggatgaacactgccgacatcaaagtcaggagatcgaactcgaggtactggtctgagaacgacgaggttcccaggattgaggcgtatggccgggtgttcaagacatggtctgattggctcaatgacaacatcgatcctgcccgcacgtccgtcttcttcatgacgatttctcctcctcacctcagtccacagaattggggaaacccggatgggatcaaatgtgtaggagagactcttccgtatcagaactacagccaacccctggatctttaccatgacatgcggctgtatgacttagtggtcaaggtggccagctccatggagaaggtcccagtgacagtgatcgatatcacaaggatgtcagattaccggaaggacgcccacacgtccctgtacaccatccggcaagggaagctgctgacgcctaagcagaaggcagacccggagaagttcgcggactgcatccactggtgcctacctggcgtgccggacgtgtggaaccaaatactctacacgaggatcctttcgaaatcatcatggcattctaattttagcccccctctgttccagtccctgcctcttcctccccaatgagaatcagaagtgggagcttggtttttgtcggagaatgtatgatttttcattcttttttttcttcttttttgggtagattgaccaaaatgttagcgcaaaaaggaaaatggatatgctgattactgatggtatagcatgtaagaaggtatagcatgtaagatggtatagcagccaacaaggagtttgaaaagatcggagtattcttgtttccttgaaatggtaaagattgatgtgat

SEQ ID NO: 44945 - DNA, 1467 bp, Zea Mays
cggaccgacgccgacagttgccggacggacctaacactaacagcaagccttaccagccgcgggatcggactaggcttgttggcctcgcgtcgcgtctcggtccccttgccgcggagtcgccaccatcggcatccagcaccttcccccagcagcagagcagtctccggccgcagccatggcgccgcccatctccacctccgaccccgcgctccccaacactaccacaaccacctcgtcggcccccaagtcgtcgtctcgccccttcctcgccccgctcgcagcctccgcgcgctccctcctcgcctcggcgcgccgctccccggtcaccacgctcgccgccgccttcttcctcctcgcgctcgtcatgtacggcgaggacgcccgcaccatcgccgagctctccatcgacgactacctctacccggacgctgacctctacaacgtctccggcctgccgcccctcgcgctgcccccgctcacctgcgacctctcccgcggccgatgggtcttcgacaacgtctccgttccggcgtaccgggagaaagactgcaccttcctcaccaagcaggtctcctgcctcgccaacggccgccccgacgacatgtggcagtactggagatggcagcccaacgagtgttccctccccacgttcgacgctcggagattcatggaggcgatgcgtgggaagcgcctcatgttcgtgggggactcactgaaccgcaaccagtgggagtcgctggtgtgcctggtgcagcccatcctgtccaagggcaggaagaagatcgtcaagcggggctccctcaacaccttctacgccaaggatccacagaattggggaaacccggatgggatcaaatgtgtaggagagactcttccgtatcagaactacagccaacccctggatctttaccatgacatgcggctgtatgacttagtggtcaaggtggccagctccatggagaaggtcccagtgacagtgatcgatatcacaaggatgtcagattaccggaaggacgcccacacgtccctgtacaccatccggcaagggaagctgctgacgcctaagcagaaggcagacccggagaagttcgcggactgcatccactggtgcctacctggcgtgccggacgtgtggaaccaaatactctacacgaggatcctttcgaaatcatcatggcattctaattttagcccccctctgttccagtccctgcctcttcctccccaatgagaatcagaagtgggagcttggtttttgtcggagaatgtatgatttttcattcttttttttcttcttttttgggtagattgaccaaaatgttagcgcaaaaaggaaaatggatatgctgattactgatggtatagcatgtaagaaggtatagcatgtaagatggtatagcagccaacaaggagtttgaaaagatcggagtattcttgtttccttgaaatggtaaagattgatgtgat

SEQ ID NO: 44946 - DNA, 1649 bp, Zea Mays
acctgaaaggtttatggtttaatccatcactaaaagaacttggcacggacatttgtacacttcaacctgtaatgtgtgaaacaggtgaaggaccaacttccccatggatatcattcagagttctgtttgcagttattcaagacaatatatcatctgtggcaagggagttaatcttccatcattatgaagagctgaaggaaagcataattacccgtgaagaaatggtgaagaaaatgataattgtagttggagagaaagtacttttggaggccttgaagaagcttcattactgtccatcattatggtacaggccttctgttgaagcagtgtctagtgattctgtaatggcagcaccaggaaaattatccttggataaggcagttcttagcaccaaaggatgtgaaacccttgcagcggatatggtgcccaatggtcaagattgtccggcaccaagtggtgtgccagaaacatctagttctgctgttgccatgcgtggggcttctacaagtgtggaacccaagcgcagagatcctcctgtacagattgtgccacctggaagctctgcaaccccatgtgccaaaaatcaagattcttttgtaggaagagtgacacctatagctcgtgatgggcttttgaggacaatttgtggaagctcttcatctcctggcggttatgcttctctagcgcaagctaatacctcccaaaccaatggagtttctgccccaggtgtcactcctaggggctatgaatctgctgtaccaagcttgtcacttggaaattccgaaagtacaggcgtgaaacaagtaaattctgcaccaagaatgacacctgaaggccagaagttcctttcgctgggtattgcgccacgaagcccagcactgcgtgatttagtaaaatgccaggccagttcgacactcgttgccatgcctccagcgggcctgggaaaatcacggtccatgaagatcgagggccatgattctctggcaccgagtgtgaaggagccaaaaggcaatggtggtctagcaccaagtaaaacgccaaagctgcatgaacctgtgatagctgatatgagcatcaagagctgtgattctctagcactgggtatcgcaccaaatggccatacccatgatggtccagcatcaggaagtggggaggccaagaaagagcaggcagcactagtaactggctcgcagagtaaatcatctgtaccaagtcttgacgctagcagccatgttaccggggcagcgagcgcccttgtcgcactatcaactctgcgggagaagggcgggcgttagaggagcagcagcagcagcagtgtagttcccgttggatcagatcctttttctctactgtacatgtttctatgtacaggaatcatccccgtcgactctgatccccagtgcgtacggttgctgttggtggccagtcccctatatgttgcttggcagcaaatgttttggttaataattagtttttataaaaggaatattcacccttgttatgttctctacatgtaaattatctgaggtatacttgcattattatgagtgctataatcttttcttttactacatgctctaaactgtatcgtgtattcaataataaaatgttaatttactccctccatttacttttattagtcgttgttg

SEQ ID NO: 44947 - DNA, 2903 bp, Zea Mays
cttctccatttcacctgatccgtatctgtttggagttagaagcaagggttctcatggcatctccacaagaatccaattctctgtgcttgaagcgaaagcttgttgatgactgcctgtcaaaagactgcaaatctcgccgtgtcaaatctgagaatgagccctcatctgattcatttgctaaacgctgcaactgttgctgcactcgacctaatcttgccaatgattgtgtgaatttcctgaagagtggagcgccaaaccgtgtcatgtattacaaaaaaggttcgtggcacaattttccagagcaaataatgaattccctcatcgatgaatttaaaggaaataaatcaagtgttgtctctgtgatggatgatgaaccaatccttgttgatttcttatcaatgaccctggtcaacctgaaaaccagaaagcagcggtctgttgcctggtttgatgacactggcaagcgtttctttccttctctgttctttgatgaggaaagtgatgaaatgcccaaacaggattctggcaatgttaataacactgcacaaggaataatgttagataaggtcacgagttctccacctgaagtggtcaagcaagttgttcttgaatctagtccaccagtccctcaaaaaccttcaactgtggatgtcttgcgcaagaagatcacatctgtggaaagaggtagcgaagggtttctatttgtccaggacctttttctctctggtatgaacccgtttgcaacaccaaataacatacttcatgtccaccgctactctccaaacgatatcaccgcacaatgtagatttgaagcttttgaaagacagatgaagtcaactaaagaagcacgtggtgatgcaaatgttaagtatggctggctaggatctaggaagagtgacatagttaggattctcattaatggtttgggtactactgcaaatcctgttgagaaagctggtttgagtgctggtgtatatctttcacctgaaaatcgagcctttaccagtgtcggtctttgtgatgttgacgaaaaaggagtgcagtatatgttgctgtgccgtatgatattgggcaatgtagaagctgttgaacctggatcccaagagtcttttccaagcagtgagatatatgattctggtgttgatgattgttcaaaccccaagtgttatgtgatgtggccatcacatctaagcactcacatccgtttagaatatcttgttagtttcaagcttgccccaaaagttcgaaattatttgcttgacctgaaaggtttatggtttaatccatcactaaaagaacttggcacggacatttgtacacttcaacctgtgagccagcctgaatcttgttacccccccggtaatgtgtgaaacaggtgaaggaccaacttccccatggatatcattcagagttctgtttgcagttattcaagacaatatatcatctgtggcaagggagttaatcttccatcattatgaagagctgaaggaaagcataattacccgtgaagaaatggtgaagaaaatgataattgtagttggagagaaagtacttttggaggccttgaagaagcttcattactgtccatcattatggtacaggccttctgttgaagcagtgtctagtgattctgtaatggcagcaccaggaaaattatccttggataagcggatatggtgcccaatggtcaagattgtccggcaccaagtggtgtgccagaaacatctagttctgctgttgccatgcgtggggcttctacaagtgtggaacccaagcgcagagatcctcctgtacagattgtgccacctggaagctctgcaaccccatgtgccaaaaatcaagattcttttgtaggaagagtgacacctatagctcgtgatgggcttttgaggacaatttgtggaagctcttcatctcctggcggttatgcttctctagcgcaagctaatacctcccaaaccaatggagtttctgccccaggtgtcactcctaggggctatgaatctgctgtaccaagcttgtcacttggaaattccgaaagtacaggcgtgaaacaagtaaattctgcaccaagaatgacacctgaaggccagaagttcctttcgctgggtattgcgccacgaagcccagcactgcgtgatttagtaaaatgccaggccagttcgacactcgttgccatgcctccagcgggcctgggaaaatcacggtccatgaagatcgagggccatgattctctggcaccgagtgtgaaggagccaaaaggcaatggtggtctagcaccaagtaaaacgccaaagctgcatgaacctgtgatagctgatatgagcatcaagagctgtgattctctagcactgggtatcgcaccaaatggccatacccatgatggtccagcatcaggaagtggggaggccaagaaagagcaggcagcactagtaactggctcgcagagtaaatcatctgtaccaagtcttgacgctagcagccatgttaccggggcagcgagcgcccttgtcgcactatcaactctgcgggagaagggcgggcgttagaggagcagcagcagcagcagtgtagttcccgttggatcagatcctttttctctactgtacatgtttctatgtacaggaatcatccccgtcgactctgatccccagtgcgtacggttgctgttggtggccagtcccctatatgttgcttggcagcaaatgttttggttaataattagtttttataaaaggaatattcacccttgttatgttctctacatgtaaattatctgaggtatacttgcattattatgagtgctataatcttttcttttactacatgctctaaactgtatcgtgtattcaataataaaatgttaatttactccctccatttacttttattagtcgttgttg

SEQ ID NO: 44948 - DNA, 2891 bp, Zea Mays
gctgaaatgccagtggtctcttctccatttcacctgatccgtatctgtttggagttagaagcaagggttctcatggcatctccacaagaatccaattctctgtgcttgaagcgaaagcttgttgatgactgcctgtcaaaagactgcaaatctcgccgtgtcaaatctgagaatgagccctcatctgattcatttgctaaacgctgcaactgttgctgcactcgacctaatcttgccaatgattgtgtgaatttcctgaagagtggagcgccaaaccgtgtcatgtattacaaaaaaggttcgtggcacaattttccagagcaaataatgaattccctcatcgatgaatttaaaggaaataaatcaagtgttgtctctgtgatggatgatgaaccaatccttgttgatttcttatcaatgaccctggtcaacctgaaaaccagaaagcagcggtctgttgcctggtttgatgacactggcaagcgtttctttccttctctgttctttgatgaggaaagtgatgaaatgcccaaacaggattctggcaatgttaataacactgcacaaggaataatgttagataaggtcacgagttctccacctgaagtggtcaagcaagttgttcttgaatctagtccaccagtccctcaaaaaccttcaactgtggatgtcttgcgcaagaagatcacatctgtggaaagaggtagcgaagggtttctatttgtccaggacctttttctctctggtatgaacccgtttgcaacaccaaataacatacttcatgtccaccgctactctccaaacgatatcaccgcacaatgtagatttgaagcttttgaaagacagatgaagtcaactaaagaagcacgtggtgatgcaaatgttaagtatggctggctaggatctaggaagagtgacatagttaggattctcattaatggtttgggtactactgcaaatcctgttgagaaagctggtttgagtgctggtgtatatctttcacctgaaaatcgagcctttaccagtgtcggtctttgtgatgttgacgaaaaaggagtgcagtatatgttgctgtgccgtatgatattgggcaatgtagaagctgttgaacctggatcccaagagtcttttccaagcagtgagatatatgattctggtgttgatgattgttcaaaccccaagtgttatgtgatgtggccatcacatctaagcactcacatccgtttagaatatcttgttagtttcaagcttgccccaaaagttcgaaattatttgcttgacctgaaaggtttatggtttaatccatcactaaaagaacttggcacggacatttgtacacttcaacctgtaatgtgtgaaacaggtgaaggaccaacttccccatggatatcattcagagttctgtttgcagttattcaagacaatatatcatctgtggcaagggagttaatcttccatcattatgaagagctgaaggaaagcataattacccgtgaagaaatggtgaagaaaatgataattgtagttggagagaaagtacttttggaggccttgaagaagcttcattactgtccatcattatggtacaggccttctgttgaagcagtgtctagtgattctgtaatggcagcaccaggaaaattatccttggataagcggatatggtgcccaatggtcaagattgtccggcaccaagtggtgtgccagaaacatctagttctgctgttgccatgcgtggggcttctacaagtgtggaacccaagcgcagagatcctcctgtacagattgtgccacctggaagctctgcaaccccatgtgccaaaaatcaagattcttttgtaggaagagtgacacctatagctcgtgatgggcttttgaggacaatttgtggaagctcttcatctcctggcggttatgcttctctagcgcaagctaatacctcccaaaccaatggagtttctgccccaggtgtcactcctaggggctatgaatctgctgtaccaagcttgtcacttggaaattccgaaagtacaggcgtgaaacaagtaaattctgcaccaagaatgacacctgaaggccagaagttcctttcgctgggtattgcgccacgaagcccagcactgcgtgatttagtaaaatgccaggccagttcgacactcgttgccatgcctccagcgggcctgggaaaatcacggtccatgaagatcgagggccatgattctctggcaccgagtgtgaaggagccaaaaggcaatggtggtctagcaccaagtaaaacgccaaagctgcatgaacctgtgatagctgatatgagcatcaagagctgtgattctctagcactgggtatcgcaccaaatggccatacccatgatggtccagcatcaggaagtggggaggccaagaaagagcaggcagcactagtaactggctcgcagagtaaatcatctgtaccaagtcttgacgctagcagccatgttaccggggcagcgagcgcccttgtcgcactatcaactctgcgggagaagggcgggcgttagaggagcagcagcagcagcagtgtagttcccgttggatcagatcctttttctctactgtacatgtttctatgtacaggaatcatccccgtcgactctgatccccagtgcgtacggttgctgttggtggccagtcccctatatgttgcttggcagcaaatgttttggttaataattagtttttataaaaggaatattcacccttgttatgttctctacatgtaaattatctgaggtatacttgcattattatgagtgctataatcttttcttttactacatgctctaaactgtatcgtgtattcaataataaaatgttaatttactccctccatttacttttattagtcgttgttg

SEQ ID NO: 44949 - DNA, 4059 bp, Zea Mays
tcgccaccgccaccgccaccgccggtgtcgtctatcctgaccccgacacctcgccgcccggtgccacctcaccgccggattcacatcgcccagtcgccccaccagccagaacctcgtcgcctcgcccgccttgctccgcaggttaggcagccagtacccccaaaccctagcatcctcggcgctgtcggtcgtagaagagcactgggggcgtgagagagggagtcaccagccctcgagacctcctcccgcttctaccactcagccgacgctcccaaaaggggcatctcaaatcccacctcactcccttctcagtacaaaatggaaccctctatctggttttttaaggccccgggaggagaagcaaggctgaaatgccagtggtctcttctccatttcacctgatccggtaatgtttaatgccagcgatctcttctccatttccttcagagtttcgtttgatttgtttgtgcatagatgaatattgtaaggcctgcataatatcatgcaacggatgcacaaaaagaactgctagacttgtcgtttctgtgtgttacttctattagctcgaattttgttcacatgttccacttgctgagttgacagtaaatgatgtaagtatcatcagagcagatttgatttttttgatgacaagttttgaagcgcttgctgtgttatgtttaacacatggaaaatgaattattgctctggaagcagttattggtctgtgcaccatatagtcttacaacctttatcgaaatgccatatgagctttaaattggcatggcttaatattgcttgcagagattgaatcatcagcttgttcctgggccaaatttcaacaactaattgtggagttgatatagctgtttgggatcctttttaggataaaagaatcgtagccacactgcctgatgctcagatttgtgatgttcattattttaaaaacaacttaattagaccctttatttgtatggttgatgtttgctatatgcaactgaacttccttgtccacttagtttttgtgttatgaatgctagcgtcactgttactaatgatccattttatcatttctccaacttctagaatactgaactgtgttttttgcttgagataaattcattcattatcttatacaggacctctgagatgtcgatatgaatggagacctgtaacttgtatatatattagggcttagttttcttgtttcagtatctgtttggagttagaagcaagggttctcatggcatctccacaagaatccaattctctgtgcttgaagcgaaagcttgttgatgactgcctgtcaaaagactgcaaatctcgccgtgtcaaatctgagaatgagccctcatctgattcatttgctaaacgctgcaactgttgctgcactcgacctaatcttgccaatgattgtgtgaatttcctgaagagtggagcgccaaaccgtgtcatgtattacaaaaaaggttcgtggcacaattttccagagcaaataatgaattccctcatcgatgaatttaaaggaaataaatcaagtgttgtctctgtgatggatgatgaaccaatccttgttgatttcttatcaatgaccctggtcaacctgaaaaccagaaagcagcggtctgttgcctggtttgatgacactggcaagcgtttctttccttctctgttctttgatgaggaaagtgatgaaatgcccaaacaggattctggcaatgttaataacactgcacaaggaataatgttagataaggtcacgagttctccacctgaagtggtcaagcaagttgttcttgaatctagtccaccagtccctcaaaaaccttcaactgtggatgtcttgcgcaagaagatcacatctgtggaaagaggtagcgaagggtttctatttgtccaggacctttttctctctggtatgaacccgtttgcaacaccaaataacatacttcatgtccaccgctactctccaaacgatatcaccgcacaatgtagatttgaagcttttgaaagacagatgaagtcaactaaagaagcacgtggtgatgcaaatgttaagtatggctggctaggatctaggaagagtgacatagttaggattctcattaatggtttgggtactactgcaaatcctgttgagaaagctggtttgagtgctggtgtatatctttcacctgaaaatcgagcctttaccagtgtcggtctttgtgatgttgacgaaaaaggagtgcagtatatgttgctgtgccgtatgatattgggcaatgtagaagctgttgaacctggatcccaagagtcttttccaagcagtgagatatatgattctggtgttgatgattgttcaaaccccaagtgttatgtgatgtggccatcacatctaagcactcacatccgtttagaatatcttgttagtttcaagcttgccccaaaagttcgaaattatttgcttgacctgaaaggtttatggtttaatccatcactaaaagaacttggcacggacatttgtacacttcaacctgtaatgtgtgaaacaggtgaaggaccaacttccccatggatatcattcagagttctgtttgcagttattcaagacaatatatcatctgtggcaagggagttaatcttccatcattatgaagagctgaaggaaagcataattacccgtgaagaaatggtgaagaaaatgataattgtagttggagagaaagtacttttggaggccttgaagaagcttcattactgtccatcattatggtacaggccttctgttgaagcagtgtctagtgattctgtaatggcagcaccaggaaaattatccttggataagcggatatggtgcccaatggtcaagattgtccggcaccaagtggtgtgccagaaacatctagttctgctgttgccatgcgtggggcttctacaagtgtggaacccaagcgcagagatcctcctgtacagattgtgccacctggaagctctgcaaccccatgtgccaaaaatcaagattcttttgtaggaagagtgacacctatagctcgtgatgggcttttgaggacaatttgtggaagctcttcatctcctggcggttatgcttctctagcgcaagctaatacctcccaaaccaatggagtttctgccccaggtgtcactcctaggggctatgaatctgctgtaccaagcttgtcacttggaaattccgaaagtacaggcgtgaaacaagtaaattctgcaccaagaatgacacctgaaggccagaagttcctttcgctgggtattgcgccacgaagcccagcactgcgtgatttagtaaaatgccaggccagttcgacactcgttgccatgcctccagcgggcctgggaaaatcacggtccatgaagatcgagggccatgattctctggcaccgagtgtgaaggagccaaaaggcaatggtggtctagcaccaagtaaaacgccaaagctgcatgaacctgtgatagctgatatgagcatcaagagctgtgattctctagcactgggtatcgcaccaaatggccatacccatgatggtccagcatcaggaagtggggaggccaagaaagagcaggcagcactagtaactggctcgcagagtaaatcatctgtaccaagtcttgacgctagcagccatgttaccggggcagcgagcgcccttgtcgcactatcaactctgcgggagaagggcgggcgttagaggagcagcagcagcagcagtgtagttcccgttggatcagatcctttttctctactgtacatgtttctatgtacaggaatcatccccgtcgactctgatccccagtgcgtacggttgctgttggtggccagtcccctatatgttgcttggcagcaaatgttttggttaataattagtttttataaaaggaatattcacccttgttatgttctctacatgtaaattatctgaggtatacttgcattattatgagtgctataatcttttcttttactacatgctctaaactgtatcgtgtattcaataataaaatgttaatttactccctccatttacttttattagtcgttgttg

SEQ ID NO: 44950 - DNA, 4130 bp, Zea Mays
tcgccaccgccaccgccaccgccggtgtcgtctatcctgaccccgacacctcgccgcccggtgccacctcaccgccggattcacatcgcccagtcgccccaccagccagaacctcgtcgcctcgcccgccttgctccgcaggttaggcagccagtacccccaaaccctagcatcctcggcgctgtcggtcgtagaagagcactgggggcgtgagagagggagtcaccagccctcgagacctcctcccgcttctaccactcagccgacgctcccaaaaggggcatctcaaatcccacctcactcccttcagtctttcatgtgtctatatattttcacttaaacacgcagtcagtacaaaatggaaccctctatctggttttttaaggccccgggaggagaagcaaggctgaaatgccagtggtctcttctccatttcacctgatccggtaatgtttaatgccagcgatctcttctccatttccttcagagtttcgtttgatttgtttgtgcatagatgaatattgtaaggcctgcataatatcatgcaacggatgcacaaaaagaactgctagacttgtcgtttctgtgtgttacttctattagctcgaattttgttcacatgttccacttgctgagttgacagtaaatgatgtaagtatcatcagagcagatttgatttttttgatgacaagttttgaagcgcttgctgtgttatgtttaacacatggaaaatgaattattgctctggaagcagttattggtctgtgcaccatatagtcttacaacctttatcgaaatgccatatgagctttaaattggcatggcttaatattgcttgcagagattgaatcatcagcttgttcctgggccaaatttcaacaactaattgtggagttgatatagctgtttgggatcctttttaggataaaagaatcgtagccacactgcctgatgctcagatttgtgatgttcattattttaaaaacaacttaattagaccctttatttgtatggttgatgtttgctatatgcaactgaacttccttgtccacttagtttttgtgttatgaatgctagcgtcactgttactaatgatccattttatcatttctccaacttctagaatactgaactgtgttttttgcttgagataaattcattcattatcttatacaggacctctgagatgtcgatatgaatggagacctgtaacttgtatatatattagggcttagttttcttgtttcagtatctgtttggagttagaagcaagggttctcatggcatctccacaagaatccaattctctgtgcttgaagcgaaagcttgttgatgactgcctgtcaaaagactgcaaatctcgccgtgtcaaatctgagaatgagccctcatctgattcatttgctaaacgctgcaactgttgctgcactcgacctaatcttgccaatgattgtgtgaatttcctgaagagtggagcgccaaaccgtgtcatgtattacaaaaaaggttcgtggcacaattttccagagcaaataatgaattccctcatcgatgaatttaaaggaaataaatcaagtgttgtctctgtgatggatgatgaaccaatccttgttgatttcttatcaatgaccctggtcaacctgaaaaccagaaagcagcggtctgttgcctggtttgatgacactggcaagcgtttctttccttctctgttctttgatgaggaaagtgatgaaatgcccaaacaggattctggcaatgttaataacactgcacaaggaataatgttagataaggtcacgagttctccacctgaagtggtcaagcaagttgttcttgaatctagtccaccagtccctcaaaaaccttcaactgtggatgtcttgcgcaagaagatcacatctgtggaaagaggtagcgaagggtttctatttgtccaggacctttttctctctggtatgaacccgtttgcaacaccaaataacatacttcatgtccaccgctactctccaaacgatatcaccgcacaatgtagatttgaagcttttgaaagacagatgaagtcaactaaagaagcacgtggtgatgcaaatgttaagtatggctggctaggatctaggaagagtgacatagttaggattctcattaatggtttgggtactactgcaaatcctgttgagaaagctggtttgagtgctggtgtatatctttcacctgaaaatcgagcctttaccagtgtcggtctttgtgatgttgacgaaaaaggagtgcagtatatgttgctgtgccgtatgatattgggcaatgtagaagctgttgaacctggatcccaagagtcttttccaagcagtgagatatatgattctggtgttgatgattgttcaaaccccaagtgttatgtgatgtggccatcacatctaagcactcacatccgtttagaatatcttgttagtttcaagcttgccccaaaagttcgaaattatttgcttgacctgaaaggtttatggtttaatccatcactaaaagaacttggcacggacatttgtacacttcaacctgtgagccagcctgaatcttgttacccccccggtaatgtgtgaaacaggtgaaggaccaacttccccatggatatcattcagagttctgtttgcagttattcaagacaatatatcatctgtggcaagggagttaatcttccatcattatgaagagctgaaggaaagcataattacccgtgaagaaatggtgaagaaaatgataattgtagttggagagaaagtacttttggaggccttgaagaagcttcattactgtccatcattatggtacaggccttctgttgaagcagtgtctagtgattctgtaatggcagcaccaggaaaattatccttggataagcggatatggtgcccaatggtcaagattgtccggcaccaagtggtgtgccagaaacatctagttctgctgttgccatgcgtggggcttctacaagtgtggaacccaagcgcagagatcctcctgtacagattgtgccacctggaagctctgcaaccccatgtgccaaaaatcaagattcttttgtaggaagagtgacacctatagctcgtgatgggcttttgaggacaatttgtggaagctcttcatctcctggcggttatgcttctctagcgcaagctaatacctcccaaaccaatggagtttctgccccaggtgtcactcctaggggctatgaatctgctgtaccaagcttgtcacttggaaattccgaaagtacaggcgtgaaacaagtaaattctgcaccaagaatgacacctgaaggccagaagttcctttcgctgggtattgcgccacgaagcccagcactgcgtgatttagtaaaatgccaggccagttcgacactcgttgccatgcctccagcgggcctgggaaaatcacggtccatgaagatcgagggccatgattctctggcaccgagtgtgaaggagccaaaaggcaatggtggtctagcaccaagtaaaacgccaaagctgcatgaacctgtgatagctgatatgagcatcaagagctgtgattctctagcactgggtatcgcaccaaatggccatacccatgatggtccagcatcaggaagtggggaggccaagaaagagcaggcagcactagtaactggctcgcagagtaaatcatctgtaccaagtcttgacgctagcagccatgttaccggggcagcgagcgcccttgtcgcactatcaactctgcgggagaagggcgggcgttagaggagcagcagcagcagcagtgtagttcccgttggatcagatcctttttctctactgtacatgtttctatgtacaggaatcatccccgtcgactctgatccccagtgcgtacggttgctgttggtggccagtcccctatatgttgcttggcagcaaatgttttggttaataattagtttttataaaaggaatattcacccttgttatgttctctacatgtaaattatctgaggtatacttgcattattatgagtgctataatcttttcttttactacatgctctaaactgtatcgtgtattcaataataaaatgttaatttactccctccatttacttttattagtcgttgttg

SEQ ID NO: 44951 - DNA, 3026 bp, Zea Mays
tcgccaccgccaccgccaccgccggtgtcgtctatcctgaccccgacacctcgccgcccggtgccacctcaccgccggattcacatcgcccagtcgccccaccagccagaacctcgtcgcctcgcccgccttgctccgcaggttaggcagccagtacccccaaaccctagcatcctcggcgctgtcggtcgtagaagagcactgggggcgtgagagagggagtcaccagccctcgagacctcctcccgcttctaccactcagccgacgctcccaaaaggggcatctcaaatcccacctcactcccttcgacctctgagatgtcgatatgaatggagacctgtaacttgtatatatattagggcttagttttcttgtttcagtatctgtttggagttagaagcaagggttctcatggcatctccacaagaatccaattctctgtgcttgaagcgaaagcttgttgatgactgcctgtcaaaagactgcaaatctcgccgtgtcaaatctgagaatgagccctcatctgattcatttgctaaacgctgcaactgttgctgcactcgacctaatcttgccaatgattgtgtgaatttcctgaagagtggagcgccaaaccgtgtcatgtattacaaaaaaggttcgtggcacaattttccagagcaaataatgaattccctcatcgatgaatttaaaggaaataaatcaagtgttgtctctgtgatggatgatgaaccaatccttgttgatttcttatcaatgaccctggtcaacctgaaaaccagaaagcagcggtctgttgcctggtttgatgacactggcaagcgtttctttccttctctgttctttgatgaggaaagtgatgaaatgcccaaacaggattctggcaatgttaataacactgcacaaggaataatgttagataaggtcacgagttctccacctgaagtggtcaagcaagttgttcttgaatctagtccaccagtccctcaaaaaccttcaactgtggatgtcttgcgcaagaagatcacatctgtggaaagaggtagcgaagggtttctatttgtccaggacctttttctctctggtatgaacccgtttgcaacaccaaataacatacttcatgtccaccgctactctccaaacgatatcaccgcacaatgtagatttgaagcttttgaaagacagatgaagtcaactaaagaagcacgtggtgatgcaaatgttaagtatggctggctaggatctaggaagagtgacatagttaggattctcattaatggtttgggtactactgcaaatcctgttgagaaagctggtttgagtgctggtgtatatctttcacctgaaaatcgagcctttaccagtgtcggtctttgtgatgttgacgaaaaaggagtgcagtatatgttgctgtgccgtatgatattgggcaatgtagaagctgttgaacctggatcccaagagtcttttccaagcagtgagatatatgattctggtgttgatgattgttcaaaccccaagtgttatgtgatgtggccatcacatctaagcactcacatccgtttagaatatcttgttagtttcaagcttgccccaaaagttcgaagaaagcataattacccgtgaagaaatggtgaagaaaatgataattgtagttggagagaaagtacttttggaggccttgaagaagcttcattactgtccatcattatggtacaggccttctgttgaagcagtgtctagtgattctgtaatggcagcaccaggaaaattatccttggataaggcagcggatatggtgcccaatggtcaagattgtccggcaccaagtggtgtgccagaaacatctagttctgctgttgccatgcgtggggcttctacaagtgtggaacccaagcgcagagatcctcctgtacagattgtgccacctggaagctctgcaaccccatgtgccaaaaatcaagattcttttgtaggaagagtgacacctatagctcgtgatgggcttttgaggacaatttgtggaagctcttcatctcctggcggttatgcttctctagcgcaagctaatacctcccaaaccaatggagtttctgccccaggtgtcactcctaggggctatgaatctgctgtaccaagcttgtcacttggaaattccgaaagtacaggcgtgaaacaagtaaattctgcaccaagaatgacacctgaaggccagaagttcctttcgctgggtattgcgccacgaagcccagcactgcgtgatttagtaaaatgccaggccagttcgacactcgttgccatgcctccagcgggcctgggaaaatcacggtccatgaagatcgagggccatgattctctggcaccgagtgtgaaggagccaaaaggcaatggtggtctagcaccaagtaaaacgccaaagctgcatgaacctgtgatagctgatatgagcatcaagagctgtgattctctagcactgggtatcgcaccaaatggccatacccatgatggtccagcatcaggaagtggggaggccaagaaagagcaggcagcactagtaactggctcgcagagtaaatcatctgtaccaagtcttgacgctagcagccatgttaccggggcagcgagcgcccttgtcgcactatcaactctgcgggagaagggcgggcgttagaggagcagcagcagcagcagtgtagttcccgttggatcagatcctttttctctactgtacatgtttctatgtacaggaatcatccccgtcgactctgatccccagtgcgtacggttgctgttggtggccagtcccctatatgttgcttggcagcaaatgttttggttaataattagtttttataaaaggaatattcacccttgttatgttctctacatgtaaattatctgaggtatacttgcattattatgagtgctataatcttttcttttactacatgctctaaactgtatcgtgtattcaataataaaatgttaatttactccctccatttacttttattagtcgttgttg

SEQ ID NO: 44952 - DNA, 3022 bp, Zea Mays
tcgccaccgccaccgccaccgccggtgtcgtctatcctgaccccgacacctcgccgcccggtgccacctcaccgccggattcacatcgcccagtcgccccaccagccagaacctcgtcgcctcgcccgccttgctccgcaggttaggcagccagtacccccaaaccctagcatcctcggcgctgtcggtcgtagaagagcactgggggcgtgagagagggagtcaccagccctcgagacctcctcccgcttctaccactcagccgacgctcccaaaaggggcatctcaaatcccacctcactcccttcgacctctgagatgtcgatatgaatggagacctgtaacttgtatatatattagggcttagttttcttgtttcagtatctgtttggagttagaagcaagggttctcatggcatctccacaagaatccaattctctgtgcttgaagcgaaagcttgttgatgactgcctgtcaaaagactgcaaatctcgccgtgtcaaatctgagaatgagccctcatctgattcatttgctaaacgctgcaactgttgctgcactcgacctaatcttgccaatgattgtgtgaatttcctgaagagtggagcgccaaaccgtgtcatgtattacaaaaaaggttcgtggcacaattttccagagcaaataatgaattccctcatcgatgaatttaaaggaaataaatcaagtgttgtctctgtgatggatgatgaaccaatccttgttgatttcttatcaatgaccctggtcaacctgaaaaccagaaagcagcggtctgttgcctggtttgatgacactggcaagcgtttctttccttctctgttctttgatgaggaaagtgatgaaatgcccaaacaggattctggcaatgttaataacactgcacaaggaataatgttagataaggtcacgagttctccacctgaagtggtcaagcaagttgttcttgaatctagtccaccagtccctcaaaaaccttcaactgtggatgtcttgcgcaagaagatcacatctgtggaaagaggtagcgaagggtttctatttgtccaggacctttttctctctggtatgaacccgtttgcaacaccaaataacatacttcatgtccaccgctactctccaaacgatatcaccgcacaatgtagatttgaagcttttgaaagacagatgaagtcaactaaagaagcacgtggtgatgcaaatgttaagtatggctggctaggatctaggaagagtgacatagttaggattctcattaatggtttgggtactactgcaaatcctgttgagaaagctggtttgagtgctggtgtatatctttcacctgaaaatcgagcctttaccagtgtcggtctttgtgatgttgacgaaaaaggagtgcagtatatgttgctgtgccgtatgatattgggcaatgtagaagctgttgaacctggatcccaagagtcttttccaagcagtgagatatatgattctggtgttgatgattgttcaaaccccaagtgttatgtgatgtggccatcacatctaagcactcacatccgtttagaatatcttgttagtttcaagcttgccccaaaagttcgaagaaagcataattacccgtgaagaaatggtgaagaaaatgataattgtagttggagagaaagtacttttggaggccttgaagaagcttcattactgtccatcattatggtacaggccttctgttgaagcagtgtctagtgattctgtaatggcagcaccaggaaaattatccttggataagcggatatggtgcccaatggtcaagattgtccggcaccaagtggtgtgccagaaacatctagttctgctgttgccatgcgtggggcttctacaagtgtggaacccaagcgcagagatcctcctgtacagattgtgccacctggaagctctgcaaccccatgtgccaaaaatcaagattcttttgtaggaagagtgacacctatagctcgtgatgggcttttgaggacaatttgtggaagctcttcatctcctggcggttatgcttctctagcgcaagctaatacctcccaaaccaatggagtttctgccccaggtgtcactcctaggggctatgaatctgctgtaccaagcttgtcacttggaaattccgaaagtacaggcgtgaaacaagtaaattctgcaccaagaatgacacctgaaggccagaagttcctttcgctgggtattgcgccacgaagcccagcactgcgtgatttagtaaaatgccaggccagttcgacactcgttgccatgcctccagcgggcctgggaaaatcacggtccatgaagatcgagggccatgattctctggcaccgagtgtgaaggagccaaaaggcaatggtggtctagcaccaagtaaaacgccaaagctgcatgaacctgtgatagctgatatgagcatcaagagctgtgattctctagcactgggtatcgcaccaaatggccatacccatgatggtccagcatcaggaagtggggaggccaagaaagagcaggcagcactagtaactggctcgcagagtaaatcatctgtaccaagtcttgacgctagcagccatgttaccggggcagcgagcgcccttgtcgcactatcaactctgcgggagaagggcgggcgttagaggagcagcagcagcagcagtgtagttcccgttggatcagatcctttttctctactgtacatgtttctatgtacaggaatcatccccgtcgactctgatccccagtgcgtacggttgctgttggtggccagtcccctatatgttgcttggcagcaaatgttttggttaataattagtttttataaaaggaatattcacccttgttatgttctctacatgtaaattatctgaggtatacttgcattattatgagtgctataatcttttcttttactacatgctctaaactgtatcgtgtattcaataataaaatgttaatttactccctccatttacttttattagtcgttgttg

SEQ ID NO: 44953 - DNA, 4123 bp, Zea Mays
cgacgttagaggatttgatacccctcgccaccgccaccgccaccgccggtgtcgtctatcctgaccccgacacctcgccgcccggtgccacctcaccgccggattcacatcgcccagtcgccccaccagccagaacctcgtcgcctcgcccgccttgctccgcaggttaggcagccagtacccccaaaccctagcatcctcggcgctgtcggtcgtagaagagcactgggggcgtgagagagggagtcaccagccctcgagacctcctcccgcttctaccactcagccgacgctcccaaaaggggcatctcaaatcccacctcactcccttcagtctttcatgtgtctatatattttcacttaaacacgcagtcagtacaaaatggaaccctctatctggttttttaaggccccgggaggagaagcaaggctgaaatgccagtggtctcttctccatttcacctgatccggtaatgtttaatgccagcgatctcttctccatttccttcagagtttcgtttgatttgtttgtgcatagatgaatattgtaaggcctgcataatatcatgcaacggatgcacaaaaagaactgctagacttgtcgtttctgtgtgttacttctattagctcgaattttgttcacatgttccacttgctgagttgacagtaaatgatgtaagtatcatcagagcagatttgatttttttgatgacaagttttgaagcgcttgctgtgttatgtttaacacatggaaaatgaattattgctctggaagcagttattggtctgtgcaccatatagtcttacaacctttatcgaaatgccatatgagctttaaattggcatggcttaatattgcttgcagagattgaatcatcagcttgttcctgggccaaatttcaacaactaattgtggagttgatatagctgtttgggatcctttttaggataaaagaatcgtagccacactgcctgatgctcagatttgtgatgttcattattttaaaaacaacttaattagaccctttatttgtatggttgatgtttgctatatgcaactgaacttccttgtccacttagtttttgtgttatgaatgctagcgtcactgttactaatgatccattttatcatttctccaacttctagaatactgaactgtgttttttgcttgagataaattcattcattatcttatacaggacctctgagatgtcgatatgaatggagacctgtaacttgtatatatattagggcttagttttcttgtttcagtatctgtttggagttagaagcaagggttctcatggcatctccacaagaatccaattctctgtgcttgaagcgaaagcttgttgatgactgcctgtcaaaagactgcaaatctcgccgtgtcaaatctgagaatgagccctcatctgattcatttgctaaacgctgcaactgttgctgcactcgacctaatcttgccaatgattgtgtgaatttcctgaagagtggagcgccaaaccgtgtcatgtattacaaaaaaggttcgtggcacaattttccagagcaaataatgaattccctcatcgatgaatttaaaggaaataaatcaagtgttgtctctgtgatggatgatgaaccaatccttgttgatttcttatcaatgaccctggtcaacctgaaaaccagaaagcagcggtctgttgcctggtttgatgacactggcaagcgtttctttccttctctgttctttgatgaggaaagtgatgaaatgcccaaacaggattctggcaatgttaataacactgcacaaggaataatgttagataaggtcacgagttctccacctgaagtggtcaagcaagttgttcttgaatctagtccaccagtccctcaaaaaccttcaactgtggatgtcttgcgcaagaagatcacatctgtggaaagaggtagcgaagggtttctatttgtccaggacctttttctctctggtatgaacccgtttgcaacaccaaataacatacttcatgtccaccgctactctccaaacgatatcaccgcacaatgtagatttgaagcttttgaaagacagatgaagtcaactaaagaagcacgtggtgatgcaaatgttaagtatggctggctaggatctaggaagagtgacatagttaggattctcattaatggtttgggtactactgcaaatcctgttgagaaagctggtttgagtgctggtgtatatctttcacctgaaaatcgagcctttaccagtgtcggtctttgtgatgttgacgaaaaaggagtgcagtatatgttgctgtgccgtatgatattgggcaatgtagaagctgttgaacctggatcccaagagtcttttccaagcagtgagatatatgattctggtgttgatgattgttcaaaccccaagtgttatgtgatgtggccatcacatctaagcactcacatccgtttagaatatcttgttagtttcaagcttgccccaaaagttcgaaattatttgcttgacctgaaaggtttatggtttaatccatcactaaaagaacttggcacggacatttgtacacttcaacctgtaatgtgtgaaacaggtgaaggaccaacttccccatggatatcattcagagttctgtttgcagttattcaagacaatatatcatctgtggcaagggagttaatcttccatcattatgaagagctgaaggaaagcataattacccgtgaagaaatggtgaagaaaatgataattgtagttggagagaaagtacttttggaggccttgaagaagcttcattactgtccatcattatggtacaggccttctgttgaagcagtgtctagtgattctgtaatggcagcaccaggaaaattatccttggataagcggatatggtgcccaatggtcaagattgtccggcaccaagtggtgtgccagaaacatctagttctgctgttgccatgcgtggggcttctacaagtgtggaacccaagcgcagagatcctcctgtacagattgtgccacctggaagctctgcaaccccatgtgccaaaaatcaagattcttttgtaggaagagtgacacctatagctcgtgatgggcttttgaggacaatttgtggaagctcttcatctcctggcggttatgcttctctagcgcaagctaatacctcccaaaccaatggagtttctgccccaggtgtcactcctaggggctatgaatctgctgtaccaagcttgtcacttggaaattccgaaagtacaggcgtgaaacaagtaaattctgcaccaagaatgacacctgaaggccagaagttcctttcgctgggtattgcgccacgaagcccagcactgcgtgatttagtaaaatgccaggccagttcgacactcgttgccatgcctccagcgggcctgggaaaatcacggtccatgaagatcgagggccatgattctctggcaccgagtgtgaaggagccaaaaggcaatggtggtctagcaccaagtaaaacgccaaagctgcatgaacctgtgatagctgatatgagcatcaagagctgtgattctctagcactgggtatcgcaccaaatggccatacccatgatggtccagcatcaggaagtggggaggccaagaaagagcaggcagcactagtaactggctcgcagagtaaatcatctgtaccaagtcttgacgctagcagccatgttaccggggcagcgagcgcccttgtcgcactatcaactctgcgggagaagggcgggcgttagaggagcagcagcagcagcagtgtagttcccgttggatcagatcctttttctctactgtacatgtttctatgtacaggaatcatccccgtcgactctgatccccagtgcgtacggttgctgttggtggccagtcccctatatgttgcttggcagcaaatgttttggttaataattagtttttataaaaggaatattcacccttgttatgttctctacatgtaaattatctgaggtatacttgcattattatgagtgctataatcttttcttttactacatgctctaaactgtatcgtgtattcaataataaaatgttaatttactccctccatttacttttattagtcgttgttg

SEQ ID NO: 44954 - DNA, 4114 bp, Zea Mays
cgacgttagaggatttgatacccctcgccaccgccaccgccaccgccggtgtcgtctatcctgaccccgacacctcgccgcccggtgccacctcaccgccggattcacatcgcccagtcgccccaccagccagaacctcgtcgcctcgcccgccttgctccgcaggttaggcagccagtacccccaaaccctagcatcctcggcgctgtcggtcgtagaagagcactgggggcgtgagagagggagtcaccagccctcgagacctcctcccgcttctaccactcagccgacgctcccaaaaggggcatctcaaatcccacctcactcccttctcagtacaaaatggaaccctctatctggttttttaaggccccgggaggagaagcaaggctgaaatgccagtggtctcttctccatttcacctgatccggtaatgtttaatgccagcgatctcttctccatttccttcagagtttcgtttgatttgtttgtgcatagatgaatattgtaaggcctgcataatatcatgcaacggatgcacaaaaagaactgctagacttgtcgtttctgtgtgttacttctattagctcgaattttgttcacatgttccacttgctgagttgacagtaaatgatgtaagtatcatcagagcagatttgatttttttgatgacaagttttgaagcgcttgctgtgttatgtttaacacatggaaaatgaattattgctctggaagcagttattggtctgtgcaccatatagtcttacaacctttatcgaaatgccatatgagctttaaattggcatggcttaatattgcttgcagagattgaatcatcagcttgttcctgggccaaatttcaacaactaattgtggagttgatatagctgtttgggatcctttttaggataaaagaatcgtagccacactgcctgatgctcagatttgtgatgttcattattttaaaaacaacttaattagaccctttatttgtatggttgatgtttgctatatgcaactgaacttccttgtccacttagtttttgtgttatgaatgctagcgtcactgttactaatgatccattttatcatttctccaacttctagaatactgaactgtgttttttgcttgagataaattcattcattatcttatacaggacctctgagatgtcgatatgaatggagacctgtaacttgtatatatattagggcttagttttcttgtttcagtatctgtttggagttagaagcaagggttctcatggcatctccacaagaatccaattctctgtgcttgaagcgaaagcttgttgatgactgcctgtcaaaagactgcaaatctcgccgtgtcaaatctgagaatgagccctcatctgattcatttgctaaacgctgcaactgttgctgcactcgacctaatcttgccaatgattgtgtgaatttcctgaagagtggagcgccaaaccgtgtcatgtattacaaaaaaggttcgtggcacaattttccagagcaaataatgaattccctcatcgatgaatttaaaggaaataaatcaagtgttgtctctgtgatggatgatgaaccaatccttgttgatttcttatcaatgaccctggtcaacctgaaaaccagaaagcagcggtctgttgcctggtttgatgacactggcaagcgtttctttccttctctgttctttgatgaggaaagtgatgaaatgcccaaacaggattctggcaatgttaataacactgcacaaggaataatgttagataaggtcacgagttctccacctgaagtggtcaagcaagttgttcttgaatctagtccaccagtccctcaaaaaccttcaactgtggatgtcttgcgcaagaagatcacatctgtggaaagaggtagcgaagggtttctatttgtccaggacctttttctctctggtatgaacccgtttgcaacaccaaataacatacttcatgtccaccgctactctccaaacgatatcaccgcacaatgtagatttgaagcttttgaaagacagatgaagtcaactaaagaagcacgtggtgatgcaaatgttaagtatggctggctaggatctaggaagagtgacatagttaggattctcattaatggtttgggtactactgcaaatcctgttgagaaagctggtttgagtgctggtgtatatctttcacctgaaaatcgagcctttaccagtgtcggtctttgtgatgttgacgaaaaaggagtgcagtatatgttgctgtgccgtatgatattgggcaatgtagaagctgttgaacctggatcccaagagtcttttccaagcagtgagatatatgattctggtgttgatgattgttcaaaccccaagtgttatgtgatgtggccatcacatctaagcactcacatccgtttagaatatcttgttagtttcaagcttgccccaaaagttcgaaattatttgcttgacctgaaaggtttatggtttaatccatcactaaaagaacttggcacggacatttgtacacttcaacctgtgagccagcctgaatcttgttacccccccggtaatgtgtgaaacaggtgaaggaccaacttccccatggatatcattcagagttctgtttgcagttattcaagacaatatatcatctgtggcaagggagttaatcttccatcattatgaagagctgaaggaaagcataattacccgtgaagaaatggtgaagaaaatgataattgtagttggagagaaagtacttttggaggccttgaagaagcttcattactgtccatcattatggtacaggccttctgttgaagcagtgtctagtgattctgtaatggcagcaccaggaaaattatccttggataagcggatatggtgcccaatggtcaagattgtccggcaccaagtggtgtgccagaaacatctagttctgctgttgccatgcgtggggcttctacaagtgtggaacccaagcgcagagatcctcctgtacagattgtgccacctggaagctctgcaaccccatgtgccaaaaatcaagattcttttgtaggaagagtgacacctatagctcgtgatgggcttttgaggacaatttgtggaagctcttcatctcctggcggttatgcttctctagcgcaagctaatacctcccaaaccaatggagtttctgccccaggtgtcactcctaggggctatgaatctgctgtaccaagcttgtcacttggaaattccgaaagtacaggcgtgaaacaagtaaattctgcaccaagaatgacacctgaaggccagaagttcctttcgctgggtattgcgccacgaagcccagcactgcgtgatttagtaaaatgccaggccagttcgacactcgttgccatgcctccagcgggcctgggaaaatcacggtccatgaagatcgagggccatgattctctggcaccgagtgtgaaggagccaaaaggcaatggtggtctagcaccaagtaaaacgccaaagctgcatgaacctgtgatagctgatatgagcatcaagagctgtgattctctagcactgggtatcgcaccaaatggccatacccatgatggtccagcatcaggaagtggggaggccaagaaagagcaggcagcactagtaactggctcgcagagtaaatcatctgtaccaagtcttgacgctagcagccatgttaccggggcagcgagcgcccttgtcgcactatcaactctgcgggagaagggcgggcgttagaggagcagcagcagcagcagtgtagttcccgttggatcagatcctttttctctactgtacatgtttctatgtacaggaatcatccccgtcgactctgatccccagtgcgtacggttgctgttggtggccagtcccctatatgttgcttggcagcaaatgttttggttaataattagtttttataaaaggaatattcacccttgttatgttctctacatgtaaattatctgaggtatacttgcattattatgagtgctataatcttttcttttactacatgctctaaactgtatcgtgtattcaataataaaatgttaatttactccctccatttacttttattagtcgttgttg

SEQ ID NO: 44955 - DNA, 3402 bp, Zea Mays
cagcctggtcgacgttagaggatttgatacccctcgccaccgccaccgccaccgccggtgtcgtctatcctgaccccgacacctcgccgcccggtgccacctcaccgccggattcacatcgcccagtcgccccaccagccagaacctcgtcgcctcgcccgccttgctccgcaggttaggcagccagtacccccaaaccctagcatcctcggcgctgtcggtcgtagaagagcactgggggcgtgagagagggagtcaccagccctcgagacctcctcccgcttctaccactcagccgacgctcccaaaaggggcatctcaaatcccacctcactcccttcagtctttcatgtgtctatatattttcacttaaacacgcagtcagtacaaaatggaaccctctatctggttttttaaggccccgggaggagaagcaaggctgaaatgccagtggtctcttctccatttcacctgatccggacctctgagatgtcgatatgaatggagacctgtaacttgtatatatattagggcttagttttcttgtttcagtatctgtttggagttagaagcaagggttctcatggcatctccacaagaatccaattctctgtgcttgaagcgaaagcttgttgatgactgcctgtcaaaagactgcaaatctcgccgtgtcaaatctgagaatgagccctcatctgattcatttgctaaacgctgcaactgttgctgcactcgacctaatcttgccaatgattgtgtgaatttcctgaagagtggagcgccaaaccgtgtcatgtattacaaaaaaggttcgtggcacaattttccagagcaaataatgaattccctcatcgatgaatttaaaggaaataaatcaagtgttgtctctgtgatggatgatgaaccaatccttgttgatttcttatcaatgaccctggtcaacctgaaaaccagaaagcagcggtctgttgcctggtttgatgacactggcaagcgtttctttccttctctgttctttgatgaggaaagtgatgaaatgcccaaacaggattctggcaatgttaataacactgcacaaggaataatgttagataaggtcacgagttctccacctgaagtggtcaagcaagttgttcttgaatctagtccaccagtccctcaaaaaccttcaactgtggatgtcttgcgcaagaagatcacatctgtggaaagaggtagcgaagggtttctatttgtccaggacctttttctctctggtatgaacccgtttgcaacaccaaataacatacttcatgtccaccgctactctccaaacgatatcaccgcacaatgtagatttgaagcttttgaaagacagatgaagtcaactaaagaagcacgtggtgatgcaaatgttaagtatggctggctaggatctaggaagagtgacatagttaggattctcattaatggtttgggtactactgcaaatcctgttgagaaagctggtttgagtgctggtgtatatctttcacctgaaaatcgagcctttaccagtgtcggtctttgtgatgttgacgaaaaaggagtgcagtatatgttgctgtgccgtatgatattgggcaatgtagaagctgttgaacctggatcccaagagtcttttccaagcagtgagatatatgattctggtgttgatgattgttcaaaccccaagtgttatgtgatgtggccatcacatctaagcactcacatccgtttagaatatcttgttagtttcaagcttgccccaaaagttcgaaattatttgcttgacctgaaaggtttatggtttaatccatcactaaaagaacttggcacggacatttgtacacttcaacctgtaatgtgtgaaacaggtgaaggaccaacttccccatggatatcattcagagttctgtttgcagttattcaagacaatatatcatctgtggcaagggagttaatcttccatcattatgaagagctgaaggaaagcataattacccgtgaagaaatggtgaagaaaatgataattgtagttggagagaaagtacttttggaggccttgaagaagcttcattactgtccatcattatggtacaggccttctgttgaagcagtgtctagtgattctgtaatggcagcaccaggaaaattatccttggataagcggatatggtgcccaatggtcaagattgtccggcaccaagtggtgtgccagaaacatctagttctgctgttgccatgcgtggggcttctacaagtgtggaacccaagcgcagagatcctcctgtacagattgtgccacctggaagctctgcaaccccatgtgccaaaaatcaagattcttttgtaggaagagtgacacctatagctcgtgatgggcttttgaggacaatttgtggaagctcttcatctcctggcggttatgcttctctagcgcaagctaatacctcccaaaccaatggagtttctgccccaggtgtcactcctaggggctatgaatctgctgtaccaagcttgtcacttggaaattccgaaagtacaggcgtgaaacaagtaaattctgcaccaagaatgacacctgaaggccagaagttcctttcgctgggtattgcgccacgaagcccagcactgcgtgatttagtaaaatgccaggccagttcgacactcgttgccatgcctccagcgggcctgggaaaatcacggtccatgaagatcgagggccatgattctctggcaccgagtgtgaaggagccaaaaggcaatggtggtctagcaccaagtaaaacgccaaagctgcatgaacctgtgatagctgatatgagcatcaagagctgtgattctctagcactgggtatcgcaccaaatggccatacccatgatggtccagcatcaggaagtggggaggccaagaaagagcaggcagcactagtaactggctcgcagagtaaatcatctgtaccaagtcttgacgctagcagccatgttaccggggcagcgagcgcccttgtcgcactatcaactctgcgggagaagggcgggcgttagaggagcagcagcagcagcagtgtagttcccgttggatcagatcctttttctctactgtacatgtttctatgtacaggaatcatccccgtcgactctgatccccagtgcgtacggttgctgttggtggccagtcccctatatgttgcttggcagcaaatgttttggttaataattagtttttataaaaggaatattcacccttgttatgttctctacatgtaaattatctgaggtatacttgcattattatgagtgctataatcttttcttttactacatgctctaaactgtatcgtgtattcaataataaaatgttaatttactccctccatttacttttattagtcgttgttg

SEQ ID NO: 44956 - DNA, 3364 bp, Zea Mays
ctcagcctggtcgacgttagaggatttgatacccctcgccaccgccaccgccaccgccggtgtcgtctatcctgaccccgacacctcgccgcccggtgccacctcaccgccggattcacatcgcccagtcgccccaccagccagaacctcgtcgcctcgcccgccttgctccgcaggttaggcagccagtacccccaaaccctagcatcctcggcgctgtcggtcgtagaagagcactgggggcgtgagagagggagtcaccagccctcgagacctcctcccgcttctaccactcagccgacgctcccaaaaggggcatctcaaatcccacctcactcccttctcagtacaaaatggaaccctctatctggttttttaaggccccgggaggagaagcaaggctgaaatgccagtggtctcttctccatttcacctgatccggacctctgagatgtcgatatgaatggagacctgtaacttgtatatatattagggcttagttttcttgtttcagtatctgtttggagttagaagcaagggttctcatggcatctccacaagaatccaattctctgtgcttgaagcgaaagcttgttgatgactgcctgtcaaaagactgcaaatctcgccgtgtcaaatctgagaatgagccctcatctgattcatttgctaaacgctgcaactgttgctgcactcgacctaatcttgccaatgattgtgtgaatttcctgaagagtggagcgccaaaccgtgtcatgtattacaaaaaaggttcgtggcacaattttccagagcaaataatgaattccctcatcgatgaatttaaaggaaataaatcaagtgttgtctctgtgatggatgatgaaccaatccttgttgatttcttatcaatgaccctggtcaacctgaaaaccagaaagcagcggtctgttgcctggtttgatgacactggcaagcgtttctttccttctctgttctttgatgaggaaagtgatgaaatgcccaaacaggattctggcaatgttaataacactgcacaaggaataatgttagataaggtcacgagttctccacctgaagtggtcaagcaagttgttcttgaatctagtccaccagtccctcaaaaaccttcaactgtggatgtcttgcgcaagaagatcacatctgtggaaagaggtagcgaagggtttctatttgtccaggacctttttctctctggtatgaacccgtttgcaacaccaaataacatacttcatgtccaccgctactctccaaacgatatcaccgcacaatgtagatttgaagcttttgaaagacagatgaagtcaactaaagaagcacgtggtgatgcaaatgttaagtatggctggctaggatctaggaagagtgacatagttaggattctcattaatggtttgggtactactgcaaatcctgttgagaaagctggtttgagtgctggtgtatatctttcacctgaaaatcgagcctttaccagtgtcggtctttgtgatgttgacgaaaaaggagtgcagtatatgttgctgtgccgtatgatattgggcaatgtagaagctgttgaacctggatcccaagagtcttttccaagcagtgagatatatgattctggtgttgatgattgttcaaaccccaagtgttatgtgatgtggccatcacatctaagcactcacatccgtttagaatatcttgttagtttcaagcttgccccaaaagttcgaaattatttgcttgacctgaaaggtttatggtttaatccatcactaaaagaacttggcacggacatttgtacacttcaacctgtaatgtgtgaaacaggtgaaggaccaacttccccatggatatcattcagagttctgtttgcagttattcaagacaatatatcatctgtggcaagggagttaatcttccatcattatgaagagctgaaggaaagcataattacccgtgaagaaatggtgaagaaaatgataattgtagttggagagaaagtacttttggaggccttgaagaagcttcattactgtccatcattatggtacaggccttctgttgaagcagtgtctagtgattctgtaatggcagcaccaggaaaattatccttggataagcggatatggtgcccaatggtcaagattgtccggcaccaagtggtgtgccagaaacatctagttctgctgttgccatgcgtggggcttctacaagtgtggaacccaagcgcagagatcctcctgtacagattgtgccacctggaagctctgcaaccccatgtgccaaaaatcaagattcttttgtaggaagagtgacacctatagctcgtgatgggcttttgaggacaatttgtggaagctcttcatctcctggcggttatgcttctctagcgcaagctaatacctcccaaaccaatggagtttctgccccaggtgtcactcctaggggctatgaatctgctgtaccaagcttgtcacttggaaattccgaaagtacaggcgtgaaacaagtaaattctgcaccaagaatgacacctgaaggccagaagttcctttcgctgggtattgcgccacgaagcccagcactgcgtgatttagtaaaatgccaggccagttcgacactcgttgccatgcctccagcgggcctgggaaaatcacggtccatgaagatcgagggccatgattctctggcaccgagtgtgaaggagccaaaaggcaatggtggtctagcaccaagtaaaacgccaaagctgcatgaacctgtgatagctgatatgagcatcaagagctgtgattctctagcactgggtatcgcaccaaatggccatacccatgatggtccagcatcaggaagtggggaggccaagaaagagcaggcagcactagtaactggctcgcagagtaaatcatctgtaccaagtcttgacgctagcagccatgttaccggggcagcgagcgcccttgtcgcactatcaactctgcgggagaagggcgggcgttagaggagcagcagcagcagcagtgtagttcccgttggatcagatcctttttctctactgtacatgtttctatgtacaggaatcatccccgtcgactctgatccccagtgcgtacggttgctgttggtggccagtcccctatatgttgcttggcagcaaatgttttggttaataattagtttttataaaaggaatattcacccttgttatgttctctacatgtaaattatctgaggtatacttgcattattatgagtgctataatcttttcttttactacatgctctaaactgtatcgtgtattcaataataaaatgttaatttactccctccatttacttttattagtcgttgttg

SEQ ID NO: 44957 - DNA, 3117 bp, Zea Mays
ctcagcctggtcgacgttagaggatttgatacccctcgccaccgccaccgccaccgccggtgtcgtctatcctgaccccgacacctcgccgcccggtgccacctcaccgccggattcacatcgcccagtcgccccaccagccagaacctcgtcgcctcgcccgccttgctccgcaggttaggcagccagtacccccaaaccctagcatcctcggcgctgtcggtcgtagaagagcactgggggcgtgagagagggagtcaccagccctcgagacctcctcccgcttctaccactcagccgacgctcccaaaaggggcatctcaaatcccacctcactcccttctatctgtttggagttagaagcaagggttctcatggcatctccacaagaatccaattctctgtgcttgaagcgaaagcttgttgatgactgcctgtcaaaagactgcaaatctcgccgtgtcaaatctgagaatgagccctcatctgattcatttgctaaacgctgcaactgttgctgcactcgacctaatcttgccaatgattgtgtgaatttcctgaagagtggagcgccaaaccgtgtcatgtattacaaaaaaggttcgtggcacaattttccagagcaaataatgaattccctcatcgatgaatttaaaggaaataaatcaagtgttgtctctgtgatggatgatgaaccaatccttgttgatttcttatcaatgaccctggtcaacctgaaaaccagaaagcagcggtctgttgcctggtttgatgacactggcaagcgtttctttccttctctgttctttgatgaggaaagtgatgaaatgcccaaacaggattctggcaatgttaataacactgcacaaggaataatgttagataaggtcacgagttctccacctgaagtggtcaagcaagttgttcttgaatctagtccaccagtccctcaaaaaccttcaactgtggatgtcttgcgcaagaagatcacatctgtggaaagaggtagcgaagggtttctatttgtccaggacctttttctctctggtatgaacccgtttgcaacaccaaataacatacttcatgtccaccgctactctccaaacgatatcaccgcacaatgtagatttgaagcttttgaaagacagatgaagtcaactaaagaagcacgtggtgatgcaaatgttaagtatggctggctaggatctaggaagagtgacatagttaggattctcattaatggtttgggtactactgcaaatcctgttgagaaagctggtttgagtgctggtgtatatctttcacctgaaaatcgagcctttaccagtgtcggtctttgtgatgttgacgaaaaaggagtgcagtatatgttgctgtgccgtatgatattgggcaatgtagaagctgttgaacctggatcccaagagtcttttccaagcagtgagatatatgattctggtgttgatgattgttcaaaccccaagtgttatgtgatgtggccatcacatctaagcactcacatccgtttagaatatcttgttagtttcaagcttgccccaaaagttcgaagtaatgtgtgaaacaggtgaaggaccaacttccccatggatatcattcagagttctgtttgcagttattcaagacaatatatcatctgtggcaagggagttaatcttccatcattatgaagagctgaaggaaagcataattacccgtgaagaaatggtgaagaaaatgataattgtagttggagagaaagtacttttggaggccttgaagaagcttcattactgtccatcattatggtacaggccttctgttgaagcagtgtctagtgattctgtaatggcagcaccaggaaaattatccttggataaggcagcggatatggtgcccaatggtcaagattgtccggcaccaagtggtgtgccagaaacatctagttctgctgttgccatgcgtggggcttctacaagtgtggaacccaagcgcagagatcctcctgtacagattgtgccacctggaagctctgcaaccccatgtgccaaaaatcaagattcttttgtaggaagagtgacacctatagctcgtgatgggcttttgaggacaatttgtggaagctcttcatctcctggcggttatgcttctctagcgcaagctaatacctcccaaaccaatggagtttctgccccaggtgtcactcctaggggctatgaatctgctgtaccaagcttgtcacttggaaattccgaaagtacaggcgtgaaacaagtaaattctgcaccaagaatgacacctgaaggccagaagttcctttcgctgggtattgcgccacgaagcccagcactgcgtgatttagtaaaatgccaggccagttcgacactcgttgccatgcctccagcgggcctgggaaaatcacggtccatgaagatcgagggccatgattctctggcaccgagtgtgaaggagccaaaaggcaatggtggtctagcaccaagtaaaacgccaaagctgcatgaacctgtgatagctgatatgagcatcaagagctgtgattctctagcactgggtatcgcaccaaatggccatacccatgatggtccagcatcaggaagtggggaggccaagaaagagcaggcagcactagtaactggctcgcagagtaaatcatctgtaccaagtcttgacgctagcagccatgttaccggggcagcgagcgcccttgtcgcactatcaactctgcgggagaagggcgggcgttagaggagcagcagcagcagcagtgtagttcccgttggatcagatcctttttctctactgtacatgtttctatgtacaggaatcatccccgtcgactctgatccccagtgcgtacggttgctgttggtggccagtcccctatatgttgcttggcagcaaatgttttggttaataattagtttttataaaaggaatattcacccttgttatgttctctacatgtaaattatctgaggtatacttgcattattatgagtgctataatcttttcttttactacatgctctaaactgtatcgtgtattcaataataaaatgttaatttactccctccatttacttttattagtcgttgttg

SEQ ID NO: 44958 - DNA, 3349 bp, Zea Mays
cttgactgctcagcctggtcgacgttagaggatttgatacccctcgccaccgccaccgccaccgccggtgtcgtctatcctgaccccgacacctcgccgcccggtgccacctcaccgccggattcacatcgcccagtcgccccaccagccagaacctcgtcgcctcgcccgccttgctccgcaggttaggcagccagtacccccaaaccctagcatcctcggcgctgtcggtcgtagaagagcactgggggcgtgagagagggagtcaccagccctcgagacctcctcccgcttctaccactcagccgacgctcccaaaaggggcatctcaaatcccacctcactcccttcgacctctgagatgtcgatatgaatggagacctgtaacttgtatatatattagggcttagttttcttgtttcagtatctgtttggagttagaagcaagggttctcatggcatctccacaagaatccaattctctgtgcttgaagcgaaagcttgttgatgactgcctgtcaaaagactgcaaatctcgccgtgtcaaatctgagaatgagccctcatctgattcatttgctaaacgctgcaactgttgctgcactcgacctaatcttgccaatgattgtgtgaatttcctgaagagtggagcgccaaaccgtgtcatgtattacaaaaaaggttcgtggcacaattttccagagcaaataatgaattccctcatcgatgaatttaaaggaaataaatcaagtgttgtctctgtgatggatgatgaaccaatccttgttgatttcttatcaatgaccctggtcaacctgaaaaccagaaagcagcggtctgttgcctggtttgatgacactggcaagcgtttctttccttctctgttctttgatgaggaaagtgatgaaatgcccaaacaggattctggcaatgttaataacactgcacaaggaataatgttagataaggtcacgagttctccacctgaagtggtcaagcaagttgttcttgaatctagtccaccagtccctcaaaaaccttcaactgtggatgtcttgcgcaagaagatcacatctgtggaaagaggtagcgaagggtttctatttgtccaggacctttttctctctggtatgaacccgtttgcaacaccaaataacatacttcatgtccaccgctactctccaaacgatatcaccgcacaatgtagatttgaagcttttgaaagacagatgaagtcaactaaagaagcacgtggtgatgcaaatgttaagtatggctggctaggatctaggaagagtgacatagttaggattctcattaatggtttgggtactactgcaaatcctgttgagaaagctggtttgagtgctggtgtatatctttcacctgaaaatcgagcctttaccagtgtcggtctttgtgatgttgacgaaaaaggagtgcagtatatgttgctgtgccgtatgatattgggcaatgtagaagctgttgaacctggatcccaagagtcttttccaagcagtgagatatatgattctggtgttgatgattgttcaaaccccaagtgttatgtgatgtggccatcacatctaagcactcacatccgtttagaatatcttgttagtttcaagcttgccccaaaagttcgaaattatttgcttgacctgaaaggtttatggtttaatccatcactaaaagaacttggcacggacatttgtacacttcaacctgtaatgtgtgaaacaggtgaaggaccaacttccccatggatatcattcagagttctgtttgcagttattcaagacaatatatcatctgtggcaagggagttaatcttccatcattatgaagagctgaaggaaagcataattacccgtgaagaaatggtgaagaaaatgataattgtagttggagagaaagtacttttggaggccttgaagaagcttcattactgtgcatgatatgtacactacattttttttcttactggcatctagcgtcactttgttattggcttctgttgcagccatcattatggtacaggccttctgttgaagcagtgtctagtgattctgtaatggcagcaccaggaaaattatccttggataaggcagcggatatggtgcccaatggtcaagattgtccggcaccaagtggtgtgccagaaacatctagttctgctgttgccatgcgtggggcttctacaagtgtggaacccaagcgcagagatcctcctgtacagattgtgccacctggaagctctgcaaccccatgtgccaaaaatcaagattcttttgtaggaagagtgacacctatagctcgtgatgggcttttgaggacaatttgtggaagctcttcatctcctggcggttatgcttctctagcgcaagctaatacctcccaaaccaatggagtttctgccccaggtgtcactcctaggggctatgaatctgctgtaccaagcttgtcacttggaaattccgaaagtacaggcgtgaaacaagtaaattctgcaccaagaatgacacctgaaggccagaagttcctttcgctgggtattgcgccacgaagcccagcactgcgtgatttagtaaaatgccaggccagttcgacactcgttgccatgcctccagcgggcctgggaaaatcacggtccatgaagatcgagggccatgattctctggcaccgagtgtgaaggagccaaaaggcaatggtggtctagcaccaagtaaaacgccaaagctgcatgaacctgtgatagctgatatgagcatcaagagctgtgattctctagcactgggtatcgcaccaaatggccatacccatgatggtccagcatcaggaagtggggaggccaagaaagagcaggcagcactagtaactggctcgcagagtaaatcatctgtaccaagtcttgacgctagcagccatgttaccggggcagcgagcgcccttgtcgcactatcaactctgcgggagaagggcgggcgttagaggagcagcagcagcagcagtgtagttcccgttggatcagatcctttttctctactgtacatgtttctatgtacaggaatcatccccgtcgactctgatccccagtgcgtacggttgctgttggtggccagtcccctatatgttgcttggcagcaaatgttttggttaataattagtttttataaaaggaatattcacccttgttatgttctctacatgtaaattatctgaggtatacttgcattattatgagtgctataatcttttcttttactacatgctctaaactgtatcgtgtattcaataataaaatgttaatttactccctccatttacttttattagtcgttgttg

SEQ ID NO: 44959 - DNA, 3274 bp, Zea Mays
cttgactgctcagcctggtcgacgttagaggatttgatacccctcgccaccgccaccgccaccgccggtgtcgtctatcctgaccccgacacctcgccgcccggtgccacctcaccgccggattcacatcgcccagtcgccccaccagccagaacctcgtcgcctcgcccgccttgctccgcaggttaggcagccagtacccccaaaccctagcatcctcggcgctgtcggtcgtagaagagcactgggggcgtgagagagggagtcaccagccctcgagacctcctcccgcttctaccactcagccgacgctcccaaaaggggcatctcaaatcccacctcactcccttcgacctctgagatgtcgatatgaatggagacctgtaacttgtatatatattagggcttagttttcttgtttcagtatctgtttggagttagaagcaagggttctcatggcatctccacaagaatccaattctctgtgcttgaagcgaaagcttgttgatgactgcctgtcaaaagactgcaaatctcgccgtgtcaaatctgagaatgagccctcatctgattcatttgctaaacgctgcaactgttgctgcactcgacctaatcttgccaatgattgtgtgaatttcctgaagagtggagcgccaaaccgtgtcatgtattacaaaaaaggttcgtggcacaattttccagagcaaataatgaattccctcatcgatgaatttaaaggaaataaatcaagtgttgtctctgtgatggatgatgaaccaatccttgttgatttcttatcaatgaccctggtcaacctgaaaaccagaaagcagcggtctgttgcctggtttgatgacactggcaagcgtttctttccttctctgttctttgatgaggaaagtgatgaaatgcccaaacaggattctggcaatgttaataacactgcacaaggaataatgttagataaggtcacgagttctccacctgaagtggtcaagcaagttgttcttgaatctagtccaccagtccctcaaaaaccttcaactgtggatgtcttgcgcaagaagatcacatctgtggaaagaggtagcgaagggtttctatttgtccaggacctttttctctctggtatgaacccgtttgcaacaccaaataacatacttcatgtccaccgctactctccaaacgatatcaccgcacaatgtagatttgaagcttttgaaagacagatgaagtcaactaaagaagcacgtggtgatgcaaatgttaagtatggctggctaggatctaggaagagtgacatagttaggattctcattaatggtttgggtactactgcaaatcctgttgagaaagctggtttgagtgctggtgtatatctttcacctgaaaatcgagcctttaccagtgtcggtctttgtgatgttgacgaaaaaggagtgcagtatatgttgctgtgccgtatgatattgggcaatgtagaagctgttgaacctggatcccaagagtcttttccaagcagtgagatatatgattctggtgttgatgattgttcaaaccccaagtgttatgtgatgtggccatcacatctaagcactcacatccgtttagaatatcttgttagtttcaagcttgccccaaaagttcgaaattatttgcttgacctgaaaggtttatggtttaatccatcactaaaagaacttggcacggacatttgtacacttcaacctgtaatgtgtgaaacaggtgaaggaccaacttccccatggatatcattcagagttctgtttgcagttattcaagacaatatatcatctgtggcaagggagttaatcttccatcattatgaagagctgaaggaaagcataattacccgtgaagaaatggtgaagaaaatgataattgtagttggagagaaagtacttttggaggccttgaagaagcttcattactgtccatcattatggtacaggccttctgttgaagcagtgtctagtgattctgtaatggcagcaccaggaaaattatccttggataagcggatatggtgcccaatggtcaagattgtccggcaccaagtggtgtgccagaaacatctagttctgctgttgccatgcgtggggcttctacaagtgtggaacccaagcgcagagatcctcctgtacagattgtgccacctggaagctctgcaaccccatgtgccaaaaatcaagattcttttgtaggaagagtgacacctatagctcgtgatgggcttttgaggacaatttgtggaagctcttcatctcctggcggttatgcttctctagcgcaagctaatacctcccaaaccaatggagtttctgccccaggtgtcactcctaggggctatgaatctgctgtaccaagcttgtcacttggaaattccgaaagtacaggcgtgaaacaagtaaattctgcaccaagaatgacacctgaaggccagaagttcctttcgctgggtattgcgccacgaagcccagcactgcgtgatttagtaaaatgccaggccagttcgacactcgttgccatgcctccagcgggcctgggaaaatcacggtccatgaagatcgagggccatgattctctggcaccgagtgtgaaggagccaaaaggcaatggtggtctagcaccaagtaaaacgccaaagctgcatgaacctgtgatagctgatatgagcatcaagagctgtgattctctagcactgggtatcgcaccaaatggccatacccatgatggtccagcatcaggaagtggggaggccaagaaagagcaggcagcactagtaactggctcgcagagtaaatcatctgtaccaagtcttgacgctagcagccatgttaccggggcagcgagcgcccttgtcgcactatcaactctgcgggagaagggcgggcgttagaggagcagcagcagcagcagtgtagttcccgttggatcagatcctttttctctactgtacatgtttctatgtacaggaatcatccccgtcgactctgatccccagtgcgtacggttgctgttggtggccagtcccctatatgttgcttggcagcaaatgttttggttaataattagtttttataaaaggaatattcacccttgttatgttctctacatgtaaattatctgaggtatacttgcattattatgagtgctataatcttttcttttactacatgctctaaactgtatcgtgtattcaataataaaatgttaatttactccctccatttacttttattagtcgttgttg

SEQ ID NO: 44960 - DNA, 3398 bp, Zea Mays
gttctgtcgtatggcctgctagatattctgtgagatggctggccccttggacggcgcagatcgcttgactgctcagcctggtcgacgttagaggatttgatacccctcgccaccgccaccgccaccgccggtgtcgtctatcctgaccccgacacctcgccgcccggtgccacctcaccgccggattcacatcgcccagtcgccccaccagccagaacctcgtcgcctcgcccgccttgctccgcaggttaggcagccagtacccccaaaccctagcatcctcggcgctgtcggtcgtagaagagcactgggggcgtgagagagggagtcaccagccctcgagacctcctcccgcttctaccactcagccgacgctcccaaaaggggcatctcaaatcccacctcactcccttcgccccgggaggagaagcaaggctgaaatgccagtggtctcttctccatttcacctgatccggacctctgagatgtcgatatgaatggagacctgtaacttgtatatatattagggcttagttttcttgtttcagtatctgtttggagttagaagcaagggttctcatggcatctccacaagaatccaattctctgtgcttgaagcgaaagcttgttgatgactgcctgtcaaaagactgcaaatctcgccgtgtcaaatctgagaatgagccctcatctgattcatttgctaaacgctgcaactgttgctgcactcgacctaatcttgccaatgattgtgtgaatttcctgaagagtggagcgccaaaccgtgtcatgtattacaaaaaaggttcgtggcacaattttccagagcaaataatgaattccctcatcgatgaatttaaaggaaataaatcaagtgttgtctctgtgatggatgatgaaccaatccttgttgatttcttatcaatgaccctggtcaacctgaaaaccagaaagcagcggtctgttgcctggtttgatgacactggcaagcgtttctttccttctctgttctttgatgaggaaagtgatgaaatgcccaaacaggattctggcaatgttaataacactgcacaaggaataatgttagataaggtcacgagttctccacctgaagtggtcaagcaagttgttcttgaatctagtccaccagtccctcaaaaaccttcaactgtggatgtcttgcgcaagaagatcacatctgtggaaagaggtagcgaagggtttctatttgtccaggacctttttctctctggtatgaacccgtttgcaacaccaaataacatacttcatgtccaccgctactctccaaacgatatcaccgcacaatgtagatttgaagcttttgaaagacagatgaagtcaactaaagaagcacgtggtgatgcaaatgttaagtatggctggctaggatctaggaagagtgacatagttaggattctcattaatggtttgggtactactgcaaatcctgttgagaaagctggtttgagtgctggtgtatatctttcacctgaaaatcgagcctttaccagtgtcggtctttgtgatgttgacgaaaaaggagtgcagtatatgttgctgtgccgtatgatattgggcaatgtagaagctgttgaacctggatcccaagagtcttttccaagcagtgagatatatgattctggtgttgatgattgttcaaaccccaagtgttatgtgatgtggccatcacatctaagcactcacatccgtttagaatatcttgttagtttcaagcttgccccaaaagttcgaaattatttgcttgacctgaaaggtttatggtttaatccatcactaaaagaacttggcacggacatttgtacacttcaacctgtaatgtgtgaaacaggtgaaggaccaacttccccatggatatcattcagagttctgtttgcagttattcaagacaatatatcatctgtggcaagggagttaatcttccatcattatgaagagctgaaggaaagcataattacccgtgaagaaatggtgaagaaaatgataattgtagttggagagaaagtacttttggaggccttgaagaagcttcattactgtccatcattatggtacaggccttctgttgaagcagtgtctagtgattctgtaatggcagcaccaggaaaattatccttggataagcggatatggtgcccaatggtcaagattgtccggcaccaagtggtgtgccagaaacatctagttctgctgttgccatgcgtggggcttctacaagtgtggaacccaagcgcagagatcctcctgtacagattgtgccacctggaagctctgcaaccccatgtgccaaaaatcaagattcttttgtaggaagagtgacacctatagctcgtgatgggcttttgaggacaatttgtggaagctcttcatctcctggcggttatgcttctctagcgcaagctaatacctcccaaaccaatggagtttctgccccaggtgtcactcctaggggctatgaatctgctgtaccaagcttgtcacttggaaattccgaaagtacaggcgtgaaacaagtaaattctgcaccaagaatgacacctgaaggccagaagttcctttcgctgggtattgcgccacgaagcccagcactgcgtgatttagtaaaatgccaggccagttcgacactcgttgccatgcctccagcgggcctgggaaaatcacggtccatgaagatcgagggccatgattctctggcaccgagtgtgaaggagccaaaaggcaatggtggtctagcaccaagtaaaacgccaaagctgcatgaacctgtgatagctgatatgagcatcaagagctgtgattctctagcactgggtatcgcaccaaatggccatacccatgatggtccagcatcaggaagtggggaggccaagaaagagcaggcagcactagtaactggctcgcagagtaaatcatctgtaccaagtcttgacgctagcagccatgttaccggggcagcgagcgcccttgtcgcactatcaactctgcgggagaagggcgggcgttagaggagcagcagcagcagcagtgtagttcccgttggatcagatcctttttctctactgtacatgtttctatgtacaggaatcatccccgtcgactctgatccccagtgcgtacggttgctgttggtggccagtcccctatatgttgcttggcagcaaatgttttggttaataattagtttttataaaaggaatattcacccttgttatgttctctacatgtaaattatctgaggtatacttgcattattatgagtgctataatcttttcttttactacatgctctaaactgtatcgtgtattcaataataaaatgttaatttactccctccatttacttttattagtcgttgttg

SEQ ID NO: 44961 - DNA, 3484 bp, Zea Mays
gggaaaccggcctaccttggtggcgtggcgccgcgcggcatccggaacgacgaggcgccgagggaggaagaagagaagggaggccgacgcatgtgctcgcgggagaggcggcgttggtgttatgggcctacttgggccctcgagttctgtcgtatggcctgctagatattctgtgagatggctggccccttggacggcgcagatcgcttgactgctcagcctggtcgacgttagaggatttgatacccctcgccaccgccaccgccaccgccggtgtcgtctatcctgaccccgacacctcgccgcccggtgccacctcaccgccggattcacatcgcccagtcgccccaccagccagaacctcgtcgcctcgcccgccttgctccgcaggttaggcagccagtacccccaaaccctagcatcctcggcgctgtcggtcgtagaagagcactgggggcgtgagagagggagtcaccagccctcgagacctcctcccgcttctaccactcagccgacgctcccaaaaggggcatctcaaatcccacctcactcccttcgacctctgagatgtcgatatgaatggagacctgtaacttgtatatatattagggcttagttttcttgtttcagtatctgtttggagttagaagcaagggttctcatggcatctccacaagaatccaattctctgtgcttgaagcgaaagcttgttgatgactgcctgtcaaaagactgcaaatctcgccgtgtcaaatctgagaatgagccctcatctgattcatttgctaaacgctgcaactgttgctgcactcgacctaatcttgccaatgattgtgtgaatttcctgaagagtggagcgccaaaccgtgtcatgtattacaaaaaaggttcgtggcacaattttccagagcaaataatgaattccctcatcgatgaatttaaaggaaataaatcaagtgttgtctctgtgatggatgatgaaccaatccttgttgatttcttatcaatgaccctggtcaacctgaaaaccagaaagcagcggtctgttgcctggtttgatgacactggcaagcgtttctttccttctctgttctttgatgaggaaagtgatgaaatgcccaaacaggattctggcaatgttaataacactgcacaaggaataatgttagataaggtcacgagttctccacctgaagtggtcaagcaagttgttcttgaatctagtccaccagtccctcaaaaaccttcaactgtggatgtcttgcgcaagaagatcacatctgtggaaagaggtagcgaagggtttctatttgtccaggacctttttctctctggtatgaacccgtttgcaacaccaaataacatacttcatgtccaccgctactctccaaacgatatcaccgcacaatgtagatttgaagcttttgaaagacagatgaagtcaactaaagaagcacgtggtgatgcaaatgttaagtatggctggctaggatctaggaagagtgacatagttaggattctcattaatggtttgggtactactgcaaatcctgttgagaaagctggtttgagtgctggtgtatatctttcacctgaaaatcgagcctttaccagtgtcggtctttgtgatgttgacgaaaaaggagtgcagtatatgttgctgtgccgtatgatattgggcaatgtagaagctgttgaacctggatcccaagagtcttttccaagcagtgagatatatgattctggtgttgatgattgttcaaaccccaagtgttatgtgatgtggccatcacatctaagcactcacatccgtttagaatatcttgttagtttcaagcttgccccaaaagttcgaaattatttgcttgacctgaaaggtttatggtttaatccatcactaaaagaacttggcacggacatttgtacacttcaacctgtaatgtgtgaaacaggtgaaggaccaacttccccatggatatcattcagagttctgtttgcagttattcaagacaatatatcatctgtggcaagggagttaatcttccatcattatgaagagctgaaggaaagcataattacccgtgaagaaatggtgaagaaaatgataattgtagttggagagaaagtacttttggaggccttgaagaagcttcattactgtccatcattatggtacaggccttctgttgaagcagtgtctagtgattctgtaatggcagcaccaggaaaattatccttggataaggcagcggatatggtgcccaatggtcaagattgtccggcaccaagtggtgtgccagaaacatctagttctgctgttgccatgcgtggggcttctacaagtgtggaacccaagcgcagagatcctcctgtacagattgtgccacctggaagctctgcaaccccatgtgccaaaaatcaagattcttttgtaggaagagtgacacctatagctcgtgatgggcttttgaggacaatttgtggaagctcttcatctcctggcggttatgcttctctagcgcaagctaatacctcccaaaccaatggagtttctgccccaggtgtcactcctaggggctatgaatctgctgtaccaagcttgtcacttggaaattccgaaagtacaggcgtgaaacaagtaaattctgcaccaagaatgacacctgaaggccagaagttcctttcgctgggtattgcgccacgaagcccagcactgcgtgatttagtaaaatgccaggccagttcgacactcgttgccatgcctccagcgggcctgggaaaatcacggtccatgaagatcgagggccatgattctctggcaccgagtgtgaaggagccaaaaggcaatggtggtctagcaccaagtaaaacgccaaagctgcatgaacctgtgatagctgatatgagcatcaagagctgtgattctctagcactgggtatcgcaccaaatggccatacccatgatggtccagcatcaggaagtggggaggccaagaaagagcaggcagcactagtaactggctcgcagagtaaatcatctgtaccaagtcttgacgctagcagccatgttaccggggcagcgagcgcccttgtcgcactatcaactctgcgggagaagggcgggcgttagaggagcagcagcagcagcagtgtagttcccgttggatcagatcctttttctctactgtacatgtttctatgtacaggaatcatccccgtcgactctgatccccagtgcgtacggttgctgttggtggccagtcccctatatgttgcttggcagcaaatgttttggttaataattagtttttataaaaggaatattcacccttgttatgttctctacatgtaaattatctgaggtatacttgcattattatgagtgctataatcttttcttttactacatgctctaaactgtatcgtgtattcaataataaaatgttaatttactccctccatttacttttattagtcgttgttg

SEQ ID NO: 44962 - DNA, 2473 bp, Zea Mays
aagaatatatggataagatgggtcagactttttcattgatagttgattctcaagaccagtttgaactgaaaacattatgcttggcatttggcgcccgtcagggaagaaggtggcagatatgatgaatcaggttctgtcagtgaaaaggaagtttgatcaatgtgaggtgtcactcgttggggcaagccaagtcagccatgtggtaaaattagcaagagattcattagccgctgagatcaccaaggctcgttctgccaatgctagagaggagaaaagagaaagctgcgccatctgcttggaagacactgacgctaccaaaatccatgcggttgaagtgtgcgcgcatcgcttttgcttctcgtgcatgaaggagcacgtgaaagttaagctgctgaatggaactctcccaggttgcccacaagagggatgcgccacgaagctcagtgtggagggttcgagggtatttctttcgccgcggctggtagagatcatggtgcagcgcatgagggaaggacagatccctccgagccaaaaggtctactgtccgtatcccaggtgctcggccttgatgtccttgggggaagtgattcatccgatgcaggagtcctcatcaaggcacacggctgctgatgctgccacgttgaggaagtgcgtgaaatgcagaggctccttctgcctgagctgtaaagtcccatggcatgatggcatgggttgctttgagtacaagatgtggtaccccctcgctcacccaggagatgccaagctgcagaacctggcaaggcagaggctgtggcgccaatgcgtgaaatgcaagcacatgatcgagcttgcggagggctgctaccacatgatctgcgtgtgcggctatgagttctgctacacctgtgggaaagaatggaagaataagaaagcaagctgctcctgcccgctgtgggatgaacgcaacatcatcagagatgaagacgacgatgacgacgaagatgatctttactagagaaggctgtttttgctgctttttttaatgatgatattcagcggctgcatggatacattgaaatgaccacctgatgttgaaattgaaactgctcatcctgtacatgttgggtactgcttatgagcgtgtagctgacactgtcgaaggggggatgacaccgcctccttcttcttcatctggtggctcctgcatcgtggccagctcttcctgcagagtcggatggcgatgcatcggcgtgtccagcaccaccaccacctcgtaggcgtctgccgtacggacctcctgcgctagcgagcacgggtagcagcagagccacagtaggcagtcggtgaggtccggcttgccgcagcaggcgcggttctcggggaggccgaaccgcctgcgcatctggatcctccagaatccgccgtagagcaggccgaacacgcagaggaagatgccggccagccccagcgcgtccctgaccgcctcgtcgtccacgttgatggccgccaggtccaagatgaagaagggcgccaggcacaggagcacgaaggtggcgacgtggacgtacatgttgcccaagccgagcctgctcgcgttccacccgaacacgcagcagctgcagaacagcgacaggtacgccagcgacatgtcgtcccacaggtcctcccacagcccgccgacccactgcggttcttctccttgtccttgccgtggcaccaacgagtagcgcctctcggtgtcgggcgttttgcgctggagctgcgactcttcctcacttattatcatcccctccgccggcgccggcgcctcgtagtctctcccgagaggactgaggttgttgtacatcccagcgacggccggcgcgcagatggcgaccgctacggtgagggcgacaccgaccaccggacgccggggcctccggtagccaaggttgaggccacagagcgcgtactgagcaaagcagttgaggtggagcagcaggatgacagccgtcatgtgcttcctctcgttgggcttgcaggccccgtccttgcagtacgcttggcggagctggtgcatgtcgccggccttccagcggcacacgagggccaggtggtagaacctcctcgggtgctggtacaggcacatgagggtgaagagcgcgttcaggatctggttgttcacctcgaaccacgtgtccctccgcggcttgcttggcagcacgcggttgagcatccccgtcatcaccatgaagaggatggcgcccgagacgccgacggccaggatccagacggacagggccatgttcatggggttccggatccacgccctggacttgacccacagcgacctgctccaccactggatacctcctccaatcatctgtcgggtggaggaagatgatgagactgagttctgctcctgcacggatttctccggcagcagcccccctgtgggaggagtcgtacgttgttggcccaaaacgaccatcttggaggaggatttctgccaaga

SEQ ID NO: 44963 - DNA, 2470 bp, Zea Mays
aagcatatagaagaaagatacatggggttagggagagaggggaacataagcatatgttaccgacttccctctgatgcttggcatttggcgcccgtcagggaagaaggtggcagatatgatgaatcaggttctgtcagtgaaaaggaagtttgatcaatgtgaggtgtcactcgttggggcaagccaagtcagccatgtggtaaaattagcaagagattcattagccgctgagatcaccaaggctcgttctgccaatgctagagaggagaaaagagaaagctgcgccatctgcttggaagacactgacgctaccaaaatccatgcggttgaagtgtgcgcgcatcgcttttgcttctcgtgcatgaaggagcacgtgaaagttaagctgctgaatggaactctcccaggttgcccacaagagggatgcgccacgaagctcagtgtggagggttcgagggtatttctttcgccgcggctggtagagatcatggtgcagcgcatgagggaaggacagatccctccgagccaaaaggtctactgtccgtatcccaggtgctcggccttgatgtccttgggggaagtgattcatccgatgcaggagtcctcatcaaggcacacggctgctgatgctgccacgttgaggaagtgcgtgaaatgcagaggctccttctgcctgagctgtaaagtcccatggcatgatggcatgggttgctttgagtacaagatgtggtaccccctcgctcacccaggagatgccaagctgcagaacctggcaaggcagaggctgtggcgccaatgcgtgaaatgcaagcacatgatcgagcttgcggagggctgctaccacatgatctgcgtgtgcggctatgagttctgctacacctgtgggaaagaatggaagaataagaaagcaagctgctcctgcccgctgtgggatgaacgcaacatcatcagagatgaagacgacgatgacgacgaagatgatctttactagagaaggctgtttttgctgctttttttaatgatgatattcagcggctgcatggatacattgaaatgaccacctgatgttgaaattgaaactgctcatcctgtacatgttgggtactgcttatgagcgtgtagctgacactgtcgaaggggggatgacaccgcctccttcttcttcatctggtggctcctgcatcgtggccagctcttcctgcagagtcggatggcgatgcatcggcgtgtccagcaccaccaccacctcgtaggcgtctgccgtacggacctcctgcgctagcgagcacgggtagcagcagagccacagtaggcagtcggtgaggtccggcttgccgcagcaggcgcggttctcggggaggccgaaccgcctgcgcatctggatcctccagaatccgccgtagagcaggccgaacacgcagaggaagatgccggccagccccagcgcgtccctgaccgcctcgtcgtccacgttgatggccgccaggtccaagatgaagaagggcgccaggcacaggagcacgaaggtggcgacgtggacgtacatgttgcccaagccgagcctgctcgcgttccacccgaacacgcagcagctgcagaacagcgacaggtacgccagcgacatgtcgtcccacaggtcctcccacagcccgccgacccactgcggttcttctccttgtccttgccgtggcaccaacgagtagcgcctctcggtgtcgggcgttttgcgctggagctgcgactcttcctcacttattatcatcccctccgccggcgccggcgcctcgtagtctctcccgagaggactgaggttgttgtacatcccagcgacggccggcgcgcagatggcgaccgctacggtgagggcgacaccgaccaccggacgccggggcctccggtagccaaggttgaggccacagagcgcgtactgagcaaagcagttgaggtggagcagcaggatgacagccgtcatgtgcttcctctcgttgggcttgcaggccccgtccttgcagtacgcttggcggagctggtgcatgtcgccggccttccagcggcacacgagggccaggtggtagaacctcctcgggtgctggtacaggcacatgagggtgaagagcgcgttcaggatctggttgttcacctcgaaccacgtgtccctccgcggcttgcttggcagcacgcggttgagcatccccgtcatcaccatgaagaggatggcgcccgagacgccgacggccaggatccagacggacagggccatgttcatggggttccggatccacgccctggacttgacccacagcgacctgctccaccactggatacctcctccaatcatctgtcgggtggaggaagatgatgagactgagttctgctcctgcacggatttctccggcagcagcccccctgtgggaggagtcgtacgttgttggcccaaaacgaccatcttggaggaggatttctgccaaga

SEQ ID NO: 44964 - DNA, 1365 bp, Zea Mays
gcgatcctcaatctggtgtcccacggccgtccgatctcacattcactaccacctgtcccgtcctcccgtcccagtcaacaccaccgtcagttcagctgagcctgagcatggcgtcgccggcggccgtgctcgtcagcaatggcggtatctccccacacgctccaccttccgccgccgccttcctcgtctccactccgggcgcctacaccaccgcccccggaaccctcctctggtggacacgtcacctccgccgcctcgccgaatccgccacgctcctcgcccgttcccgccccaacctgctcggcctccccctcccccgatcgcgcgccctcgacctcgatttactatccatccattctctcgtgaacccctccgtgcgggtcgccatccgcgagatgcgcacaaggctgcccatgaccaaggacgaggatttggcgctcacggccctggtcaggggagccgatcccatttctggcggtggcggggctggcctcgacgtcttcgtccacgtggggacgtattccccgccgatctttggagaatcgggggccaggcttgccgcggccggcaggggaagggacgccgctgccgccaagtacgcgtcctgggccaggatccggaagagtttggaaaagatgaggcctcctggggtcactgagctcttgctgactaatgacggggatcacattcttgaaggcgctgttacaaacttctttgttgtctgccaacagggtgtgccatgatattggaatcccagtacgagaggtctctccatcgtggtccatgaatgaattctggaaggaagcctttgttacaagtagcttaaggtttatccagcatgtagagtcagttcaagtgcctttattttgggaggacatacaatctaaaacctggagtgatgtaccttgggcggtgaagaagtttcagggtgttggatgcattaccacacagattcagagggaattactgaagagagcaagaagtgataagtacggcgttaacggtctcctttgagttatgatcattgttgttgattcatttgaagggacttcttttccaggcacttaattatttcatttctgctgggacgacactgttaagactgggtttcttgtgtgtataattcagacattttttgtctgctcagtgctgtgtcggccttctacaagctgcaggtagatagccactgggcagtagcgaagcaattccatgcttgtttattactgtaattatgaggatggatcagatttagctaactgtcggagtccttttttttacttgtacctgcaattaattgatctgatctgtttgccgggtaggtgttcgtgaatatgaatggctgaatgaatttgggttccttaaatt

SEQ ID NO: 44965 - DNA, 1471 bp, Zea Mays
gtgcgatcctcaatctggtgtcccacggccgtccgatctcacattcactaccacctgtcccgtcctcccgtcccagtcaacaccaccgtcagttcagctgagcctgagcatggcgtcgccggcggccgtgctcgtcagcaatggcggtatctccccacacgctccaccttccgccgccgccttcctcgtctccactccgggcgcctacaccaccgcccccggaaccctcctctggtggacacgtcacctccgccgcctcgccgaatccgccacgctcctcgcccgttcccgccccaacctgctcggcctccccctcccccgatcgcgcgccctcgacctcgatttactatccatccattctctcgtgaacccctccgtgcgggtcgccatccgcgagatgcgcacaaggctgcccatgaccaaggacgaggatttggcgctcacggccctggtcaggggagccgatcccatttctggcggtggcggggctggcctcgacgtcttcgtccacgtggggacgtattccccgccgatctttggagaatcgggggccaggcttgccgcggccggcaggggaagggacgccgctgccgccaagtacgcgtcctgggccaggatccggaagagtttggaaaagatgaggcctcctggggtcactgagctcttgctgactaatgacggggatcacattcttgaaggcgctgttacaaacttctttgttgtctgccaacaggaggaatgcgagagcaacggaaaattctctaatcaaacaatggctactaagtttgaagtgcaaacagcaccactgagtgacggagttctccctgggattatgcgtcagatagtgatcgaggtgtgccatgatattggaatcccagtacgagaggtctctccatcgtggtccatgaatgaattctggaaggaagcctttgttacaagtagcttaaggtttatccagcatgtagagtcagttcaagtgcctttattttgggaggacatacaatctaaaacctggagtgatgtaccttgggcggtgaagaagtttcagggtgttggatgcattaccacacagattcagagagcaagaagtgataagtacggcgttaacggtctcctttgagttatgatcattgttgttgattcatttgaagggacttcttttccaggcacttaattatttcatttctgctgggacgacactgttaagactgggtttcttgtgtgtataattcagacattttttgtctgctcagtgctgtgtcggccttctacaagctgcaggtagatagccactgggcagtagcgaagcaattccatgcttgtttattactgtaattatgaggatggatcagatttagctaactgtcggagtccttttttttacttgtacctgcaattaattgatctgatctgtttgccgggtaggtgttcgtgaatatgaatggctgaatgaatttgggttccttaaatt

SEQ ID NO: 44966 - DNA, 210 bp, Zea Mays
gttgctgttacaagcaggcaggcaggcaggatcgatctagtactagtcctagtactagatcagtgtgttggtggacatggttggagaaaacctggaagcaaggcgatggacatccagctttttctaccactccgtctgcacgcggcgctcgtctttaactagtggtaaagtgaccttaatcgataaagacgggctgacatgggagtttag

SEQ ID NO: 44967 - DNA, 711 bp, Zea Mays
ataataataataataataataataataataataataataataataataataataataataataataataataataataataataataataataataataataataataataataataataataataataataataataataataataataataataataataataataataataataataatatactggttcctttgctagcattacttaatttgtttctcaaaaaaaatgtagtaaacacattaattactacatacaatggactcaaggtacgagtaggttgttctcatctcatctgagacccggctgcatgagcagctcgtcgaaagatgctcctccattctgctccacgctacctgaacccatcctgttgctgcaattggacacgagcacccgctccatggcaatggcgtcctggatctccttgagcacttccgagatgggaggcctctgggcgcccttgggcttcacacacattatggccacctccgcgatcttccacaccgactgcaggtcatagcagcctctgtccaacgactcatcaatgatggcgtggatgttcccgctctcgatgtgcgatcgggcctgcatttatttatttatttatttaacgcttttgcttcagcagaaccaacaggaatactcttctttcttacccacgcaacaatgttccggcagttgagcccaaagttgtcattcgagatgggttca

SEQ ID NO: 44968 - DNA, 2276 bp, Zea Mays
ctctattacccagttctcttatcttgaatatttcttaacttttctcagacatgtgggaatccagattgtctctatttgcatgatgtaggcagtcaggaggatagttttactaaagatgagataatctcagcatatacgaggaccagagtcccccagatggcatctagtgtttcgcaaagacgtacaggcaacatgttgcctcctccaggagatgatttctcttacagtgcagtggtttcagccaagcataccttcaagaatgcaacacttaataccaccaaccagcccagaccttcacctccaaacagtagttctgggaggtccacacttccaccagctgcctcatggggacaacgtgatgtgaacgccaggacaacagctactggggtgacatcatcacaatctcatacaaaaccaaaatcagaatcacagagtaatccattttcaagttcttcagtaatttccagtacaaaaacaccctcttcatggaatgatgatacaagtacagcagcaaaaatgtctgaaggacagcaagtgtcagaaaaagagtccaaaaccttgcagctgtataagcctggtatttcaatggcaacacaagctacatcatcacttgagttatcactgaacatagacttctcgacaataccttcagcttggaatgacgatgagattgtagtatcagatgggatgtcaaaaggaagcgatgaaaatcaagttgcaaatgaaaatggcgagctaacccatccagcatctaagccactagtcttatctaagaaagacataacaatgaaatctaccagtaccagcaaaagtcctccaaatattgtatcaagtctagcaatatctaaatcagatgtaaatactagtgatggtgaccactcacttaccaatattagccttacttcaaatgctgtagtctgccaatctaatcatgttgctggggcgaaaatattggaggatattagatccagggacactgacatggagaagctatctgttcatatatcttcagtaaaattaggtggcaatgatgagattcagattatggcaggaaatcagcgaccagatgtaatgccatgcacatctgttgatgcgcccatgaatcagaatttcgacagagaccaatctcatctcaatcttaatgagcctttgttaccttcagaaaataaggatactgttctttcttgtcaatatagttctgataagcgtcttgattggagttcagagatgcaaaatggtagtgtgactccttcaaataatatagtagattctacgatgctcactggtaaacttcatagtatactactggatgtttcagagcaaccatcatatgcccgattccctagttcattggatacttcattgtgtaatgatacagaaagtaacactgcagcaacgattgacactacaatttcacatatgcagactgagttctcttcaattaataatatgtatgccttgttaaatggaggtcaagatggactcgggactgtaaatacacacggtaatgtttctgaacagcatcctggaatgggaaatcatcaatgtagagcaatgggttcagtaagaactgaagcaatgggttcagtaagaacagatagtataggaagttttgagaagaccataagcataaataaggatgagagcagaataatttctgatatgttatcatcagagtttaatccatgggatgattcatattcgactgctaacaattttgttaggatgcttagggaatctgaaaataatgatgtccacttcgctgtgccttcatggaaatcaggaaccgggaacaaagagtctagattttcatttgctagacaggataaccaagggaacttattggattcatctctcagaaactgtggtactggtaccgagcagaatttcagtttgctaccccagaattctcgaggaaatatctaccagaatggccttgcattccaatctttggagaacgatttttcgaacagcaactctcttggtgtattagatatgttaactactggttcgttctcttgtatgatctgtgaagcttgagtgaaaagaaagattatgtgccgagaacaaagcagctgaagttgaaatatattgagatatgtctataatgtagtgtggtgtggctcttgaacgtgagcgactaagaagatttggtgggcttgacttgatgatggcagtgttttcttgtgttggtacatgatgatggtgttggtcggtggctgcctggccagtacatgcgttttgccataataatacccatggtataataataataa

SEQ ID NO: 44969 - DNA, 3460 bp, Zea Mays
atattacttatgccaaagaagaagaagccatccagtgtattcaagctgtacacaattttgtcttggaagggaaagtgttaagggcatgctttggtactacgaagtattgccatgcatggctgagaaacatgattgtctctatttgcatgatgtaggcagtcaggaggatagttttactaaagatgagataatctcagcatatacgaggaccagagtcccccagatggcatctagtgtttcgcaaagacgtacaggcaacatgttgcctcctccaggagatgatttctcttacagtgcagtggtttcagccaagcataccttcaagaatgcaacacttaataccaccaaccagcccagaccttcacctccaaacagtagttctgggaggtccacacttccaccagctgcctcatggggacaacgtgatgtgaacgccaggacaacagctactggggtgacatcatcacaatctcatacaaaaccaaaatcagaatcacagagtaatccattttcaagttcttcagtaatttccagtacaaaaacaccctcttcatggaatgatgatacaagtacagcagcaaaaatgtctgaaggacagcaagtgtcagaaaaagagtccaaaaccttgcagctgtataagcctggtatttcaatggcaacacaagctacatcatcacttgagttatcactgaacatagacttctcgacaataccttcagcttggaatgacgatgagattgtagtatcagatgggatgtcaaaaggaagcgatgaaaatcaagttgcaaatgaaaatggcgagctaacccatccagcatctaagccactagtcttatctaagaaagacataacaatgaaatctaccagtaccagcaaaagtcctccaaatattgtatcaagtctagcaatatctaaatcagatgtaaatactagtgatggtgaccactcacttaccaatattagccttacttcaaatgctgtagtctgccaatctaatcatgttgctggggcgaaaatattggaggatattagatccagggacactgacatggagaagctatctgttcatatatcttcagtaaaattaggtggcaatgatgagattcagattatggcaggaaatcagcgaccagatgtaatgccatgcacatctgttgatgcgcccatgaatcagaatttcgacagagaccaatctcatctcaatcttaatgagcctttgttaccttcagaaaataaggatactgttctttcttgtcaatatagttctgataagcgtcttgattggagttcagagatgcaaaatggtagtgtgactccttcaaataatatagtagattctacgatgctcactggtaaacttcatagtatactactggatgtttcagagcaaccatcatatgcccgattccctagttcattggatacttcattgtgtaatgatacagaaagtaacactgcagcaacgattgacactacaatttcacatatgcagactgagttctcttcaattaataatatgtatgccttgttaaatggaggtcaagatggactcgggactgtaaatacacacggtaatgtttctgaacagcatcctggaatgggaaatcatcaatgtagagcaatgggttcagtaagaactgaagcaatgggttcagtaagaacagatagtataggaagttttgagaagaccataagcataaataaggatgagagcagaataatttctgatatgttatcatcagagtttaatccatgggatgattcatattcgactgctaacaattttgttaggatgcttagggaatctgaaaataatgatgtccacttcgctgtgccttcatggaaatcaggaaccgggaacaaagagtctagattttcatttgctagacaggataaccaagggaacttattggattcatctctcagaaactgtggtactggtaccgagcagaatttcagtttgctaccccagaattctcgaggaaatatctaccagaatggccttgcattccaatctttggagaacgatttttcgaacagcaactctcttggtgtattagatatgttaactactggtacatcgaggtctaaaatatctgcgcccccaggattttcagcaccagcaagagtcccccctcctggattttctactgcacttccatcccaggagtttccttctggaatttcgtctcatgatgggtctatagcccttcctagattcccttgggcattttcttctcaaatttcagcccaggaactgtctaagccccctagtagactgccttctccattttcttctggtttttcatctctggatgggcctaattcctcgtctaggtttccttctgcatttccttctggattttcatcacagaatggccctaacccttcatctggattccctttttcttctgggttttcatcacaggatgggtctaatcagtcgtatggctcaacaaacccagaaaatcttctccggaatactgttctgggtggcagtagtaatcattatcaatctcagtttggaaggcactcaagtgacatggagttcgatgatcctgctatattagctgtgggcaaagggctgatgcctggaattggcgattcagggctggagatgaaaaatactcctgcttttcaagcacagttgcaaccagcaagcagtgatccaagatttcacttacatatacagccaaatgtgcagtctcaccaaaacatgggattcgcagaccatatgcaggatggtttgaaccatatgaatgataatagatttttaggtcagaaccatggtcctctatccccttatgtgcagattccgcaacaacccagaaactcgcaggttacaaatggtcactgggatgggtggagtgattcgagacaagggaatagcactcctatgtcagacatgtcgaggatattatatccaagtgaagtgaacaagttgcacatgctgggttcaaatgatatctataacagagcctttggaatgtgatcatctcctgggataatgtgtgagtttgagctgacatgttctgacttgggggcgttctgtggaagtaactggttgcacaacacagtatacctgatgtggataatggtggttgtgcttatgagctggtacacgagtattttttgctattggaatttacaaaaacgaacctgagttttggttcagctatttgaaattaccaggttcgttctcttgtatgatctgtgaagcttgagtgaaaagaaagattatgtgccgagaacaaagcagctgaagttgaaatatattgagatatgtctataatgtagtgtggtgtggctcttgaacgtgagcgactaagaagatttggtgggcttgacttgatgatggcagtgttttcttgtgttggtacatgatgatggtgttggtcggtggctgcctggccagtacatgcgttttgccataataatacccatggtataataataataa

SEQ ID NO: 44970 - DNA, 3476 bp, Zea Mays
atattacttatgccaaagaagaagaagccatccagtgtattcaagctgtacacaattttgtcttggaagggaaagtgttaagggcatgctttggtactacgaagtattgccatgcatggctgagaaacatgacatgtgggaatccagattgtctctatttgcatgatgtaggcagtcaggaggatagttttactaaagatgagataatctcagcatatacgaggaccagagtcccccagatggcatctagtgtttcgcaaagacgtacaggcaacatgttgcctcctccaggagatgatttctcttacagtgcagtggtttcagccaagcataccttcaagaatgcaacacttaataccaccaaccagcccagaccttcacctccaaacagtagttctgggaggtccacacttccaccagctgcctcatggggacaacgtgatgtgaacgccaggacaacagctactggggtgacatcatcacaatctcatacaaaaccaaaatcagaatcacagagtaatccattttcaagttcttcagtaatttccagtacaaaaacaccctcttcatggaatgatgatacaagtacagcagcaaaaatgtctgaaggacagcaagtgtcagaaaaagagtccaaaaccttgcagctgtataagcctggtatttcaatggcaacacaagctacatcatcacttgagttatcactgaacatagacttctcgacaataccttcagcttggaatgacgatgagattgtagtatcagatgggatgtcaaaaggaagcgatgaaaatcaagttgcaaatgaaaatggcgagctaacccatccagcatctaagccactagtcttatctaagaaagacataacaatgaaatctaccagtaccagcaaaagtcctccaaatattgtatcaagtctagcaatatctaaatcagatgtaaatactagtgatggtgaccactcacttaccaatattagccttacttcaaatgctgtagtctgccaatctaatcatgttgctggggcgaaaatattggaggatattagatccagggacactgacatggagaagctatctgttcatatatcttcagtaaaattaggtggcaatgatgagattcagattatggcaggaaatcagcgaccagatgtaatgccatgcacatctgttgatgcgcccatgaatcagaatttcgacagagaccaatctcatctcaatcttaatgagcctttgttaccttcagaaaataaggatactgttctttcttgtcaatatagttctgataagcgtcttgattggagttcagagatgcaaaatggtagtgtgactccttcaaataatatagtagattctacgatgctcactggtaaacttcatagtatactactggatgtttcagagcaaccatcatatgcccgattccctagttcattggatacttcattgtgtaatgatacagaaagtaacactgcagcaacgattgacactacaatttcacatatgcagactgagttctcttcaattaataatatgtatgccttgttaaatggaggtcaagatggactcgggactgtaaatacacacggtaatgtttctgaacagcatcctggaatgggaaatcatcaatgtagagcaatgggttcagtaagaactgaagcaatgggttcagtaagaacagatagtataggaagttttgagaagaccataagcataaataaggatgagagcagaataatttctgatatgttatcatcagagtttaatccatgggatgattcatattcgactgctaacaattttgttaggatgcttagggaatctgaaaataatgatgtccacttcgctgtgccttcatggaaatcaggaaccgggaacaaagagtctagattttcatttgctagacaggataaccaagggaacttattggattcatctctcagaaactgtggtactggtaccgagcagaatttcagtttgctaccccagaattctcgaggaaatatctaccagaatggccttgcattccaatctttggagaacgatttttcgaacagcaactctcttggtgtattagatatgttaactactggtacatcgaggtctaaaatatctgcgcccccaggattttcagcaccagcaagagtcccccctcctggattttctactgcacttccatcccaggagtttccttctggaatttcgtctcatgatgggtctatagcccttcctagattcccttgggcattttcttctcaaatttcagcccaggaactgtctaagccccctagtagactgccttctccattttcttctggtttttcatctctggatgggcctaattcctcgtctaggtttccttctgcatttccttctggattttcatcacagaatggccctaacccttcatctggattccctttttcttctgggttttcatcacaggatgggtctaatcagtcgtatggctcaacaaacccagaaaatcttctccggaatactgttctgggtggcagtagtaatcattatcaatctcagtttggaaggcactcaagtgacatggagttcgatgatcctgctatattagctgtgggcaaagggctgatgcctggaattggcgattcagggctggagatgaaaaatactcctgcttttcaagcacagttgcaaccagcaagcagtgatccaagatttcacttacatatacagccaaatgtgcagtctcaccaaaacatgggattcgcagaccatatgcaggatggtttgaaccatatgaatgataatagatttttaggtcagaaccatggtcctctatccccttatgtgcagattccgcaacaacccagaaactcgcaggttacaaatggtcactgggatgggtggagtgattcgagacaagggaatagcactcctatgtcagacatgtcgaggatattatatccaagtgaagtgaacaagttgcacatgctgggttcaaatgatatctataacagagcctttggaatgtgatcatctcctgggataatgtgtgagtttgagctgacatgttctgacttgggggcgttctgtggaagtaactggttgcacaacacagtatacctgatgtggataatggtggttgtgcttatgagctggtacacgagtattttttgctattggaatttacaaaaacgaacctgagttttggttcagctatttgaaattaccaggttcgttctcttgtatgatctgtgaagcttgagtgaaaagaaagattatgtgccgagaacaaagcagctgaagttgaaatatattgagatatgtctataatgtagtgtggtgtggctcttgaacgtgagcgactaagaagatttggtgggcttgacttgatgatggcagtgttttcttgtgttggtacatgatgatggtgttggtcggtggctgcctggccagtacatgcgttttgccataataatacccatggtataataataataa

SEQ ID NO: 44971 - DNA, 3436 bp, Zea Mays
atattacttatgccaaagaagaagaagccatccagtgtattcaagctgtacacaattttgtcttggaagggaaagtgttaagggcatgctttggtactacgaagtattgccatgcatggctgagaaacatggcagtcaggaggatagttttactaaagatgagataatctcagcatatacgaggaccagagtcccccagatggcatctagtgtttcgcaaagacgtacaggcaacatgttgcctcctccaggagatgatttctcttacagtgcagtggtttcagccaagcataccttcaagaatgcaacacttaataccaccaaccagcccagaccttcacctccaaacagtagttctgggaggtccacacttccaccagctgcctcatggggacaacgtgatgtgaacgccaggacaacagctactggggtgacatcatcacaatctcatacaaaaccaaaatcagaatcacagagtaatccattttcaagttcttcagtaatttccagtacaaaaacaccctcttcatggaatgatgatacaagtacagcagcaaaaatgtctgaaggacagcaagtgtcagaaaaagagtccaaaaccttgcagctgtataagcctggtatttcaatggcaacacaagctacatcatcacttgagttatcactgaacatagacttctcgacaataccttcagcttggaatgacgatgagattgtagtatcagatgggatgtcaaaaggaagcgatgaaaatcaagttgcaaatgaaaatggcgagctaacccatccagcatctaagccactagtcttatctaagaaagacataacaatgaaatctaccagtaccagcaaaagtcctccaaatattgtatcaagtctagcaatatctaaatcagatgtaaatactagtgatggtgaccactcacttaccaatattagccttacttcaaatgctgtagtctgccaatctaatcatgttgctggggcgaaaatattggaggatattagatccagggacactgacatggagaagctatctgttcatatatcttcagtaaaattaggtggcaatgatgagattcagattatggcaggaaatcagcgaccagatgtaatgccatgcacatctgttgatgcgcccatgaatcagaatttcgacagagaccaatctcatctcaatcttaatgagcctttgttaccttcagaaaataaggatactgttctttcttgtcaatatagttctgataagcgtcttgattggagttcagagatgcaaaatggtagtgtgactccttcaaataatatagtagattctacgatgctcactggtaaacttcatagtatactactggatgtttcagagcaaccatcatatgcccgattccctagttcattggatacttcattgtgtaatgatacagaaagtaacactgcagcaacgattgacactacaatttcacatatgcagactgagttctcttcaattaataatatgtatgccttgttaaatggaggtcaagatggactcgggactgtaaatacacacggtaatgtttctgaacagcatcctggaatgggaaatcatcaatgtagagcaatgggttcagtaagaactgaagcaatgggttcagtaagaacagatagtataggaagttttgagaagaccataagcataaataaggatgagagcagaataatttctgatatgttatcatcagagtttaatccatgggatgattcatattcgactgctaacaattttgttaggatgcttagggaatctgaaaataatgatgtccacttcgctgtgccttcatggaaatcaggaaccgggaacaaagagtctagattttcatttgctagacaggataaccaagggaacttattggattcatctctcagaaactgtggtactggtaccgagcagaatttcagtttgctaccccagaattctcgaggaaatatctaccagaatggccttgcattccaatctttggagaacgatttttcgaacagcaactctcttggtgtattagatatgttaactactggtacatcgaggtctaaaatatctgcgcccccaggattttcagcaccagcaagagtcccccctcctggattttctactgcacttccatcccaggagtttccttctggaatttcgtctcatgatgggtctatagcccttcctagattcccttgggcattttcttctcaaatttcagcccaggaactgtctaagccccctagtagactgccttctccattttcttctggtttttcatctctggatgggcctaattcctcgtctaggtttccttctgcatttccttctggattttcatcacagaatggccctaacccttcatctggattccctttttcttctgggttttcatcacaggatgggtctaatcagtcgtatggctcaacaaacccagaaaatcttctccggaatactgttctgggtggcagtagtaatcattatcaatctcagtttggaaggcactcaagtgacatggagttcgatgatcctgctatattagctgtgggcaaagggctgatgcctggaattggcgattcagggctggagatgaaaaatactcctgcttttcaagcacagttgcaaccagcaagcagtgatccaagatttcacttacatatacagccaaatgtgcagtctcaccaaaacatgggattcgcagaccatatgcaggatggtttgaaccatatgaatgataatagatttttaggtcagaaccatggtcctctatccccttatgtgcagattccgcaacaacccagaaactcgcaggttacaaatggtcactgggatgggtggagtgattcgagacaagggaatagcactcctatgtcagacatgtcgaggatattatatccaagtgaagtgaacaagttgcacatgctgggttcaaatgatatctataacagagcctttggaatgtgatcatctcctgggataatgtgtgagtttgagctgacatgttctgacttgggggcgttctgtggaagtaactggttgcacaacacagtatacctgatgtggataatggtggttgtgcttatgagctggtacacgagtattttttgctattggaatttacaaaaacgaacctgagttttggttcagctatttgaaattaccaggttcgttctcttgtatgatctgtgaagcttgagtgaaaagaaagattatgtgccgagaacaaagcagctgaagttgaaatatattgagatatgtctataatgtagtgtggtgtggctcttgaacgtgagcgactaagaagatttggtgggcttgacttgatgatggcagtgttttcttgtgttggtacatgatgatggtgttggtcggtggctgcctggccagtacatgcgttttgccataataatacccatggtataataataataa

SEQ ID NO: 44972 - DNA, 1120 bp, Zea Mays
ctctcttcctcttcttcctctgcagcaccccgcagaccagacgcaggcacaccgcaccgtgccccctccctgttcatcgcccgcaccccaacaacaaggaacaggccggagtccagccatccgaccttgaatccgcttgccctcctgcttgatcccaccgccacgcgccacctcaatcgcccactcctccctcaccctctagggttccctgccgctcccacaaatcacgcaatcggagacccccggtccgccctccaattccgggcgtatatccccgtaccagaggaatccggtggaattcgctctcgaggattgtgatatctttctgcccatagatttaaggttggatggctgatttattagaatcggtcaaggttcgatgccctctgtgtcttctacacttcaatctctcatgtatcagtttatcctgcctgtgctgtgctcgaatatttgagatctcaagttcctgatactgtaccttaaggattgaatgatgtcttatctgtttgaatcttggccatcttcttattcttccgcatgcataatacaacacttgggtggtcgtttctcctcacgctggctgacttccaatccaccaggacgaccatgagcgatgatggcgaccgcacctgcccgctctgtgctgaggagatggacatcactgaccagcaactcaagccatgcaaatgcggctatgatatttgtgtttggtgctggcaccacatcatagacatggctgagaaggaggaaacagagggccgctgccctgcctgccgcacacgctatgacaaggataggatcgtcaagatggccgccacttgtgacaggacagtggcagataaaaatgcggagaagaagcaaaaggcccaaagggttaagccaaaggcagcaccaacagcaacaacaacatcaaccgtagaatctaagaagcatcttgctactgtcagggttatccagagaaatctggtgtacataattgggctacctgcgcatttatgcaatgagagcgtacttgagcgcagggagtactttggtcaatatgggaaagttttgaaggtttcagtttcccgtccgactgggcctccctctcagcaggcatcagcaaacagcagtattagtg

SEQ ID NO: 44973 - DNA, 652 bp, Zea Mays
cgagtatcccaccatctctcttcctcttcttcctctgcagcaccccgcagaccagacgcaggcacaccgcaccgtgccccctccctgttcatcgcccgcaccccaacaacaaggaacaggccggagtccagccatccgaccttgaatccgcttgccctcctgcttgatcccaccgccacgcgccacctcaatcgcccactcctccctcaccctctagggttccctgccgctcccacaaatcacgcaatcggagacccccggtccgccctccaatgacgaccatgagcgatgatggcgaccgcacctgcccgctctgtgctgaggagatggacatcactgaccagcaactcaagccatgcaaatgcggctatgatacatggctgagaaggaggaaacagagggccgctgccctgcctgccgcacacgctatgacaaggataggatcgtcaagatggccgccacttgtgacaggacagtggcagataaaaatgcggagaagaagcaaaaggcccaaagggttaagccaaaggcagcaccaacagcaacaacaacatcaaccgtagaatctaagaagcatcttgctactgtcagggttatccagagaaatctggtgtacataattgggctacctgcgcatttatgcaatgagagc

SEQ ID NO: 44974 - DNA, 1081 bp, Zea Mays
acatggaagggagacaggcgaatagaggacagctgagctgcagcatcccgtccaacagcaggaccagcgagggtgtacctccgcctcgcgagtcgggaccatgtggacgggcagcccgctgctccgggacgttggcgccgccgtgctcacgggagtgggcgcggctgccgtgctccgcttctgggaagagatcgccaaccgcgccctgctggaccagtgattggacttggtttcgtgaaagctgaaggtgtggttaactccatgactaggcatggagaccgcagagaacttctcaagggcccgctgtattatgcctgtgctataactctgacaacaatagttttctggaggacatctcccatctcaatcgcggtgatctgcaatttgtgtgccggagacggtgttgctgacatagctgggagacgattcgggcatgttaagctccctcacaaccctgaaaaatcatatgccgggagcatcgcaatgttcttggcaggtttcatcgcatcagtactgttcatgtgctacttcaacattttcgggtttgttgagaagagctggaccatggttgctgcctttggtgtgatatccctggctgcagcagttgtggagtcactcccgatcagcacacgccttgacgacaatctgacggtttctgtcgcatcagtgctagttggcgcccttgttttctattccattggagccagaaacctgtgctgcatgagcagcgaagtcaggagaagtatcccagcaaccgttggaatggtgtttgcaggcagcagctgaaacatgtagccacagtccaggagcagagttgagcagaaagtgcagagaaaggagttcttcaatcctgatgtgtgtgtatcttgtactgtaaccattttcctgtctaagcagacattcttgtaactttattaagaaagaggtaaagcgagaataagtttattagggaaaacagaggatgagctctcataagcaaatgcaaattacagcgtgaaagttatgcgattggtgaaaagggagatgaaactgagcaaaaagaaatctagaagagaaaggaaaatatataaaaaataaataa

SEQ ID NO: 44975 - DNA, 1144 bp, Zea Mays
acatggaagggagacaggcgaatagaggacagctgagctgcagcatcccgtccaacagcaggaccagcgagggtgtacctccgcctcgcgagtcgggaccatgtggacgggcagcccgctgctccgggacgttggcgccgccgtgctcacgggagtgggcgcggctgccgtgctccgcttctgggaagagatcgccaaccgcgccctgctggaccagatgatgtgtttgctccatctctcgctccgcttatcatcatcatcaacatcatgaaagtgacagtgattggacttggtttcgtgaaagctgaaggtgtggttaactccatgactaggcatggagaccgcagagaacttctcaagggcccgctgtattatgcctgtgctataactctgacaacaatagttttctggaggacatctcccatctcaatcgcggtgatctgcaatttgtgtgccggagacggtgttgctgacatagctgggagacgattcgggcatgttaagctccctcacaaccctgaaaaatcatatgccgggagcatcgcaatgttcttggcaggtttcatcgcatcagtactgttcatgtgctacttcaacattttcgggtttgttgagaagagctggaccatggttgctgcctttggtgtgatatccctggctgcagcagttgtggagtcactcccgatcagcacacgccttgacgacaatctgacggtttctgtcgcatcagtgctagttggcgcccttgttttctattccattggagccagaaacctgtgctgcatgagcagcgaagtcaggagaagtatcccagcaaccgttggaatggtgtttgcaggcagcagctgaaacatgtagccacagtccaggagcagagttgagcagaaagtgcagagaaaggagttcttcaatcctgatgtgtgtgtatcttgtactgtaaccattttcctgtctaagcagacattcttgtaactttattaagaaagaggtaaagcgagaataagtttattagggaaaacagaggatgagctctcataagcaaatgcaaattacagcgtgaaagttatgcgattggtgaaaagggagatgaaactgagcaaaaagaaatctagaagagaaaggaaaatatataaaaaataaataa

SEQ ID NO: 44976 - DNA, 1554 bp, Zea Mays
ctattttgaatatatttcatgtgtggagtaaaacagaacatggaagggagacaggcgaatagaggacagctgagctgcagcatcccgtccaacagcaggaccagcgagggtgtacctccgcctcgcgagtcgggaccatgtggacgggcagcccgctgctccgggacgttggcgccgccgtgctcacgggagtgggcgcggctgccgtgctccgcttctgggaagagatcgccaaccgcgccctgctggaccaggtcacgcttttcctttgtttttttccccagtttctgtgctccgtataaaatccggtatctattgcttgcgctaacaagtacagtagtaattgaagttttggtttcgattcgttccaaattgccctgaaccccaccctcgatagtcaacccaccaagctctagcagtactgcagcttcactagtcataattataatcaaacttttattagctatcaccttcgaagcctattgatatcattttccctttcaagatgaatctactgattgatctctgtatatgtctttctctgtgcattctagaaactctgcaggaaactggtgcacataactgtaggattagtgtttttccttatgtggcctttgttcagctcagatgatgtgtttgctccatctctcgctccgcttatcatcatcatcaacatcatgaaagtgacagtgattggacttggtttcgtgaaagctgaaggtgtggttaactccatgactaggcatggagaccgcagagaacttctcaagggcccgctgtattatgcctgtgctataactctgacaacaatagttttctggaggacatctcccatctcaatcgcggtgatctgcaatttgtgtgccggagacggtgttgctgacatagctgggagacgattcgggcatgttaagctccctcacaaccctgaaaaatcatatgccgggagcatcgcaatgttcttggcaggtttcatcgcatcagtactgttcatgtgctacttcaacattttcgggtttgttgagaagagctggaccatggttgctgcctttggtgtgatatccctggctgcagcagttgtggagtcactcccgatcagcacacgccttgacgacaatctgacggtttctgtcgcatcagtgctagttggcgcccttgttttctattccattggagccagaaacctgtgctgcatgagcagcgaagtcaggagaagtatcccagcaaccgttggaatggtgtttgcaggcagcagctgaaacatgtagccacagtccaggagcagagttgagcagaaagtgcagagaaaggagttcttcaatcctgatgtgtgtgtatcttgtactgtaaccattttcctgtctaagcagacattcttgtaactttattaagaaagaggtaaagcgagaataagtttattagggaaaacagaggatgagctctcataagcaaatgcaaattacagcgtgaaagttatgcgattggtgaaaagggagatgaaactgagcaaaaagaaatctagaagagaaaggaaaatatataaaaaataaataa

SEQ ID NO: 44977 - DNA, 1549 bp, Zea Mays
ctattttgaatatatttcatgtgtggagtaaaacagaacatggaagggagacaggcgaatagaggacagctgagctgcagcatcccgtccaacagcaggaccagcgagggtgtacctccgcctcgcgagtcgggaccatgtggacgggcagcccgctgctccgggacgttggcgccgccgtgctcacgggagtgggcgcggctgccgtgctccgcttctgggaagagatcgccaaccgcgccctgctggaccaggtcacgcttttcctttgtttttttccccagtttctgtgctccgtataaaatccggtatctattgcttgcgctaacaagtacagtagtaattgaagttttggtttcgattcgttccaaattgccctgaaccccaccctcgatagtcaacccaccaagctctagcagtactgcagcttcactagtcataattataatcaaacttttattagctatcaccttcgaagcctattgatatcattttccctttcaagatgaatctactgattgatctctgtatatgtctttctctgtgcattctagaaactctgcaggaaactggtgcacataactgtaggattagtgtttttccttatgtggcctttgttcagatgatgtgtttgctccatctctcgctccgcttatcatcatcatcaacatcatgaaagtgacagtgattggacttggtttcgtgaaagctgaaggtgtggttaactccatgactaggcatggagaccgcagagaacttctcaagggcccgctgtattatgcctgtgctataactctgacaacaatagttttctggaggacatctcccatctcaatcgcggtgatctgcaatttgtgtgccggagacggtgttgctgacatagctgggagacgattcgggcatgttaagctccctcacaaccctgaaaaatcatatgccgggagcatcgcaatgttcttggcaggtttcatcgcatcagtactgttcatgtgctacttcaacattttcgggtttgttgagaagagctggaccatggttgctgcctttggtgtgatatccctggctgcagcagttgtggagtcactcccgatcagcacacgccttgacgacaatctgacggtttctgtcgcatcagtgctagttggcgcccttgttttctattccattggagccagaaacctgtgctgcatgagcagcgaagtcaggagaagtatcccagcaaccgttggaatggtgtttgcaggcagcagctgaaacatgtagccacagtccaggagcagagttgagcagaaagtgcagagaaaggagttcttcaatcctgatgtgtgtgtatcttgtactgtaaccattttcctgtctaagcagacattcttgtaactttattaagaaagaggtaaagcgagaataagtttattagggaaaacagaggatgagctctcataagcaaatgcaaattacagcgtgaaagttatgcgattggtgaaaagggagatgaaactgagcaaaaagaaatctagaagagaaaggaaaatatataaaaaataaataa

SEQ ID NO: 44978 - DNA, 1582 bp, Zea Mays
ctattttgaatatatttcatgtgtggagtaaaacagaacatggaagggagacaggcgaatagaggacagctgagctgcagcatcccgtccaacagcaggaccagcgagggtgtacctccgcctcgcgagtcgggaccatgtggacgggcagcccgctgctccgggacgttggcgccgccgtgctcacgggagtgggcgcggctgccgtgctccgcttctgggaagagatcgccaaccgcgccctgctggaccaggtcacgcttttcctttgtttttttccccagtttctgtgctccgtataaaatccggtatctattgcttgcgctaacaagtacagtagtaattgaagttttggtttcgattcgttccaaattgccctgaaccccaccctcgatagtcaacccaccaagctctagcagtactgcagcttcactagtcataattataatcaaacttttattagctatcaccttcgaagcctattgatatcattttccctttcaagatgaatctactgattgatctctgtatatgtctttctctgtgcattctagaaactctgcaggaaactggtgcacataactgtaggattagtgtttttccttatgtggcctttgttcagttcctttccttgctcatttcgttttcagctcagatgatgtgtttgctccatctctcgctccgcttatcatcatcatcaacatcatgaaagtgacagtgattggacttggtttcgtgaaagctgaaggtgtggttaactccatgactaggcatggagaccgcagagaacttctcaagggcccgctgtattatgcctgtgctataactctgacaacaatagttttctggaggacatctcccatctcaatcgcggtgatctgcaatttgtgtgccggagacggtgttgctgacatagctgggagacgattcgggcatgttaagctccctcacaaccctgaaaaatcatatgccgggagcatcgcaatgttcttggcaggtttcatcgcatcagtactgttcatgtgctacttcaacattttcgggtttgttgagaagagctggaccatggttgctgcctttggtgtgatatccctggctgcagcagttgtggagtcactcccgatcagcacacgccttgacgacaatctgacggtttctgtcgcatcagtgctagttggcgcccttgttttctattccattggagccagaaacctgtgctgcatgagcagcgaagtcaggagaagtatcccagcaaccgttggaatggtgtttgcaggcagcagctgaaacatgtagccacagtccaggagcagagttgagcagaaagtgcagagaaaggagttcttcaatcctgatgtgtgtgtatcttgtactgtaaccattttcctgtctaagcagacattcttgtaactttattaagaaagaggtaaagcgagaataagtttattagggaaaacagaggatgagctctcataagcaaatgcaaattacagcgtgaaagttatgcgattggtgaaaagggagatgaaactgagcaaaaagaaatctagaagagaaaggaaaatatataaaaaataaataa

SEQ ID NO: 44979 - DNA, 1647 bp, Zea Mays
ctattttgaatatatttcatgtgtggagtaaaacagaacatggaagggagacaggcgaatagaggacagctgagctgcagcatcccgtccaacagcaggaccagcgagggtgtacctccgcctcgcgagtcgggaccatgtggacgggcagcccgctgctccgggacgttggcgccgccgtgctcacgggagtgggcgcggctgccgtgctccgcttctgggaagagatcgccaaccgcgccctgctggaccaggtcacgcttttcctttgtttttttccccagtttctgtgctccgtataaaatccggtatctattgcttgcgctaacaagtacagtagtaattgaagttttggtttcgattcgttccaaattgccctgaaccccaccctcgatagtcaacccaccaagctctagcagtactgcagcttcactagtcataattataatcaaacttttattagctatcaccttcgaagcctattgatatcattttccctttcaagatgaatctactgattgatctctgtatatgtctttctctgtgcattctagaaactctgcaggaaactggtgcacataactgtaggattagtgtttttccttatgtggcctttgttcaggtaaagtaaaaattaggccaccagcaaagacaaaaattcctcctcctccagtcgtagcgtatcaacctgactgcatacaaatagttcctttccttgctcatttcgttttcagctcagatgatgtgtttgctccatctctcgctccgcttatcatcatcatcaacatcatgaaagtgacagtgattggacttggtttcgtgaaagctgaaggtgtggttaactccatgactaggcatggagaccgcagagaacttctcaagggcccgctgtattatgcctgtgctataactctgacaacaatagttttctggaggacatctcccatctcaatcgcggtgatctgcaatttgtgtgccggagacggtgttgctgacatagctgggagacgattcgggcatgttaagctccctcacaaccctgaaaaatcatatgccgggagcatcgcaatgttcttggcaggttcatgtgctacttcaacattttcgggtttgttgagaagagctggaccatggttgctgcctttggtgtgatatccctggctgcagcagttgtggagtcactcccgatcagcacacgccttgacgacaatctgacggtttctgtcgcatcagtgctagttggcgcccttgttttctattccattggagccagaaacctgtgctgcatgagcagcgaagtcaggagaagtatcccagcaaccgttggaatggtgtttgcaggcagcagctgaaacatgtagccacagtccaggagcagagttgagcagaaagtgcagagaaaggagttcttcaatcctgatgtgtgtgtatcttgtactgtaaccattttcctgtctaagcagacattcttgtaactttattaagaaagaggtaaagcgagaataagtttattagggaaaacagaggatgagctctcataagcaaatgcaaattacagcgtgaaagttatgcgattggtgaaaagggagatgaaactgagcaaaaagaaatctagaagagaaaggaaaatatataaaaaataaataa

SEQ ID NO: 44980 - DNA, 1109 bp, Zea Mays
ctctggtttaggataggatctgaatgcccaagtgcctcagaggagagtctgcgtgtgtggtactggtagtctggtaatggtagagcaaggaaagtaacaaaagctcgcggttgtccagaactggaatttattctgcgtctgaacatagttgtatgactgtatgagttgaagctttcagtatgtgcatcgatggatgatgatagattcaaagactggtagcaattctacaaatttaggacgacttatatagaatagaaggctagctattgttagtaaatgtttggttatgtatcaagctatgttgtagttatgttcatgcttgagcttgacatagttggaagctaataatctgttgtctatttctgatatgtgcctctcttttttattgatttcagctatggagctggctctggccctggaaaagctggtcaatgagaagctgcacaacctgcatggtgtggcaacaaggtgcaatgatcctcagctgacagacttcatcgagagtgagttcctcgaggagcaggtggaagccataaacaagatctccaagtatgtcgcccagctgaggagagtgggcaaggggcacggggtgtggcacttcgatcagatgctgcttgaggaagaggcctaaaaagaagaacggacagatgaatgaaggaaacaagtgtgtaatgttgatcaggcggaggaataataatgggtcaactgacaactctgggtcggtggatttgtagttggtttgggttttttagttgtagaacggtgttgccctcctagagagggatgaacacattatgcatgcgatgtgtcagttcggtcggtgctatgctcgttgggatttgattgtcggaaataaaacatgggtgatgaatgtgtaccctccctaatctatgaagttgagaaagccctgcgggtgtaggtggatttgtagaggtttttcttcagttggttaggttcgctgttgcctacctcatttgcccctaatcatcatcgccgtaatttatttataataaaaaagatccagcttttccccctctcatggctgatttgtagaggccgcgctgtagtcggagactcgaggaggagcccgaagcggtcagggagctcgt

SEQ ID NO: 44981 - DNA, 1072 bp, Zea Mays
cccatttccatcccattcatctccgccagaggagggaggcgagccgcgtttttcatttcgaaatcaaaccacgacgatgccgcaggcgatggcggacgccgcgacgctctccgccctcgctctctttgcctcccgcctctcctgtcgcaggttcggggacgaggacctccgggtgctggaggccgcgctgtccgccggcgccgacgtccccgcgctgctcgccacgcgctcggcggcccggcgcctgctgcgatcgagcgcggcggaggcactcgcgttcaccgcggcgggtgcatcgctggatggtggggatgagagacggagcctcgccgtcgccgacttcttctcacgcgccttcgcgcttgtaggcgatgtcgagagctgccttgccatgagatacgaggcactgttgcttcgagacgctaaatactgcaacgaccttcacttgcaagtgtcccgtcaggagtggctaacttttgcaacggattgtcttgataatggcttctacaccattgcctccaaggcttttgcaaatgctcttgtgcacattcatccaagccacacagggcacttggactctgctaattccattgaggagaaggacaagatcattgaaataaaaggactccagaacttggccaagtcattatctgcacagcattgtgttcagataaagtctgctgaatacatggaaaggagagcttcaggtgttcacgagaagtataatttgcaatcaggaaaaccaaagttaacaggaagttcaatgttcaggctagggattaaaacgaggaacataaagaaattgcttcgtagccaggaaaggaacttgggggatttaaagcaatcttagcgttgcatcttccaaccgagaggaatgttgtaaaaagatcagttaggtgacaatttatgcaaatggagacatgaagtggagttatggatgggtctttgattcaacattaagacaaatacgttgaagagtagttgcatcctttggtagcatactcactgtgcaaaacgtaactaggcaatgaatctatcaagctgttcaaaaagacatggagctcgatccggg

SEQ ID NO: 44982 - DNA, 1011 bp, Zea Mays
ctctcaagtgatgcatacatgcacttcatattgccgactgctgcagcaagtggaaaacggagaacgctgcaggttacaccatggccggcagcggcagcggcagcccgccctgcgcatcgtgcaagctgctgcggcggcggtgcacgcaggagtgcgtgttcgcaccctacttccctcccgatgacccccacaagttcgccatcgtccataaggtcttcggagccagcaatgtcagcaagatgctgcagcagagagcggacgccgtgagcagcctggtgtacgaggccaacgcgcgcatgagggaccccgtgtacggctgcgtgggcgccatctcctacctccagcagcaggtctcccagctccaggtgcagctcgccctcgccaaggccgagatcctctgcgtccagatgcagcacgacgagtcagctgcagcttctgccgcgccagcaccggcaaagcaacaacaactctatcaccaccaccagcagcagcagacgatggagtgcgaggcttacggcagcctgctcgtgcagaatggtctgatgatgaacacgttgggcagcgctggtgcagctcatcagcagcagcagatgctgggtggcttcggctctgcggggaacactgcaatggcgctgcaggaggcgtgcctcaagaaagagaccctttgggcatgagtgggtacctccatttgtcgtcgacaagcaagacagaacaaaactagctgtccgccgctgtaattctatgaaaaaagatcatccgaaacaataatctctcagcatttctacttgaaaactaagaacaagaccattcaaaagaaatagaaactaagaaccaagacgaagctagctgagggatcttgatgtgaagtagagttttttgcacaacggctgctacagaagtttgagaggttcaccttttggtagagctgggatgagctgagagtcagctatttggacgagtttggattcacatggtgtgcacatcagtagaactgttttgttcgttgacaac

SEQ ID NO: 44983 - DNA, 1974 bp, Zea Mays
atttccatcccattcatctccgccagaggagggaggcgagccgcgtttttcatttcgaaatcaaaccacgacgatgccgcaggcgatggcggacgccgcgacgctctccgccctcgctctctttgcctcccgcctctcctgtcgcaggttcggggacgaggacctccgggtgctggaggccgcgctgtccgccggcgccgacgtccccgcgctgctcgccacgcgctcggcggcccggcgcctgctgcgatcgagcgcggcggaggcactcgcgttcaccgcggcgggtgcatcgctggatggtggggatgagagacggagcctcgccgtcgccgacttcttctcacgcgccttcgcgcttgtaggcgatgtcgagagctgccttgccatgagatacgaggcactgttgcttcgagacgctaaatactgcaacgaccttcacttgcaagtgtcccgtcaggagtggctaacttttgcaacggattgtcttgataatggcttctacaccattgcctccaaggcttttgcaaatgctcttgtgcacattcatccaagccacacagggcacttggactctgctaattccattgaggagaaggacaagatcattgaaataaaaggactccagaacttggccaagtcattatctgcacagcattgtgttcagataaagtctgctgaatacatggaaaggagagcttcaggtgttcacgagaagtataatttgcaatcaggaaaaccaaagttaacaggaagttcaatgttcaggctagggattaaaacgaggaacataaagaaattgcttcgtagccaggaaaggaacttgggggatttaaagcaatcttagcgttgcatcttccaaccgagaggaatgttgtaaaaagatcagttaggtgacaatttatgcaaatggagacatgaagtggagttatggatgggtctttgattcaacattaagacaaatacgttgaagagtagttgcatcctttggtagcatactcactgtgcaaaacgctgcaggttacaccatggccggcagcggcagcggcagcccgccctgcgcatcgtgcaagctgctgcggcggcggtgcacgcaggagtgcgtgttcgcaccctacttccctcccgatgacccccacaagttcgccatcgtccataaggtcttcggagccagcaatgtcagcaagatgctgcaggagctgcctgctcagcagagagcggacgccgtgagcagcctggtgtacgaggccaacgcgcgcatgagggaccccgtgtacggctgcgtgggcgccatctcctacctccagcagcaggtctcccagctccaggtgcagctcgccctcgccaaggccgagatcctctgcgtccagatgcagcacgacgagtcagctgcagcttctgccgcgccagcaccggcaaagcaacaacaactctatcaccaccaccagcagcagcagacgatggagtgcgaggcttacggcagcctgctcgtgcagaatggtctgatgatgaacacgttgggcagcgctggtgcagctcatcagcagcagcagatgctgggtggcttcggctctgcggggaacactgcaatggcgctgcaggaggcgtgcctcaagaaagagaccctttgggcatgagtgggtacctccatttgtcgtcgacaagcaagacagaacaaaactagctgtccgccgctgtaattctatgaaaaaagatcatccgaaacaataatctctcagcatttctacttgaaaactaagaacaagaccattcaaaagaaatagaaactaagaaccaagacgaagctagctgagggatcttgatgtgaagtagagttttttgcacaacggctgctacagaagtttgagaggttcaccttttggtagagctgggatgagctgagagtcagctatttggacgagtttggattcacatggtgtgcacatcagtagaactgttttgttcgttgacaac

SEQ ID NO: 44984 - DNA, 923 bp, Zea Mays
atttccatcccattcatctccgccagaggagggaggcgagccgcgtttttcatttcgaaatcaaaccacgacgatgccgcaggcgatggcggacgccgcgacgctctccgccctcgctctctttgcctcccgcctctcctgtcgcaggttcggggacgaggacctccgggtgctggaggccgcgctgtccgccggcgccgacgtccccgcgctgctcgccacgcgctcggcggcccggcgcctgctgcgatcgagcgcggcggaggcactcgcgttcaccgcggcgggtgcatcgctggatggtggggatgagagacggagcctcgccgtcgccgacttcttctcacgcgccttcgcgcttgtaggcgatgtcgagagctgccttgccatgagatacgaggcactgttgcttcgagacgctaaatactgcaacgaccttcacttgcaagtgtcccgtcaggagtggctaacttttgcaacggattgtcttgataatggcttctacaccattgcctccaaggcttttgcaaatgctcttgtgcacattcatccaagccacacagggcacttggactctgctaattccattgaggagaaggacaagatcattgaaataaaaggactccagaacttggccaagtcattatctgcacagcattgtgttcagataaagtctgctgaatacatggaaaggagagcttcaggtgttcacgagaagtataatttgcaatcaggaaaaccaaagttaacaggaagttcaatgttcaggctagggattaaaacgaggaacataaagaaattgcttcgtagccaggaaaggaacttgggggatttaaagcaatcttagcgttgcatcttccaaccgagaggaatgttgtaaaaagttaggtgacaatttatgcaaatggagacatgaagtggag

SEQ ID NO: 44985 - DNA, 891 bp, Zea Mays
atttccatcccattcatctccgccagaggagggaggcgagccgcgtttttcatttcgaaatcaaaccacgacgatgccgcaggcgatggcggacgccgcgacgctctccgccctcgctctctttgcctcccgcctctcctgtcgcaggttcggggacgaggacctccgggtgctggaggccgcgctgtccgccggcgccgacgtccccgcgctgctcgccacgcgctcggcggcccggcgcctgctgcgatcgagcgcggcggaggcactcgcgttcaccgcggcgggtgcatcgctggatggtggggatgagagacggagcctcgccgtcgccgacttcttctcacgcgccttcgcgcttgtaggcgatgtcgagagctgccttgccatgagatacgaggcactgttgcttcgagacgctaaatactgcaacgaccttcacttgcaagtgtcccgtcaggagtggctaacttttgcaacggattgtcttgataatggcttctacaccattgcctccaaggcttttgcaaatgctcttgtgcacattcatccaagccacacagggcacttggactctgctaattccattgaggagaaggacaagatcattgaaataaaaggactccagaacttggccaagtcattatctgcacagcattgtgataaagtctgctgaatacatggaaaggagagcttcaggtgttcacgagaagtataatttgcaatcaggaaaaccaaagttaacaggaagttcaatgttcaggctagggattaaaacgaggaacataaagaaattgcttcgtagccaggaaaggaacttgggggatttaaagcaatcttagcgttgcatcttccaaccgagaggaatgttgtaaaaaggtgagttttatg

SEQ ID NO: 44986 - DNA, 1641 bp, Zea Mays
tgctacgaataacaagaatatatttctgctcgatgatacataaacaaactccagtatatggtttgatttgttgctttccgtagctatatatagtagtataatttttgagctgcataaatagttccgcgaaaataatcgatcaagaaaatggcagtgacctcaagcatagcatctattacagactcatgatcagacgcggcctccggtggcggaggcgatgagcgacagcagcgggttgccggtgccgccggcagcctggtcaacatcgtcgaggaagaggtcctcgggcacgcggcacgcgccgtgcgcgcagacgatggcggtccccagcgcgagcgcggagaagatgagcgagcccaccgacgtgaggaagacgacgaacgcggaggcggcggcgaggcctccgagcacctcgcggtcggagaaggtgcggccgaacgcggagacggggggcgcgtcggcggggcggagcacgtagaggaggcaccaggcggcgagcagcgccagcagcgcggccagggagaaggggtgcgccaggagcgccgcggcgaggcacagcgcggccacggcggcgtagttgacgcggaagtaggccaggttcttgcgcaagcgggacgtggcctcggcgagggactccgggcgggagagagccgagcggtccgcgagctcggaccaggggcgggcgcccgacagcgcgcgccgggtggtgtcgaggaggcgggagaggaaggcccggatcgccgctgggttggtgtcggtggcgtccgcggaggatatggccgtgggcgcgggtgtcgggggtgctgcggccgccgggacgaccgtggtggggaggagcggaggcgatgccgcggccatggcgatctctctgtctcggcgggtttggcggatctgaggaggacctggacgacgcggagagagagagatccgcgcgacgcgaattaatagagaaatggaggtccgcaccgcaccgacacagcggtcaacggttcaccacggtgcacgttttcttcttgccaaaaaaaaaaaccagcactaaaatcagtttttttttgttggttcctgcaagagttcctcattagactcagaactacaaccggcttataataattgtgacagcagaaaagaacgagagcaaattgtgtacaaaattcgtcggttatatttgagtacgtatagtttttttatacaaaaaatgcatacagtttgatatgggatatgtgaacaatttcagcactgttgtgggtttttttagactaaaaagcaatggttaggtagagatgcaatgttatttttggtgtcatgcacgggaagaaattcaattcaatcaacaagaagcagaaggccaggatgctggggagcactccttttccaggttaggcagcaaccaagccaacaagagtaggtgcaggtctaatgtcactacctacagctagcaggtctgcaaagttcttgcaatttggatctaggagaagaaacatccacatccagcacaccaacaaagttcttgcatcattccttgaatgtggccaaacctacctcggttcctccccttgcatcattccttgaatgcattccactactactaggccagcaaatttgtttgaaacaacaaacagtgtggctatgaagaggaatttc

SEQ ID NO: 44987 - DNA, 2509 bp, Zea Mays
atccaacggagtagccagcccactcactacccatgcccagttctccctgtccaccggccgccgccgccgctgccgtgcgcttaatcctacccctgtctgtctcctcatccagtgcaaggagcgcccaccgctgcctgtgtcgtttggtcaccggagatggatggggatgaggagaacgtcgggccgttccgccggactagcgcgcgcacgcgccgcatggccacgcgcatggcgtccgcgctcgccagctcggacaatcgcgcccaggtaacggtgggattggactggttgctcctcttcccccgctgtttccctacagtttgtcaattccctttcgtctacgagtattcactgtgttgaaattagaattgctgttgcagagctcactcgatattttatctccgcacgtgctggggtcaaaaaatactatccaattctatctaggagtatcaaattaccatatcaagcattggccttatgttttttttttctagaagaaggattggtctcatcgacaagtagttttggtaatactattacttacgcctatgaactagagcaaatagtcatgtgtctaaaaaatcgatagtagaattagctaactaacaaatagttgactaactattagctaattatagctgggttgaaccaactaataactaaactaatggatagttgagggtgtagctaatggttagctggactattagatgagacatgagagtgtttggatgtctctaactaaaaataaataatatctaaactattagttgggttattcggatgtcttcagctaattttagcagctaattattagctctagtgcattcaaacagggtctaagtatagactctagaaaaaaaaggaacatatttctatcctgggtttacactgcttattatgtgccatgtgtattgttgtacccgtgccttctcatgactccttaccaaaggatttgaggtgttaactcagattccattcatattgagaccattttgtgcttataggttgctgacttgctgatcagttactgtgtctgaaactattctcctttatgttttgctgcctcattatggaaacacctctgtatctgtaatgccattcaggctgcattagctcgccttgaagctcttgagagcgataatggtggggtcgaggtggtagatcttaatgatgatgagtacggatccacggatgaagaagaccctggtcagtttctttctcatttattattctcaaagtaatggtacgatgtggaaaatgatagggtagctgtagcatgtagccatgtataaactcaatgcaaaaactgtcgtcactctttgcaaactgtgagtggtgaaacccagaatacttgtccatgttgatatcgcttctagtatcagttttgcaaaggagaaaaaaacacacacaacaacaacattacctactacttgttttcgcaaatgattcgataaagaagattaaaactatcctgaaaggcaatatttgaaagatatatactttcatttctgccacgaataataacaccacaaatcgttcatactgtggctgtgttattagcatctgaaaacgcctctgaagtcagcatttatatatccttgaactccacgtgctacagctcgtaaactgcaaaggttcctgggttcaactcaaatgctctacccgctgataaactgaagttcattgatgtaagccaaacttctgttttctgctttcctcgatacagttctcatgcaaaaaaaacagtccaagatcatgaaacgtaaaacaaggcaagggaaagctttggagaagagggcagcaagatcactcatggatgtgctacaagaagcaaatttggagtccgttcctcctcatgtgccaacatattcaagggctgctgtgggtccaccgagcacttcatctcgacgccactactgctcagtttgcggtagctctgcaacctacacatgcgtgaggtgtgggacgcggttctgttcatgccgctgtcaagtcatacacaatgatacacgctgcctgaagtttgtggcttgatcggctggatatgtataagctacatttgatgtatgtccacatcctaatggctgttcatatgtgctctgatcagtatgatatacttgctgactatgtatcctactctgtaggtgggggtttggtaagttgtagaaaaccattttctcagtagtgtactgcagttgcaccgaccacttttgtttttttttcccagaaatgttgtgcgagctcgcagttatgcagtagagctgaaagtagctcttggttccaagatatctgaatggtaatttgagtgcttggcagtgtttcttgatggactaaactctggtattagatatgaactagtatgttaatatcacaattgaccagcttatgatatcaacaaacgtcaataaaatagtactgcaaatgatgtaatgcataatataatgttgaaacagtatagtatatatttcatttcgaggattggcacagactacagtgctgtaatgga

SEQ ID NO: 44988 - DNA, 1670 bp, Zea Mays
atccaacggagtagccagcccactcactacccatgcccagttctccctgtccaccggccgccgccgccgctgccgtgcgcttaatcctacccctgtctgtctcctcatccagtgcaaggagcgcccaccgctgcctgtgtcgtttggtcaccggagatggatggggatgaggagaacgtcgggccgttccgccggactagcgcgcgcacgcgccgcatggccacgcgcatggcgtccgcgctcgccagctcggacaatcgcgcccaggctgcattagctcgccttgaagctcttgagagcgataatggtggggtcgaggtggtagatcttaatgatgatgagtacggatccacggatgaagaagaccctggtcagtttctttctcatttattattctcaaagtaatggtacgatgtggaaaatgatagggtagctgtagcatgtagccatgtataaactcaatgcaaaaactgtcgtcactctttgcaaactgtgagtggtgaaacccagaatacttgtccatgttgatatcgcttctagtatcagttttgcaaaggagaaaaaaacacacacaacaacaacattacctactacttgttttcgcaaatgattcgataaagaagattaaaactatcctgaaaggcaatatttgaaagatatatactttcatttctgccacgaataataacaccacaaatcgttcatactgtggctgtgttattagcatctgaaaacgcctctgaagtcagcatttatatatccttgaactccacgtgctacagctcgtaaactgcaaaggttcctgggttcaactcaaatgctctacccgctgataaactgaagttcattgatgtaagccaaacttctgttttctgctttcctcgatacagttctcatgcaaaaaaaacagtccaagatcatgaaacgtaaaacaaggcaagggaaagctttggagaagagggcagcaagatcactcatggatgtgctacaagaagcaaatttggagtccgttcctcctcatgtgccaacatattcaagggctgctgtgggtccaccgagcacttcatctcgacgccactactgctcagtttgcggtagctctgcaacctacacatgcgtgaggtgtgggacgcggttctgttcatgccgctgtcaagtcatacacaatgatacacgctgcctgaagtttgtggcttgatcggctggatatgtataagctacatttgatgtatgtccacatcctaatggctgttcatatgtgctctgatcagtatgatatacttgctgactatgtatcctactctgtaggtgggggtttggtaagttgtagaaaaccattttctcagtagtgtactgcagttgcaccgaccacttttgtttttttttcccagaaatgttgtgcgagctcgcagttatgcagtagagctgaaagtagctcttggttccaagatatctgaatggtaatttgagtgcttggcagtgtttcttgatggactaaactctggtattagatatgaactagtatgttaatatcacaattgaccagcttatgatatcaacaaacgtcaataaaatagtactgcaaatgatgtaatgcataatataatgttgaaacagtatagtatatatttcatttcgaggattggcacagactacagtgctgtaatgga

SEQ ID NO: 44989 - DNA, 1258 bp, Zea Mays
atccaacggagtagccagcccactcactacccatgcccagttctccctgtccaccggccgccgccgccgctgccgtgcgcttaatcctacccctgtctgtctcctcatccagtgcaaggagcgcccaccgctgcctgtgtcgtttggtcaccggagatggatggggatgaggagaacgtcgggccgttccgccggactagcgcgcgcacgcgccgcatggccacgcgcatggcgtccgcgctcgccagctcggacaatcgcgcccaggctgcattagctcgccttgaagctcttgagagcgataatggtggggtcgaggtggtagatcttaatgatgatgagtacggatccacggatgaagaagaccctgctcgtaaactgcaaaggttcctgggttcaactcaaatgctctacccgctgataaactgaagttcattgatgtaagccaaacttctgttttctgctttcctcgatacagttctcatgcaaaaaaaacagtccaagatcatgaaacgtaaaacaaggcaagggaaagctttggagaagagggcagcaagatcactcatggatgtgctacaagaagcaaatttggagtccgttcctcctcatgtgccaacatattcaagggctgctgtgggtccaccgagcacttcatctcgacgccactactgctcagtttgcggtagctctgcaacctacacatgcgtgaggtgtgggacgcggttctgttcatgccgctgtcaagtcatacacaatgatacacgctgcctgaagtttgtggcttgatcggctggatatgtataagctacatttgatgtatgtccacatcctaatggctgttcatatgtgctctgatcagtatgatatacttgctgactatgtatcctactctgtaggtgggggtttggtaagttgtagaaaaccattttctcagtagtgtactgcagttgcaccgaccacttttgtttttttttcccagaaatgttgtgcgagctcgcagttatgcagtagagctgaaagtagctcttggttccaagatatctgaatggtaatttgagtgcttggcagtgtttcttgatggactaaactctggtattagatatgaactagtatgttaatatcacaattgaccagcttatgatatcaacaaacgtcaataaaatagtactgcaaatgatgtaatgcataatataatgttgaaacagtatagtatatatttcatttcgaggattggcacagactacagtgctgtaatgga

SEQ ID NO: 44990 - DNA, 1945 bp, Zea Mays
gcccaatatctagcaatccgttacgcacgcatgggaatccaacggagtagccagcccactcactacccatgcccagttctccctgtccaccggccgccgccgccgctgccgtgcgcttaatcctacccctgtctgtctcctcatccagtgcaaggagcgcccaccgctgcctgtgtcgtttggtcaccggagatggatggggatgaggagaacgtcgggccgttccgccggactagcgcgcgcacgcgccgcatggccacgcgcatggcgtccgcgctcgccagctcggacaatcgcgcccaggtaacggtgggattggactggttgctcctcttcccccgctgtttccctacagtttgtcaattccctttcgtctacgagtattcactgtgttgaaattagaattgctgttgcagagctcactcgatattttatctccgcacgtgctggggtcaaaaaatactatccaattctatctaggagtatcaaattaccatatcaagcattggccttatgttttttttttctagaagaaggattggtctcatcgacaagtagttttggtaatactattacttacgcctatgaactagagcaaatagtcatgtgtctaaaaaatcgatagtagaattagctaactaacaaatagttgactaactattagctaattatagctgggttgaaccaactaataactaaactaatggatagttgagggtgtagctaatggttagctggactattagatgagacatgagagtgtttggatgtctctaactaaaaataaataatatctaaactattagttgggttattcggatgtcttcagctaattttagcagctaattattagctctagtgcattcaaacagggtctaagtatagactctagaaaaaaaaggaacatatttctatcctgggtttacactgcttattatgtgccatgtgtattgttgtacccgtgccttctcatgactccttaccaaaggatttgaggtgttaactcagattccattcatattgagaccattttgtgcttataggttgctgacttgctgatcagttactgtgtctgaaactattctcctttatgttttgctgcctcattatggaaacacctctgtatctgtaatgccattcaggctgcattagctcgccttgaagctcttgagagcgataatggtggggtcgaggtggtagatcttaatgatgatgagtacggatccacggatgaagaagaccctgttctcatgcaaaaaaaacagtccaagatcatgaaacgtaaaacaaggcaagggaaagctttggagaagagggcagcaagatcactcatggatgtgctacaagaagcaaatttggagtccgttcctcctcatgtgccaacatattcaagggctgctgtgggtccaccgagcacttcatctcgacgccactactgctcagtttgcggtagctctgcaacctacacatgcgtgaggtgtgggacgcggttctgttcatgccgctgtcaagtcatacacaatgatacacgctgcctgaagtttgtggcttgatcggctggatatgtataagctacatttgatgtgggggtttggtaagttgtagaaaaccattttctcagtagtgtactgcagttgcaccgaccacttttgtttttttttcccagaaatgttgtgcgagctcgcagttatgcagtagagctgaaagtagctcttggttccaagatatctgaatggtaatttgagtgcttggcagtgtttcttgatggactaaactctggtattagatatgaactagtatgttaatatcacaattgaccagcttatgatatcaacaaacgtcaataaaatagtactgcaaatgatgtaatgcataatataatgttgaaacagtatagtatatatttcatttcgaggattggcacagactacagtgctgtaatgga

SEQ ID NO: 44991 - DNA, 1338 bp, Zea Mays
atccaacggagtagccagcccactcactacccatgcccagttctccctgtccaccggccgccgccgccgctgccgtgcgcttaatcctacccctgtctgtctcctcatccagtgcaaggagcgcccaccgctgcctgtgtcgtttggtcaccggagatggatggggatgaggagaacgtcgggccgttccgccggactagcgcgcgcacgcgccgcatggccacgcgcatggcgtccgcgctcgccagctcggacaatcgcgcccaggtaacggtgggattggactggttgctcctcttcccccgctgtttccctacagtttgtcaattccctttcgtctacgagtattcactgtgttgaaattagaattgctgttgcagagctcactcgatattttatctccgcacgtgctggggtcaaaaaatactatccaattctatctaggagtatcaaattaccatatcaagcattggccttatgttttttttttctagaagaaggattggtctcatcgacaagtagttttggtaatactattacttacgcctatgaactagagcaaatagtcatgtgtctaaaaaatcgatagtagaattagctaactaacaaatagttgactaactattagctaattatagctgggttgaaccaactaataactaaactaatggatagttgagggtgtagctaatggttagctggactattagatgagacatgagagtgtttggatgtctctaactaaaaataaataatatctaaactattagttgggttattcggatgtcttcagctaattttagcagctaattattagctctagtgcattcaaacagggtctaagtatagactctagaaaaaaaaggaacatatttctatcctgggtttacactgcttattatgtgccatgtgtattgttgtacccgtgccttctcatgactccttaccaaaggatttgaggtgttaactcagattccattcatattgagaccattttgtgcttataggttgctgacttgctgatcagttactgtgtctgaaactattctcctttatgttttgctgcctcattatggaaacacctctgtatctgtaatgccattcaggctgcattagctcgccttgaagctcttgagagcgataatggtggggtcgaggtggtagatcttaatgatgatgagtacggatccacggatgaagaagaccctgttctcatgcaaaaaaaacagtccaagatcatgaaacgtaaaacaaggcaagggaaagctttggagaagagggcagcaagatcactcatggatgtgctacaagaaacattctccaatcttgaactggaac

SEQ ID NO: 44992 - DNA, 1426 bp, Zea Mays
gtttgtttctcaagaacaaagtttcattccatagtctgcatctcaggtccgctctggatactttgctgctggttttgctgatggttctgtcaggatatatgatgtttgctctcctgatagtaggcctgtctatgtggccaggccgcatgccccaagaacagaaaaggttgtgggcatagggtttcagcctgggtttgatccatacgagattgtaagtgcatctcaagctggagacattcagtttcttgatgttagaatggcagcagaaccctacctgactattgaggcacacaggggttcacttacagcattagcggttcatcggcatgccccagttgttgctagttcagccaagcagatgattaaagtgtttagtcttgaaggagaacagttgaggataattcgctacctgccatcttttatgggccaaagaacaggcagtgtaaattgcctttcttttcacccatacaaatcactcctggctgccggtgctggtcataatgctcttgtctctatctatgctgaggaaaattacaagtaagatcgaggcctatatctcatgctcatgataatgcagacacagtgcgatcgacaggccttacatttttggccaagtgatgctccacagcatggtgcagcttcaagatccaagatgatggtaagctttgtcacagagaaggtgttgatggctccatggctttcggtgcatattgcctgttggacggcgtgtgcaatttgtatgatacagtcaagaactcaagattcattaggcctccttgcattgtgaaccctaccctgatcctgccgttgaacttggaggccccatcaacaaattaatcatacctaagttaaccaaaatgtaaatagccagtgcattcgggttgtactttgtcagcattaatccctttttcaagtgtaaaaaggtctgaaggtgcttgatatgataaacatggcttggtagtggctgctgactgggcaagtggggttgtgcatatgggcctggtcgcacatttctgctcacagatgatgttgaatagatagatgtctgctcacagatgaggttgaatagatagatgtctgctcacagatgttgttgaatagatagatgcatttgtccagctaatatagcgctagatgggggtagcgttggcctgcatgaatgaaggaaagttgtcgagtgaggagtgaccttcattgccattctgtgccgcaacaagtctccatgtgttatcagatggccctgtagataatacatatatttgtagatgtgttttgttcggtgaattgtgctgaccgctgagtaaaatgtattgtgaacgttgttgataaatgctattgtaatgaatttgcaacaagaaaaaattatatgctattgtagtgtatatcacaactctggttgctttttatttttatttttttaaaaaaa

SEQ ID NO: 44993 - DNA, 3644 bp, Zea Mays
cttcattttagattgttttgaaaaaacggcagaatgactagtaatgggaaccggagggagtaaaacaaatagtcatgcaattttattattccttataaattaccgtagtacaaattacttgacaaagttatgttttgtggatcatgccattacccaaaatacactataatatgactggagggcttatatttcttttattgttttactttgcttacatctcttttttgcaggtactgcttagtcagtcacacagatttagagcgcttgttctgcttggaagatttcttgacatggggccatgggcagttgatttggccctgtctgtcggaatatttccttatgtactcaaactgcttccaacaaatacaatagagttacgtcaaattttagtgtttatatggacaaaaattctctctcttgataagtcttgtcaggttgacttggttaaagatggaggacatacatattttattaggtttcttgacagtttggatgctttcccagaacagcgtgcaatggccgcttttgttatagcagtcatcgtggatgggcataggatgggtcaagaggcttgtatgaatgcagggcttatagatgtttgcctgagacatctgcaacctgagaatcttcatgcacaaacagaacctttgcttttgcagtggctttgtttatgccttgggaaactctgggaagatttccctgaggctcagttacttggtctgcaaacaaatgcaccagaaactgtaatatgcttattgtcggagcctcgacctgaggtcagagctgctgctgtttttgcacttgggaatcttactacattatcaaattgccctgatgatgattctgatgatgatgaaaaggtgaaagctgaaataaatgtagttcgaagccttctccagatatcttcagatggtagtccccttgttagatctgaggttgctatagcgcttactcactttgcgttgggtcacaacaaaaatctcaaatctgttgctgcggagtattggaaacctcaatccaaatcgttgctgaagtcattaccatcattggcaaatataaataatccaagcaatgtttacagtcccaataatattctccaaggcagcattggtcctgtgctgagggttggcagtgatagcggtgccgctggtcgtgatggacacatttctacaagtagcccaattgcagcaagtagcatcatgcatggctctccccagtcagatgattcttcccaacactctgattcaggcatattactgagggagaatgcaagtaatggtggtctcagctacactaggtcgaggcctgttgataatgtcatttattctcaatttatatcaactatgtgttctgtttctaaagatcctgacccaagaattgcaactattggttggagagcactgacccttataggtgttgaacaagtggccatgaaaagtactcgatttaacagtggaggtctacaccgaggagagacatctgcgtcaacctttggaatggcacactcttcttcttggagagatatgaattctggtcccagtaatgcagaactaaagaaacttcccgaatcaacaatttacaactggagttgtggtcacttctctaggccacttttaactgcctctgatgataatgaagaaaccaatgctagaagagaagagagagaacggattgcactagatttcatcactaagtgccagcgctcctgtacgtggatgtacatttgtctgcattacattattgttgttggttttcttgattgtttacctgctgtttttcttggtggttcaacctgggaatagcagcctgcaagattacaagccaaattgctagttgggatacaagatttgagttggggacaaaggcagctttattattgccattttctccgattgtcgtagcagctgatgaaaatgaaaaaataagtgtgtggaactatgacgatgcacaaccagtgaactcttttcacaaccataagttgtccgacagagggctatctaaacttttgcttatcaacgagcttgatgagtgcttgcttttggctgcctcaaggagggcagaaacttgtaactgctttttcatcagttcagggacatcgagctgctggtcgcagtattgtgattgactggcagcagcaatcttgttatctgtacgcatctggtgacatgtcttccatcttggtatgggatcttgacaaggaacaacttctcaacaccattccgtcatccgctgatagtgccatttctgccctgtctgcatctcaggtccgctctggatactttgctgctggttttgctgatggttctgtcaggatatatgatgtttgctctcctgatagtaggcctgtctatgtggccaggccgcatgccccaagaacagaaaaggttgtgggcatagggtttcagcctgggtttgatccatacgagattgtaagtgcatctcaagctggagacattcagtttcttgatgttagaatggcagcagaaccctacctgactattgaggcacacaggggttcacttacagcattagcggttcatcggcatgccccagttgttgctagttcagccaagcagatgattaaagtgtttagtcttgaaggagaacagttgaggataattcgctacctgccatcttttatgggccaaagaacaggcagtgtaaattgcctttcttttcacccatacaaatcactcctggctgccggtgctggtcataatgctcttgtctctatctatgctgaggaaaattacaagtaagatcgaggcctatatctcatgctcatgataatgcagacacagtgcgatcgacaggccttacatttttggccaagtgatgctccacagcatggtgcagcttcaagatccaagatgatggtaagctttgtcacagagaaggtgttgatggctccatggctttcggtgcatattgcctgttggacggcgtgtgcaatttgtatgatacagtcaagaactcaagattcattaggcctccttgcattgtgaaccctaccctgatcctgccgttgaacttggaggccccatcaacaaattaatcatacctaagttaaccaaaatgtaaatagccagtgcattcgggttgtactttgtcagcattaatccctttttcaagtgtaaaaaggtctgaaggtgcttgatatgataaacatggcttggtagtggctgctgactgggcaagtggggttgtgcatatgggcctggtcgcacatttctgctcacagatgatgttgaatagatagatgtctgctcacagatgaggttgaatagatagatgtctgctcacagatgttgttgaatagatagatgcatttgtccagctaatatagcgctagatgggggtagcgttggcctgcatgaatgaaggaaagttgtcgagtgaggagtgaccttcattgccattctgtgccgcaacaagtctccatgtgttatcagatggccctgtagataatacatatatttgtagatgtgttttgttcggtgaattgtgctgaccgctgagtaaaatgtattgtgaacgttgttgataaatgctattgtaatgaatttgcaacaagaaaaaattatatgctattgtagtgtatatcacaactctggttgctttttatttttatttttttaaaaaaa

SEQ ID NO: 44994 - DNA, 3761 bp, Zea Mays
cttgaaacgtgccagcaacttcattttagattgttttgaaaaaacggcagaatgactagtaatgggaaccggagggagtaaaacaaatagtcatgcaattttattattccttataaattaccgtagtacaaattacttgacaaagttatgttttgtggatcatgccattacccaaaatacactataatatgactggagggcttatatttcttttattgttttactttgcttacatctcttttttgcaggtactgcttagtcagtcacacagatttagagcgcttgttctgcttggaagatttcttgacatggggccatgggcagttgatttggccctgtctgtcggaatatttccttatgtactcaaactgcttccaacaaatacaatagagttacgtcaaattttagtgtttatatggacaaaaattctctctcttgataagtcttgtcaggttgacttggttaaagatggaggacatacatattttattaggtttcttgacagtttggatgctttcccagaacagcgtgcaatggccgcttttgttatagcagtcatcgtggatgggcataggatgggtcaagaggcttgtatgaatgcagggcttatagatgtttgcctgagacatctgcaacctgagaatcttcatgcacaaacagaacctttgcttttgcagtggctttgtttatgccttgggaaactctgggaagatttccctgaggctcagttacttggtctgcaaacaaatgcaccagaaactgtaatatgcttattgtcggagcctcgacctgaggtcagagctgctgctgtttttgcacttgggaatcttactacattatcaaattgccctgatgatgattctgatgatgatgaaaaggtgaaagctgaaataaatgtagttcgaagccttctccagatatcttcagatggtagtccccttgttagatctgaggttgctatagcgcttactcactttgcgttgggtcacaacaaaaatctcaaatctgttgctgcggagtattggaaacctcaatccaaatcgttgctgaagtcattaccatcattggcaaatataaataatccaagcaatgtttacagtcccaataatattctccaaggcagcattggtcctgtgctgagggttggcagtgatagcggtgccgctggtcgtgatggacacatttctacaagtagcccaattgcagcaagtagcatcatgcatggctctccccagtcagatgattcttcccaacactctgattcaggcatattactgagggagaatgcaagtaatggtggtctcagctacactaggtcgaggcctgttgataatgtcatttattctcaatttatatcaactatgtgttctgtttctaaagatcctgacccaagaattgcaactattggttggagagcactgacccttataggtgttgaacaagtggccatgaaaagtactcgatttaacagtggaggtctacaccgaggagagacatctgcgtcaacctttggaatggcacactcttcttcttggagagatatgaattctggaagcaactcgatgaaatttatgacccctcctgttagccctcctcagcatgattatcttctactaggattgcgccgagtgtgttctatggagtttggacagcatcctataaattcacctgatggctttgctaatctccttttaagctctgctacaggtcccagtaatgcagaactaaagaaacttcccgaatcaacaatttacaactggagttgtggtcacttctctaggccacttttaactgcctctgatgataatgaagaaaccaatgctagaagagaagagagagaacggattgcactagatttcatcactaagtgccagcgctcctcctgcaagattacaagccaaattgctagttgggatacaagatttgagttggggacaaaggcagctttattattgccattttctccgattgtcgtagcagctgatgaaaatgaaaaaataagtgtgtggaactatgacgatgcacaaccagtgaactcttttcacaaccataagttgtccgacagagggctatctaaacttttgcttatcaacgagcttgatgagtgcttgcttttggctgcctcaagtgatggaaatgtacgcatatggaaaaattttgcttgtaagggagggcagaaacttgtaactgctttttcatcagttcagggacatcgagctgctggtcgcagtattgtgattgactggcagcagcaatcttgttatctgtacgcatctggtgacatgtcttccatcttggtatgggatcttgacaaggaacaacttctcaacaccattccgtcatccgctgatagtgccatttctgccctgtctgcatctcaggtccgctctggatactttgctgctggttttgctgatggttctgtcaggatatatgatgtttgctctcctgatagtaggcctgtctatgtggccaggccgcatgccccaagaacagaaaaggttgtgggcatagggtttcagcctgggtttgatccatacgagattgtaagtgcatctcaagctggagacattcagtttcttgatgttagaatggcagcagaaccctacctgactattgaggcacacaggggttcacttacagcattagcggttcatcggcatgccccagttgttgctagttcagccaagcagatgattaaagtgtttagtcttgaaggagaacagttgaggataattcgctacctgccatcttttatgggccaaagaacaggcagtgtaaattgcctttcttttcacccatacaaatcactcctggctgccggtgctggtcataatgctcttgtctctatctatgctgaggaaaattacaagtaagatcgaggcctatatctcatgctcatgataatgcagacacagtgcgatcgacaggccttacatttttggccaagtgatgctccacagcatggtgcagcttcaagatccaagatgatggtaagctttgtcacagagaaggtgttgatggctccatggctttcggtgcatattgcctgttggacggcgtgtgcaatttgtatgatacagtcaagaactcaagattcattaggcctccttgcattgtgaaccctaccctgatcctgccgttgaacttggaggccccatcaacaaattaatcatacctaagttaaccaaaatgtaaatagccagtgcattcgggttgtactttgtcagcattaatccctttttcaagtgtaaaaaggtctgaaggtgcttgatatgataaacatggcttggtagtggctgctgactgggcaagtggggttgtgcatatgggcctggtcgcacatttctgctcacagatgatgttgaatagatagatgtctgctcacagatgaggttgaatagatagatgtctgctcacagatgttgttgaatagatagatgcatttgtccagctaatatagcgctagatgggggtagcgttggcctgcatgaatgaaggaaagttgtcgagtgaggagtgaccttcattgccattctgtgccgcaacaagtctccatgtgttatcagatggccctgtagataatacatatatttgtagatgtgttttgttcggtgaattgtgctgaccgctgagtaaaatgtattgtgaacgttgttgataaatgctattgtaatgaatttgcaacaagaaaaaattatatgctattgtagtgtatatcacaactctggttgctttttatttttatttttttaaaaaaa

SEQ ID NO: 44995 - DNA, 3634 bp, Zea Mays
ccaagtcctttttttacggaacaactgacggcttttgaagtgtggcttgatcatggctctgaggacaagaaacctcctgaacagttacccatagttcttcaggtactgcttagtcagtcacacagatttagagcgcttgttctgcttggaagatttcttgacatggggccatgggcagttgatttggccctgtctgtcggaatatttccttatgtactcaaactgcttccaacaaatacaatagagttacgtcaaattttagtgtttatatggacaaaaattctctctcttgataagtcttgtcaggttgacttggttaaagatggaggacatacatattttattaggtttcttgacagtttggatgctttcccagaacagcgtgcaatggccgcttttgttatagcagtcatcgtggatgggcataggatgggtcaagaggcttgtatgaatgcagggcttatagatgtttgcctgagacatctgcaacctgagaatcttcatgcacaaacagaacctttgcttttgcagtggctttgtttatgccttgggaaactctgggaagatttccctgaggctcagttacttggtctgcaaacaaatgcaccagaaactgtaatatgcttattgtcggagcctcgacctgaggtcagagctgctgctgtttttgcacttgggaatcttactacattatcaaattgccctgatgatgattctgatgatgatgaaaaggtgaaagctgaaataaatgtagttcgaagccttctccagatatcttcagatggtagtccccttgttagatctgaggttgctatagcgcttactcactttgcgttgggtcacaacaaaaatctcaaatctgttgctgcggagtattggaaacctcaatccaaatcgttgctgaagtcattaccatcattggcaaatataaataatccaagcaatgtttacagtcccaataatattctccaaggcagcattggtcctgtgctgagggttggcagtgatagcggtgccgctggtcgtgatggacacatttctacaagtagcccaattgcagcaagtagcatcatgcatggctctccccagtcagatgattcttcccaacactctgattcaggcatattactgagggagaatgcaagtaatggtggtctcagctacactaggtcgaggcctgttgataatgtcatttattctcaatttatatcaactatgtgttctgtttctaaagatcctgacccaagaattgcaactattggttggagagcactgacccttataggtgttgaacaagtggccatgaaaagtactcgatttaacagtggaggtctacaccgaggagagacatctgcgtcaacctttggaatggcacactcttcttcttggagagatatgaattctggaagcaactcgatgaaatttatgacccctcctgttagccctcctcagcatgattatcttctactaggattgcgccgagtgtgttctatggagtttggacagcatcctataaattcacctgatggctttgctaatctccttttaagctctgctacaggtcccagtaatgcagaactaaagaaacttcccgaatcaacaatttacaactggagttgtggtcacttctctaggccacttttaactgcctctgatgataatgaagaaaccaatgctagaagagaagagagagaacggattgcactagatttcatcactaagtgccagcgctcctcagcctgcaagattacaagccaaattgctagttgggatacaagatttgagttggggacaaaggcagctttattattgccattttctccgattgtcgtagcagctgatgaaaatgaaaaaataagttctgtatcatgccagtgtgtggaactatgacgatgcacaaccagtgaactcttttcacaaccataagttgtccgacagagggctatctaaacttttgcttatcaacgagcttgatgagtgcttgcttttggctgcctcaagtgatggaaatgtacgcatatggaaaaattttgcttgtaagggagggcagaaacttgtaactgctttttcatcagttcagggacatcgagctgctggtcgcagtattgtgattgactggcagcagcaatcttgttatctgtacgcatctggtgacatgtcttccatcttggtatgggatcttgacaaggaacaacttctcaacaccattccgtcatccgctgatagtgccatttctgccctgtctgcatctcaggtccgctctggatactttgctgctggttttgctgatggttctgtcaggatatatgatgtttgctctcctgatagtaggcctgtctatgtggccaggccgcatgccccaagaacagaaaaggttgtgggcatagggtttcagcctgggtttgatccatacgagattgtaagtgcatctcaagctggagacattcagtttcttgatgttagaatggcagcagaaccctacctgactattgaggcacacaggggttcacttacagcattagcggttcatcggcatgccccagttgttgctagttcagccaagcagatgattaaagtgtttagtcttgaaggagaacagttgaggataattcgctacctgccatcttttatgggccaaagaacaggcagtgtaaattgcctttcttttcacccatacaaatcactcctggctgccggtgctggtcataatgctcttgtctctatctatgctgaggaaaattacaagtaagatcgaggcctatatctcatgctcatgataatgcagacacagtgcgatcgacaggccttacatttttggccaagtgatgctccacagcatggtgcagcttcaagatccaagatgatggtaagctttgtcacagagaaggtgttgatggctccatggctttcggtgcatattgcctgttggacggcgtgtgcaatttgtatgatacagtcaagaactcaagattcattaggcctccttgcattgtgaaccctaccctgatcctgccgttgaacttggaggccccatcaacaaattaatcatacctaagttaaccaaaatgtaaatagccagtgcattcgggttgtactttgtcagcattaatccctttttcaagtgtaaaaaggtctgaaggtgcttgatatgataaacatggcttggtagtggctgctgactgggcaagtggggttgtgcatatgggcctggtcgcacatttctgctcacagatgatgttgaatagatagatgtctgctcacagatgaggttgaatagatagatgtctgctcacagatgttgttgaatagatagatgcatttgtccagctaatatagcgctagatgggggtagcgttggcctgcatgaatgaaggaaagttgtcgagtgaggagtgaccttcattgccattctgtgccgcaacaagtctccatgtgttatcagatggccctgtagataatacatatatttgtagatgtgttttgttcggtgaattgtgctgaccgctgagtaaaatgtattgtgaacgttgttgataaatgctattgtaatgaatttgcaacaagaaaaaattatatgctattgtagtgtatatcacaactctggttgctttttatttttatttttttaaaaaaa

SEQ ID NO: 44996 - DNA, 3529 bp, Zea Mays
cctcagttaattgatgatccaaatgctgagtttcagccaagtcctttttttacggaacaactgacggcttttgaagtgtggcttgatcatggctctgaggacaagaaacctcctgaacagttacccatagttcttcaggtactgcttagtcagtcacacagatttagagcgcttgttctgcttggaagatttcttgacatggggccatgggcagttgatttggccctgtctgtcggaatatttccttatgtactcaaactgcttccaacaaatacaatagagttacgtcaaattttagtgtttatatggacaaaaattctctctcttgataagtcttgtcaggttgacttggttaaagatggaggacatacatattttattaggtttcttgacagtttggatgctttcccagaacagcgtgcaatggccgcttttgttatagcagtcatcgtggatgggcataggatgggtcaagaggcttgtatgaatgcagggcttatagatgtttgcctgagacatctgcaacctgagaatcttcatgcacaaacagaacctttgcttttgcagtggctttgtttatgccttgggaaactctgggaagatttccctgaggctcagttacttggtctgcaaacaaatgcaccagaaactgtaatatgcttattgtcggagcctcgacctgaggtcagagctgctgctgtttttgcacttgggaatcttactacattatcaaattgccctgatgatgattctgatgatgatgaaaaggtgaaagctgaaataaatgtagttcgaagccttctccagatatcttcagatggtagtccccttgttagatctgaggttgctatagcgcttactcactttgcgttgggtcacaacaaaaatctcaaatctgttgctgcggagtattggaaacctcaatccaaatcgttgctgaagtcattaccatcattggcaaatataaataatccaagcaatgtttacagtcccaataatattctccaaggcagcattggtcctgtgctgagggttggcagtgatagcggtgccgctggtcgtgatggacacatttctacaagtagcccaattgcagcaagtagcatcatgcatggctctccccagtcagatgattcttcccaacactctgattcaggcatattactgagggagaatgcaagtaatggtggtctcagctacactaggtcgaggcctgttgataatgtcatttattctcaatttatatcaactatgtgttctgtttctaaagatcctgacccaagaattgcaactattggttggagagcactgacccttataggtgttgaacaagtggccatgaaaagtactcgatttaacagtggaggtctacaccgaggagagacatctgcgtcaacctttggaatggcacactcttcttcttggagagatatgaattctggaagcaactcgatgaaatttatgacccctcctgttagccctcctcagcatgattatcttctactaggattgcgccgagtgtgttctatggagtttggacagcatcctataaattcacctgatggctttgctaatctccttttaagctctgctacaggtcccagtaatgcagaactaaagaaacttcccgaatcaacaatttacaactggagttgtggtcacttctctaggccacttttaactgcctctgatgataatgaagaaaccaatgctagaagagaagagagagaacggattgcactagatttcatcactaagtgccagcgctcctcagcctgcaagattacaagccaaattgctagttgggatacaagatttgagttggggacaaaggcagctttattattgccattttctccgattgtcgtagcagctgatgaaaatgaaaaaataaggtgatggaaatgtacgcatatggaaaaattttgcttgtaagggagggcagaaacttgtaactgctttttcatcagttcagggacatcgagctgctggtcgcagtattgtgattgactggcagcagcaatcttgttatctgtacgcatctggtgacatgtcttccatcttggtatgggatcttgacaaggaacaacttctcaacaccattccgtcatccgctgatagtgccatttctgccctgtctgcatctcaggtccgctctggatactttgctgctggttttgctgatggttctgtcaggatatatgatgtttgctctcctgatagtaggcctgtctatgtggccaggccgcatgccccaagaacagaaaaggttgtgggcatagggtttcagcctgggtttgatccatacgagattgtaagtgcatctcaagctggagacattcagtttcttgatgttagaatggcagcagaaccctacctgactattgaggcacacaggggttcacttacagcattagcggttcatcggcatgccccagttgttgctagttcagccaagcagatgattaaagtgtttagtcttgaaggagaacagttgaggataattcgctacctgccatcttttatgggccaaagaacaggcagtgtaaattgcctttcttttcacccatacaaatcactcctggctgccggtgctggtcataatgctcttgtctctatctatgctgaggaaaattacaagtaagatcgaggcctatatctcatgctcatgataatgcagacacagtgcgatcgacaggccttacatttttggccaagtgatgctccacagcatggtgcagcttcaagatccaagatgatggtaagctttgtcacagagaaggtgttgatggctccatggctttcggtgcatattgcctgttggacggcgtgtgcaatttgtatgatacagtcaagaactcaagattcattaggcctccttgcattgtgaaccctaccctgatcctgccgttgaacttggaggccccatcaacaaattaatcatacctaagttaaccaaaatgtaaatagccagtgcattcgggttgtactttgtcagcattaatccctttttcaagtgtaaaaaggtctgaaggtgcttgatatgataaacatggcttggtagtggctgctgactgggcaagtggggttgtgcatatgggcctggtcgcacatttctgctcacagatgatgttgaatagatagatgtctgctcacagatgaggttgaatagatagatgtctgctcacagatgttgttgaatagatagatgcatttgtccagctaatatagcgctagatgggggtagcgttggcctgcatgaatgaaggaaagttgtcgagtgaggagtgaccttcattgccattctgtgccgcaacaagtctccatgtgttatcagatggccctgtagataatacatatatttgtagatgtgttttgttcggtgaattgtgctgaccgctgagtaaaatgtattgtgaacgttgttgataaatgctattgtaatgaatttgcaacaagaaaaaattatatgctattgtagtgtatatcacaactctggttgctttttatttttatttttttaaaaaaa

SEQ ID NO: 44997 - DNA, 3841 bp, Zea Mays
gcttcctcagttaattgatgatccaaatgctgagtttcagccaagtcctttttttacggaacaactgacggcttttgaagtgtggcttgatcatggctctgaggacaagaaacctcctgaacagttacccatagttcttcaggtaaggcattttgcttatacacttacatacaagtcaatattatctgtaaaatccagtttaactttgtaacctcttcacctttctctaagctgctatggttttaatttggtaaattttatattcgtattcctttatttatcttaatctgctactcactccaatcacaaaaaagactctcattttgggttgtgtgcagtcagcctacaaaaaaaaaacgattgttatttgctctggtgcgcattgagattgggcatttgaaaatattatggctagatttgtcccaaaacatactccctccgattcgttttagtagtcgttttggacatcatttcacataccaaggtactgcttagtcagtcacacagatttagagcgcttgttctgcttggaagatttcttgacatggggccatgggcagttgatttggccctgtctgtcggaatatttccttatgtactcaaactgcttccaacaaatacaatagagttacgtcaaattttagtgtttatatggacaaaaattctctctcttgataagtcttgtcaggttgacttggttaaagatggaggacatacatattttattaggtttcttgacagtttggatgctttcccagaacagcgtgcaatggccgcttttgttatagcagtcatcgtggatgggcataggatgggtcaagaggcttgtatgaatgcagggcttatagatgtttgcctgagacatctgcaacctgagaatcttcatgcacaaacagaacctttgcttttgcagtggctttgtttatgccttgggaaactctgggaagatttccctgaggctcagttacttggtctgcaaacaaatgcaccagaaactgtaatatgcttattgtcggagcctcgacctgaggtcagagctgctgctgtttttgcacttgggaatcttactacattatcaaattgccctgatgatgattctgatgatgatgaaaaggtgaaagctgaaataaatgtagttcgaagccttctccagatatcttcagatggtagtccccttgttagatctgaggttgctatagcgcttactcactttgcgttgggtcacaacaaaaatctcaaatctgttgctgcggagtattggaaacctcaatccaaatcgttgctgaagtcattaccatcattggcaaatataaataatccaagcaatgtttacagtcccaataatattctccaaggcagcattggtcctgtgctgagggttggcagtgatagcggtgccgctggtcgtgatggacacatttctacaagtagcccaattgcagcaagtagcatcatgcatggctctccccagtcagatgattcttcccaacactctgattcaggcatattactgagggagaatgcaagtaatggtggtctcagctacactaggtcgaggcctgttgataatgtcatttattctcaatttatatcaactatgtgttctgtttctaaagatcctgacccaagaattgcaactattggttggagagcactgacccttataggtgttgaacaagtggccatgaaaagtactcgatttaacagtggaggtctacaccgaggagagacatctgcgtcaacctttggaatggcacactcttcttcttggagagatatgaattctggtcccagtaatgcagaactaaagaaacttcccgaatcaacaatttacaactggagttgtggtcacttctctaggccacttttaactgcctctgatgataatgaagaaaccaatgctagaagagaagagagagaacggattgcactagatttcatcactaagtgccagcgctcctcctgcaagattacaagccaaattgctagttgggatacaagatttgagttggggacaaaggcagctttattattgccattttctccgattgtcgtagcagctgatgaaaatgaaaaaataagtgtgtggaactatgacgatgcacaaccagtgaactcttttcacaaccataagttgtccgacagagggctatctaaacttttgcttatcaacgagcttgatgagtgcttgcttttggctgcctcaagtgatggaaatgtacgcatatggaaaaattttgcttgtaagggagggcagaaacttgtaactgctttttcatcagttcagggacatcgagctgctggtcgcagtattgtgattgactggcagcagcaatcttgttatctgtacgcatctggtgacatgtcttccatcttggtatgggatcttgacaaggaacaacttctcaacaccattccgtcatccgctgatagtgccatttctgccctgtctgcatctcaggtccgctctggatactttgctgctggttttgctgatggttctgtcaggatatatgatgtttgctctcctgatagtaggcctgtctatgtggccaggccgcatgccccaagaacagaaaaggttgtgggcatagggtttcagcctgggtttgatccatacgagattgtaagtgcatctcaagctggagacattcagtttcttgatgttagaatggcagcagaaccctacctgactattgaggcacacaggggttcacttacagcattagcggttcatcggcatgccccagttgttgctagttcagccaagcagatgattaaagtgtttagtcttgaaggagaacagttgaggataattcgctacctgccatcttttatgggccaaagaacaggcagtgtaaattgcctttcttttcacccatacaaatcactcctggctgccggtgctggtcataatgctcttgtctctatctatgctgaggaaaattacaagtaagatcgaggcctatatctcatgctcatgataatgcagacacagtgcgatcgacaggccttacatttttggccaagtgatgctccacagcatggtgcagcttcaagatccaagatgatggtaagctttgtcacagagaaggtgttgatggctccatggctttcggtgcatattgcctgttggacggcgtgtgcaatttgtatgatacagtcaagaactcaagattcattaggcctccttgcattgtgaaccctaccctgatcctgccgttgaacttggaggccccatcaacaaattaatcatacctaagttaaccaaaatgtaaatagccagtgcattcgggttgtactttgtcagcattaatccctttttcaagtgtaaaaaggtctgaaggtgcttgatatgataaacatggcttggtagtggctgctgactgggcaagtggggttgtgcatatgggcctggtcgcacatttctgctcacagatgatgttgaatagatagatgtctgctcacagatgaggttgaatagatagatgtctgctcacagatgttgttgaatagatagatgcatttgtccagctaatatagcgctagatgggggtagcgttggcctgcatgaatgaaggaaagttgtcgagtgaggagtgaccttcattgccattctgtgccgcaacaagtctccatgtgttatcagatggccctgtagataatacatatatttgtagatgtgttttgttcggtgaattgtgctgaccgctgagtaaaatgtattgtgaacgttgttgataaatgctattgtaatgaatttgcaacaagaaaaaattatatgctattgtagtgtatatcacaactctggttgctttttatttttatttttttaaaaaaa

SEQ ID NO: 44998 - DNA, 4283 bp, Zea Mays
agcttcctcagttaattgatgatccaaatgctgagtttcagccaagtcctttttttacggaacaactgacggcttttgaagtgtggcttgatcatggctctgaggacaagaaacctcctgaacagttacccatagttcttcaggtaaggcattttgcttatacacttacatacaagtcaatattatctgtaaaatccagtttaactttgtaacctcttcacctttctctaagctgctatggttttaatttggtaaattttatattcgtattcctttatttatcttaatctgctactcactccaatcacaaaaaagactctcattttgggttgtgtgcagtcagcctacaaaaaaaaaacgattgttatttgctctggtgcgcattgagattgggcatttgaaaatattatggctagatttgtcccaaaacatactccctccgattcgttttagtagtcgttttggacatcatttcacataccaaggtgaaggctactttccagtcttacccttattatatacattcagttgtttctttcaacaagctctgtttcctgtttcaactggttatcaacgcttgtcaaggcaccccgtctgatgcggcttgggttcgaaacccttgctgttgtgtgccttaatattttttttgcgatttttgcacgttacttgcatgcgggtttttttgcatgcgcatgcatatgcaccctatctttctgaatcaaggacttgacaacgaagaaccctccggttccttttatcagtcacaagtactgcttagtcagtcacacagatttagagcgcttgttctgcttggaagatttcttgacatggggccatgggcagttgatttggccctgtctgtcggaatatttccttatgtactcaaactgcttccaacaaatacaatagagttacgtcaaattttagtgtttatatggacaaaaattctctctcttgataagtcttgtcaggttgacttggttaaagatggaggacatacatattttattaggtttcttgacagtttggatgctttcccagaacagcgtgcaatggccgcttttgttatagcagtcatcgtggatgggcataggatgggtcaagaggcttgtatgaatgcagggcttatagatgtttgcctgagacatctgcaacctgagaatcttcatgcacaaacagaacctttgcttttgcagtggctttgtttatgccttgggaaactctgggaagatttccctgaggctcagttacttggtctgcaaacaaatgcaccagaaactgtaatatgcttattgtcggagcctcgacctgaggtcagagctgctgctgtttttgcacttgggaatcttactacattatcaaattgccctgatgatgattctgatgatgatgaaaaggtgaaagctgaaataaatgtagttcgaagccttctccagatatcttcagatggtagtccccttgttagatctgaggttgctatagcgcttactcactttgcgttgggtcacaacaaaaatctcaaatctgttgctgcggagtattggaaacctcaatccaaatcgttgctgaagtcattaccatcattggcaaatataaataatccaagcaatgtttacagtcccaataatattctccaaggcagcattggtcctgtgctgagggttggcagtgatagcggtgccgctggtcgtgatggacacatttctacaagtagcccaattgcagcaagtagcatcatgcatggctctccccagtcagatgattcttcccaacactctgattcaggcatattactgagggagaatgcaagtaatggtggtctcagctacactaggtcgaggcctgttgataatgtcatttattctcaatttatatcaactatgtgttctgtttctaaagatcctgacccaagaattgcaactattggttggagagcactgacccttataggtgttgaacaagtggccatgaaaagtactcgatttaacagtggaggtctacaccgaggagagacatctgcgtcaacctttggaatggcacactcttcttcttggagagatatgaattctggaagcaactcgatgaaatttatgacccctcctgttagccctcctcagcatgattatcttctactaggattgcgccgagtgtgttctatggagtttggacagcatcctataaattcacctgatggctttgctaatctccttttaagctctgctacaggtcccagtaatgcagaactaaagaaacttcccgaatcaacaatttacaactggagttgtggtcacttctctaggccacttttaactgcctctgatgataatgaagaaaccaatgctagaagagaagagagagaacggattgcactagatttcatcactaagtgccagcgctcctcagcctgcaagattacaagccaaattgctagttgggatacaagatttgagttggggacaaaggcagctttattattgccattttctccgattgtcgtagcagctgatgaaaatgaaaaaataagtgtgtggaactatgacgatgcacaaccagtgaactcttttcacaaccataagttgtccgacagagggctatctaaacttttgcttatcaacgagcttgatgagtgcttgcttttggctgcctcaagtgatggaaatgtacgcatatggaaaaattttgcttgtaagggagggcagaaacttgtaactgctttttcatcagttcagggacatcgagctgctggtcgcagtattgtgattgactggcagcagcaatcttgttatctgtacgcatctggtgacatgtcttccatcttggtatgggatcttgacaaggaacaacttctcaacaccattccgtcatccgctgatagtgccatttctgccctgtctgcatctcaggtccgctctggatactttgctgctggttttgctgatggttctgtcaggatatatgatgtttgctctcctgatagtaggcctgtctatgtggccaggccgcatgccccaagaacagaaaaggttgtgggcatagggtttcagcctgggtttgatccatacgagattgtaagtgcatctcaagctggagacattcagtttcttgatgttagaatggcagcagaaccctacctgactattgaggcacacaggggttcacttacagcattagcggttcatcggcatgccccagttgttgctagttcagccaagcagatgattaaagtgtttagtcttgaaggagaacagttgaggataattcgctacctgccatcttttatgggccaaagaacaggcagtgtaaattgcctttcttttcacccatacaaatcactcctggctgccggtgctggtcataatgctcttgtctctatctatgctgaggaaaattacaagtaagatcgaggcctatatctcatgctcatgataatgcagacacagtgcgatcgacaggccttacatttttggccaagtgatgctccacagcatggtgcagcttcaagatccaagatgatggtaagctttgtcacagagaaggtgttgatggctccatggctttcggtgcatattgcctgttggacggcgtgtgcaatttgtatgatacagtcaagaactcaagattcattaggcctccttgcattgtgaaccctaccctgatcctgccgttgaacttggaggccccatcaacaaattaatcatacctaagttaaccaaaatgtaaatagccagtgcattcgggttgtactttgtcagcattaatccctttttcaagtgtaaaaaggtctgaaggtgcttgatatgataaacatggcttggtagtggctgctgactgggcaagtggggttgtgcatatgggcctggtcgcacatttctgctcacagatgatgttgaatagatagatgtctgctcacagatgaggttgaatagatagatgtctgctcacagatgttgttgaatagatagatgcatttgtccagctaatatagcgctagatgggggtagcgttggcctgcatgaatgaaggaaagttgtcgagtgaggagtgaccttcattgccattctgtgccgcaacaagtctccatgtgttatcagatggccctgtagataatacatatatttgtagatgtgttttgttcggtgaattgtgctgaccgctgagtaaaatgtattgtgaacgttgttgataaatgctattgtaatgaatttgcaacaagaaaaaattatatgctattgtagtgtatatcacaactctggttgctttttatttttatttttttaaaaaaa

SEQ ID NO: 44999 - DNA, 3802 bp, Zea Mays
agcttcctcagttaattgatgatccaaatgctgagtttcagccaagtcctttttttacggaacaactgacggcttttgaagtgtggcttgatcatggctctgaggacaagaaacctcctgaacagttacccatagttcttcagtcagcctacaaaaaaaaaacgattgttatttgctctggtgcgcattgagattgggcatttgaaaatattatggctagatttgtcccaaaacatactccctccgattcgttttagtagtcgttttggacatcatttcacataccaaggtactgcttagtcagtcacacagatttagagcgcttgttctgcttggaagatttcttgacatggggccatgggcagttgatttggccctgtctgtcggaatatttccttatgtactcaaactgcttccaacaaatacaatagagttacgtcaaattttagtgtttatatggacaaaaattctctctcttgataagtcttgtcaggttgacttggttaaagatggaggacatacatattttattaggtttcttgacagtttggatgctttcccagaacagcgtgcaatggccgcttttgttatagcagtcatcgtggatgggcataggatgggtcaagaggcttgtatgaatgcagggcttatagatgtttgcctgagacatctgcaacctgagaatcttcatgcacaaacagaacctttgcttttgcagtggctttgtttatgccttgggaaactctgggaagatttccctgaggctcagttacttggtctgcaaacaaatgcaccagaaactgtaatatgcttattgtcggagcctcgacctgaggtcagagctgctgctgtttttgcacttgggaatcttactacattatcaaattgccctgatgatgattctgatgatgatgaaaaggtgaaagctgaaataaatgtagttcgaagccttctccagatatcttcagatggtagtccccttgttagatctgaggttgctatagcgcttactcactttgcgttgggtcacaacaaaaatctcaaatctgttgctgcggagtattggaaacctcaatccaaatcgttgctgaagtcattaccatcattggcaaatataaataatccaagcaatgtttacagtcccaataatattctccaaggcagcattggtcctgtgctgagggttggcagtgatagcggtgccgctggtcgtgatggacacatttctacaagtagcccaattgcagcaagtagcatcatgcatggctctccccagtcagatgattcttcccaacactctgattcaggcatattactgagggagaatgcaagtaatggtggtctcagctacactaggtcgaggcctgttgataatgtcatttattctcaatttatatcaactatgtgttctgtttctaaagatcctgacccaagaattgcaactattggttggagagcactgacccttataggtgttgaacaagtggccatgaaaagtactcgatttaacagtggaggtctacaccgaggagagacatctgcgtcaacctttggaatggcacactcttcttcttggagagatatgaattctggaagcaactcgatgaaatttatgacccctcctgttagccctcctcagcatgattatcttctactaggattgcgccgagtgtgttctatggagtttggacagcatcctataaattcacctgatggctttgctaatctccttttaagctctgctacaggtcccagtaatgcagaactaaagaaacttcccgaatcaacaatttacaactggagttgtggtcacttctctaggccacttttaactgcctctgatgataatgaagaaaccaatgctagaagagaagagagagaacggattgcactagatttcatcactaagtgccagcgctcctcctgcaagattacaagccaaattgctagttgggatacaagatttgagttggggacaaaggcagctttattattgccattttctccgattgtcgtagcagctgatgaaaatgaaaaaataagtgtgtggaactatgacgatgcacaaccagtgaactcttttcacaaccataagttgtccgacagagggctatctaaacttttgcttatcaacgagcttgatgagtgcttgcttttggctgcctcaagtgatggaaatgtacgcatatggaaaaattttgcttgtaagggagggcagaaacttgtaactgctttttcatcagttcagggacatcgagctgctggtcgcagtattgtgattgactggcagcagcaatcttgttatctgtacgcatctggtgacatgtcttccatcttggtatgggatcttgacaaggaacaacttctcaacaccattccgtcatccgctgatagtgccatttctgccctgtctgcatctcaggtccgctctggatactttgctgctggttttgctgatggttctgtcaggatatatgatgtttgctctcctgatagtaggcctgtctatgtggccaggccgcatgccccaagaacagaaaaggttgtgggcatagggtttcagcctgggtttgatccatacgagattgtaagtgcatctcaagctggagacattcagtttcttgatgttagaatggcagcagaaccctacctgactattgaggcacacaggggttcacttacagcattagcggttcatcggcatgccccagttgttgctagttcagccaagcagatgattaaagtgtttagtcttgaaggagaacagttgaggataattcgctacctgccatcttttatgggccaaagaacaggcagtgtaaattgcctttcttttcacccatacaaatcactcctggctgccggtgctggtcataatgctcttgtctctatctatgctgaggaaaattacaagtaagatcgaggcctatatctcatgctcatgataatgcagacacagtgcgatcgacaggccttacatttttggccaagtgatgctccacagcatggtgcagcttcaagatccaagatgatggtaagctttgtcacagagaaggtgttgatggctccatggctttcggtgcatattgcctgttggacggcgtgtgcaatttgtatgatacagtcaagaactcaagattcattaggcctccttgcattgtgaaccctaccctgatcctgccgttgaacttggaggccccatcaacaaattaatcatacctaagttaaccaaaatgtaaatagccagtgcattcgggttgtactttgtcagcattaatccctttttcaagtgtaaaaaggtctgaaggtgcttgatatgataaacatggcttggtagtggctgctgactgggcaagtggggttgtgcatatgggcctggtcgcacatttctgctcacagatgatgttgaatagatagatgtctgctcacagatgaggttgaatagatagatgtctgctcacagatgttgttgaatagatagatgcatttgtccagctaatatagcgctagatgggggtagcgttggcctgcatgaatgaaggaaagttgtcgagtgaggagtgaccttcattgccattctgtgccgcaacaagtctccatgtgttatcagatggccctgtagataatacatatatttgtagatgtgttttgttcggtgaattgtgctgaccgctgagtaaaatgtattgtgaacgttgttgataaatgctattgtaatgaatttgcaacaagaaaaaattatatgctattgtagtgtatatcacaactctggttgctttttatttttatttttttaaaaaaa

SEQ ID NO: 45000 - DNA, 3410 bp, Zea Mays
agcttcctcagttaattgatgatccaaatgctgagtttcagccaagtcctttttttacggaacaactgacggcttttgaagtgtggcttgatcatggctctgaggacaagaaacctcctgaacagttacccatagttcttcaggtactgcttagtcagtcacacagatttagagcgcttgttctgcttggaagatttcttgacatggggccatgggcagttgatttggccctgtctgtcggaatatttccttatgtactcaaactgcttccaacaaatacaatagagttacgtcaaattttagtgtttatatggacaaaaattctctctcttgataagtcttgtcaggttgacttggttaaagatggaggacatacatattttattaggtttcttgacagtttggatgctttcccagaacagcgtgcaatggccgcttttgttatagcagtcatcgtggatgggcataggatgggtcaagaggcttgtatgaatgcagggcttatagatgtttgcctgagacatctgcaacctgagaatcttcatgcacaaacagaacctttgcttttgcagtggctttgtttatgccttgggaaactctgggaagatttccctgaggctcagttacttggtctgcaaacaaatgcaccagaaactgtaatatgcttattgtcggagcctcgacctgaggtcagagctgctgctgtttttgcacttgggaatcttactacattatcaaattgccctgatgatgattctgatgatgatgaaaaggtgaaagctgaaataaatgtagttcgaagccttctccagatatcttcagatggtagtccccttgttagatctgaggttgctatagcgcttactcactttgcgttgggtcacaacaaaaatctcaaatctgttgctgcggagtattggaaacctcaatccaaatcgttgctgaagtcattaccatcattggcaaatataaataatccaagcaatgtttacagtcccaataatattctccaaggcagcattggtcctgtgctgagggttggcagtgatagcggtgccgctggtcgtgatggacacatttctacaagtagcccaattgcagcaagtagcatcatgcatggctctccccagtcagatgattcttcccaacactctgattcaggcatattactgagggagaatgcaagtaatggtggtctcagctacactaggtcgaggcctgttgataatgtcatttattctcaatttatatcaactatgtgttctgtttctaaagatcctgacccaagaattgcaactattggttggagagcactgacccttataggtgttgaacaagtggccatgaaaagtactcgatttaacagtggaggtctacaccgaggagagacatctgcgtcaacctttggaatggcacactcttcttcttggagagatatgaattctggaagcaactcgatgaaatttatgacccctcctgttagccctcctcagcatgattatcttctactaggattgcgccgagtgtgttctatggagtttggacagcatcctataaattcacctgatggctttgctaatctccttttaagctctgctacaggtcccagtaatgcagaactaaagaaacttcccgaatcaacaatttacaactggagttgtggtcacttctctaggccacttttaactgcctctgatgataatgaagaaaccaatgctagaagagaagagagagaacggattgcactagatttcatcactaagtgccagcgctcctgtgatggaaatgtacgcatatggaaaaattttgcttgtaagggagggcagaaacttgtaactgctttttcatcagttcagggacatcgagctgctggtcgcagtattgtgattgactggcagcagcaatcttgttatctgtacgcatctggtgacatgtcttccatcttggtatgggatcttgacaaggaacaacttctcaacaccattccgtcatccgctgatagtgccatttctgccctgtctgcatctcaggtccgctctggatactttgctgctggttttgctgatggttctgtcaggatatatgatgtttgctctcctgatagtaggcctgtctatgtggccaggccgcatgccccaagaacagaaaaggttgtgggcatagggtttcagcctgggtttgatccatacgagattgtaagtgcatctcaagctggagacattcagtttcttgatgttagaatggcagcagaaccctacctgactattgaggcacacaggggttcacttacagcattagcggttcatcggcatgccccagttgttgctagttcagccaagcagatgattaaagtgtttagtcttgaaggagaacagttgaggataattcgctacctgccatcttttatgggccaaagaacaggcagtgtaaattgcctttcttttcacccatacaaatcactcctggctgccggtgctggtcataatgctcttgtctctatctatgctgaggaaaattacaagtaagatcgaggcctatatctcatgctcatgataatgcagacacagtgcgatcgacaggccttacatttttggccaagtgatgctccacagcatggtgcagcttcaagatccaagatgatggtaagctttgtcacagagaaggtgttgatggctccatggctttcggtgcatattgcctgttggacggcgtgtgcaatttgtatgatacagtcaagaactcaagattcattaggcctccttgcattgtgaaccctaccctgatcctgccgttgaacttggaggccccatcaacaaattaatcatacctaagttaaccaaaatgtaaatagccagtgcattcgggttgtactttgtcagcattaatccctttttcaagtgtaaaaaggtctgaaggtgcttgatatgataaacatggcttggtagtggctgctgactgggcaagtggggttgtgcatatgggcctggtcgcacatttctgctcacagatgatgttgaatagatagatgtctgctcacagatgaggttgaatagatagatgtctgctcacagatgttgttgaatagatagatgcatttgtccagctaatatagcgctagatgggggtagcgttggcctgcatgaatgaaggaaagttgtcgagtgaggagtgaccttcattgccattctgtgccgcaacaagtctccatgtgttatcagatggccctgtagataatacatatatttgtagatgtgttttgttcggtgaattgtgctgaccgctgagtaaaatgtattgtgaacgttgttgataaatgctattgtaatgaatttgcaacaagaaaaaattatatgctattgtagtgtatatcacaactctggttgctttttatttttatttttttaaaaaaa

SEQ ID NO: 45001 - DNA, 3654 bp, Zea Mays
aagcttcctcagttaattgatgatccaaatgctgagtttcagccaagtcctttttttacggaacaactgacggcttttgaagtgtggcttgatcatggctctgaggacaagaaacctcctgaacagttacccatagttcttcaggtactgcttagtcagtcacacagatttagagcgcttgttctgcttggaagatttcttgacatggggccatgggcagttgatttggccctgtctgtcggaatatttccttatgtactcaaactgcttccaacaaatacaatagagttacgtcaaattttagtgtttatatggacaaaaattctctctcttgataagtcttgtcaggttgacttggttaaagatggaggacatacatattttattaggtttcttgacagtttggatgctttcccagaacagcgtgcaatggccgcttttgttatagcagtcatcgtggatgggcataggatgggtcaagaggcttgtatgaatgcagggcttatagatgtttgcctgagacatctgcaacctgagaatcttcatgcacaaacagaacctttgcttttgcagtggctttgtttatgccttgggaaactctgggaagatttccctgaggctcagttacttggtctgcaaacaaatgcaccagaaactgtaatatgcttattgtcggagcctcgacctgaggtcagagctgctgctgtttttgcacttgggaatcttactacattatcaaattgccctgatgatgattctgatgatgatgaaaaggtgaaagctgaaataaatgtagttcgaagccttctccagatatcttcagatggtagtccccttgttagatctgaggttgctatagcgcttactcactttgcgttgggtcacaacaaaaatctcaaatctgttgctgcggagtattggaaacctcaatccaaatcgttgctgaagtcattaccatcattggcaaatataaataatccaagcaatgtttacagtcccaataatattctccaaggcagcattggtcctgtgctgagggttggcagtgatagcggtgccgctggtcgtgatggacacatttctacaagtagcccaattgcagcaagtagcatcatgcatggctctccccagtcagatgattcttcccaacactctgattcaggcatattactgagggagaatgcaagtaatggtggtctcagctacactaggtcgaggcctgttgataatgtcatttattctcaatttatatcaactatgtgttctgtttctaaagatcctgacccaagaattgcaactattggttggagagcactgacccttataggtgttgaacaagtggccatgaaaagtactcgatttaacagtggaggtctacaccgaggagagacatctgcgtcaacctttggaatggcacactcttcttcttggagagatatgaattctggaagcaactcgatgaaatttatgacccctcctgttagccctcctcagcatgattatcttctactaggattgcgccgagtgtgttctatggagtttggacagcatcctataaattcacctgatggctttgctaatctccttttaagctctgctacaggtcccagtaatgcagaactaaagaaacttcccgaatcaacaatttacaactggagttgtggtcacttctctaggccacttttaactgcctctgatgataatgaagaaaccaatgctagaagagaagagagagaacggattgcactagatttcatcactaagtgccagcgctcctcctgcaagattacaagccaaattgctagttgggatacaagatttgagttggggacaaaggcagctttattattgccattttctccgattgtcgtagcagctgatgaaaatgaaaaaataagtgtgtggaactatgacgatgcacaaccagtgaactcttttcacaaccataagttgtccgacagagggctatctaaacttttgcttatcaacgagcttgatgagtgcttgcttttggctgcctcaagtgatggaaatgtacgcatatggaaaaattttgcttgtaagggagggcagaaacttgtaactgctttttcatcagttcagggacatcgagctgctggtcgcagtattgtgattgactggcagcagcaatcttgttatctgtacgcatctggtgacatgtcttccatcttggtatgggatcttgacaaggaacaacttctcaacaccattccgtcatccgctgatagtgccatttctgccctgtctgcatctcaggtccgctctggatactttgctgctggttttgctgatggttctgtcaggatatatgatgtttgctctcctgataggcctgtctatgtggccaggccgcatgccccaagaacagaaaaggttgtgggcatagggtttcagcctgggtttgatccatacgagattgtaagtgcatctcaagctggagacattcagtttcttgatgttagaatggcagcagaaccctacctgactattgaggcacacaggggttcacttacagcattagcggttcatcggcatgccccagttgttgctagttcagccaagcagatgattaaagtgtttagtcttgaaggagaacagttgaggataattcgctacctgccatcttttatgggccaaagaacaggcagtgtaaattgcctttcttttcacccatacaaatcactcctggctgccggtgctggtcataatgctcttgtctctatctatgctgaggaaaattacaagtaagatcgaggcctatatctcatgctcatgataatgcagacacagtgcgatcgacaggccttacatttttggccaagtgatgctccacagcatggtgcagcttcaagatccaagatgatggtaagctttgtcacagagaaggtgttgatggctccatggctttcggtgcatattgcctgttggacggcgtgtgcaatttgtatgatacagtcaagaactcaagattcattaggcctccttgcattgtgaaccctaccctgatcctgccgttgaacttggaggccccatcaacaaattaatcatacctaagttaaccaaaatgtaaatagccagtgcattcgggttgtactttgtcagcattaatccctttttcaagtgtaaaaaggtctgaaggtgcttgatatgataaacatggcttggtagtggctgctgactgggcaagtggggttgtgcatatgggcctggtcgcacatttctgctcacagatgatgttgaatagatagatgtctgctcacagatgaggttgaatagatagatgtctgctcacagatgttgttgaatagatagatgcatttgtccagctaatatagcgctagatgggggtagcgttggcctgcatgaatgaaggaaagttgtcgagtgaggagtgaccttcattgccattctgtgccgcaacaagtctccatgtgttatcagatggccctgtagataatacatatatttgtagatgtgttttgttcggtgaattgtgctgaccgctgagtaaaatgtattgtgaacgttgttgataaatgctattgtaatgaatttgcaacaagaaaaaattatatgctattgtagtgtatatcacaactctggttgctttttatttttatttttttaaaaaaa

SEQ ID NO: 45002 - DNA, 3386 bp, Zea Mays
  misc_feature (1)..(1): n is a, c, g, or t
naagcttcctcagttaattgatgatccaaatgctgagtttcagccaagtcctttttttacggaacaactgacggcttttgaagtgtggcttgatcatggctctgaggacaagaaacctcctgaacagttacccatagttcttcaggtactgcttagtcagtcacacagatttagagcgcttgttctgcttggaagatttcttgacatggggccatgggcagttgatttggccctgtctgtcggaatatttccttatgtactcaaactgcttccaacaaatacaatagagttacgtcaaattttagtgtttatatggacaaaaattctctctcttgataagtcttgtcaggttgacttggttaaagatggaggacatacatattttattaggtttcttgacagtttggatgctttcccagaacagcgtgcaatggccgcttttgttatagcagtcatcgtggatgggcataggatgggtcaagaggcttgtatgaatgcagggcttatagatgtttgcctgagacatctgcaacctgagaatcttcatgcacaaacagaacctttgcttttgcagtggctttgtttatgccttgggaaactctgggaagatttccctgaggctcagttacttggtctgcaaacaaatgcaccagaaactgtaatatgcttattgtcggagcctcgacctgaggtcagagctgctgctgtttttgcacttgggaatcttactacattatcaaattgccctgatgatgattctgatgatgatgaaaaggtgaaagctgaaataaatgtagttcgaagccttctccagatatcttcagatggtagtccccttgttagatctgaggttgctatagcgcttactcactttgcgttgggtcacaacaaaaatctcaaatctgttgctgcggagtattggaaacctcaatccaaatcgttgctgaagtcattaccatcattggcaaatataaataatccaagcaatgtttacagtcccaataatattctccaaggcagcattggtcctgtgctgagggttggcagtgatagcggtgccgctggtcgtgatggacacatttctacaagtagcccaattgcagcaagtagcatcatgcatggctctccccagtcagatgattcttcccaacactctgattcaggcatattactgagggagaatgcaagtaatggtggtctcagctacactaggtgttgaacaagtggccatgaaaagtactcgatttaacagtggaggtctacaccgaggagagacatctgcgtcaacctttggaatggcacactcttcttcttggagagatatgaattctggtcccagtaatgcagaactaaagaaacttcccgaatcaacaatttacaactggagttgtggtcacttctctaggccacttttaactgcctctgatgataatgaagaaaccaatgctagaagagaagagagagaacggattgcactagatttcatcactaagtgccagcgctcctcctgcaagattacaagccaaattgctagttgggatacaagatttgagttggggacaaaggcagctttattattgccattttctccgattgtcgtagcagctgatgaaaatgaaaaaataagtgtgtggaactatgacgatgcacaaccagtgaactcttttcacaaccataagttgtccgacagagggctatctaaacttttgcttatcaacgagcttgatgagtgcttgcttttggctgcctcaagtgatggaaatgtacgcatatggaaaaattttgcttgtaagggagggcagaaacttgtaactgctttttcatcagttcagggacatcgagctgctggtcgcagtattgtgattgactggcagcagcaatcttgttatctgtacgcatctggtgacatgtcttccatcttggtatgggatcttgacaaggaacaacttctcaacaccattccgtcatccgctgatagtgccatttctgccctgtctgcatctcaggtccgctctggatactttgctgctggttttgctgatggttctgtcaggatatatgatgtttgctctcctgatagtaggcctgtctatgtggccaggccgcatgccccaagaacagaaaaggttgtgggcatagggtttcagcctgggtttgatccatacgagattgtaagtgcatctcaagctggagacattcagtttcttgatgttagaatggcagcagaaccctacctgactattgaggcacacaggggttcacttacagcattagcggttcatcggcatgccccagttgttgctagttcagccaagcagatgattaaagtgtttagtcttgaaggagaacagttgaggataattcgctacctgccatcttttatgggccaaagaacaggcagtgtaaattgcctttcttttcacccatacaaatcactcctggctgccggtgctggtcataatgctcttgtctctatctatgctgaggaaaattacaagtaagatcgaggcctatatctcatgctcatgataatgcagacacagtgcgatcgacaggccttacatttttggccaagtgatgctccacagcatggtgcagcttcaagatccaagatgatggtaagctttgtcacagagaaggtgttgatggctccatggctttcggtgcatattgcctgttggacggcgtgtgcaatttgtatgatacagtcaagaactcaagattcattaggcctccttgcattgtgaaccctaccctgatcctgccgttgaacttggaggccccatcaacaaattaatcatacctaagttaaccaaaatgtaaatagccagtgcattcgggttgtactttgtcagcattaatccctttttcaagtgtaaaaaggtctgaaggtgcttgatatgataaacatggcttggtagtggctgctgactgggcaagtggggttgtgcatatgggcctggtcgcacatttctgctcacagatgatgttgaatagatagatgtctgctcacagatgaggttgaatagatagatgtctgctcacagatgttgttgaatagatagatgcatttgtccagctaatatagcgctagatgggggtagcgttggcctgcatgaatgaaggaaagttgtcgagtgaggagtgaccttcattgccattctgtgccgcaacaagtctccatgtgttatcagatggccctgtagataatacatatatttgtagatgtgttttgttcggtgaattgtgctgaccgctgagtaaaatgtattgtgaacgttgttgataaatgctattgtaatgaatttgcaacaagaaaaaattatatgctattgtagtgtatatcacaactctggttgctttttatttttatttttttaaaaaaa

SEQ ID NO: 45003 - DNA, 3658 bp, Zea Mays
  misc_feature (1)..(1): n is a, c, g, or t
naagcttcctcagttaattgatgatccaaatgctgagtttcagccaagtcctttttttacggaacaactgacggcttttgaagtgtggcttgatcatggctctgaggacaagaaacctcctgaacagttacccatagttcttcaggtactgcttagtcagtcacacagatttagagcgcttgttctgcttggaagatttcttgacatggggccatgggcagttgatttggccctgtctgtcggaatatttccttatgtactcaaactgcttccaacaaatacaatagagttacgtcaaattttagtgtttatatggacaaaaattctctctcttgataagtcttgtcaggttgacttggttaaagatggaggacatacatattttattaggtttcttgacagtttggatgctttcccagaacagcgtgcaatggccgcttttgttatagcagtcatcgtggatgggcataggatgggtcaagaggcttgtatgaatgcagggcttatagatgtttgcctgagacatctgcaacctgagaatcttcatgcacaaacagaacctttgcttttgcagtggctttgtttatgccttgggaaactctgggaagatttccctgaggctcagttacttggtctgcaaacaaatgcaccagaaactgtaatatgcttattgtcggagcctcgacctgaggtcagagctgctgctgtttttgcacttgggaatcttactacattatcaaattgccctgatgatgattctgatgatgatgaaaaggtgaaagctgaaataaatgtagttcgaagccttctccagatatcttcagatggtagtccccttgttagatctgaggttgctatagcgcttactcactttgcgttgggtcacaacaaaaatctcaaatctgttgctgcggagtattggaaacctcaatccaaatcgttgctgaagtcattaccatcattggcaaatataaataatccaagcaatgtttacagtcccaataatattctccaaggcagcattggtcctgtgctgagggttggcagtgatagcggtgccgctggtcgtgatggacacatttctacaagtagcccaattgcagcaagtagcatcatgcatggctctccccagtcagatgattcttcccaacactctgattcaggcatattactgagggagaatgcaagtaatggtggtctcagctacactaggtcgaggcctgttgataatgtcatttattctcaatttatatcaactatgtgttctgtttctaaagatcctgacccaagaattgcaactattggttggagagcactgacccttataggtgttgaacaagtggccatgaaaagtactcgatttaacagtggaggtctacaccgaggagagacatctgcgtcaacctttggaatggcacactcttcttcttggagagatatgaattctggaagcaactcgatgaaatttatgacccctcctgttagccctcctcagcatgattatcttctactaggattgcgccgagtgtgttctatggagtttggacagcatcctataaattcacctgatggctttgctaatctccttttaagctctgctacaggtcccagtaatgcagaactaaagaaacttcccgaatcaacaatttacaactggagttgtggtcacttctctaggccacttttaactgcctctgatgataatgaagaaaccaatgctagaagagaagagagagaacggattgcactagatttcatcactaagtgccagcgctcctcctgcaagattacaagccaaattgctagttgggatacaagatttgagttggggacaaaggcagctttattattgccattttctccgattgtcgtagcagctgatgaaaatgaaaaaataagtgtgtggaactatgacgatgcacaaccagtgaactcttttcacaaccataagttgtccgacagagggctatctaaacttttgcttatcaacgagcttgatgagtgcttgcttttggctgcctcaagtgatggaaatgtacgcatatggaaaaattttgcttgtaagggagggcagaaacttgtaactgctttttcatcagttcagggacatcgagctgctggtcgcagtattgtgattgactggcagcagcaatcttgttatctgtacgcatctggtgacatgtcttccatcttggtatgggatcttgacaaggaacaacttctcaacaccattccgtcatccgctgatagtgccatttctgccctgtctgcatctcaggtccgctctggatactttgctgctggttttgctgatggttctgtcaggatatatgatgtttgctctcctgatagtaggcctgtctatgtggccaggccgcatgccccaagaacagaaaaggttgtgggcatagggtttcagcctgggtttgatccatacgagattgtaagtgcatctcaagctggagacattcagtttcttgatgttagaatggcagcagaaccctacctgactattgaggcacacaggggttcacttacagcattagcggttcatcggcatgccccagttgttgctagttcagccaagcagatgattaaagtgtttagtcttgaaggagaacagttgaggataattcgctacctgccatcttttatgggccaaagaacaggcagtgtaaattgcctttcttttcacccatacaaatcactcctggctgccggtgctggtcataatgctcttgtctctatctatgctgaggaaaattacaagtaagatcgaggcctatatctcatgctcatgataatgcagacacagtgcgatcgacaggccttacatttttggccaagtgatgctccacagcatggtgcagcttcaagatccaagatgatggtaagctttgtcacagagaaggtgttgatggctccatggctttcggtgcatattgcctgttggacggcgtgtgcaatttgtatgatacagtcaagaactcaagattcattaggcctccttgcattgtgaaccctaccctgatcctgccgttgaacttggaggccccatcaacaaattaatcatacctaagttaaccaaaatgtaaatagccagtgcattcgggttgtactttgtcagcattaatccctttttcaagtgtaaaaaggtctgaaggtgcttgatatgataaacatggcttggtagtggctgctgactgggcaagtggggttgtgcatatgggcctggtcgcacatttctgctcacagatgatgttgaatagatagatgtctgctcacagatgaggttgaatagatagatgtctgctcacagatgttgttgaatagatagatgcatttgtccagctaatatagcgctagatgggggtagcgttggcctgcatgaatgaaggaaagttgtcgagtgaggagtgaccttcattgccattctgtgccgcaacaagtctccatgtgttatcagatggccctgtagataatacatatatttgtagatgtgttttgttcggtgaattgtgctgaccgctgagtaaaatgtattgtgaacgttgttgataaatgctattgtaatgaatttgcaacaagaaaaaattatatgctattgtagtgtatatcacaactctggttgctttttatttttatttttttaaaaaaa

SEQ ID NO: 45004 - DNA, 5070 bp, Zea Mays
  misc_feature (1)..(1): n is a, c, g, or t
naagcttcctcagttaattgatgatccaaatgctgagtttcagccaagtcctttttttacggaacaactgacggcttttgaagtgtggcttgatcatggctctgaggacaagaaacctcctgaacagttacccatagttcttcaggtaaggcattttgcttatacacttacatacaagtcaatattatctgtaaaatccagtttaactttgtaacctcttcacctttctctaagctgctatggttttaatttggtaaattttatattcgtattcctttatttatcttaatctgctactcactccaatcacaaaaaagactctcattttgggttgtgtgcagtcagcctacaaaaaaaaaacgattgttatttgctctggtgcgcattgagattgggcatttgaaaatattatggctagatttgtcccaaaacatactccctccgattcgttttagtagtcgttttggacatcatttcacataccaaggtgaaggctactttccagtcttacccttattatatacattcagttgtttctttcaacaagctctgtttcctgtttcaactggttatcaacgcttgtcaaggcaccccgtctgatgcggcttgggttcgaaacccttgctgttgtgtgccttaatattttttttgcgatttttgcacgttacttgcatgcgggtttttttgcatgcgcatgcatatgcaccctatctttctgaatcaaggacttgacaacgaagaaccctccggttccttttatcagtcacaagtaagtttattttttgaaccggccacatataacttgacaatttttcttgatttagttttattaaccaaataaaaaaactaacattttcttgatttagatggtggtgctactaggaggaaacgaagcgcgtgtgtggtgccaaggcttgctggcatggctgtatgcatgcaaacactcggcatagttaacggccatcaactatagacggctgctgacggtcctttgccgagggtcacgtttcgccaagtgtttgacgctcggcaaagactcctttgccgagcgtcagcttatgccgagtgtttggcactcgacaaagggggtctgtgccgagtgccgttcgtcgccgatagtggccctcaacaaagcttgttttgctgagtgcccaataaaatgcacttggcaaagaacttgacgctcggcaaagagccggattccggcagtgtacgcgtggcttaggaagtggaaacgctgcagcggtaatcgtgtgagcaattaacgctgcatgcagccgctcttttggatttaatttccaccggctgcatgcaagggcaaggacatccaaaatccccttgaaacgtgccagcaacttcattttagattgttttgaaaaaacggcagaatgactagtaatgggaaccggagggagtaaaacaaatagtcatgcaattttattattccttataaattaccgtagtacaaattacttgacaaagttatgttttgtggatcatgccattacccaaaatacactataatatgactggagggcttatatttcttttattgttttactttgcttacatctcttttttgcaggtactgcttagtcagtcacacagatttagagcgcttgttctgcttggaagatttcttgacatggggccatgggcagttgatttggccctgtctgtcggaatatttccttatgtactcaaactgcttccaacaaatacaatagagttacgtcaaattttagtgtttatatggacaaaaattctctctcttgataagtcttgtcaggttgacttggttaaagatggaggacatacatattttattaggtttcttgacagtttggatgctttcccagaacagcgtgcaatggccgcttttgttatagcagtcatcgtggatgggcataggatgggtcaagaggcttgtatgaatgcagggcttatagatgtttgcctgagacatctgcaacctgagaatcttcatgcacaaacagaacctttgcttttgcagtggctttgtttatgccttgggaaactctgggaagatttccctgaggctcagttacttggtctgcaaacaaatgcaccagaaactgtaatatgcttattgtcggagcctcgacctgaggtcagagctgctgctgtttttgcacttgggaatcttactacattatcaaattgccctgatgatgattctgatgatgatgaaaaggtgaaagctgaaataaatgtagttcgaagccttctccagatatcttcagatggtagtccccttgttagatctgaggttgctatagcgcttactcactttgcgttgggtcacaacaaaaatctcaaatctgttgctgcggagtattggaaacctcaatccaaatcgttgctgaagtcattaccatcattggcaaatataaataatccaagcaatgtttacagtcccaataatattctccaaggcagcattggtcctgtgctgagggttggcagtgatagcggtgccgctggtcgtgatggacacatttctacaagtagcccaattgcagcaagtagcatcatgcatggctctccccagtcagatgattcttcccaacactctgattcaggcatattactgagggagaatgcaagtaatggtggtctcagctacactaggtcgaggcctgttgataatgtcatttattctcaatttatatcaactatgtgttctgtttctaaagatcctgacccaagaattgcaactattggttggagagcactgacccttataggtgttgaacaagtggccatgaaaagtactcgatttaacagtggaggtctacaccgaggagagacatctgcgtcaacctttggaatggcacactcttcttcttggagagatatgaattctggaagcaactcgatgaaatttatgacccctcctgttagccctcctcagcatgattatcttctactaggattgcgccgagtgtgttctatggagtttggacagcatcctataaattcacctgatggctttgctaatctccttttaagctctgctacaggtcccagtaatgcagaactaaagaaacttcccgaatcaacaatttacaactggagttgtggtcacttctctaggccacttttaactgcctctgatgataatgaagaaaccaatgctagaagagaagagagagaacggattgcactagatttcatcactaagtgccagcgctcctcctgcaagattacaagccaaattgctagttgggatacaagatttgagttggggacaaaggcagctttattattgccattttctccgattgtcgtagcagctgatgaaaatgaaaaaataagttctgtatcatgccagtgtgtggaactatgacgatgcacaaccagtgaactcttttcacaaccataagttgtccgacagagggctatctaaacttttgcttatcaacgagcttgatgagtgcttgcttttggctgcctcaaggagggcagaaacttgtaactgctttttcatcagttcagggacatcgagctgctggtcgcagtattgtgattgactggcagcagcaatcttgttatctgtacgcatctggtgacatgtcttccatcttggtatgggatcttgacaaggaacaacttctcaacaccattccgtcatccgctgatagtgccatttctgccctgtctgcatctcaggtccgctctggatactttgctgctggttttgctgatggttctgtcaggatatatgatgtttgctctcctgataggcctgtctatgtggccaggccgcatgccccaagaacagaaaaggttgtgggcatagggtttcagcctgggtttgatccatacgagattgtaagtgcatctcaagctggagacattcagtttcttgatgttagaatggcagcagaaccctacctgactattgaggcacacaggggttcacttacagcattagcggttcatcggcatgccccagttgttgctagttcagccaagcagatgattaaagtgtttagtcttgaaggagaacagttgaggataattcgctacctgccatcttttatgggccaaagaacaggcagtgtaaattgcctttcttttcacccatacaaatcactcctggctgccggtgctggtcataatgctcttgtctctatctatgctgaggaaaattacaagtaagatcgaggcctatatctcatgctcatgataatgcagacacagtgcgatcgacaggccttacatttttggccaagtgatgctccacagcatggtgcagcttcaagatccaagatgatggtaagctttgtcacagagaaggtgttgatggctccatggctttcggtgcatattgcctgttggacggcgtgtgcaatttgtatgatacagtcaagaactcaagattcattaggcctccttgcattgtgaaccctaccctgatcctgccgttgaacttggaggccccatcaacaaattaatcatacctaagttaaccaaaatgtaaatagccagtgcattcgggttgtactttgtcagcattaatccctttttcaagtgtaaaaaggtctgaaggtgcttgatatgataaacatggcttggtagtggctgctgactgggcaagtggggttgtgcatatgggcctggtcgcacatttctgctcacagatgatgttgaatagatagatgtctgctcacagatgaggttgaatagatagatgtctgctcacagatgttgttgaatagatagatgcatttgtccagctaatatagcgctagatgggggtagcgttggcctgcatgaatgaaggaaagttgtcgagtgaggagtgaccttcattgccattctgtgccgcaacaagtctccatgtgttatcagatggccctgtagataatacatatatttgtagatgtgttttgttcggtgaattgtgctgaccgctgagtaaaatgtattgtgaacgttgttgataaatgctattgtaatgaatttgcaacaagaaaaaattatatgctattgtagtgtatatcacaactctggttgctttttatttttatttttttaaaaaaa

SEQ ID NO: 45005 - DNA, 3807 bp, Zea Mays
  misc_feature (1)..(1): n is a, c, g, or t
naagcttcctcagttaattgatgatccaaatgctgagtttcagccaagtcctttttttacggaacaactgacggcttttgaagtgtggcttgatcatggctctgaggacaagaaacctcctgaacagttacccatagttcttcagtcagcctacaaaaaaaaaacgattgttatttgctctggtgcgcattgagattgggcatttgaaaatattatggctagatttgtcccaaaacatactccctccgattcgttttagtagtcgttttggacatcatttcacataccaaggtactgcttagtcagtcacacagatttagagcgcttgttctgcttggaagatttcttgacatggggccatgggcagttgatttggccctgtctgtcggaatatttccttatgtactcaaactgcttccaacaaatacaatagagttacgtcaaattttagtgtttatatggacaaaaattctctctcttgataagtcttgtcaggttgacttggttaaagatggaggacatacatattttattaggtttcttgacagtttggatgctttcccagaacagcgtgcaatggccgcttttgttatagcagtcatcgtggatgggcataggatgggtcaagaggcttgtatgaatgcagggcttatagatgtttgcctgagacatctgcaacctgagaatcttcatgcacaaacagaacctttgcttttgcagtggctttgtttatgccttgggaaactctgggaagatttccctgaggctcagttacttggtctgcaaacaaatgcaccagaaactgtaatatgcttattgtcggagcctcgacctgaggtcagagctgctgctgtttttgcacttgggaatcttactacattatcaaattgccctgatgatgattctgatgatgatgaaaaggtgaaagctgaaataaatgtagttcgaagccttctccagatatcttcagatggtagtccccttgttagatctgaggttgctatagcgcttactcactttgcgttgggtcacaacaaaaatctcaaatctgttgctgcggagtattggaaacctcaatccaaatcgttgctgaagtcattaccatcattggcaaatataaataatccaagcaatgtttacagtcccaataatattctccaaggcagcattggtcctgtgctgagggttggcagtgatagcggtgccgctggtcgtgatggacacatttctacaagtagcccaattgcagcaagtagcatcatgcatggctctccccagtcagatgattcttcccaacactctgattcaggcatattactgagggagaatgcaagtaatggtggtctcagctacactaggtcgaggcctgttgataatgtcatttattctcaatttatatcaactatgtgttctgtttctaaagatcctgacccaagaattgcaactattggttggagagcactgacccttataggtgttgaacaagtggccatgaaaagtactcgatttaacagtggaggtctacaccgaggagagacatctgcgtcaacctttggaatggcacactcttcttcttggagagatatgaattctggaagcaactcgatgaaatttatgacccctcctgttagccctcctcagcatgattatcttctactaggattgcgccgagtgtgttctatggagtttggacagcatcctataaattcacctgatggctttgctaatctccttttaagctctgctacaggtcccagtaatgcagaactaaagaaacttcccgaatcaacaatttacaactggagttgtggtcacttctctaggccacttttaactgcctctgatgataatgaagaaaccaatgctagaagagaagagagagaacggattgcactagatttcatcactaagtgccagcgctcctcagcctgcaagattacaagccaaattgctagttgggatacaagatttgagttggggacaaaggcagctttattattgccattttctccgattgtcgtagcagctgatgaaaatgaaaaaataagtgtgtggaactatgacgatgcacaaccagtgaactcttttcacaaccataagttgtccgacagagggctatctaaacttttgcttatcaacgagcttgatgagtgcttgcttttggctgcctcaagtgatggaaatgtacgcatatggaaaaattttgcttgtaagggagggcagaaacttgtaactgctttttcatcagttcagggacatcgagctgctggtcgcagtattgtgattgactggcagcagcaatcttgttatctgtacgcatctggtgacatgtcttccatcttggtatgggatcttgacaaggaacaacttctcaacaccattccgtcatccgctgatagtgccatttctgccctgtctgcatctcaggtccgctctggatactttgctgctggttttgctgatggttctgtcaggatatatgatgtttgctctcctgatagtaggcctgtctatgtggccaggccgcatgccccaagaacagaaaaggttgtgggcatagggtttcagcctgggtttgatccatacgagattgtaagtgcatctcaagctggagacattcagtttcttgatgttagaatggcagcagaaccctacctgactattgaggcacacaggggttcacttacagcattagcggttcatcggcatgccccagttgttgctagttcagccaagcagatgattaaagtgtttagtcttgaaggagaacagttgaggataattcgctacctgccatcttttatgggccaaagaacaggcagtgtaaattgcctttcttttcacccatacaaatcactcctggctgccggtgctggtcataatgctcttgtctctatctatgctgaggaaaattacaagtaagatcgaggcctatatctcatgctcatgataatgcagacacagtgcgatcgacaggccttacatttttggccaagtgatgctccacagcatggtgcagcttcaagatccaagatgatggtaagctttgtcacagagaaggtgttgatggctccatggctttcggtgcatattgcctgttggacggcgtgtgcaatttgtatgatacagtcaagaactcaagattcattaggcctccttgcattgtgaaccctaccctgatcctgccgttgaacttggaggccccatcaacaaattaatcatacctaagttaaccaaaatgtaaatagccagtgcattcgggttgtactttgtcagcattaatccctttttcaagtgtaaaaaggtctgaaggtgcttgatatgataaacatggcttggtagtggctgctgactgggcaagtggggttgtgcatatgggcctggtcgcacatttctgctcacagatgatgttgaatagatagatgtctgctcacagatgaggttgaatagatagatgtctgctcacagatgttgttgaatagatagatgcatttgtccagctaatatagcgctagatgggggtagcgttggcctgcatgaatgaaggaaagttgtcgagtgaggagtgaccttcattgccattctgtgccgcaacaagtctccatgtgttatcagatggccctgtagataatacatatatttgtagatgtgttttgttcggtgaattgtgctgaccgctgagtaaaatgtattgtgaacgttgttgataaatgctattgtaatgaatttgcaacaagaaaaaattatatgctattgtagtgtatatcacaactctggttgctttttatttttatttttttaaaaaaa

SEQ ID NO: 45006 - DNA, 3661 bp, Zea Mays
  misc_feature (1)..(1): n is a, c, g, or t
naagcttcctcagttaattgatgatccaaatgctgagtttcagccaagtcctttttttacggaacaactgacggcttttgaagtgtggcttgatcatggctctgaggacaagaaacctcctgaacagttacccatagttcttcaggtactgcttagtcagtcacacagatttagagcgcttgttctgcttggaagatttcttgacatggggccatgggcagttgatttggccctgtctgtcggaatatttccttatgtactcaaactgcttccaacaaatacaatagagttacgtcaaattttagtgtttatatggacaaaaattctctctcttgataagtcttgtcaggttgacttggttaaagatggaggacatacatattttattaggtttcttgacagtttggatgctttcccagaacagcgtgcaatggccgcttttgttatagcagtcatcgtggatgggcataggatgggtcaagaggcttgtatgaatgcagggcttatagatgtttgcctgagacatctgcaacctgagaatcttcatgcacaaacagaacctttgcttttgcagtggctttgtttatgccttgggaaactctgggaagatttccctgaggctcagttacttggtctgcaaacaaatgcaccagaaactgtaatatgcttattgtcggagcctcgacctgaggtcagagctgctgctgtttttgcacttgggaatcttactacattatcaaattgccctgatgatgattctgatgatgatgaaaaggtgaaagctgaaataaatgtagttcgaagccttctccagatatcttcagatggtagtccccttgttagatctgaggttgctatagcgcttactcactttgcgttgggtcacaacaaaaatctcaaatctgttgctgcggagtattggaaacctcaatccaaatcgttgctgaagtcattaccatcattggcaaatataaataatccaagcaatgtttacagtcccaataatattctccaaggcagcattggtcctgtgctgagggttggcagtgatagcggtgccgctggtcgtgatggacacatttctacaagtagcccaattgcagcaagtagcatcatgcatggctctccccagtcagatgattcttcccaacactctgattcaggcatattactgagggagaatgcaagtaatggtggtctcagctacactaggtcgaggcctgttgataatgtcatttattctcaatttatatcaactatgtgttctgtttctaaagatcctgacccaagaattgcaactattggttggagagcactgacccttataggtgttgaacaagtggccatgaaaagtactcgatttaacagtggaggtctacaccgaggagagacatctgcgtcaacctttggaatggcacactcttcttcttggagagatatgaattctggaagcaactcgatgaaatttatgacccctcctgttagccctcctcagcatgattatcttctactaggattgcgccgagtgtgttctatggagtttggacagcatcctataaattcacctgatggctttgctaatctccttttaagctctgctacaggtcccagtaatgcagaactaaagaaacttcccgaatcaacaatttacaactggagttgtggtcacttctctaggccacttttaactgcctctgatgataatgaagaaaccaatgctagaagagaagagagagaacggattgcactagatttcatcactaagtgccagcgctcctcagcctgcaagattacaagccaaattgctagttgggatacaagatttgagttggggacaaaggcagctttattattgccattttctccgattgtcgtagcagctgatgaaaatgaaaaaataagtgtgtggaactatgacgatgcacaaccagtgaactcttttcacaaccataagttgtccgacagagggctatctaaacttttgcttatcaacgagcttgatgagtgcttgcttttggctgcctcaagtgatggaaatgtacgcatatggaaaaattttgcttgtaagggagggcagaaacttgtaactgctttttcatcagttcagggacatcgagctgctggtcgcagtattgtgattgactggcagcagcaatcttgttatctgtacgcatctggtgacatgtcttccatcttggtatgggatcttgacaaggaacaacttctcaacaccattccgtcatccgctgatagtgccatttctgccctgtctgcatctcaggtccgctctggatactttgctgctggttttgctgatggttctgtcaggatatatgatgtttgctctcctgatagtaggcctgtctatgtggccaggccgcatgccccaagaacagaaaaggttgtgggcatagggtttcagcctgggtttgatccatacgagattgtaagtgcatctcaagctggagacattcagtttcttgatgttagaatggcagcagaaccctacctgactattgaggcacacaggggttcacttacagcattagcggttcatcggcatgccccagttgttgctagttcagccaagcagatgattaaagtgtttagtcttgaaggagaacagttgaggataattcgctacctgccatcttttatgggccaaagaacaggcagtgtaaattgcctttcttttcacccatacaaatcactcctggctgccggtgctggtcataatgctcttgtctctatctatgctgaggaaaattacaagtaagatcgaggcctatatctcatgctcatgataatgcagacacagtgcgatcgacaggccttacatttttggccaagtgatgctccacagcatggtgcagcttcaagatccaagatgatggtaagctttgtcacagagaaggtgttgatggctccatggctttcggtgcatattgcctgttggacggcgtgtgcaatttgtatgatacagtcaagaactcaagattcattaggcctccttgcattgtgaaccctaccctgatcctgccgttgaacttggaggccccatcaacaaattaatcatacctaagttaaccaaaatgtaaatagccagtgcattcgggttgtactttgtcagcattaatccctttttcaagtgtaaaaaggtctgaaggtgcttgatatgataaacatggcttggtagtggctgctgactgggcaagtggggttgtgcatatgggcctggtcgcacatttctgctcacagatgatgttgaatagatagatgtctgctcacagatgaggttgaatagatagatgtctgctcacagatgttgttgaatagatagatgcatttgtccagctaatatagcgctagatgggggtagcgttggcctgcatgaatgaaggaaagttgtcgagtgaggagtgaccttcattgccattctgtgccgcaacaagtctccatgtgttatcagatggccctgtagataatacatatatttgtagatgtgttttgttcggtgaattgtgctgaccgctgagtaaaatgtattgtgaacgttgttgataaatgctattgtaatgaatttgcaacaagaaaaaattatatgctattgtagtgtatatcacaactctggttgctttttatttttatttttttaaaaaaa

SEQ ID NO: 45007 - DNA, 5101 bp, Zea Mays
  misc_feature (1)..(1): n is a, c, g, or t
naagcttcctcagttaattgatgatccaaatgctgagtttcagccaagtcctttttttacggaacaactgacggcttttgaagtgtggcttgatcatggctctgaggacaagaaacctcctgaacagttacccatagttcttcaggtaaggcattttgcttatacacttacatacaagtcaatattatctgtaaaatccagtttaactttgtaacctcttcacctttctctaagctgctatggttttaatttggtaaattttatattcgtattcctttatttatcttaatctgctactcactccaatcacaaaaaagactctcattttgggttgtgtgcagtcagcctacaaaaaaaaaacgattgttatttgctctggtgcgcattgagattgggcatttgaaaatattatggctagatttgtcccaaaacatactccctccgattcgttttagtagtcgttttggacatcatttcacataccaaggtgaaggctactttccagtcttacccttattatatacattcagttgtttctttcaacaagctctgtttcctgtttcaactggttatcaacgcttgtcaaggcaccccgtctgatgcggcttgggttcgaaacccttgctgttgtgtgccttaatattttttttgcgatttttgcacgttacttgcatgcgggtttttttgcatgcgcatgcatatgcaccctatctttctgaatcaaggacttgacaacgaagaaccctccggttccttttatcagtcacaagtaagtttattttttgaaccggccacatataacttgacaatttttcttgatttagttttattaaccaaataaaaaaactaacattttcttgatttagatggtggtgctactaggaggaaacgaagcgcgtgtgtggtgccaaggcttgctggcatggctgtatgcatgcaaacactcggcatagttaacggccatcaactatagacggctgctgacggtcctttgccgagggtcacgtttcgccaagtgtttgacgctcggcaaagactcctttgccgagcgtcagcttatgccgagtgtttggcactcgacaaagggggtctgtgccgagtgccgttcgtcgccgatagtggccctcaacaaagcttgttttgctgagtgcccaataaaatgcacttggcaaagaacttgacgctcggcaaagagccggattccggcagtgtacgcgtggcttaggaagtggaaacgctgcagcggtaatcgtgtgagcaattaacgctgcatgcagccgctcttttggatttaatttccaccggctgcatgcaagggcaaggacatccaaaatccccttgaaacgtgccagcaacttcattttagattgttttgaaaaaacggcagaatgactagtaatgggaaccggagggagtaaaacaaatagtcatgcaattttattattccttataaattaccgtagtacaaattacttgacaaagttatgttttgtggatcatgccattacccaaaatacactataatatgactggagggcttatatttcttttattgttttactttgcttacatctcttttttgcaggtactgcttagtcagtcacacagatttagagcgcttgttctgcttggaagatttcttgacatggggccatgggcagttgatttggccctgtctgtcggaatatttccttatgtactcaaactgcttccaacaaatacaatagagttacgtcaaattttagtgtttatatggacaaaaattctctctcttgataagtcttgtcaggttgacttggttaaagatggaggacatacatattttattaggtttcttgacagtttggatgctttcccagaacagcgtgcaatggccgcttttgttatagcagtcatcgtggatgggcataggatgggtcaagaggcttgtatgaatgcagggcttatagatgtttgcctgagacatctgcaacctgagaatcttcatgcacaaacagaacctttgcttttgcagtggctttgtttatgccttgggaaactctgggaagatttccctgaggctcagttacttggtctgcaaacaaatgcaccagaaactgtaatatgcttattgtcggagcctcgacctgaggtcagagctgctgctgtttttgcacttgggaatcttactacattatcaaattgccctgatgatgattctgatgatgatgaaaaggtgaaagctgaaataaatgtagttcgaagccttctccagatatcttcagatggtagtccccttgttagatctgaggttgctatagcgcttactcactttgcgttgggtcacaacaaaaatctcaaatctgttgctgcggagtattggaaacctcaatccaaatcgttgctgaagtcattaccatcattggcaaatataaataatccaagcaatgtttacagtcccaataatattctccaaggcagcattggtcctgtgctgagggttggcagtgatagcggtgccgctggtcgtgatggacacatttctacaagtagcccaattgcagcaagtagcatcatgcatggctctccccagtcagatgattcttcccaacactctgattcaggcatattactgagggagaatgcaagtaatggtggtctcagctacactaggtcgaggcctgttgataatgtcatttattctcaatttatatcaactatgtgttctgtttctaaagatcctgacccaagaattgcaactattggttggagagcactgacccttataggtgttgaacaagtggccatgaaaagtactcgatttaacagtggaggtctacaccgaggagagacatctgcgtcaacctttggaatggcacactcttcttcttggagagatatgaattctggaagcaactcgatgaaatttatgacccctcctgttagccctcctcagcatgattatcttctactaggattgcgccgagtgtgttctatggagtttggacagcatcctataaattcacctgatggctttgctaatctccttttaagctctgctacaggtcccagtaatgcagaactaaagaaacttcccgaatcaacaatttacaactggagttgtggtcacttctctaggccacttttaactgcctctgatgataatgaagaaaccaatgctagaagagaagagagagaacggattgcactagatttcatcactaagtgccagcgctcctcagcctgcaagattacaagccaaattgctagttgggatacaagatttgagttggggacaaaggcagctttattattgccattttctccgattgtcgtagcagctgatgaaaatgaaaaaataagtgtgtggaactatgacgatgcacaaccagtgaactcttttcacaaccataagttgtccgacagagggctatctaaacttttgcttatcaacgagcttgatgagtgcttgcttttggctgcctcaagtgatggaaatgtacgcatatggaaaaattttgcttgtaagggagggcagaaacttgtaactgctttttcatcagttcagggacatcgagctgctggtcgcagtattgtgattgactggcagcagcaatcttgttatctgtacgcatctggtgacatgtcttccatcttggtatgggatcttgacaaggaacaacttctcaacaccattccgtcatccgctgatagtgccatttctgccctgtctgcatctcaggtccgctctggatactttgctgctggttttgctgatggttctgtcaggatatatgatgtttgctctcctgatagtaggcctgtctatgtggccaggccgcatgccccaagaacagaaaaggttgtgggcatagggtttcagcctgggtttgatccatacgagattgtaagtgcatctcaagctggagacattcagtttcttgatgttagaatggcagcagaaccctacctgactattgaggcacacaggggttcacttacagcattagcggttcatcggcatgccccagttgttgctagttcagccaagcagatgattaaagtgtttagtcttgaaggagaacagttgaggataattcgctacctgccatcttttatgggccaaagaacaggcagtgtaaattgcctttcttttcacccatacaaatcactcctggctgccggtgctggtcataatgctcttgtctctatctatgctgaggaaaattacaagtaagatcgaggcctatatctcatgctcatgataatgcagacacagtgcgatcgacaggccttacatttttggccaagtgatgctccacagcatggtgcagcttcaagatccaagatgatggtaagctttgtcacagagaaggtgttgatggctccatggctttcggtgcatattgcctgttggacggcgtgtgcaatttgtatgatacagtcaagaactcaagattcattaggcctccttgcattgtgaaccctaccctgatcctgccgttgaacttggaggccccatcaacaaattaatcatacctaagttaaccaaaatgtaaatagccagtgcattcgggttgtactttgtcagcattaatccctttttcaagtgtaaaaaggtctgaaggtgcttgatatgataaacatggcttggtagtggctgctgactgggcaagtggggttgtgcatatgggcctggtcgcacatttctgctcacagatgatgttgaatagatagatgtctgctcacagatgaggttgaatagatagatgtctgctcacagatgttgttgaatagatagatgcatttgtccagctaatatagcgctagatgggggtagcgttggcctgcatgaatgaaggaaagttgtcgagtgaggagtgaccttcattgccattctgtgccgcaacaagtctccatgtgttatcagatggccctgtagataatacatatatttgtagatgtgttttgttcggtgaattgtgctgaccgctgagtaaaatgtattgtgaacgttgttgataaatgctattgtaatgaatttgcaacaagaaaaaattatatgctattgtagtgtatatcacaactctggttgctttttatttttatttttttaaaaaaa

SEQ ID NO: 45008 - DNA, 4945 bp, Zea Mays
  misc_feature (1)..(1): n is a, c, g, or t
naagcttcctcagttaattgatgatccaaatgctgagtttcagccaagtcctttttttacggaacaactgacggcttttgaagtgtggcttgatcatggctctgaggacaagaaacctcctgaacagttacccatagttcttcaggtaaggcattttgcttatacacttacatacaagtcaatattatctgtaaaatccagtttaactttgtaacctcttcacctttctctaagctgctatggttttaatttggtaaattttatattcgtattcctttatttatcttaatctgctactcactccaatcacaaaaaagactctcattttgggttgtgtgcagtcagcctacaaaaaaaaaacgattgttatttgctctggtgcgcattgagattgggcatttgaaaatattatggctagatttgtcccaaaacatactccctccgattcgttttagtagtcgttttggacatcatttcacataccaaggtgaaggctactttccagtcttacccttattatatacattcagttgtttctttcaacaagctctgtttcctgtttcaactggttatcaacgcttgtcaaggcaccccgtctgatgcggcttgggttcgaaacccttgctgttgtgtgccttaatattttttttgcgatttttgcacgttacttgcatgcgggtttttttgcatgcgcatgcatatgcaccctatctttctgaatcaaggacttgacaacgaagaaccctccggttccttttatcagtcacaagtaagtttattttttgaaccggccacatataacttgacaatttttcttgatttagttttattaaccaaataaaaaaactaacattttcttgatttagatggtggtgctactaggaggaaacgaagcgcgtgtgtggtgccaaggcttgctggcatggctgtatgcatgcaaacactcggcatagttaacggccatcaactatagacggctgctgacggtcctttgccgagggtcacgtttcgccaagtgtttgacgctcggcaaagactcctttgccgagcgtcagcttatgccgagtgtttggcactcgacaaagggggtctgtgccgagtgccgttcgtcgccgatagtggccctcaacaaagcttgttttgctgagtgcccaataaaatgcacttggcaaagaacttgacgctcggcaaagagccggattccggcagtgtacgcgtggcttaggaagtggaaacgctgcagcggtaatcgtgtgagcaattaacgctgcatgcagccgctcttttggatttaatttccaccggctgcatgcaagggcaaggacatccaaaatccccttgaaacgtgccagcaacttcattttagattgttttgaaaaaacggcagaatgactagtaatgggaaccggagggagtaaaacaaatagtcatgcaattttattattccttataaattaccgtagtacaaattacttgacaaagttatgttttgtggatcatgccattacccaaaatacactataatatgactggagggcttatatttcttttattgttttactttgcttacatctcttttttgcaggtactgcttagtcagtcacacagatttagagcgcttgttctgcttggaagatttcttgacatggggccatgggcagttgatttggccctgtctgtcggaatatttccttatgtactcaaactgcttccaacaaatacaatagagttacgtcaaattttagtgtttatatggacaaaaattctctctcttgataagtcttgtcaggttgacttggttaaagatggaggacatacatattttattaggtttcttgacagtttggatgctttcccagaacagcgtgcaatggccgcttttgttatagcagtcatcgtggatgggcataggatgggtcaagaggcttgtatgaatgcagggcttatagatgtttgcctgagacatctgcaacctgagaatcttcatgcacaaacagaacctttgcttttgcagtggctttgtttatgccttgggaaactctgggaagatttccctgaggctcagttacttggtctgcaaacaaatgcaccagaaactgtaatatgcttattgtcggagcctcgacctgaggtcagagctgctgctgtttttgcacttgggaatcttactacattatcaaattgccctgatgatgattctgatgatgatgaaaaggtgaaagctgaaataaatgtagttcgaagccttctccagatatcttcagatggtagtccccttgttagatctgaggttgctatagcgcttactcactttgcgttgggtcacaacaaaaatctcaaatctgttgctgcggagtattggaaacctcaatccaaatcgttgctgaagtcattaccatcattggcaaatataaataatccaagcaatgtttacagtcccaataatattctccaaggcagcattggtcctgtgctgagggttggcagtgatagcggtgccgctggtcgtgatggacacatttctacaagtagcccaattgcagcaagtagcatcatgcatggctctccccagtcagatgattcttcccaacactctgattcaggcatattactgagggagaatgcaagtaatggtggtctcagctacactaggtcgaggcctgttgataatgtcatttattctcaatttatatcaactatgtgttctgtttctaaagatcctgacccaagaattgcaactattggttggagagcactgacccttataggtgttgaacaagtggccatgaaaagtactcgatttaacagtggaggtctacaccgaggagagacatctgcgtcaacctttggaatggcacactcttcttcttggagagatatgaattctggtcccagtaatgcagaactaaagaaacttcccgaatcaacaatttacaactggagttgtggtcacttctctaggccacttttaactgcctctgatgataatgaagaaaccaatgctagaagagaagagagagaacggattgcactagatttcatcactaagtgccagcgctcctcagcctgcaagattacaagccaaattgctagttgggatacaagatttgagttggggacaaaggcagctttattattgccattttctccgattgtcgtagcagctgatgaaaatgaaaaaataagtgtgtggaactatgacgatgcacaaccagtgaactcttttcacaaccataagttgtccgacagagggctatctaaacttttgcttatcaacgagcttgatgagtgcttgcttttggctgcctcaagtgatggaaatgtacgcatatggaaaaattttgcttgtaagggagggcagaaacttgtaactgctttttcatcagttcagggacatcgagctgctggtcgcagtattgtgattgactggcagcagcaatcttgttatctgtacgcatctggtgacatgtcttccatcttggtatgggatcttgacaaggaacaacttctcaacaccattccgtcatccgctgatagtgccatttctgccctgtctgcatctcaggtccgctctggatactttgctgctggttttgctgatggttctgtcaggatatatgatgtttgctctcctgatagtaggcctgtctatgtggccaggccgcatgccccaagaacagaaaaggttgtgggcatagggtttcagcctgggtttgatccatacgagattgtaagtgcatctcaagctggagacattcagtttcttgatgttagaatggcagcagaaccctacctgactattgaggcacacaggggttcacttacagcattagcggttcatcggcatgccccagttgttgctagttcagccaagcagatgattaaagtgtttagtcttgaaggagaacagttgaggataattcgctacctgccatcttttatgggccaaagaacaggcagtgtaaattgcctttcttttcacccatacaaatcactcctggctgccggtgctggtcataatgctcttgtctctatctatgctgaggaaaattacaagtaagatcgaggcctatatctcatgctcatgataatgcagacacagtgcgatcgacaggccttacatttttggccaagtgatgctccacagcatggtgcagcttcaagatccaagatgatggtaagctttgtcacagagaaggtgttgatggctccatggctttcggtgcatattgcctgttggacggcgtgtgcaatttgtatgatacagtcaagaactcaagattcattaggcctccttgcattgtgaaccctaccctgatcctgccgttgaacttggaggccccatcaacaaattaatcatacctaagttaaccaaaatgtaaatagccagtgcattcgggttgtactttgtcagcattaatccctttttcaagtgtaaaaaggtctgaaggtgcttgatatgataaacatggcttggtagtggctgctgactgggcaagtggggttgtgcatatgggcctggtcgcacatttctgctcacagatgatgttgaatagatagatgtctgctcacagatgaggttgaatagatagatgtctgctcacagatgttgttgaatagatagatgcatttgtccagctaatatagcgctagatgggggtagcgttggcctgcatgaatgaaggaaagttgtcgagtgaggagtgaccttcattgccattctgtgccgcaacaagtctccatgtgttatcagatggccctgtagataatacatatatttgtagatgtgttttgttcggtgaattgtgctgaccgctgagtaaaatgtattgtgaacgttgttgataaatgctattgtaatgaatttgcaacaagaaaaaattatatgctattgtagtgtatatcacaactctggttgctttttatttttatttttttaaaaaaa

SEQ ID NO: 45009 - DNA, 4155 bp, Zea Mays
  misc_feature (1)..(1): n is a, c, g, or t
naagcttcctcagttaattgatgatccaaatgctgagtttcagccaagtcctttttttacggaacaactgacggcttttgaagtgtggcttgatcatggctctgaggacaagaaacctcctgaacagttacccatagttcttcaggtaaggcattttgcttatacacttacatacaagtcaatattatctgtaaaatccagtttaactttgtaacctcttcacctttctctaagctgctatggttttaatttggtaaattttatattcgtattcctttatttatcttaatctgctactcactccaatcacaaaaaagactctcattttgggttgtgtgcagtcagcctacaaaaaaaaaacgattgttatttgctctggtgcgcattgagattgggcatttgaaaatattatggctagatttgtcccaaaacatactccctccgattcgttttagtagtcgttttggacatcatttcacataccaaggtgaaggctactttccagtcttacccttattatatacattcagttgtttctttcaacaagctctgtttcctgtttcaactggttatcaacgcttgtcaaggcaccccgtctgatgcggcttgggttcgaaacccttgctgttgtgtgccttaatattttttttgcgatttttgcacgttacttgcatgcgggtttttttgcatgcgcatgcatatgcaccctatctttctgaatcaaggacttgacaacgaagaaccctccggttccttttatcagtcacaagtactgcttagtcagtcacacagatttagagcgcttgttctgcttggaagatttcttgacatggggccatgggcagttgatttggccctgtctgtcggaatatttccttatgtactcaaactgcttccaacaaatacaatagagttacgtcaaattttagtgtttatatggacaaaaattctctctcttgataagtcttgtcaggttgacttggttaaagatggaggacatacatattttattaggtttcttgacagtttggatgctttcccagaacagcgtgcaatggccgcttttgttatagcagtcatcgtggatgggcataggatgggtcaagaggcttgtatgaatgcagggcttatagatgtttgcctgagacatctgcaacctgagaatcttcatgcacaaacagaacctttgcttttgcagtggctttgtttatgccttgggaaactctgggaagatttccctgaggctcagttacttggtctgcaaacaaatgcaccagaaactgtaatatgcttattgtcggagcctcgacctgaggtatgatgccctcatattctgtgcactctttcttttgcctacttcacaagtaaatatttggttttgccaggtcagagctgctgctgtttttgcacttgggaatcttactacattatcaaattgccctgatgatgattctgatgatgatgaaaaggtgaaagctgaaataaatgtagttcgaagccttctccagatatcttcagatggtagtccccttgttagatctgaggttgctatagcgcttactcactttgcgttgggtcacaacaaaaatctcaaatctgttgctgcggagtattggaaacctcaatccaaatcgttgctgaagtcattaccatcattggcaaatataaataatccaagcaatgtttacagtcccaataatattctccaaggcagcattggtcctgtgctgagggttggcagtgatagcggtgccgctggtcgtgatggacacatttctacaagtagcccaattgcagcaagtagcatcatgcatggctctccccagtcagatgattcttcccaacactctgattcaggcatattactgagggagaatgcaagtaatggtggtctcagctacactaggtcgaggcctgttgataatgtcatttattctcaatttatatcaactatgtgttctgtttctaaagatcctgacccaagaattgcaactattggttggagagcactgacccttataggtgttgaacaagtggccatgaaaagtactcgatttaacagtggaggtctacaccgaggagagacatctgcgtcaacctttggaatggcacactcttcttcttggagagatatgaattctggtcccagtaatgcagaactaaagaaacttcccgaatcaacaatttacaactggagttgtggtcacttctctaggccacttttaactgcctctgatgataatgaagaaaccaatgctagaagagaagagagagaacggattgcactagatttcatcactaagtgccagcgctcctcctgcaagattacaagccaaattgctagttgggatacaagatttgagttggggacaaaggcagctttattattgccattttctccgattgtcgtagcagctgatgaaaatgaaaaaataagtgtgtggaactatgacgatgcacaaccagtgaactcttttcacaaccataagttgtccgacagagggctatctaaacttttgcttatcaacgagcttgatgagtgcttgcttttggctgcctcaaggagggcagaaacttgtaactgctttttcatcagttcagggacatcgagctgctggtcgcagtattgtgattgactggcagcagcaatcttgttatctgtacgcatctggtgacatgtcttccatcttggtatgggatcttgacaaggaacaacttctcaacaccattccgtcatccgctgatagtgccatttctgccctgtctgcatctcaggtccgctctggatactttgctgctggttttgctgatggttctgtcaggatatatgatgtttgctctcctgatagtaggcctgtctatgtggccaggccgcatgccccaagaacagaaaaggttgtgggcatagggtttcagcctgggtttgatccatacgagattgtaagtgcatctcaagctggagacattcagtttcttgatgttagaatggcagcagaaccctacctgactattgaggcacacaggggttcacttacagcattagcggttcatcggcatgccccagttgttgctagttcagccaagcagatgattaaagtgtttagtcttgaaggagaacagttgaggataattcgctacctgccatcttttatgggccaaagaacaggcagtgtaaattgcctttcttttcacccatacaaatcactcctggctgccggtgctggtcataatgctcttgtctctatctatgctgaggaaaattacaagtaagatcgaggcctatatctcatgctcatgataatgcagacacagtgcgatcgacaggccttacatttttggccaagtgatgctccacagcatggtgcagcttcaagatccaagatgatggtaagctttgtcacagagaaggtgttgatggctccatggctttcggtgcatattgcctgttggacggcgtgtgcaatttgtatgatacagtcaagaactcaagattcattaggcctccttgcattgtgaaccctaccctgatcctgccgttgaacttggaggccccatcaacaaattaatcatacctaagttaaccaaaatgtaaatagccagtgcattcgggttgtactttgtcagcattaatccctttttcaagtgtaaaaaggtctgaaggtgcttgatatgataaacatggcttggtagtggctgctgactgggcaagtggggttgtgcatatgggcctggtcgcacatttctgctcacagatgatgttgaatagatagatgtctgctcacagatgaggttgaatagatagatgtctgctcacagatgttgttgaatagatagatgcatttgtccagctaatatagcgctagatgggggtagcgttggcctgcatgaatgaaggaaagttgtcgagtgaggagtgaccttcattgccattctgtgccgcaacaagtctccatgtgttatcagatggccctgtagataatacatatatttgtagatgtgttttgttcggtgaattgtgctgaccgctgagtaaaatgtattgtgaacgttgttgataaatgctattgtaatgaatttgcaacaagaaaaaattatatgctattgtagtgtatatcacaactctggttgctttttatttttatttttttaaaaaaa

SEQ ID NO: 45010 - DNA, 3959 bp, Zea Mays
  misc_feature (1)..(1): n is a, c, g, or t
naagcttcctcagttaattgatgatccaaatgctgagtttcagccaagtcctttttttacggaacaactgacggcttttgaagtgtggcttgatcatggctctgaggacaagaaacctcctgaacagttacccatagttcttcaggtaaggcattttgcttatacacttacatacaagtcaatattatctgtaaaatccagtttaactttgtaacctcttcacctttctctaagctgctatggttttaatttggtaaattttatattcgtattcctttatttatcttaatctgctactcactccaatcacaaaaaagactctcattttgggttgtgtgcagtcagcctacaaaaaaaaaacgattgttatttgctctggtgcgcattgagattgggcatttgaaaatattatggctagatttgtcccaaaacatactccctccgattcgttttagtagtcgttttggacatcatttcacataccaaggtactgcttagtcagtcacacagatttagagcgcttgttctgcttggaagatttcttgacatggggccatgggcagttgatttggccctgtctgtcggaatatttccttatgtactcaaactgcttccaacaaatacaatagagttacgtcaaattttagtgtttatatggacaaaaattctctctcttgataagtcttgtcaggttgacttggttaaagatggaggacatacatattttattaggtttcttgacagtttggatgctttcccagaacagcgtgcaatggccgcttttgttatagcagtcatcgtggatgggcataggatgggtcaagaggcttgtatgaatgcagggcttatagatgtttgcctgagacatctgcaacctgagaatcttcatgcacaaacagaacctttgcttttgcagtggctttgtttatgccttgggaaactctgggaagatttccctgaggctcagttacttggtctgcaaacaaatgcaccagaaactgtaatatgcttattgtcggagcctcgacctgaggtcagagctgctgctgtttttgcacttgggaatcttactacattatcaaattgccctgatgatgattctgatgatgatgaaaaggtgaaagctgaaataaatgtagttcgaagccttctccagatatcttcagatggtagtccccttgttagatctgaggttgctatagcgcttactcactttgcgttgggtcacaacaaaaatctcaaatctgttgctgcggagtattggaaacctcaatccaaatcgttgctgaagtcattaccatcattggcaaatataaataatccaagcaatgtttacagtcccaataatattctccaaggcagcattggtcctgtgctgagggttggcagtgatagcggtgccgctggtcgtgatggacacatttctacaagtagcccaattgcagcaagtagcatcatgcatggctctccccagtcagatgattcttcccaacactctgattcaggcatattactgagggagaatgcaagtaatggtggtctcagctacactaggtcgaggcctgttgataatgtcatttattctcaatttatatcaactatgtgttctgtttctaaagatcctgacccaagaattgcaactattggttggagagcactgacccttataggtgttgaacaagtggccatgaaaagtactcgatttaacagtggaggtctacaccgaggagagacatctgcgtcaacctttggaatggcacactcttcttcttggagagatatgaattctggaagcaactcgatgaaatttatgacccctcctgttagccctcctcagcatgattatcttctactaggattgcgccgagtgtgttctatggagtttggacagcatcctataaattcacctgatggctttgctaatctccttttaagctctgctacaggtcccagtaatgcagaactaaagaaacttcccgaatcaacaatttacaactggagttgtggtcacttctctaggccacttttaactgcctctgatgataatgaagaaaccaatgctagaagagaagagagagaacggattgcactagatttcatcactaagtgccagcgctcctcctgcaagattacaagccaaattgctagttgggatacaagatttgagttggggacaaaggcagctttattattgccattttctccgattgtcgtagcagctgatgaaaatgaaaaaataagtgtgtggaactatgacgatgcacaaccagtgaactcttttcacaaccataagttgtccgacagagggctatctaaacttttgcttatcaacgagcttgatgagtgcttgcttttggctgcctcaaggagggcagaaacttgtaactgctttttcatcagttcagggacatcgagctgctggtcgcagtattgtgattgactggcagcagcaatcttgttatctgtacgcatctggtgacatgtcttccatcttggtatgggatcttgacaaggaacaacttctcaacaccattccgtcatccgctgatagtgccatttctgccctgtctgcatctcaggtccgctctggatactttgctgctggttttgctgatggttctgtcaggatatatgatgtttgctctcctgatagtaggcctgtctatgtggccaggccgcatgccccaagaacagaaaaggttgtgggcatagggtttcagcctgggtttgatccatacgagattgtaagtgcatctcaagctggagacattcagtttcttgatgttagaatggcagcagaaccctacctgactattgaggcacacaggggttcacttacagcattagcggttcatcggcatgccccagttgttgctagttcagccaagcagatgattaaagtgtttagtcttgaaggagaacagttgaggataattcgctacctgccatcttttatgggccaaagaacaggcagtgtaaattgcctttcttttcacccatacaaatcactcctggctgccggtgctggtcataatgctcttgtctctatctatgctgaggaaaattacaagtaagatcgaggcctatatctcatgctcatgataatgcagacacagtgcgatcgacaggccttacatttttggccaagtgatgctccacagcatggtgcagcttcaagatccaagatgatggtaagctttgtcacagagaaggtgttgatggctccatggctttcggtgcatattgcctgttggacggcgtgtgcaatttgtatgatacagtcaagaactcaagattcattaggcctccttgcattgtgaaccctaccctgatcctgccgttgaacttggaggccccatcaacaaattaatcatacctaagttaaccaaaatgtaaatagccagtgcattcgggttgtactttgtcagcattaatccctttttcaagtgtaaaaaggtctgaaggtgcttgatatgataaacatggcttggtagtggctgctgactgggcaagtggggttgtgcatatgggcctggtcgcacatttctgctcacagatgatgttgaatagatagatgtctgctcacagatgaggttgaatagatagatgtctgctcacagatgttgttgaatagatagatgcatttgtccagctaatatagcgctagatgggggtagcgttggcctgcatgaatgaaggaaagttgtcgagtgaggagtgaccttcattgccattctgtgccgcaacaagtctccatgtgttatcagatggccctgtagataatacatatatttgtagatgtgttttgttcggtgaattgtgctgaccgctgagtaaaatgtattgtgaacgttgttgataaatgctattgtaatgaatttgcaacaagaaaaaattatatgctattgtagtgtatatcacaactctggttgctttttatttttatttttttaaaaaaa

SEQ ID NO: 45011 - DNA, 871 bp, Zea Mays
actggtcaatctctcgttctctctcgagtctcggcgtcgcctgcttcctcgctccctcacgcatcgagacgccgcttcccttcccctgccacctctctctctctctcatctcccagctgcatccaaaccctaaccctaaacccctcccctaccaacctctgcccagtctccccaccggcccacccttcactgatctggctccccacctcggacacgccacgcttgtgcgatccgatcgatgtaggtgagcgagcttcccgacctcatgatgactgcggggtgactggagtgtgactgggtgcggaagcgaggcacagcaagcgtcgatggcattgggagatcccatgacgttcaggctcggccactcctcatcttcgccgtcgtcggccgcggccccggtgccaccgctgccccatcaccaccacagccaccagaaccacatcgcggatgacctccccgtcgccaacgggccggagcccaggaacgagctggaggtcgccgaggtggagaagccggcgcccgcggcgtacctgtcccaggtggtcgtgctgtgcgaccagcgccacgaggggattgacgaagctaccgcagccgcctcagcggcctccaccagcggcctcgtttccaagtggcgccccaaggaacggatgaagactggatgtgttgcacttgtattatgtttaaacataagtgttgatccacctgatgtaattaaaatttccccttgcgcaagattggagtgctggatagaccctttctctatgacacctcttaaagctcttgaaagtattggaaaaacgttgcattcacagtatgagcgctggcaacctaagtggcacttgcaggctcgatacaagcttcagctggatct

SEQ ID NO: 45012 - DNA, 876 bp, Zea Mays
actggtcaatctctcgttctctctcgagtctcggcgtcgcctgcttcctcgctccctcacgcatcgagacgccgcttcccttcccctgccacctctctctctctctcatctcccagctgcatccaaaccctaaccctaaacccctcccctaccaacctctgcccagtctccccaccggcccacccttcactgatctggctccccacctcggacacgccacgcttgtgcgatccgatcgatgtaggtgagcgagcttcccgacctcatgatgactgcggggtgactggagtgtgactgggtgcggaagcgaggcacagcaagcgtcgatggcattgggagatcccatgacgttcaggctcggccactcctcatcttcgccgtcgtcggccgcggccccggtgccaccgctgccccatcaccaccacagccaccagaaccacatcgcggatgacctccccgtcgccaacgggccggagcccaggaacgagctggaggtcgccgaggtggagaagccggcgcccgcggcgtacctgtcccaggtggtcgtgctgtgcgaccagcgccacgaggggattgacgaagctaccgcagccgcctcagcggcctccaccagcggcctcgtttccaagtggcgccccaaggaacggtgcagatgaagactggatgtgttgcacttgtattatgtttaaacataagtgttgatccacctgatgtaattaaaatttccccttgcgcaagattggagtgctggatagaccctttctctatgacacctcttaaagctcttgaaagtattggaaaaacgttgcattcacagtatgagcgctggcaacctaagtggcacttgcaggctcgatacaagcttcagctggatct

SEQ ID NO: 45013 - DNA, 865 bp, Zea Mays
actggtcaatctctcgttctctctcgagtctcggcgtcgcctgcttcctcgctccctcacgcatcgagacgccgcttcccttcccctgccacctctctctctctctcatctcccagctgcatccaaaccctaaccctaaacccctcccctaccaacctctgcccagtctccccaccggcccacccttcactgatctggctccccacctcggacacgccacgcttgtgcgatccgatcgatgtaggtgagcgagcttcccgacctcatgatgactgcggggtgactggagtgtgactgggtgcggaagcgaggcacagcaagcgtcgatggcattgggagatcccatgacgttcaggctcggccactcctcatcttcgccgtcgtcggccgcggccccggtgccaccgctgccccatcaccaccacagccaccagaaccacatcgcggatgacctccccgtcgccaacgggccggagcccaggaacgagctggaggtcgccgaggtggagaagccggcgcccgcggcgtacctgtcccaggtggtcgtgctgtgcgaccagcgccacgaggggattgacgaagctaccgcagccgcctcagcggcctccaccagcggcctcgtttccaagtggcgccccaaggaacggactggatgtgttgcacttgtattatgtttaaacataagtgttgatccacctgatgtaattaaaatttccccttgcgcaagattggagtgctggatagaccctttctctatgacacctcttaaagctcttgaaagtattggaaaaacgttgcattcacagtatgagcgctggcaacctaagtggcacttgcaggctcgatacaagcttcagctggatct

SEQ ID NO: 45014 - DNA, 702 bp, Zea Mays
actggtcaatctctcgttctctctcgagtctcggcgtcgcctgcttcctcgctccctcacgcatcgagacgccgcttcccttcccctgccacctctctctctctctcatctcccagctgcatccaaaccctaaccctaaacccctcccctaccaacctctgcccagtctccccaccggcccacccttcactgatctggctccccacctcggacacgccacgcttgtgcgatccgatcgatgtaggtgagcgagcttcccgacctcatgatgactgcggggtgactggagtgtgactgggtgcggaagcgaggcacagcaagcgtcgatggcattgggagatcccatgacgttcaggctcggccactcctcatcttcgccgtcgtcggccgcggccccggtgccaccgctgccccatcaccaccacagccaccagaaccacatcgcggatgacctccccgtcgccaacgggccggagcccaggaacgagctggaggtcgccgaggtggagaagccggcgcccgcggcgtacctgtcccaggtggtcgtgctgtgcgaccagcgccacgaggggattgacgaagctaccgcagccgcctcagcggcctccaccagcggcctcgtttccaagtggcgccccaaggaacggaccctttctctatgacacctcttaaagctcttgaaagtattggaaaaacgttgca

SEQ ID NO: 45015 - DNA, 1164 bp, Zea Mays
caagaagctagggaaaccggggagaaacggaaggccggggcgcctctggtttcgtcgtctccgcccgtttgttcccccctcttccatggcgtggcaggcagggtcatctcggcacctggctggctataagtagctcacctggctgcatccatcactggcacgcatccgcgaaatccaagagcagcagcagcagcagaccaagatcgagggagggaggaagacagacagacagacagagagatggagcggatgagctcgtcggtgcagtcctgggtggaggaacacaagctctcgtccatcggagccgtgtgggcgacggcggtgggcgcgtccgtggcgtacagccggcggagggcgccggcgcgggccacgagcctgcgcctcatccacgccaggatgcacgcccaggcgctcacgctcgccgtgctcgggggagccgcgctcgcgcaccgctattacggcagcagcgagaggaggcagaggcaggaggacctggactacggcttcaaatcccagctgccgccggccaccgacgccgagggcaacgagaacgagcgctggagctggtagtggcagggcagactagcagtgagtgaccagtgagccttcagatgcatacatcagatcagagagaaggaaggaagagggacaataaatagattaattagtactagtagcaataataataattgcatgcctgtttgccaatcaatgatacatgacgtggcgcctgatcctgttcgtcacggcccataaacccaggaagcagctagcccatgttgcaaagtccctctcaagcctcaacctacctaccgctggtccattcatgacgatccttcccttcatccattttatataacatatccatgcaatcatatatccaaatcattgtatcctagtctaattataggggtccttatgacaggaaaatggttgtactgtccttccagccaagtttatatattttattattatggaagaaaaatgttccatccttatgcacactcctacatacggctattacagatcgagaattaactaaacatccaccataaaataaaaaaaagaggaatccttagaaagaaccactcaatattcctctagtatagtatccatatcttgcggacatcttcatggtcaccccctctaaggctctagtagtcg

SEQ ID NO: 45016 - DNA, 985 bp, Zea Mays
caagaagctagggaaaccggggagaaacggaaggccggggcgcctctggtttcgtcgtctccgcccgtttgttcccccctcttccatggcgtggcaggcagggtcatctcggcacctggctggctataagtagctcacctggctgcatccatcactggcacgcatccgcgaaatccaagagcagcagcagcagcagaccaagatcgagggagggaggaagacagacagacagacagagagatggagcggatgagctcgtcggtgcagtcctgggtggaggaacacaagctctcgtccatcggagccgtgtgggcgacggcggtgggcgcgtccgtggcgtacagccggcggagggcgccggcgcgggccacgagcctgcgcctcatccacgccaggatgcacgcccaggcgctcacgctcgccgtgctcgggggagccgcgctcgcgcaccgctattacggcagcagcgagaggaggcagaggcaggaggacctggactacggcttcaaatcccagctgccgccggccaccgacgccgagggcaacgagaacgagcgctggagctggtagtggcagggcagactagcagtgagtgaccagttgcaaagtccctctcaagcctcaacctacctaccgctggtccattcatgacgatccttcccttcatccattttatataacatatccatgcaatcatatatccaaatcattgtatcctagtctaattataggggtccttatgacaggaaaatggttgtactgtccttccagccaagtttatatattttattattatggaagaaaaatgttccatccttatgcacactcctacatacggctattacagatcgagaattaactaaacatccaccataaaataaaaaaaagaggaatccttagaaagaaccactcaatattcctctagtatagtatccatatcttgcggacatcttcatggtcaccccctctaaggctctagtagtcg

SEQ ID NO: 45017 - DNA, 697 bp, Zea Mays
tgcgtgcccacaagaagctagggaaaccggggagaaacggaaggccggggcgcctctggtttcgtcgtctccgcccgtttgttcccccctcttccatggcgtggcaggcagggtcatctcggcacctggctggctataagtagctcacctggctgcatccatcactggcacgcatccgcgaaatccaagagcagcagcagcagcagaccaagatcgagggagggaggaagacagacagacagacagagagatggagcggatgagctcgtcggtgcagtcctgggtggaggaacacaagctctcgtccatcggttgcaaagtccctctcaagcctcaacctacctaccgctggtccattcatgacgatccttcccttcatccattttatataacatatccatgcaatcatatatccaaatcattgtatcctagtctaattataggggtccttatgacaggaaaatggttgtactgtccttccagccaagtttatatattttattattatggaagaaaaatgttccatccttatgcacactcctacatacggctattacagatcgagaattaactaaacatccaccataaaataaaaaaaagaggaatccttagaaagaaccactcaatattcctctagtatagtatccatatcttgcggacatcttcatggtcaccccctctaaggctctagtagtcg

SEQ ID NO: 45018 - DNA, 1015 bp, Zea Mays
caacagaaaggggagtggcctacgccggccgtgcgtgcccacaagaagctagggaaaccggggagaaacggaaggccggggcgcctctggtttcgtcgtctccgcccgtttgttcccccctcttccatggcgtggcaggcagggtcatctcggcacctggctggctataagtagctcacctggctgcatccatcactggcacgcatccgcgaaatccaagagcagcagcagcagcagaccaagatcgagggagggaggaagacagacagacagacagagagatggagcggatgagctcgtcggtgcagtcctgggtggaggaacacaagctctcgtccatcggagccgtgtgggcgacggcggtgggcgcgtccgtggcgtacagccggcggagggcgccggcgcgggccacgagcctgcgcctcatccacgccaggatgcacgcccaggcgctcacgctcgccgtgctcgggggagccgcgctcgcgcaccgctattacggcagcagcgagaggaggcagaggcaggaggacctggactacggcttcaaatcccagctgccgccggccaccgacgccgagggcaacgagaacgagcgctggagctggtagtggcagggcagactagcagttgcaaagtccctctcaagcctcaacctacctaccgctggtccattcatgacgatccttcccttcatccattttatataacatatccatgcaatcatatatccaaatcattgtatcctagtctaattataggggtccttatgacaggaaaatggttgtactgtccttccagccaagtttatatattttattattatggaagaaaaatgttccatccttatgcacactcctacatacggctattacagatcgagaattaactaaacatccaccataaaataaaaaaaagaggaatccttagaaagaaccactcaatattcctctagtatagtatccatatcttgcggacatcttcatggtcaccccctctaaggctctagtagtcg

SEQ ID NO: 45019 - DNA, 1875 bp, Zea Mays
ccccgcatcgccgcatctttccaccttccctcccctccactcccgcaatctcgtctccgccgtccgccgccgcgccgtagcaaggtaacagagatcacaacaagttaaagcctcaaggaatgctgaaagatgtgctttcctagaagatatttctgttgcgacatcaaggaccttgctgctccccgagggctgctgatctgctcaactcttgatgacctgatctgcatcgattctacaacgttcagactgcgccacgaccaagccataagaagagagaagatatggagtcgacaggaaagattttgatggagcggtatgaggtggggaggctactggggaaaggcacatttggcaaggtgcactacgcaaagaatcttgagtccaacgagagtgttgccattaagatgatggacaaggacaaagtgctcaaggccgggctttcggagcagataaggcgggagatcacaacgatgcggttggtggctcataagaacattgttgagcttcatgaggtcatggcgacgcggaacaacatctactttgtcatggagtatgtgaaaggcggagagctctttgacaagattggcaagagtggcaagctcacagaggccgctgcacacaagtacttccagcagctcattggtgcggtggattactgccacagccgaggtgtgtatcaccgggacttgaagcctgagaaccttctgttggatgagaatgagaacctcaaggtctcagattttggactgagtgcactttcagaatccaaggggcaagatggcttactccacaccacctgtgggactccagcatatgtagctccagaggtgatcagcaagacaggctatgatggggcaaagtcagacatctggtcctgtggtgttgttctatttgtactagttgctggttatcttcctttccgggccccaaacatgatggagatgtatcgcaagatacagaatggtgatttcaggtgccctagttggttttcacacaaactcaagaagctcttgtacaagatcctcgaccccagcccagacacaagaatttcagtgcagaagataaaagagtctacctggtttcgaaaaggccctgtggagacccgtacagtaaaggagaaaattctgagtgagaatgacaccacaaatgctgctccagccgttgctatgaggcgcaagaagaatgttcatgaagacgtgaagcccccgactgtcacaagcttaaacgcctttgaaattatatctttctccacaggattggacctctctggcctatttatcagaaaggagtgtaagaaggagacgcggttcacttctgataagggtgccgtgtccatcatctcgaagcttgaagatgttgcaaaagcactgaatctcagggtaaggaagaaggacaatggtgttgtcaagattcaggggaggaaggtggggaggaagggtgtcctggagttcgacactgaaatatttgagatcacggcatcctaccacctcatcgagatgaaacaaacgggcggtgattcacttgagtacaagaaactgttggaagaggacatccggccagcactgaaggacatagtctgggcctggcatggagatgaccagcaacaaaagtagtagctttggatctctcttttttgttccataaaattgttagatctttcacttcagattgattttgttcgacatgtgcgtgttcttcttactagttacattctttctgtttctgtggaccattggactgtattctgtcgtgcaataattgttgggaggcctgagtttgttagtcgttccattctgaaaactggtatctgttctgtaatggttgtccctatcaataatgaaataattgcgtttgatccttgaaaaaaaaaaagaa

SEQ ID NO: 45020 - DNA, 2977 bp, Zea Mays
ggacctcgcccccgcgcctcccctctcatcagttcttgcacacacgagttgcagttccagcagacaaatcctcccactggtacttccaccacaccacagtccacaggcagagaagagcgaagatgcttcttcccaggcacagattcttcaagttcaggtccttgtagatgagctgcagctgcaggatctcagaatcagctaactattttccacgcatagtcgcctttaattccaggtgacagcaagggcaggtcgactgcgcttgttgcctactgctactccgatcgatacatacatacagattccctgcaccggccgttcgacgagctcctgggcaaaggcgccatgaagtcggtgtaccggggcttcgacgaggagcgcggcgtggaggtggcgtggaaccaggcgagcctcgccgacgtgctccgctccccggacgccgtgcagcgcatgtactcggaggtgcagctgctgagcgagctccggcacgacggcatcatcggcttccacgcgtcctgggtggacgtgcccgggcgcagcttcaacttcatcaccgagctcttctcctccggcacgctccgctcctaccgcctccggtacccccgcgtgaacctgcgcgccgtccggtcgtgggcgcggcagctgctggggggcctcgcctacctgcacgcgcgcgacccgccggtcatccaccgcgacctcaagtgcgacaacatcttcgtcaacggccaccagggccacgtcaagatcggcgacctcgggctcgccgcggtgctccgccggggcggcgccgcgcacagcgtcatcggcacgcccgagttcatggcgcccgagatgtacgacgaggagtacgacgagcgcgtcgacgtctacgccttcgggatgtgcatgctggagatgctcaccgtcgagtacccctacagcgagtgcaccaacccggcgcagatctacaagaaggtcaccgcaggcaggctccccgacgcgttctaccgggtggacgacgacgacgcgcgcaggttcatcggccgctgcctcgtccccgccgccaaccgcccgtccgccgccgagctgctgctggaccctttcctcctccaccaccaccaccatgctgctgctgctgctggcacggtaccagtgccgtcaccattgccaactaccgctgttgccgccggcgctccgccgccctcgacgtgtagtagctccgcggccgacgatgatgtcgtctcggcgttggacgacgacgacgaggtggacgtgccgcccaggaatgacatgaccatcaccgggaagctgaacgcggaggaggacaccatcttcctgaaggtgcagatcgccgacgaggcgtcggggcacgcgcgcaacatctacttcccgttcgacatggcgagcgacacggcggcggaggtggcgcaggagatggtgaaggagctggacatcacggaccgccacgcgtcggagatcgccgccatgatccaacaggagatcggcaggctgctgccggggcgagcgcagcagcacgagtacacgtacgcgtcacgcggcggcgactacgacgacgaggagcggcctcctcccttctactacctctcctcgtcccccgcatcctcccatggttctcactgcggggtggggccatatgccttcggaggcttctctggcccatgtggcagtgcttggaccaaaggtaaacctaaccaccacatccatctccacattaatttgttttatttaatttggtgtttattttaaggctacggtcccgaacctcggcttacaaatccccctttacaaattgattggttcttttttctaaagttataataaaatgattgaacgtgatttgagattatttgttttaaaaagtggaaggtattttatataaaaatctccttttcaattttttgtttttgttttcgcactgcaaaaatgtcaccgtaccgtacgtgcaagggcgggaaattttgctggcgcccagcagctgcagtaggcatcatcggtcactgtatgccgacatctatttcgttcttagtccacgtaggaaatacagtgctatctgcatagtactctctccgtccaaattttataattcttttaacattcttttacaagttttaccgatacgtcttattcaattattttttggaaaaaaattcgaagtaataatagtcatatattttttttaaacaaagtgttcaaatttagtgtaaaaaaggtactaaacggagagtactgtgataatgagccatgacatttgtgcattcttgtgcaaaaaaaaaaaactttgttggtgtagatcatgactggtacgctttaagcgacaacgacgatgacatgagctccgtgcactccggtaagtactctcctgtgcactacgcgtcaggtgccggccacgaggaggcgccggccagcagcagcggctcgtccaagacaaggttcggcggcggcggctccggttccgccgcggcgctcgcgcggcagctggagcggcagtgcagcgtgtcgccgcagcacgcggggcggccgcggcggcgggaggacgacgacgaccgggccggcaggcggaggaggatgacgcggaaccggtccatggtggacatgcggagccagctgctgcaccgcacgctggtggaggagctcaaccgccgcctcttcttcaacaccgtcggcgccgtcgagaacatcggcttccgcgcgcccaccaccaccgccgcctcgtcctcctcgtctgcgcgcggcggcctcgaccgcggcaggagaccaggcggcggcggcaagcagcggcagctggacgacaaggagcagcagtatttcatgctttgattgccgctccgcatacgaccgactttttttttttgacaacatatctggtgtcacatattaaatcatcaccactcattttagatctaatatctctagttgtttggtacattttattaaggataccctccaacgtggtgttgtatagtggtggaaggtg

SEQ ID NO: 45021 - DNA, 3813 bp, Zea Mays
ggacctcgcccccgcgcctcccctctcatcagttcttgcacacacgagttgcagttccagcagacaaatcctcccactggtacttccaccacaccacagtccacaggcagagaagagcgaagatgcttcttcccaggcacagattcttcaagttcaggtccttgtagatgagctgcagctgcaggatctcagaatcagctaactattttccacgcatagtcgcctttaattccaggtgacagcaagggcaggtcgactgcgcttgttgcctactgctactccgatcgatacatacatacagattccctgcaccggccgatcgcgatcagagattgaggaggcatcctgtccagctgttccacttccatccatccatccaccaccagagaagagcatacagtagtgcaccactcatctcatccccttctgctgtgcccctgtggtatagcaatagcttcattaatttgcttgtggtgctgctagctgtgctgtgtgcctacctgccctgccactgccacacacaccacatataactccctggtgtccgtgtccacagatgagtgcacggccctgcccctgccgctgcggcctcggcgccgcgcaccacgcgcacgcgggtgcctccccttgctcctccggggtgccgtcgacgtcgtcgtccacgtccatggagccgcgtgccggcacggacttctcctgcctcagctggctcctcttccgcgtctccgcctacgacgacgacgacacccacaacctcctcctcctcgccgccggcgccctctagcgcgcgcctcctgccgcccacagctcttcttccctccacttctaccaatttgctccctccatccacacatacatacatagctaggttagttagttagttgagttctctctccgccgtctgtcagtgtcagctgctgcaactcatcaatacaactgctgctagctagcttattagccttagctgcggtacacccaaaccaagaaagctaattaagggaaggaaataaagctccgtcgtctcgagccgatcgacgaccaccatgtcggcggcacggcggtgcggcggcgtccggcgtcggctggatagggcggcggcgggagacaacgccaacggatacgtcgagactgaccccaccggtcgctatggacggttcgacgagctcctgggcaaaggcgccatgaagtcggtgtaccggggcttcgacgaggagcgcggcgtggaggtggcgtggaaccaggcgagcctcgccgacgtgctccgctccccggacgccgtgcagcgcatgtactcggaggtgcagctgctgagcgagctccggcacgacggcatcatcggcttccacgcgtcctgggtggacgtgcccgggcgcagcttcaacttcatcaccgagctcttctcctccggcacgctccgctcctaccgcctccggtacccccgcgtgaacctgcgcgccgtccggtcgtgggcgcggcagctgctggggggcctcgcctacctgcacgcgcgcgacccgccggtcatccaccgcgacctcaagtgcgacaacatcttcgtcaacggccaccagggccacgtcaagatcggcgacctcgggctcgccgcggtgctccgccggggcggcgccgcgcacagcgtcatcggcacgcccgagttcatggcgcccgagatgtacgacgaggagtacgacgagcgcgtcgacgtctacgccttcgggatgtgcatgctggagatgctcaccgtcgagtacccctacagcgagtgcaccaacccggcgcagatctacaagaaggtcaccgcaggcaggctccccgacgcgttctaccgggtggacgacgacgacgcgcgcaggttcatcggccgctgcctcgtccccgccgccaaccgcccgtccgccgccgagctgctgctggaccctttcctcctccaccaccaccaccatgctgctgctgctgctggcacggtaccagtgccgtcaccattgccaactaccgctgttgccgccggcgctccgccgccctcgacgtgtagtagctccgcggccgacgatgatgtcgtctcggcgttggacgacgacgacgaggtggacgtgccgcccaggaatgacatgaccatcaccgggaagctgaacgcggaggaggacaccatcttcctgaaggtgcagatcgccgacgaggcgtcggggcacgcgcgcaacatctacttcccgttcgacatggcgagcgacacggcggcggaggtggcgcaggagatggtgaaggagctggacatcacggaccgccacgcgtcggagatcgccgccatgatccaacaggagatcggcaggctgctgccggggcgagcgcagcagcacgagtacacgtacgcgtcacgcggcggcgactacgacgacgaggagcggcctcctcccttctactacctctcctcgtcccccgcatcctcccatggttctcactgcggggtggggccatatgccttcggaggcttctctggcccatgtggcagtgcttggaccaaaggtaaacctaaccaccacatccatctccacattaatttgttttatttaatttggtgtttattttaaggctacggtcccgaacctcggcttacaaatccccctttacaaattgattggttcttttttctaaagttataataaaatgattgaacgtgatttgagattatttgttttaaaaagtggaaggtattttatataaaaatctccttttcaattttttgtttttgttttcgcactgcaaaaatgtcaccgtaccgtacgtgcaagggcgggaaattttgctggcgcccagcagctgcagtaggcatcatcggtcactgtatgccgacatctatttcgttcttagtccacgtaggaaatacagtgctatctgcatagtactctctccgtccaaattttataattcttttaacattcttttacaagttttaccgatacgtcttattcaattattttttggaaaaaaattcgaagtaataatagtcatatattttttttaaacaaagtgttcaaatttagtgtaaaaaaggtactaaacggagagtactgtgataatgagccatgacatttgtgcattcttgtgcaaaaaaaaaaaactttgttggtgtagatcatgactggtacgctttaagcgacaacgacgatgacatgagctccgtgcactccggtaagtactctcctgtgcactacgcgtcaggtgccggccacgaggaggcgccggccagcagcagcggctcgtccaagacaaggttcggcggcggcggctccggttccgccgcggcgctcgcgcggcagctggagcggcagtgcagcgtgtcgccgcagcacgcggggcggccgcggcggcgggaggacgacgacgaccgggccggcaggcggaggaggatgacgcggaaccggtccatggtggacatgcggagccagctgctgcaccgcacgctggtggaggagctcaaccgccgcctcttcttcaacaccgtcggcgccgtcgagaacatcggcttccgcgcgcccaccaccaccgccgcctcgtcctcctcgtctgcgcgcggcggcctcgaccgcggcaggagaccaggcggcggcggcaagcagcggcagctggacgacaaggagcagcagtatttcatgctttgattgccgctccgcatacgaccgactttttttttttgacaacatatctggtgtcacatattaaatcatcaccactcattttagatctaatatctctagttgtttggtacattttattaaggataccctccaacgtggtgttgtatagtggtggaaggtg

SEQ ID NO: 45022 - DNA, 3794 bp, Zea Mays
ctcgtttaacccgcgacgcattctccatccgcgacaaacaacaaaccgctttagaaacgaagcaagaaattcgcaaacccatcacatcatccataagccggtgaagctgtgaggtcgccgaattggatctgatcgaaggacgaaaaaaaagcggaaaggaaatcgtgccttgaagcctcctcttcgtcttcttcttgctccggcggcggcctgcgggcggagagattgagccgagcagcgcgcgtgcagccggccgagccccgaaaagcagcagcagaagcaagccgcgggagcgtctcgtcagcgtcatctctatccgcggcgtgcgcagatcagacgagcaagcgaggaagtggaggtggaggcaaggcaaggaggaaagcgaagcaacggatgcccgcctaaaaaaaaactgactcctgatctcctcacattaaaatccccccgctcgtcttcccccgtgctcccaaatcccgagctctccccctcttccctgccctgccctacctcgccggcggcggcgcgcagatcgcggcccctcgcccgcaccgattcgccccgcggcgcccaccttcccgtccgttctgcttgggcgacggcgattcctgcatcgcatcgcctccttctttagcggctgcttcggctacagcggcggttcctgcgtcgcccgcctcctccagcggctgcttggcggcgtctccagctctggggaagaagcaagcggctagcggctctctcccggcgcccatggtggacatcagcgagtgctcgccggtgcccgagtccgtgccggcgcacccggaccccgcgtccgtttctccggacgcctggcggcgcttcgagaccgccgcgctcgccgtggtgaacaagatccagcccaccgccgcctccgaacacctccgcgccgccgtcgtcgactacgtccagcgcctcttctggttccaagcccggtctttccatttggatctgttccattgaaaacatatcttccagatggagatattgacctgacattatttggccctgctatttctgatgagaatctagcaaatgaagtatgcactattctaaaatcggaagagcgaaggaaagattctgaatttgaggttaaagatgtccagtatgtccctgctgaggtcaagctggttaaatgtttggtacaaaacattgttgtagacatctcagttaatcagattggtgggctgtgcacactatgttttcttgagaaggttgatcaacactttggaaaagatcacctatttaagaaaagcataattcttataaaagactggtgttactatgaaagccggattcttggtgctcaccacggcctaatttccacgttctctataggtttctagactattatagtaaatttgattgggataataaggggatcagcttatttggacctgtttccttatcttcactacctgagctagttactgacccaccagatatccaagatgatgattttcttcaacgggaggaatttctaaaagaatgcatagaatcttttagtgttctccctagaaactctgagacgaatcctagactattctcacggagatttttaaatattgttgatccactaaagcagagtaataatcttggacgcagtgtcagtaaaggaaacttttaccggatacgcagcgcatttgattttggtgctcgtaagcttggcaagattcttcaagtgccttcttgtctcactgttggtgaagtcaatcagtttttcaggaacactctaaagagaaaccgtactggtttaaggccagatgttttggttgtctcttctgaccttgttacaaatgatcctgtatcatcagacttagatgtggaaagagtcaacaatgttgcgcctaacaattcctgtgatgttctgtctaatcagctcagtaacatcaacatttcagattccaataatcatggctcaataaagcaaaaagaatgtaactctatggctgatcacaaggagacaaaatctgtttctttgggtttgctagatagtgatgccacaaatcatgcaactaccgattcattaagtataaggggtggtggcaacttctctgaagcttcaccagtacctagtgaaaccagtaccttgcaatcagaaacaggcaagaaagttgatgttagaaatgacacaaccccatcatactatggggtttcagcaaagcagtttacaggcagatctcaccactatattgaagatactaagcataatgcttacccctattctactggtttagttgatggtctgggcacatctaattcagttttaacatcggatacacaacctggaggtaacaacaatgacacagtgccaaatctcactggagatttcgatacaaatttgcataatcttctgtatgcacgggggttccatcaggacaatcctatgactcaattatactatccaatgcccatgccaccacccctgcaatatcagaacatgcacccatcaaatggccatggcagaaaaaatccgtatggatatgctggtaggaatggggttgtccctggtcatgtttatccacctagctattttgtgtataggccattgtatcaagcagatgatcatatgactttgaggactcgtggaacaggcacctactttcctgacccaaatttgcgcaaggaccgaccacctactggacgtggggagagaggaaggaatcattcccatcagaataattatcataagtttcaccaccacacccgaccggatatgcctgtagatatgatacctttggaggaattgcggcatgagctgccactgcagacatatgctcctaatgcaaatggtcatggaatcccatctccaatgaatataccaatatcatccccatcttcccagtctccaagggatcctttgaatgtaccaatgcattccccatcttcccatgtccgaaaggataattttcatggcaatggttttatgctcccgcaagacagtaaacttgagtttgggaccttgggggcattgccttcggaagttgcctctaaagaccatgccaacagatcaggttctgtctccaacaatcaagcttctgggcctgtgagccccatgtctgtggccaaaaatactggaatgggttccaatggaatgaggaatgttcagccataccgtctcaaggacagtggtgacttcccgccactgtccagttgatgtcgattccgtgtgtatgagaggcagcaggataatgatgagtggtgtgcttccgacacgaatgggacatcgtgtaatggcgccgagttctttggcagaagcatacgccatgatgtacatcctgttttttttttccttcccttttctctagttgccattaagcaccaccactgcaacgcagcctgtgctttcttgcgacaagagagaaggcagaagtaaaaagagatgaaaaacgagagaaggaaaaatgtaagggaaaaaaatgaaagcaaaagggtggagatacttttaggggtatagtcccgttgtttcagttctacagctcaagaggaacagatggtgctggtgaaagatagatctagctagctagctagttttgttgttttgattgacctcagggtgattggagaactggattttgtcgtccatgtccacgtgtaacgaggatagagttgtagctccctgtttgcatttagagggggggaggccttggtgttgaaaggccccaaagtttgaagctactttagctgcttgaaaatggattaggtacacagaatgtgttaaatctgctgtccaaacgaaaatgcgcttgctgtgtgtttccgtttatgcataatctgta

SEQ ID NO: 45023 - DNA, 2540 bp, Zea Mays
gtactggccggctataaaaagaaagaaaaggtcaagctggttaaatgtttggtacaaaacattgttgtagacatctcagttaatcagattggtgggctgtgcacactatgttttcttgagaaggttgatcaacactttggaaaagatcacctatttaagaaaagcataattcttataaaagactggtgttactatgaaagccggattcttggtgctcaccacggcctaatttccacgtatgccttggagactctagttctatacattttccatatcttccacaagtctttggatggtccattggctgttctctataggtttctagactattatagtaaatttgattgggataataaggggatcagcttatttggacctgtttccttatcttcactacctgagctagttactgacccaccagatatccaagatgatgattttcttcaacgggaggaatttctaaaagaatgcatagaatcttttagtgttctccctagaaactctgagacgaatcctagactattctcacggagatttttaaatattgttgatccactaaagcagagtaataatcttggacgcagtgtcagtaaaggaaacttttaccggatacgcagcgcatttgattttggtgctcgtaagcttggcaagattcttcaagtgccttcttgtctcactgttggtgaagtcaatcagtttttcaggaacactctaaagagaaaccgtactggtttaaggccagatgttttggttgtctcttctgaccttgttacaaatgatcctgtatcatcagacttagatgtggaaagagtcaacaatgttgcgcctaacaattcctgtgatgttctgtctaatcagctcagtaacatcaacatttcagattccaataatcatggctcaataaagcaaaaagaatgtaactctatggctgatcacaaggagacaaaatctgtttctttgggtttgctagatagtgatgccacaaatcatgcaactaccgattcattaagtataaggggtggtggcaacttctctgaagcttcaccagtacctagtgaaaccagtaccttgcaatcagaaacaggcaagaaagttgatgttagaaatgacacaaccccatcatactatggggtttcagcaaagcagtttacaggcagatctcaccactatattgaagatactaagcataatgcttacccctattctactggtttagttgatggtctgggcacatctaattcagttttaacatcggatacacaacctggaggtaacaacaatgacacagtgccaaatctcactggagatttcgatacaaatttgcataatcttctgtatgcacgggggttccatcaggacaatcctatgactcaattatactatccaatgcccatgccaccacccctgcaatatcagaacatgcacccatcaaatggccatggcagaaaaaatccgtatggatatgctggtaggaatggggttgtccctggtcatgtttatccacctagctattttgtgtataggccattgtatcaagcagatgatcatatgactttgaggactcgtggaacaggcacctactttcctgacccaaatttgcgcaaggaccgaccacctactggacgtggggagagaggaaggaatcattcccatcagaataattatcataagtttcaccaccacacccgaccggatatgcctgtagatatgatacctttggaggaattgcggcatgagctgccactgcagacatatgctcctaatgcaaatggtcatggaatcccatctccaatgaatataccaatatcatccccatcttcccagtctccaagggatcctttgaatgtaccaatgcattccccatcttcccatgtccgaaaggataattttcatggcaatggttttatgctcccgcaagacagtaaacttgagtttgggaccttgggggcattgccttcggaagttgcctctaaagaccatgccaacagatcaggttctgtctccaacaatcaagcttctgggcctgtgagccccatgtctgtggccaaaaatactggaatgggttccaatggaatgaggtaagtatgctgcgagattttagttgacagcaccaaaatttatttctgatgggaagaacatgcaattggtatactagtctcattgtacgagttccaacccccccccccccccccccctttctaaatataacggtaagtagctctccttgcatatttgagggaaaaacatgcaattagtgaacatttccatggtacaaacaatgagataaaatttagctctttgttaggaacttaggttggtgtttagaaggacaagcttggcatagtggtaagaaggcttccccactgagccaggcagcctctctgcattaaatgcagaggtaaggcttgccttggttatttcttcccagaaccttatgggagccatcagtagttggtctgtcttttttgctagattggtgtttctgttaaattatttagatgctcttattgttcacttttggacaattgatatgtggattg

SEQ ID NO: 45024 - DNA, 1830 bp, Zea Mays
tatgagtataatatatacagctacttcccaccctctcccccgcaccgtcggcaccaagatgacgaccccgccgcgccgatcgccgccgctccggggaagaggccatgcgggacttcgggctctggcgcctatggtcaacatccacgagcgctcgcctgtgcccgcgtgcgtgccggcacacccggacccttcgtcgtcgatctccccggacgactggcggcgtttggagggcgcaacgttctctgtgatgtgcaagatccatcccaccgtctcctcccagcaccttcgcgccagggtaatcgactacgtccagcgcctcttcaggctccaccatgacggctaccaggtcatttcatttggatctgttccattgaagacatatcttcctgatggagatatcgacttgactttattgtgcgctgcaatttctgatgagaatctggaaaatgaagtgtgcgctattctaaaatcggaagagcagaggaaagattctgaatttgaagtcaaggatgtcaagtatgtacctgctgaggtcaagcttgtgaagtgcaaggtgcaaaacattgctgtagacatctcagttaatcagattggtggacccaataaagtttattttctagagaaggttgatcaaaacttggggaaaaataacttgttgaggagaagcataatgcttatcaaacattggtgttattatgaaagctgcattcttggtgctcaacgtggtttggtttccacttatgctttggagacattagtgctgtacattttccatgtcttccacaagtctctggatggtccattggctgtttcttgactactatagcaaatttgattgggataacaaggggatcagcttgtttggtcctatttcactatcttcactacccgagctagtcaccgagccaccatatactcgtgatgatggttttctctcacgggaggcgtttctcaaagactgtgctaaggcttttagtgtccccccaataaactctgaggaaaatccgcaagtattctccaaaaagtttgtgaatatagttgacccattgaagcagagtaacaatcttggacgcagtatcagcaaaggaaaccttggccggatacgcaaggaattctattttggtgcttgcaagctcggcaagattcttcaggcgcccgcgtgtttctctgccaacgaaatcaaccggtttttcaggaacacattaagcagggcagatgttccggtgagctctcctgatgatgttctacaggccgctagtgtttctgcgtcaccgggcaacaagggcgtggaaggagtcagcaagggcagttcacccaacaactcgtgtgacgttctgtgcaatcagttcggttacattaaaatctcagattccaacaatgcgctgcagaatctggtcgtggacaggcccgcttaggctgtacctgcacatggtcatagaacctccagcagcttactcatcttactttctaccatattttttttaaaaaaaacttccacattataaagaatacagtctatggtataaaataatgttttacatggctgtatacacggaccgctgatcatagcctaagtcgttgtcgttggtggccacaacaactgtgaatggtgtgtataaaaggatgggccaacaaattacgagattaattgtgcataaggttagctcattgcgaagctaggcacataaattttcttttgttaatatgtatatttatgttcttcgtaaggaaatgtctagatcaagaaaatgtggcccatggataatattttatattgtaatagacgtgattgacaaagactttcaccatatattttggtttcctatatac

SEQ ID NO: 45025 - DNA, 1840 bp, Zea Mays
cacgacggtcctatatatgagtataatatatacagctacttcccaccctctcccccgcaccgtcggcaccaagatgacgaccccgccgcgccgatcgccgccgctccggggaagaggccatgcgggacttcgggctctggcgcctatggtcaacatccacgagcgctcgcctgtgcccgcgtgcgtgccggcacacccggacccttcgtcgtcgatctccccggacgactggcggcgtttggagggcgcaacgttctctgtgatgtgcaagatccatcccaccgtctcctcccagcaccttcgcgccagggtaatcgactacgtccagcgcctcttcaggctccaccatgacggctaccaggtcatttcatttggatctgttccattgaagacatatcttcctgatggagatatcgacttgactttattgtgcgctgcaatttctgatgagaatctggaaaatgaagtgtgcgctattctaaaatcggaagagcagaggaaagattctgaatttgaagtcaaggatgtcaagtcaagcttgtgaagtgcaaggtgcaaaacattgctgtagacatctcagttaatcagattggtggacccaataaagtttattttctagagaaggttgatcaaaacttggggaaaaataacttgttgaggagaagcataatgcttatcaaacattggtgttattatgaaagctgcattcttggtgctcaacgtggtttggtttccacttatgctttggagacattagtgctgtacattttccatgtcttccacaagtctctggatggtccattggctgttctctataggtttcttgactactatagcaaatttgattgggataacaaggggatcagcttgtttggtcctatttcactatcttcactacccgagctagtcaccgagccaccatatactcgtgatgatggttttctctcacgggaggcgtttctcaaagactgtgctaaggcttttagtgtccccccaataaactctgaggaaaatccgcaagtattctccaaaaagtttgtgaatatagttgacccattgaagcagagtaacaatcttggacgcagtatcagcaaaggaaaccttggccggatacgcaaggaattctattttggtgcttgcaagctcggcaagattcttcaggcgcccgcgtgtttctctgccaacgaaatcaaccggtttttcaggaacacattaagcagggcagatgttccggtgagctctcctgatgatgttctacaggccgctagtgtttctgcgtcaccgggcaacaagggcgtggaaggagtcagcaagggcagttcacccaacaactcgtgtgacgttctgtgcaatcagttcggttacattaaaatctcagattccaacaatgcgctgcagaatctggtcgtggacaggcccgcttaggctgtacctgcacatggtcatagaacctccagcagcttactcatcttactttctaccatattttttttaaaaaaaacttccacattataaagaatacagtctatggtataaaataatgttttacatggctgtatacacggaccgctgatcatagcctaagtcgttgtcgttggtggccacaacaactgtgaatggtgtgtataaaaggatgggccaacaaattacgagattaattgtgcataaggttagctcattgcgaagctaggcacataaattttcttttgttaatatgtatatttatgttcttcgtaaggaaatgtctagatcaagaaaatgtggcccatggataatattttatattgtaatagacgtgattgacaaagactttcaccatatattttggtttcctatatac

SEQ ID NO: 45026 - DNA, 1158 bp, Zea Mays
tatgagtataatatatacagctacttcccaccctctcccccgcaccgtcggcaccaagatgacgaccccgccgcgccgatcgccgccgctccggggaagaggccatgcgggacttcgggctctggcgcctatggtcaacatccacgagcgctcgcctgtgcccgcgtgcgtgccggcacacccggacccttcgtcgtcgatctccccggacgactggcggcgtttggagggcgcaacgttctctgtgatgtgcaagatccatcccaccgtctcctcccagcaccttcgcgccagggtaatcgactacgtccagcgcctcttcaggctccaccatgacggctaccaggtcatttcatttggatctgttccattgaagacatatcttcctgatggagatatcgacttgactttattgtgcgctgcaatttctgatgagaatctggaaaatgaagtgtgcgctattctaaaatcggaagagcagaggaaagattctgaatttgaagtcaaggatgtcaagtatgtacctgctgaggtcaagcttgtgaagtgcaaggtgcaaaacattgctgtagacatctcagttaatcagattggtggacccaataaagtttattttctagagaaggttgatcaaaacttggggaaaaataacttgttgaggagaagcataatgcttatcaaacattggtgttattatgaaagctgcattcttggtgctcaacgtggtttggtttccacttatgctttggagacattagtgctgtacattttccatgtcttccacaagtctctggatggtccattggctgttctctataggtttcttgactactatagcaaatttgattgggataacaaggggatcagcttgtttggtcctatttcactatcttcactacccgagctagtcaccgagccaccatatactcgtgatgatggttttctctcacgggaggcgtttctcaaagactgtgctaaggcttttagtgtccccccaataaactctgaggaaaatccgcaagtattctccaaaaagtttgtgaatatagttgacccattgaagcagagtaacaatcttggacgcagtatcagcaaaggaacaattttcttgtccaatacagctgcttcttgttgtagattcttttgtgggaaggcatt

SEQ ID NO: 45027 - DNA, 1517 bp, Zea Mays
tgtcatgtttatcatgggtctgagcatctcctggaatggtcctgcaactaacaagcaacccgatatttgctgagattgtacctgagaggtcaaggacaagcatctatgaattggactctattggagatgcttctgaataattgcggagagcctgtccataggcaggtcattgataatggccttcttccaatacttgtgaagatagtgaagaaaaagacggatttaccagttcgagaaaaaatatttcttctgttagatgcaacacaaacatcccttggtggagctaaagcaaggctccctcagtactatgagtcgtgaaacaatttgtctcccttcttttcagttgtatattgtccttgttagattaaactgtcttactacactttatctaacattctgtttgctttttggctgactggcttatttgttggatggacaacagattaaaggctgctggtggtagagctaatggagatggaacaaggaagacaaggacacgggaccggcctagggctgttccagctccagaggcaaacgccgaactgcaagcaaatattgataaaagaaggttaataactcatgcaaatgcgaagagcaagagtgaaaagttccctccgccgcatcaggatggcgcacttggatttcccttgggttgttcgaaccacatggaaccttcatttgaacccccagacccttcttccttcagcactgtatttccttacaaaaaaagcaccgtgccaacctggtccggaccattggcaaactctacagctggcaaccagaagcggaaacacaagtctggccgctcctcgaaacaaccagcaaccgcccatgctagattatacacatcattccatgcttagtgcaaaccaaatcttcgatacctcccaaagaaataccttgcagtggttcctaaaaactgggatacctgattcgtaatcaagagctacagaaatgaactgttttcttttccttagatccattcatgtacacatttttttcttccctgagcatcaatcaatgtataggctggagatggagctggattagtcagttatgtacattaggttctcttttccgttcttacaagcagcaacatgtcagtttagattaattcgagtgaggaatggagctggtaggtcaacttagcaagctatcattctatatagatacttccaatcaattgaaatattttttacctgctattttgtctattttccctttatttcattttacaatattttgaaacaaaatcaaaagcatagcaaaattcaaatgatttgcgctgtttcattaatctgtgtgctattaccgtggccgaatgttgtttttatggttaagctatagtcttgattcagattcacttctatttgtttcagctattggagatgcttctgaataattgcggagagcctttccataggcaggtcattgataatggccttcttccaatacttgtgaagatagtgaagaaaaaggtaacgtatttttcactgaatttattatggcaattgtga

SEQ ID NO: 45028 - DNA, 2236 bp, Zea Mays
cttgcgtttactaattacttagcgagtagcgagttgtcgtgaggaggtcttcaggtggatgtcttcaagattgttacttcgcaaagaaggcatggaatgcacagaaagcaggagcagcggcaatccttgttgctgatgacaaagacgaacctctaattacaatggacaaccctgaggagggtggcaacacggattatttagagaacatcactattccttcggcgttaataaccaagagctttggggacaggctcaagaaagcaatcgacagcggtgacatggttaatgtgaatttggattggagggaggccctgccccatcctgacgagcgtgtcgagtatgaattctggaccaacagcaatgatgaatgtggcccaaagtgcgatagccagattgacttcgtcaagagcttcaaaggagcagcacaggtacttgagaagaagggctatacggagttcactcctcattacattacctggtactgcccagaggccttcattctgagcaagcagtgcaagtcccagtgcatcaatcatgggaggtactgtgcacctgacccagaacaggattttagcaaaggatatgacggcaaggatgtggtggtccagaacttgcgccaagtttgtgtctttaaggttgctaaggagcacaagaagccttggttatggtgggactacgttactgattttgcgattcggtgcccgatgaaggaaaagaagtacacaaaggagtgtgccgatggagttatcaagtcacttggccttgatcataaagcaatagataagtgtattggtgatccagatgcagatgaggaaaaccatgttctgaaagctgaacaggatgcacagattggcaagggttctcgtggtgatgttaccatcttaccaactctggtaatcaacaatagacaatacagagggaagcttgacaaaggagcagttcttaaagcactttgtgctggctttagggaaaccaccgagccagccgtttgcttgagtgatgatatacaaacaaacgagtgcctagagaacaatggtggctgttggcaagataaggctgccaacatcactgcatgcaaggtacttcctgtggtgctgttttttttttaccttgaaattttggtttatcaaatatttgttctgattagcttatgcatgtaatgtgttttcggtttatatacaggatacattccgtggaagagtttgcgagtgtccagttgtgaaaggcgtcaaatttgttggcgatggctatactcactgtgaagcttccggatctggtcggtgtgaaattaacaacggagggtgctggaaagataccaagaatggtcggacatactctgcctgtactgatgatggctgcagatgccctgacggattcaagggtgatggcaagcacaaatgtgaagatgttgatgaatgtaaggaaaggactgtgtgccagtgcgaagaatgcagatgcaaaaacacgtggggaagctacgagtgcggctgcagcgggggcctgctttacatgaaggagcatgacacatgcataagcaaaaacggagcatcagaagccggctggggcttcctgtgggtcgtcgtcttcggcctcgtcgcagcaggaattgcagggtacgcggtgtacaagtacaggatccggaggtacatggactcggagatccgcgccatcatggcccagtacatgcctctggacagccaaggagatgtccagagccacgcgcaccatattgagatgtgaggatgcatgcagacttgatgagaggagacggaggcttggtctagcttatataatacaccagaattagatgtgcatattcgtaacaatcttgtgtctagcacgcaaagtccttgaacatttggtgtctgtgttaggttgtaccatgacatggtcttgtttagcaataattgccgtcttttatttcggtgccaataaaggagatggcaaacggggctctgtgttgctcagttgtgtatgtggtccatgatcagtggtaaaagaatctgagtcccttatggggattgcagggctaaaatcctcttcttatttaaaattgaataaagatgagattttagctcctccaatctagctcttagggttgattttagtgacaaaggatcacgggaggattgatagggaaataaactaatttcctcctcaatccctaacaatcttccgtgatccttgatcaccaaatcagcccttatcttatacttatgtaaaagaaaattgtgcc

SEQ ID NO: 45029 - DNA, 2139 bp, Zea Mays
cttgcgtttactaattacttagcgagtagcgagttgtcgtgaggaggtcttcaggtggatgtcttcaagattgttacttcgcaaagaaggcatggaatgcacagaaagcaggagcagcggcaatccttgttgctgatgacaaagacgaacctctaattacaatggacaaccctgaggagggtggcaacacggattatttagagaacatcactattccttcggcgttaataaccaagagctttggggacaggctcaagaaagcaatcgacagcggtgacatggttaatgtgaatttggattggagggaggccctgccccatcctgacgagcgtgtcgagtatgaattctggaccaacagcaatgatgaatgtggcccaaagtgcgatagccagattgacttcgtcaagagcttcaaaggagcagcacaggtacttgagaagaagggctatacggagttcactcctcattacattacctggtactgcccagaggccttcattctgagcaagcagtgcaagtcccagtgcatcaatcatgggaggtactgtgcacctgacccagaacaggattttagcaaaggatatgacggcaaggatgtggtggtccagaacttgcgccaagtttgtgtctttaaggttgctaaggagcacaagaagccttggttatggtgggactacgttactgattttgcgattcggtgcccgatgaaggaaaagaagtacacaaaggagtgtgccgatggagttatcaagtcacttggccttgatcataaagcaatagataagtgtattggtgatccagatgcagatgaggaaaaccatgttctgaaagctgaacaggatgcacagattggcaagggttctcgtggtgatgttaccatcttaccaactctggtaatcaacaatagacaatacagagggaagcttgacaaaggagcagttcttaaagcactttgtgctggctttagggaaaccaccgagccagccgtttgcttgagtgatgatatacaaacaaacgagtgcctagagaacaatggtggctgttggcaagataaggctgccaacatcactgcatgcaaggatacattccgtggaagagtttgcgagtgtccagttgtgaaaggcgtcaaatttgttggcgatggctatactcactgtgaagcttccggatctggtcggtgtgaaattaacaacggagggtgctggaaagataccaagaatggtcggacatactctgcctgtactgtaagtgatgatggctgcagatgccctgacggattcaagggtgatggcaagcacaaatgtgaagatgttgatgaatgtaaggaaaggactgtgtgccagtgcgaagaatgcagatgcaaaaacacgtggggaagctacgagtgcggctgcagcgggggcctgctttacatgaaggagcatgacacatgcataagcaaaaacggagcatcagaagccggctggggcttcctgtgggtcgtcgtcttcggcctcgtcgcagcaggaattgcagggtacgcggtgtacaagtacaggatccggaggtacatggactcggagatccgcgccatcatggcccagtacatgcctctggacagccaaggagatgtccagagccacgcgcaccatattgagatgtgaggatgcatgcagacttgatgagaggagacggaggcttggtctagcttatataatacaccagaattagatgtgcatattcgtaacaatcttgtgtctagcacgcaaagtccttgaacatttggtgtctgtgttaggttgtaccatgacatggtcttgtttagcaataattgccgtcttttatttcggtgccaataaaggagatggcaaacggggctctgtgttgctcagttgtgtatgtggtccatgatcagtggtaaaagaatctgagtcccttatggggattgcagggctaaaatcctcttcttatttaaaattgaataaagatgagattttagctcctccaatctagctcttagggttgattttagtgacaaaggatcacgggaggattgatagggaaataaactaatttcctcctcaatccctaacaatcttccgtgatccttgatcaccaaatcagcccttatcttatacttatgtaaaagaaaattgtgcc

SEQ ID NO: 45030 - DNA, 2798 bp, Zea Mays
cttcctctaaggctgctggtttcaacagctgtgctgcagctaatgcgcagtagctgattcttgaagaagctgcttcgttgggaagaaaaagaaaccacatgctaccgtgtcggcctggttttgttcacgtgtttcttctgcctttagttttggttcatcgcgtccgtccttcctcctccttcgccgcctcttgcgcctcccctcccctccccactcctctcctctctccccgaaccaaaccaaacccctcccactccaactcctcgattctcagagtgctgtacaagtgtctcgccctaccgcggccgtcaaaaatccgatctttccgccgtttccggaggccacacggctgcaagactgaccaatcccccgcggatcgagccgcagacgccagcagttcctgctcgcggaccgcaggcggggcccggacggagcatggggtcccgatccgccggcgcggcgctgcggctgtggctgctggcgctcctgctgggctgctgccaggggaggttcgtggtggagaagaacagcctcaaggtgacggcgcccgacggcctcaagggcacctacgagtgcgccattggcaacttcggggtgccccagtacggcggcaccatggtcggcttcgtcgcctaccccaaggccaacaggaaggcctgcaagagcttcgacgacttcgacatctcctacaaggccaagccgggggcgttccccaccttcctgctcgtcgacaggggagattgttacttcgcaaagaaggcatggaatgcacagaaagcaggagcagcggcaatccttgttgctgatgacaaagacgaacctctaattacaatggacaaccctgaggagggtggcaacacggattatttagagaacatcactattccttcggcgttaataaccaagagctttggggacaggctcaagaaagcaatcgacagcggtgacatggttaatgtgaatttggattggagggaggccctgccccatcctgacgagcgtgtcgagtatgaattctggaccaacagcaatgatgaatgtggcccaaagtgcgatagccagattgacttcgtcaagagcttcaaaggagcagcacaggtacttgagaagaagggctatacggagttcactcctcattacattacctggtactgcccagaggccttcattctgagcaagcagtgcaagtcccagtgcatcaatcatgggaggtactgtgcacctgacccagaacaggattttagcaaaggatatgacggcaaggatgtggtggtccagaacttgcgccaagtttgtgtctttaaggttgctaaggagcacaagaagccttggttatggtgggactacgttactgattttgcgattcggtgcccgatgaaggaaaagaagtacacaaaggagtgtgccgatggagttatcaagtcacttggccttgatcataaagcaatagataagtgtattggtgatccagatgcagatgaggaaaaccatgttctgaaagctgaacaggatgcacagattggcaagggttctcgtggtgatgttaccatcttaccaactctggtaatcaacaatagacaatacagagcttgacaaaggagcagttcttaaagcactttgtgctggctttagggaaaccaccgagccagccgtttgcttgagtgatgatatacaaacaaacgagtgcctagagaacaatggtggctgttggcaagataaggctgccaacatcactgcatgcaaggatacattccgtggaagagtttgcgagtgtccagttgtgaaaggcgtcaaatttgttggcgatggctatactcactgtgaagcttccggatctggtcggtgtgaaattaacaacggagggtgctggaaagataccaagaatggtcggacatactctgcctgtactgatgatggctgcagatgccctgacggattcaagggtgatggcaagcacaaatgtgaagatgttgatgaatgtaaggaaaggactgtgtgccagtgcgaagaatgcagatgcaaaaacacgtggggaagctacgagtgcggctgcagcgggggcctgctttacatgaaggagcatgacacatgcataagcaaaaacggagcatcagaagccggctggggcttcctgtgggtcgtcgtcttcggcctcgtcgcagcaggaattgcagggtacgcggtgtacaagtacaggatccggaggtacatggactcggagatccgcgccatcatggcccagtacatgcctctggacagccaaggagatgtccagagccacgcgcaccatattgagatgtgaggatgcatgcagacttgatgagaggagacggaggcttggtctagcttatataatacaccagaattagatgtgcatattcgtaacaatcttgtgtctagcacgcaaagtccttgaacatttggtgtctgtgttaggttgtaccatgacatggtcttgtttagcaataattgccgtcttttatttcggtgccaataaaggagatggcaaacggggctctgtgttgctcagttgtgtatgtggtccatgatcagtggtaaaagaatctgagtcccttatggggattgcagggctaaaatcctcttcttatttaaaattgaataaagatgagattttagctcctccaatctagctcttagggttgattttagtgacaaaggatcacgggaggattgatagggaaataaactaatttcctcctcaatccctaacaatcttccgtgatccttgatcaccaaatcagcccttatcttatacttatgtaaaagaaaattgtgcc

SEQ ID NO: 45031 - DNA, 2775 bp, Zea Mays
cttcctctaaggctgctggtttcaacagctgtgctgcagctaatgcgcagtagctgattcttgaagaagctgcttcgttgggaagaaaaagaaaccacatgctaccgtgtcggcctggttttgttcacgtgtttcttctgcctttagttttggttcatcgcgtccgtccttcctcctccttcgccgcctcttgcgcctcccctcccctccccactcctctcctctctccccgaaccaaaccaaacccctcccactccaactcctcgattctcagagtgctgtacaagtgtctcgccctaccgcggccgtcaaaaatccgatctttccgccgtttccggaggccacacggctgcaagactgaccaatcccccgcggatcgagccgcagacgccagcagttcctgctcgcggaccgcaggcggggcccggacggagcatggggtcccgatccgccggcgcggcgctgcggctgtggctgctggcgctcctgctgggctgctgccaggggaggttcgtggtggagaagaacagcctcaaggtgacggcgcccgacggcctcaagggcacctacgagtgcgccattggcaacttcggggtgccccagtacggcggcaccatggtcggcttcgtcgcctaccccaaggccaacaggaaggcctgcaagagcttcgacgacttcgacatctcctacaaggccaagccgggggcgttccccaccttcctgctcgtcgacaggggagattgttacttcgcaaagaaggcatggaatgcacagaaagcaggagcagcggcaatccttgttgctgatgacaaagacgaacctctaattacaatggacaaccctgaggagggtggcaacacggattatttagagaacatcactattccttcggcgttaataaccaagagctttggggacaggctcaagaaagcaatcgacagcggtgacatggttaatgtgaatttggattggagggaggccctgccccatcctgacgagcgtgtcgagtatgaattctggaccaacagcaatgatgaatgtggcccaaagtgcgatagccagattgacttcgtcaagagcttcaaaggagcagcacaggtacttgagaagaagggctatacggagttcactcctcattacattacctggtactgcccagaggccttcattctgagcaagcagtgcaagtcccagtgcatcaatcatgggaggtactgtgcacctgacccagaacaggattttagcaaaggatatgacggcaaggatgtggtggtccagaacttgcgccaagtttgtgtctttaaggttgctaaggagcacaagaagccttggttatggtgggactacgttactgattttgcgattcggtgcccgatgaaggaaaagaagtacacaaaggagtgtgccgatggagttatcaagtcacttggccttgatcataaagcaatagataagtgtattggtgatccagatgcagatgaggaaaaccatgttctgaaagctgaacaggatgcacagattggcaagggttctcgtggtgatgttaccatcttaccaactctggtaatcaacaatagacaatacagagggaagcttgacaaaggagcagttcttaaagcactttgtgctggctttagggaaaccaccgagccagccgtttgcttgagtgatgatatacaaacaaacgagtgcctagagaacaatggtggctgttggcaagataaggctgccaacatcactgcatgcaaggatacattccgtggaagagtttgcgagtgtccagttgtgaaaggcgtcaaatttgttggcgatggctatactcactgtgaagcttccggatctggtcggtgtgaaattaacaacggagggtgctggaaagataccaagaatggtcggacatactctgcctgtactgatgatggctgcagatgccctgacggattcaagggtgatggcaagcacaaatgtgaagatgttgatgaatgtaaggaaaggactgtgtgccagtgcgaagaatgcagatgcaaaaacacgtggggaagctacgagtgcggctgcagcgggggcctgctttacatgaaggagcatgacacatgcataagcaaaaacggagcatcagaagccggctggggcttcctgtgggtcgtcgtcttcggcctcgtcgcagcaggaattgcaggaggtacatggactcggagatccgcgccatcatggcccagtacatgcctctggacagccaaggagatgtccagagccacgcgcaccatattgagatgtgaggatgcatgcagacttgatgagaggagacggaggcttggtctagcttatataatacaccagaattagatgtgcatattcgtaacaatcttgtgtctagcacgcaaagtccttgaacatttggtgtctgtgttaggttgtaccatgacatggtcttgtttagcaataattgccgtcttttatttcggtgccaataaaggagatggcaaacggggctctgtgttgctcagttgtgtatgtggtccatgatcagtggtaaaagaatctgagtcccttatggggattgcagggctaaaatcctcttcttatttaaaattgaataaagatgagattttagctcctccaatctagctcttagggttgattttagtgacaaaggatcacgggaggattgatagggaaataaactaatttcctcctcaatccctaacaatcttccgtgatccttgatcaccaaatcagcccttatcttatacttatgtaaaagaaaattgtgcc

SEQ ID NO: 45032 - DNA, 2590 bp, Zea Mays
cttcctctaaggctgctggtttcaacagctgtgctgcagctaatgcgcagtagctgattcttgaagaagctgcttcgttgggaagaaaaagaaaccacatgctaccgtgtcggcctggttttgttcacgtgtttcttctgcctttagttttggttcatcgcgtccgtccttcctcctccttcgccgcctcttgcgcctcccctcccctccccactcctctcctctctccccgaaccaaaccaaacccctcccactccaactcctcgattctcagagtgctgtacaagtgtctcgccctaccgcggccgtcaaaaatccgatctttccgccgtttccggaggccacacggctgcaagactgaccaatcccccgcggatcgagccgcagacgccagcagttcctgctcgcggaccgcaggcggggcccggacggagcatggggtcccgatccgccggcgcggcgctgcggctgtggctgctggcgctcctgctgggctgctgccaggggaggttcgtggtggagaagaacagcctcaaggtgacggcgcccgacggcctcaagggcacctacgagtgcgccattggcaacttcggggtgccccagtacggcggcaccatggtcggcttcgtcgcctaccccaaggccaacaggaaggcctgcaagagcttcgacgacttcgacatctcctacaaggccaagccgggggcgttccccaccttcctgctcgtcgacaggggagattgttacttcgcaaagaaggcatggaatgcacagaaagcaggagcagcggcaatccttgttgctgatgacaaagacgaacctctaattacaatggacaaccctgaggagggtggcaacacggattatttagagaacatcactattccttcggcgttaataaccaagagctttggggacaggctcaagaaagcaatcgacagcggtgacatggttaatgtgaatttggattggagggaggccctgccccatcctgacgagcgtgtcgagtatgaattctggaccaacagcaatgatgaatgtggcccaaagtgcgatagccagattgacttcgtcaagagcttcaaaggagcagcacaggattttagcaaaggatatgacggcaaggatgtggtggtccagaacttgcgccaagtttgtgtctttaaggaaaagaagtacacaaaggagtgtgccgatggagttatcaagtcacttggccttgatcataaagcaatagataagtgtattggtgatccagatgcagatgaggaaaaccatgttctgaaagctgaacaggatgcacagattggcaagggttctcgtggtgatgttaccatcttaccaactctggtaatcaacaatagacaatacagagggaagcttgacaaaggagcagttcttaaagcactttgtgctggctttagggaaaccaccgagccagccgtttgcttgagtgatgatatacaaacaaacgagtgcctagagaacaatggtggctgttggcaagataaggctgccaacatcactgcatgcaaggatacattccgtggaagagtttgcgagtgtccagttgtgaaaggcgtcaaatttgttggcgatggctatactcactgtgaagcttccggatctggtcggtgtgaaattaacaacggagggtgctggaaagataccaagaatggtcggacatactctgcctgtactgatgatggctgcagatgccctgacggattcaagggtgatggcaagcacaaatgtgaagatgttgatgaatgtaaggaaaggactgtgtgccagtgcgaagaatgcagatgcaaaaacacgtggggaagctacgagtgcggctgcagcgggggcctgctttacatgaaggagcatgacacatgcataagcaaaaacggagcatcagaagccggctggggcttcctgtgggtcgtcgtcttcggcctcgtcgcagcaggaattgcagggtacgcggtgtacaagtacaggatccggaggtacatggactcggagatccgcgccatcatggcccagtacatgcctctggacagccaaggagatgtccagagccacgcgcaccatattgagatgtgaggatgcatgcagacttgatgagaggagacggaggcttggtctagcttatataatacaccagaattagatgtgcatattcgtaacaatcttgtgtctagcacgcaaagtccttgaacatttggtgtctgtgttaggttgtaccatgacatggtcttgtttagcaataattgccgtcttttatttcggtgccaataaaggagatggcaaacggggctctgtgttgctcagttgtgtatgtggtccatgatcagtggtaaaagaatctgagtcccttatggggattgcagggctaaaatcctcttcttatttaaaattgaataaagatgagattttagctcctccaatctagctcttagggttgattttagtgacaaaggatcacgggaggattgatagggaaataaactaatttcctcctcaatccctaacaatcttccgtgatccttgatcaccaaatcagcccttatcttatacttatgtaaaagaaaattgtgcc

SEQ ID NO: 45033 - DNA, 2821 bp, Zea Mays
cttcctctaaggctgctggtttcaacagctgtgctgcagctaatgcgcagtagctgattcttgaagaagctgcttcgttgggaagaaaaagaaaccacatgctaccgtgtcggcctggttttgttcacgtgtttcttctgcctttagttttggttcatcgcgtccgtccttcctcctccttcgccgcctcttgcgcctcccctcccctccccactcctctcctctctccccgaaccaaaccaaacccctcccactccaactcctcgattctcagagtgctgtacaagtgtctcgccctaccgcggccgtcaaaaatccgatctttccgccgtttccggaggccacacggctgcaagactgaccaatcccccgcggatcgagccgcagacgccagcagttcctgctcgcggaccgcaggcggggcccggacggagcatggggtcccgatccgccggcgcggcgctgcggctgtggctgctggcgctcctgctgggctgctgccaggggaggttcgtggtggagaagaacagcctcaaggtgacggcgcccgacggcctcaagggcacctacgagtgcgccattggcaacttcggggtgccccagtacggcggcaccatggtcggcttcgtcgcctaccccaaggccaacaggaaggcctgcaagagcttcgacgacttcgacatctcctacaaggccaagccgggggcgttccccaccttcctgctcgtcgacaggggagattgttacttcgcaaagaaggcatggaatgcacagaaagcaggagcagcggcaatccttgttgctgatgacaaagacgaacctctaattacaatggacaaccctgaggagggtggcaacacggattatttagagaacatcactattccttcggcgttaataaccaagagctttggggacaggctcaagaaagcaatcgacagcggtgacatggttaatgtgaatttggattggagggaggccctgccccatcctgacgagcgtgtcgagtatgaattctggaccaacagcaatgatgaatgtggcccaaagtgcgatagccagattgacttcgtcaagagcttcaaaggagcagcacaggtacttgagaagaagggctatacggagttcactcctcattacattacctggtactgcccagaggccttcattctgagcaagcagtgcaagtcccagtgcatcaatcatgggaggtactgtgcacctgacccagaacaggattttagcaaaggatatgacggcaaggatgtggtggtccagaacttgcgccaagtttgtgtctttaaggttgctaaggagcacaagaagccttggttatggtgggactacgttactgattttgcgattcggtgcccgatgaaggaaaagaagtacacaaaggagtgtgccgatggagttatcaagtcacttggccttgatcataaagcaatagataagtgtattggtgatccagatgcagatgaggaaaaccatgttctgaaagctgaacaggatgcacagattggcaagggttctcgtggtgatgttaccatcttaccaactctggtaatcaacaatagacaatacagagggaagcttgacaaaggagcagttcttaaagcactttgtgctggctttagggaaaccaccgagccagccgtttgcttgagtgatgatatacaaacaaacgagtgcctagagaacaatggtggctgttggcaagataaggctgccaacatcactgcatgcaaggatacattccgtggaagagtttgcgagtgtccagttgtgaaaggcgtcaaatttgttggcgatggctatactcactgtgaagcttccggatctggtcggtgtgaaattaacaacggagggtgctggaaagataccaagaatggtcggacatactctgcctgtactgatgatggctgcagatgccctgacggattcaagggtgatggcaagcacaaatgtgaagatgttgatgaatgtaaggaaaggactgtgtgccagtgcgaagaatgcagatgcaaaaacacgtggggaagctacgagtgcggctgcagcgggggcctgctttacatgaaggagcatgacacatgcataatgtgtttgtcgtactcaggcaaaaacggagcatcagaagccggctggggcttcctgtgggtcgtcgtcttcggcctcgtcgcagcaggaattgcagggtacgcggtgtacaagtacaggatccggaggtacatggactcggagatccgcgccatcatggcccagtacatgcctctggacagccaaggagatgtccagagccacgcgcaccatattgagatgtgaggatgcatgcagacttgatgagaggagacggaggcttggtctagcttatataatacaccagaattagatgtgcatattcgtaacaatcttgtgtctagcacgcaaagtccttgaacatttggtgtctgtgttaggttgtaccatgacatggtcttgtttagcaataattgccgtcttttatttcggtgccaataaaggagatggcaaacggggctctgtgttgctcagttgtgtatgtggtccatgatcagtggtaaaagaatctgagtcccttatggggattgcagggctaaaatcctcttcttatttaaaattgaataaagatgagattttagctcctccaatctagctcttagggttgattttagtgacaaaggatcacgggaggattgatagggaaataaactaatttcctcctcaatccctaacaatcttccgtgatccttgatcaccaaatcagcccttatcttatacttatgtaaaagaaaattgtgcc

SEQ ID NO: 45034 - DNA, 1074 bp, Zea Mays
agcaagtcttctcttgctccaggttctactacagatgcacatacaagaacgacatgaagtgccccgcgacgaagcaagtgcagcagaaggacagcagcgacccgccactgttctccgtcacttacttcaaccagcacacctgcagcagctcaagcgccctcggcagcgccagagacgtcgcgtcccagtcgtcttcaaagaaggcggtgtcgatctgcttcagcccgcacgccccctccgagcagacctcgttcctgacgacgactacggtcgcgccgccggttatgcactcctacggcgccaaccgacagcccgacaggagcgcctacaaccaacagccccagtggtggacaggcggtgtgccatctcccacaagcaacggccctgctaagatggaggtcgcggagtccacgcagaagccgagcggttcgtacggcagcaccaccggcaacgctccgtccaggacgctgctaccgatcggccagtccaggtgcatcgagtacttccatttcttgtgatgagcttccgggaaggcaagctggggctcgggcactgcagcttggtgtctgcttgtttggagtggcaagtggagtttgtatctggagctggaggcgaaggcgaaaatgttgctgccgtcgtcctggcctcctggcctgaactacacaggccgggcggggcccaatcagtatactgactgacctgcattgcattacatacagagactgcctgctgcttactgtactgtacatctttgcatttgggttcaagccacgttttggtgcttggatgatgtgaagaatggtattggactgttggggtttctttatctagcagtagcgtacatgatatgatacgacgtacagaatgactgcttgacagttgagatatatccatttgtttgttatgtgttgtttgctgtttgtttagagatgagactaggatgtctcatttctgacagcgggatattggccatggttcagtctgctgctacggaaatgctgaaggttatagattatgtacactaaacagtaacagtttcttattaacatgtcttctacagttttagaagcagaa

SEQ ID NO: 45035 - DNA, 1349 bp, Zea Mays
ggacggagcccgccgcacagcaaagctccgaccttgcgccgccacgtttgtcttgtcccacccaccacctcctccactccccgcccccggcgcccctgcacgccgtcccatttctctcgtcccccctcctcctccccttcccctaccatctcagtggcggcggggctagggctctccttctccgttcctccctcaatcctcctcccctcctccctctcgcatccagtcaaactccagccagccaaaaccagcagcctcgaccaggccgccggcaggccgaccgattgatcggtgtggatcgagtcgagggaaggaggcaacgggctacaggaccaagtccagcacccaggcgcaaaaacttcctgagcaggatcatgccttcttgccctcggggaagaagcgccaaaggggaaggaaggatttgtgccatctgactccagtgcctgcattctagactcccaagctcgaacacaggccagggaagggaagcggtggccatggaacctcacagcctgcggttcgtcaggtgcccgaaatgccaccagctcctcgtcgagtacccctccattcctgtctacaagtgtggcggctgtggcacggttctcagagggccgacagtggcatgctaacagatcgaaggcaggatgcacattatctgtgctggctcatgtgtggaggttaggtggactgtccaaccaaccactaaaaattttgctggcgcatgtggcttgtctgtaaagacatgcacgctgtgtctcatgatcgcagacgcagcagacaaggctgcttctgtgaatctgattgcaacgtcaaaggcagaggctggctggctggctgtggacaggctagtacagcatccctgatggtggtgtgatactataaccatccccagtgccatggaaaaaaggtaggtgatgcaatgatgacatccttgtgatgagcttgtcctgcaacatgacaatgtgggagcataataacaagcattctctattcctaggatctggtttgttcatgtggatgtggcttctttccagtttgttggccctctggccagtggtttaatttggtagagagtccagtggatgcagtcttgtgcatggggcaaatatgcaatgcaatgcaagcctggcaatgtaaaggagcctggcggtggcggtggtgtgaaacagaatgatggagtatagctattaagcctaatgatgaagagaacatggggctgttgttcaacggcctgttcactgttggtgtcatggtcttgtgtgtttcttacataacaggagtacctggatggcaatttcagactcttttgatcactgaaacattgtgtttcagagagatgattctttttc

SEQ ID NO: 45036 - DNA, 4643 bp, Zea Mays
ggacggagcccgccgcacagcaaagctccgaccttgcgccgccacgtttgtcttgtcccacccaccacctcctccactccccgcccccggcgcccctgcacgccgtcccatttctctcgtcccccctcctcctccccttcccctaccatctcagtggcggcggggctagggctctccttctccgttcctccctcaatcctcctcccctcctccctctcgcatccagtcaaactccagccagccaaaaccagcagcctcgaccaggccgccggcaggccgaccgattgatcggtgtggatcgagtcgagggaaggaggcaacgggctacaggaccaagtccagcacccaggcgcaaaaacttcctgagcaggatcatgccttcttgccctcggggaagaagcgccaaagcaggggaaggaaggatttgtgccatctgactccagtgcctgcattctagactcccaagctcgaacacaggccagggaagggaagcggtggccatggaacctcacagcctgcggttcgtcaggtgcccgaaatgccaccagctcctcgtcgagtacccctccattcctgtctacaagtgtggcggctgtggcacggttctcagagcgaaacatcgggctgcccctgcagcacgagctggttcagaatctggggagcacagcaccggctctccgtgtagcctgaacggctcccctagccagagtagcggatcgatctgctcgggcgaacagagagctggctcctctgttgatcggcctcatgaggccacggctcatggaagcatgtcctccgctgccaacaacatcgactcgtgtgacggcacagtccatgaaagaaccatgtctgcagcagatagtggtgtaacccatgccgagcatccggaggagggcaagtgctccttagctgatgatggaaatatccagaagtctggggttatggtcaaagaaaaagagacacatggacaaaacgctggggctagtttggatttaactgaaagagttgagaatgttgacactggtgaaaaggcgagcggaggtaaaatcggtgatattggcactagtcaactgagcatgacactgtatgagaaaagtcaggctgctcacagggaggagaggccacgcaggtatgaaggcgtgcatgttgagtctcacaaagctctgatcgaagagttggagaggtctctttcgttcagcagtgaggatgactacttctcggacgaagcagaaagcagtggcctcagtgatgctctgcgtaaccaaatgggtagccgcaggtttatgctagggggcagagtgaatgatgcgccccgaagcgatccacatggtcgattgattgaagaactagagatgtctttcagcgatgcagaagagccattggagcagcatgctatgggttcagagagagttcatggaaatgtgcttgacaaggatccacagatcctgagtgataaaagtgcacatccatgtgaagaaagcctctcatcatttgagagtggacacctcaaatctgaacaaactcctcaccaggaaagcagggcaataggggcaataggcaatggcaatcaaggaaatgagcgtattgaagataacaataatactgccgactctgttcatgggagtgagcatattgtgattgacgatgacaaaattgcagatatattccacgagaaagaacatgataaggattgccagcttgcaaacacagaaagtgcatacccttctgaaggaagcacctctgctgtcgatgattgcagtattgaagttcagcaaagttttcaaccaaatgacctgacagcagtcgatgagtgcagtattgaagttcagcaaagttttcaaccaaatgacctgacagcagatgtcaatcaagaaatggaagatgataagataaccaatgataacattgtacctgcagattcccatgagaaagagcatgagaatgataatcttattcatgcgcctgcagatgaagacatttcagagagagttggtgtaaatgaagagctaacagcagatggcactcaagaaatggaagatggcttcatggaagatgacaacatgatcaattgtgtgcatgacaaagataattctgtgcttgcagatgaaaacattgcagagaaagttcatatgcatgaagatttaaaaactgatggcactcaggaaatggaagagggttgtatggaagacagcaacatgagcaattgtattcatgtcagtgataatcttgtatttgcagatgaaggcattgcagatagagttcatggaaatgaagagacagctgatggcgctggagaaaatgaacagagcctaatggaaaatgaaaatgtgaatgttgctgttgcagctgagttcattgcgaagaagattcacgagaatgagcatggtagggatcagcggtccctggaggacggaagtgcacagctgtatgaaggagtcatcactccattcagtgccagatacgttgaatctgaacaaagttttcaacaagatgagccaatacctgatgccactgaagaaaaggaagatgattttatggaagatggaaatatggccaactgcattgaagaaagcatggcagctgttgctaggttctcaagcttgccaaataagaggaatcagtccaagttagctagctttaataagaacaaagaacaaatgacctacagatctagaggtagccaacttcgtcagggacgttcacttgattctgaagattttggttcaattcaaaacttcatggagtcacaaatggatggcacctcaagttctctctcaagcgggtctcccagtcgaggcgatccggtgcacagaacagcaaacaagttcaataataactgtagacacgagcgcctcaaaaagatggatgaactaagagatcagctaagtaggctttcgagccagaagagctcggagagaagttaccagaagagaggcctagagtaccagcaacaatcaaatgggtatgacgtcgagcaccatattcaaagtgttgatggtgattccgctccaagttcctgtgctctagaatcctattatggtcatggaaggccgccaaggtacccaccaccacaaaatcctttctctccgacccatacatacgcacattgccattttggacatgccgaaacacgcctaccacacagttatgacccatgggagttcaattcatattaccagtcctcgtatgctgaaagcacaatactggaccaagaatcacttaggtcaagctacaaggagcagaaacgggtggtgagaaagcatatcttgcggcctctgtcaggtgcttccccattcactatctgcaacggctgtttcaacctggttcaaatgccatcggatgtctacatatcaaaagcaatggtcggcaaaatgcaatgcggcaagtgctccaaggttctggcattatcattccgtgcagcatacaatgcaaatgcaaagagtagtgtggatgtggcccaagagtcatacaacctggacgatagcgtagtcgctaaaaacgaggatattgcttcttattatgctgagtgcctaacagggggtccggttagtatcagtgaagactatggagcatcgcacacaagaagcatgcctgctcgagctgagtctagtagccttgctgccgcacaaagtggcaagaaggtctctgactcggcgctccatcggctcatggggtatgattcagctagccagttgttacgccatagcagggtgtttgaagatgggtacgagagcttcgagtcgatggtgccagtttccagcagagtgtccagaagaaagaacaagtgaggttctacttcgaagcgtgaaaccttttgctcaccttgcgagtaatcgtacaaaggagaaacagttttggagtgcggtccaaccgtgccgcagaagcccgtcctatgatccgaagggccgacagtggcatgctaacagatcgaaggcaggatgcacattatctgtgctggctcatgtgtggaggttaggtggactgtccaaccaaccactaaaaattttgctggcgcatgtggcttgtctgtaaagacatgcacgctgtgtctcatgatcgcagacgcagcagacaaggctgcttctgtgaatctgattgcaacgtcaaaggcagaggctggctggctggctgtggacaggctagtacagcatccctgatggtggtgtgatactataaccatccccagtgccatggaaaaaaggtaggtgatgcaatgatgacatccttgtgatgagcttgtcctgcaacatgacaatgtgggagcataataacaagcattctctattcctaggatctggtttgttcatgtggatgtggcttctttccagtttgttggccctctggccagtggtttaatttggtagagagtccagtggatgcagtcttgtgcatggggcaaatatgcaatgcaatgcaagcctggcaatgtaaaggagcctggcggtggcggtggtgtgaaacagaatgatggagtatagctattaagcctaatgatgaagagaacatggggctgttgttcaacggcctgttcactgttggtgtcatggtcttgtgtgtttcttacataacaggagtacctggatggcaatttcagactcttttgatcactgaaacattgtgtttcagagagatgattctttttc

SEQ ID NO: 45037 - DNA, 4549 bp, Zea Mays
ggacggagcccgccgcacagcaaagctccgaccttgcgccgccacgtttgtcttgtcccacccaccacctcctccactccccgcccccggcgcccctgcacgccgtcccatttctctcgtcccccctcctcctccccttcccctaccatctcagtggcggcggggctagggctctccttctccgttcctccctcaatcctcctcccctcctccctctcgcatccagtcaaactccagccagccaaaaccagcagcctcgaccaggccgccggcaggccgaccgattgatcggtgtggatcgagtcgagggaaggaggcaacgggctacaggaccaagtccagcacccaggcgcaaaaacttcctgagcaggatcatgccttcttgccctcggggaagaagcgccaaaggggaaggaaggatttgtgccatctgactccagtgcctgcattctagactcccaagctcgaacacaggccagggaagggaagcggtggccatggaacctcacagcctgcggttcgtcaggtgcccgaaatgccaccagctcctcgtcgagtacccctccattcctgtctacaagtgtggcggctgtggcacggttctcagagcgaaacatcgggctgcccctgcagcacgagctggttcagaatctggggagcacagcaccggctctccgtgtagcctgaacggctcccctagccagagtagcggatcgatctgctcgggcgaacagagagctggctcctctgttgatcggcctcatgaggccacggctcatggaagcatgtcctccgctgccaacaacatcgactcgtgtgacggcacagtccatgaaagaaccatgtctgcagcagatagtggtgtaacccatgccgagcatccggaggagggcaagtgctccttagctgatgatggaaatatccagaagtctggggttatggtcaaagaaaaagagacacatggacaaaacgctggggctagtttggatttaactgaaagagttgagaatgttgacactggtgaaaaggcgagcggaggtaaaatcggtgatattggcactagtcaactgagcatgacactgtatgagaaaagtcaggctgctcacagggaggagaggccacgcaggtatgaaggcgtgcatgttgagtctcacaaagctctgatcgaagagttggagaggtctctttcgttcagcagtgaggatgactacttctcggacgaagcagaaagcagtggcctcagtgatgctctgcgtaaccaaatgggtagccgcaggtttatgctagggggcagagtgaatgatgcgccccgaagcgatccacatggtcgattgattgaagaactagagatgtctttcagcgatgcagaagagccattggagcagcatgctatgggttcagagagagttcatggaaatgtgcttgacaaggatccacagatcctgagtgataaaagtgcacatccatgtgaagaaagcctctcatcatttgagagtggacacctcaaatctgaacaaactcctcaccaggaaagcagggcaataggggcaataggcaatggcaatcaaggaaatgagcgtattgaagataacaataatactgccgactctgttcatgggagtgagcatattgtgattgacgatgacaaaattgcagatatattccacgagaaagaacatgataaggattgccagcttgcaaacacagaaagtgcatacccttctgaaggaagcacctctgctgtcgatgattgcagtattgaagttcagcaaagttttcaaccaaatgacctgacagcagtcgatgagtgcagtattgaagttcagcaaagttttcaaccaaatgacctgacagcagatgtcaatcaagaaatggaagatgataagataaccaatgataacattgtacctgcagattcccatgagaaagagcatgagaatgataatcttattcatgcgcctgcagatgaagacatttcagagagagttggtgtaaatgaagagctaacagcagatggcactcaagaaatggaagatggcttcatggaagatgacaacatgatcaattgtgtgcatgacaaagataattctgtgcttgcagatgaaaacattgcagagaaagttcatatgcatgaagatttaaaaactgatggcactcaggaaatggaagagggttgtatggaagacagcaacatgagcaattgtattcatgtcagtgataatcttgtatttgcagatgaaggcattgcagatagagttcatggaaatgaagagacagctgatggcgctggagaaaatgaacagagcctaatggaaaatgaaaatgtgaatgttgctgttgcagctgagttcattgcgaagaagattcacgagaatgagcatggtagggatcagcggtccctggaggacggaagtgcacagctgtatgaaggagtcatcactccattcagtgccagatacgttgaatctgaacaaagttttcaacaagatgagccaatacctgatgccactgaagaaaaggaagatgattttatggaagatggaaatatggccaactgcattgaagaaagcatggcagctgttgctaggttctcaagcttgccaaataagaggaatcagtccaagttagctagctttaataagaacaaagaacaaatgacctacagatctagaggtagccaacttcgtcagggacgttcacttgattctgaagattttggttcaattcaaaacttcatggagtcacaaatggatggcacctcaagttctctctcaagcgggtctcccagtcgaggcgatccggtgcacagaacagcaaacaagttcaataataactgtagacacgagcgcctcaaaaagatggatgaactaagagatcagctaagtaggctttcgagccagaagagctcggagagaagttaccagaagagaggcctagagtaccagcaacaatcaaatgggtatgacgtcgagcaccatattcaaagtgttgatggtgattccgctccaagttcctgtgctctagaatcctattatggtcatggaaggccgccaaggtacccaccaccacaaaatcctttctctccgacccatacatacgcacattgccattttggacatgccgaaacacgcctaccacacagttatgacccatgggagttcaattcatattaccagtcctcgtatgctgaaagcacaatactggaccaagaatcacttaggtcaagctacaaggagcagaaacgggtggtgagaaagcatatcttgcggcctctgtcaggtgcttccccattcactatctgcaacggctgtttcaacctggttcaaatgccatcggatgtctacatatcaaaagcaatggtcggcaaaatgcaatgcggcaagtgctccaaggttctggcattatcattccgtgcagcatacaatgcaaatgcaaagagtagtgtggatgtggcccaagagtcatacaacctggacgatagcgtagtcgctaaaaacgaggatattgcttcttattatgctgagtgcctaacagggggtccggttagtatcagtgaagactatggagcatcgcacacaagaagcatgcctgctcgagctgagtctagtagccttgctgccgcacaaagtggcaagaaggtctctgactcggcgctccatcggctcatggggtatgattcagctagccagttgttacgccatagcagggtgtttgaagatgggtacgagagcttcgagtcgatggtgccagtttccagcagagtgtccagaagaaagaacaagtgaggttctacttcgaagcgtgaaaccttttgctcaccttgcgagtaatcgtacaaaggagaaacagttttggagtgcggtccaaccgtgccgcagaagcccgtcctatgatccgaagggccgacagtggcatgctaacagatcgaaggcaggatgcacattatctgtgctggctcatgtgtggagacgcagcagacaaggctgcttctgtgaatctgattgcaacgtcaaaggcagaggctggctggctggctgtggacaggctagtacagcatccctgatggtggtgtgatactataaccatccccagtgccatggaaaaaaggtaggtgatgcaatgatgacatccttgtgatgagcttgtcctgcaacatgacaatgtgggagcataataacaagcattctctattcctaggatctggtttgttcatgtggatgtggcttctttccagtttgttggccctctggccagtggtttaatttggtagagagtccagtggatgcagtcttgtgcatggggcaaatatgcaatgcaatgcaagcctggcaatgtaaaggagcctggcggtggcggtggtgtgaaacagaatgatggagtatagctattaagcctaatgatgaagagaacatggggctgttgttcaacggcctgttcactgttggtgtcatggtcttgtgtgtttcttacataacaggagtacctggatggcaatttcagactcttttgatcactgaaacattgtgtttcagagagatgattctttttc

SEQ ID NO: 45038 - DNA, 4972 bp, Zea Mays
ggacggagcccgccgcacagcaaagctccgaccttgcgccgccacgtttgtcttgtcccacccaccacctcctccactccccgcccccggcgcccctgcacgccgtcccatttctctcgtcccccctcctcctccccttcccctaccatctcagtggcggcggggctagggctctccttctccgttcctccctcaatcctcctcccctcctccctctcgcatccagtcaaactccagccagccaaaaccagcagcctcgaccaggccgccggcaggccgaccgattgatcggtgtggatcgagtcgagggaaggaggcaacgggctacaggaccaagtccagcacccaggcgcaaaaacttcctgagcaggatcatgccttcttgccctcggggaagaagcgccaaaggggaaggaaggatttgtgccatctgactccagtgcctgcattctagactcccaagctcgaacacaggccagggaagggaagcggtggccatggaacctcacagcctgcggttcgtcaggtgcccgaaatgccaccagctcctcgtcgagtacccctccattcctgtctacaagtgtggcggctgtggcacggttctcagagcgaaacatcgggctgcccctgcagcacgagctggttcagaatctggggagcacagcaccggctctccgtgtagcctgaacggctcccctagccagagtagcggatcgatctgctcgggcgaacagagagctggctcctctgttgatcggcctcatgaggccacggctcatggaagcatgtcctccgctgccaacaacatcgactcgtgtgacggcacagtccatgaaagaaccatgtctgcagcagatagtggtgtaacccatgccgagcatccggaggagggcaagtgctccttagctgatgatggaaatatccagaagtctggggttatggtcaaagaaaaagagacacatggacaaaacgctggggctagtttggatttaactgaaagagttgagaatgttgacactggtgaaaaggcgagcggaggtaaaatcggtgatattggcactagtcaactgagcatgacactgtatgagaaaagtcaggctgctcacagggaggagaggccacgcaggtatgaaggcgtgcatgttgagtctcacaaagctctgatcgaagagttggagaggtctctttcgttcagcagtgaggatgactacttctcggacgaagcagaaagcagtggcctcagtgatgctctgcgtaaccaaatgggtagccgcaggtttatgctagggggcagagtgaatgatgcgccccgaagcgatccacatggtcgattgattgaagaactagagatgtctttcagcgatgcagaagagccattggagcagcatgctatgggttcagagagagttcatggaaatgtgcttgacaaggatccacagatcctgagtgataaaagtgcacatccatgtgaagaaagcctctcatcatttgagagtggacacctcaaatctgaacaaactcctcaccaggaaagcagggcaataggggcaataggcaatggcaatcaaggaaatgagcgtattgaagataacaataatactgccgactctgttcatgggagtgagcatattgtgattgacgatgacaaaattgcagatatattccacgagaaagaacatgataaggattgccagcttgcaaacacagaaagtgcatacccttctgaaggaagcacctctgctgtcgatgattgcagtattgaagttcagcaaagttttcaaccaaatgacctgacagcagtcgatgagtgcagtattgaagttcagcaaagttttcaaccaaatgacctgacagcagatgtcaatcaagaaatggaagatgataagataaccaatgataacattgtacctgcagattcccatgagaaagagcatgagaatgataatcttattcatgcgcctgcagatgaagacatttcagagagagttggtgtaaatgaagagctaacagcagatggcactcaagaaatggaagatggcttcatggaagatgacaacatgatcaattgtgtgcatgacaaagataattctgtgcttgcagatgaaaacattgcagagaaagttcatatgcatgaagatttaaaaactgatggcactcaggaaatggaagagggttgtatggaagacagcaacatgagcaattgtattcatgtcagtgataatcttgtatttgcagatgaaggcattgcagatagagttcatggaaatgaagagacagctgatggcgctggagaaaatgaacagagcctaatggaaaatgaaaatgtgaatgttgctgttgcagctgagttcattgcgaagaagattcacgagaatgagcatggtagggatcagcggtccctggaggacggaagtgcacagctgtatgaaggagtcatcactccattcagtgccagatacgttgaatctgaacaaagttttcaacaagatgagccaatacctgatgccactgaagaaaaggaagatgattttatggaagatggaaatatggccaactgcattgaagaaagcatggcagctgttgctaggttctcaagcttgccaaataagaggaatcagtccaagttagctagctttaataagaacaaagaacaaatgacctacagatctagaggtagccaacttcgtcagggacgttcacttgattctgaagattttggttcaattcaaaacttcatggagtcacaaatggatggcacctcaagttctctctcaagcgggtctcccagtcgaggcgatccggtgcacagaacagcaaacaagttcaataataactgtagacacgagcgcctcaaaaagatggatgaactaagagatcagctaagtaggctttcgagccagaagagctcggagagaagttaccagaagagaggcctagagtaccagcaacaatcaaatgggtatgacgtcgagcaccatattcaaagtgttgatggtgattccgctccaagttcctgtgctctagaatcctattatggtcatggaaggccgccaaggtacccaccaccacaaaatcctttctctccgacccatacatacgcacattgccattttggacatgccgaaacacgcctaccacacagttatgacccatgggagttcaattcatattaccagtcctcgtatgctgaaagcacaatactggaccaagaatcacttaggtcaagctacaaggagcagaaacgggtggtgagaaagcatatcttgcggcctctgtcaggtgcttccccattcactatctgcaacggctgtttcaacctggttcaaatgccatcggatgtctacatatcaaaagcaatggtcggcaaaatgcaatgcggcaagtgctccaaggttctggcattatcattccgtgcagcatacaatgcaaatgcaaagagtagtgtggatgtggcccaagagtcatacaacctggacgatagcgtagtcgctaaaaacgaggatattgcttcttattatgctgagtgcctaacagggggtccggttagtatcagtgaagactatggagcatcgcacacaagaagcatgcctgctcgagctgagtctagtagccttgctgccgcacaaagtggcaagaaggtctctgactcggcgctccatcggctcatggggtatgattcagctagccagttgttacgccatagcagggtgtttgaagatgggtacgagagcttcgagtcgatggtgccagtttccagcagagtgtccagaagaaagaacaagtgaggttctacttcgaagcgtgaaaccttttgctcaccttgcgagtaatcgtacaaaggagaaacagttttggagtgcggtccaaccgtgccgcagaagcccgtcctatgatccgaaggcaagttggcatcttgccatcgaatagttccattattttctcaaataagttgggatgtttgaagcgattttagtttttttttggtcatattctttaggtgtggtgtatagatatattgcttattcttgttgtaaatttgttcatatctggtactggtataatgacaactattaataccacacaattggcaatctcgtggtcggatttgattgtatagtccggatactggtaggttcaggtctttcacaactccctgcatgttgaattaaggctcagaaatgcgagctgtagacattgtattgacactgacatagttcaagaaaaatgtccagggccgacagtggcatgctaacagatcgaaggcaggatgcacattatctgtgctggctcatgtgtggaggttaggtggactgtccaaccaaccactaaaaattttgctggcgcatgtggcttgtctgtaaagacatgcacgctgtgtctcatgatcgcagacgcagcagacaaggctgcttctgtgaatctgattgcaacgtcaaaggcagaggctggctggctggctgtggacaggctagtacagcatccctgatggtggtgtgatactataaccatccccagtgccatggaaaaaaggtaggtgatgcaatgatgacatccttgtgatgagcttgtcctgcaacatgacaatgtgggagcataataacaagcattctctattcctaggatctggtttgttcatgtggatgtggcttctttccagtttgttggccctctggccagtggtttaatttggtagagagtccagtggatgcagtcttgtgcatggggcaaatatgcaatgcaatgcaagcctggcaatgtaaaggagcctggcggtggcggtggtgtgaaacagaatgatggagtatagctattaagcctaatgatgaagagaacatggggctgttgttcaacggcctgttcactgttggtgtcatggtcttgtgtgtttcttacataacaggagtacctggatggcaatttcagactcttttgatcactgaaacattgtgtttcagagagatgattctttttc

SEQ ID NO: 45039 - DNA, 3900 bp, Zea Mays
ggacggagcccgccgcacagcaaagctccgaccttgcgccgccacgtttgtcttgtcccacccaccacctcctccactccccgcccccggcgcccctgcacgccgtcccatttctctcgtcccccctcctcctccccttcccctaccatctcagtggcggcggggctagggctctccttctccgttcctccctcaatcctcctcccctcctccctctcgcatccagtcaaactccagccagccaaaaccagcagcctcgaccaggccgccggcaggccgaccgattgatcggtgtggatcgagtcgagggaaggaggcaacgggctacaggaccaagtccagcacccaggcgcaaaaacttcctgagcaggatcatgccttcttgccctcggggaagaagcgccaaaggggaaggaaggatttgtgccatctgactccagtgcctgcattctagactcccaagctcgaacacaggccagggaagggaagcggtggccatggaacctcacagcctgcggttcgtcaggtgcccgaaatgccaccagctcctcgtcgagtacccctccattcctgtctacaagtgtggcggctgtggcacggttctcagaggtaccaattgtcccccccatctttcatttctatgtttatggaaacaaacaaacaatctgatcggtatatgtggtttgtcaccggcgcagcgaaacatcgggctgcccctgcagcacgagctggttcagaatctggggagcacagcaccggctctccgtgtagcctgaacggctcccctagccagagtagcggatcgatctgctcgggcgaacagagagctggctcctctgttgatcggcctcatgaggccacggctcatggaagcatgtcctccgctgccaacaacatcgactcgtgtgacggcacagtccatgaaagaaccatgtctgcagcagatagtggtgtaacccatgccgagcatccggaggagggcaagtgctccttagctgatgatggaaatatccagaagtctggggttatggtcaaagaaaaagagacacatggacaaaacgctggggctagtttggatttaactgaaagagttgagaatgttgacactggtgaaaaggcgagcggaggtaaaatcggtgatattggcactagtcaactgagcatgacactgtatgagaaaagtcaggctgctcacagggaggagaggccacgcaggtatgaaggcgtgcatgttgagtctcacaaagctctgatcgaagagttggagaggtctctttcgttcagcagtgaggatgactacttctcggacgaagcagaaagcagtggcctcagtgatgctctgcgtaaccaaatgggtagccgcaggtttatgctagggggcagagtgaatgatgcgccccgaagcgatccacatggtcgattgattgaagaactagagatgtctttcagcgatgcagaagagccattggagcagcatgctatgggttcagagagagttcatggaaatgtgcttgacaaggatccacagatcctgagtgataaaagtgcacatccatgtgaagaaagcctctcatcatttgagagtggacacctcaaatctgaacaaactcctcaccaggaaagcagggcaataggggcaataggcaatggcaatcaaggaaatgagcgtattgaagataacaataatactgccgactctgttcatgggagtgagcatattgtgattgacgatgacaaaattgcagatatattccacgagaaagaacatgataaggattgccagcttgcaaacacagaaagtgcatacccttctgaaggaagcacctctgctgtcgatgattgcagtattgaagttcagcaaagttttcaaccaaatgacctgacagcagtcgatgagtgcagtattgaagttcagcaaagttttcaaccaaatgacctgacagcagatgtcaatcaagaaatggaagatgataagataaccaatgataacattgtacctgcagattcccatgagaaagagcatgagaatgataatcttattcatgcgcctgcagatgaagacatttcagagagagttggtgtaaatgaagagctaacagcagatggcactcaagaaatggaagatggcttcatggaagatgacaacatgatcaattgtgtgcatgacaaagataattctgtgcttgcagatgaaaacattgcagagaaagttcatatgcatgaagatttaaaaactgatggcactcaggaaatggaagagggttgtatggaagacagcaacatgagcaattgtattcatgtcagtgataatcttgtatttgcagatgaaggcattgcagatagagttcatggaaatgaagagacagctgatggcgctggagaaaatgaacagagcctaatggaaaatgaaaatgtgaatgttgctgttgcagctgagttcattgcgaagaagattcacgagaatgagcatggtagggatcagcggtccctggaggacggaagtgcacagctgtatgaaggagtcatcactccattcagtgccagatacgttgaatctgaacaaagttttcaacaagatgagccaatacctgatgccactgaagaaaaggaagatgattttatggaagatggaaatatggccaactgcattgaagaaagcatggcagctgttgctaggttctcaagcttgccaaataagaggaatcagtccaagttagctagctttaataagaacaaagaacaaatgacctacagatctagaggtagccaacttcgtcagggacgttcacttgattctgaagattttggttcaattcaaaacttcatggagtcacaaatggatggcacctcaagttctctctcaagcgggtctcccagtcgaggcgatccggtgcacagaacagcaaacaagttcaataataactgtagacacgagcgcctcaaaaagatggatgaactaagagatcagctaagtaggctttcgagccagaagagctcggagagaagttaccagaagagaggcctagagtaccagcaacaatcaaatgggtatgacgtcgagcaccatattcaaagtgttgatggtgattccgctccaagttcctgtgctctagaatcctattatggtcatggaaggccgccaaggtacccaccaccacaaaatcctttctctccgacccatacatacgcacattgccattttggacatgccgaaacacgcctaccacacagttatgacccatgggagttcaattcatattaccagtcctcgtatgctgaaagcacaatactggaccaagaatcacttaggtcaagctacaaggagcagaaacgggtggtgagaaagcatatcttgcggcctctgtcaggtgcttccccattcactatctgcaacggctgtttcaacctggttcaaatgccatcggatgtctacatatcaaaagcaatggtcggcaaaatgcaatgcggcaagtgctccaaggttctggcattatcattccgtgcagcatacaatgcaaatgcaaagagtagtgtggatgtggcccaagagtcatacaacctggacgatagcgtagtcgctaaaaacgaggatattgcttcttattatgctgagtgcctaacagggggtccggttagtatcagtgaagactatggagcatcgcacacaagaagcatgcctgctcgagctgagtctagtagccttgctgccgcacaaagtggcaagaaggtctctgactcggcgctccatcggctcatggggtatgattcagctagccagttgttacgccatagcagggtgtttgaagatgggtacgagagcttcgagtcgatggtgccagtttccagcagagtgtccagaagaaagaacaaggccgacagtggcatgctaacagatcgaag

SEQ ID NO: 45040 - DNA, 1156 bp, Zea Mays
gaaaacaagaactcttgaattgctaaaaagaggaaagtgataactctgaaggcctcatcacattaactttttttagaacatttccgatgacatgcctttcattaagagggaactcaggttaacaaaaactggtccaaactatatattgttatccatcaccggtgcaattaaaagtgcttccaaagtagcatctatattttatgttttttatgcgtgacatgtaagaacttttggtatggaaattataaaggctctgacttgagtgagttgttcaaaaaactgaatttaagtgtttgcgctaagcgatcttttacttgcaatcttgcaccattaaaccatatttgtagatatgcggatatgccaggaagattcattgagaagcatgtttgacaaatctgaggtcctaaatcttgtggtgattattgtttgtgggtagtgttacaagaatttgggcaaccccagtcagtagctttctgcatttgtcatcatagagatttgactattaaattgaacagctgttctggtgcagagaagaaggggctgtgatctgtatctatgaccaaaacctcactgggtggccactttttgatcatggagtcttgctgttgaggatccagcatgtggtcgcgctccatctttatgaaagttcgtttgattcggttcaatctctcatcatctccttcgaagcttgctgtactgatagctgttgcaggccacggacgcatcagcattgaagcaagtactgattcctataccagataaaaataagaatggctttgttgtgatagtcgatcacgctggaattctggcctcaaggcaatggttgttggaggatcatctgctcctgcaccaagtgtcaactcaatctcgttctcgggcaaagagggtctatgtggtttaaaaagatggcaaacaaattcttcaaaaacattacatcgttcttatcttcatcggcttgaaatccaaacggcagcattgtggcggccacgaaaaatgcttgaccgatcctgtcaacaaattcatgcattgcatggatcacactcagccctccagcgccatgtccgatcagaatcacctagaacaagaccggagaatgggttagcatacatatggacagcaccaggcactggagtctggaagaacacaagcgattact

SEQ ID NO: 45041 - DNA, 1395 bp, Zea Mays
gaaaacaagaactcttgaattgctaaaaagaggaaagtgataactctgaaggcctcatcacattaactttttttagaacatttccgatgacatgcctttcattaagagggaactcaggttaacaaaaactggtccaaactatatattgttatccatcaccggtgcaattaaaagtgcttccaaagtagcatctatattttatgttttttatgcgtgacatgtaagaacttttggtatggaaattataaaggctctgacttgagtgagttgttcaaaaaactgaatttaagtgtttgcgctaagcgatcttttacttgcaatcttgcaccattaaaccatatttgtagatatgcggatatgccaggaagattcattgagaagcatgtttgacaaatctgaggtcctaaatcttgtggtgattattgtttgtgggtagtgttacaagaatttgggcaaccccagtcagtagctttctgcatttgtcatcatagagatttgactattaaattgaacagctgttctggtgcagagaagaaggggctgtgatctgtatctatgaccaaaacctcactgggtggccactttttgatcatggagtcttgctgttgaggatccagcatgtggtcgcgctccatctttatgaaagttcgtttgattcggttcaatctctcatcatctccttcgaagcttgctgtactgatagctgttgcaggccacggacgcatcagcattgaagcaagtactgattcctataccagataaaaataagaatggctttgttgtgatagtcgatcacgctggaattctggcctcaaggcaatggttgttggaggatcatctgctcctgcaccaagtgtcaactcaatctcgttctcgggcaaagtcggtaacccctgttacatgttgatatgagaaggatgtaacaatcatacatcgtattataaaagaagattaattatagtagattcaccacgagctaacgcaacttcgtatgattgtttcagagtttccatgctcatatgtgttattacatttttcttctataataaaagccttaaggtttgcccctatatgtatatgtttgtttgatgtgtactctatatttttttatcatttgctaggagggtctatgtggtttaaaaagatggcaaacaaattcttcaaaaacattacatcgttcttatcttcatcggcttgaaatccaaacggcagcattgtggcggccacgaaaaatgcttgaccgatcctgtcaacaaattcatgcattgcatggatcacactcagccctccagcgccatgtccgatcagaatcacctagaacaagaccggagaatgggttagcatacatatggacagcaccaggcactggagtctggaagaacacaagcgattact

SEQ ID NO: 45042 - DNA, 1160 bp, Zea Mays
gaaaacaagaactcttgaattgctaaaaagaggaaagtgataactctgaaggcctcatcacattaactttttttagaacatttccgatgacatgcctttcattaagagggaactcaggttaacaaaaactggtccaaactatatattgttatccatcaccggtgcaattaaaagtgcttccaaagtagcatctatattttatgttttttatgcgtgacatgtaagaacttttggtatggaaattataaaggctctgacttgagtgagttgttcaaaaaactgaatttaagtgtttgcgctaagcgatcttttacttgcaatcttgcaccattaaaccatatttgtagatatgcggatatgccaggaagattcattgagaagcatgtttgacaaatctgaggtcctaaatcttgtggtgattattgtttgtgggtagtgttacaagaatttgggcaaccccagtcagtagctttctgcatttgtcatcatagagatttgactattaaattgaacagctgttctggtgcagagaagaaggggctgtgatctgtatctatgaccaaaacctcactgggtggccactttttgatcatggagtcttgctgttgaggatccagcatgtggtcgcgctccatctttatgaaagttcgtttgattcggttcaatctctcatcatctccttcgaagcttgctgtactgatagctgttgcaggccacggacgcatcagcattgaagcaagtactgattcctataccagataaaaataagaatggctttgttgtgatagtcgatcacgctggaattctggcctcaaggcaatggttgttggaggatcatctgctcctgcaccaagtgtcaactcaatctcgttctcgggcaaagtcggagggtctatgtggtttaaaaagatggcaaacaaattcttcaaaaacattacatcgttcttatcttcatcggcttgaaatccaaacggcagcattgtggcggccacgaaaaatgcttgaccgatcctgtcaacaaattcatgcattgcatggatcacactcagccctccagcgccatgtccgatcagaatcacctagaacaagaccggagaatgggttagcatacatatggacagcaccaggcactggagtctggaagaacacaagcgattact

SEQ ID NO: 45043 - DNA, 1070 bp, Zea Mays
ctatagaccctgtgcaccttttagagatgcggcgttgaagggttttatggtccgtcgactccaaaacttctgcatgtgaacccagatggcagatgcttattctggaactattgggatggattttatcatgaaccatagtgcactgggaattgatttagcttctgttcatatttgttctgacagttgataagtccccatattgtcatgagagaagaaggggctgtgatctgtatctatgaccaaaacctcactgggtggccactttttgatcatggagtcttgctgttgaggatccagcatgtggtcgcgctccatctttatgaaagttcgtttgattcggttcaatctctcatcatctccttcgaagcttgctgtactgatagctgttgcaggccacggacgcatcagcattgaagcaagtactgattcctataccagataaaaataagaatggctttgttgtgatagtcgatcacgctggaattctggcctcaaggcaatggttgttggaggatcatctgctcctgcaccaagtgtcaactcaatctcgttctcgggcaaagtcggtaacccctgttacatgttgatatgagaaggatgtaacaatcatacatcgtattataaaagaagattaattatagtagattcaccacgagctaacgcaacttcgtatgattgtttcagagtttccatgctcatatgtgttattacatttttcttctataataaaagccttaaggtttgcccctatatgtatatgtttgtttgatgtgtactctatatttttttatcatttgctaggagggtctatgtggtttaaaaagatggcaaacaaattcttcaaaaacattacatcgttcttatcttcatcggcttgaaatccaaacggcagcattgtggcggccacgaaaaatgcttgaccgatcctgtcaacaaattcatgcattgcatggatcacactcagccctccagcgccatgtccgatcagaatcacctagaacaagaccggagaatgggttagcatacatatgcaccaggcactggagtctggaagaacacaagcgattact

SEQ ID NO: 45044 - DNA, 1089 bp, Zea Mays
ctatagaccctgtgcaccttttagagatgcggcgttgaagggttttatggtccgtcgactccaaaacttctgcatgtgaacccagatggcagatgcttattctggaactattgggatggattttatcatgaaccatagtgcactgggaattgatttagcttctgttcatatttgttctgacagttgataagtccccatattgtcatgagctgttctggtgcagagaagaaggggctgtgatctgtatctatgaccaaaacctcactgggtggccactttttgatcatggagtcttgctgttgaggatccagcatgtggtcgcgctccatctttatgaaagttcgtttgattcggttcaatctctcatcatctccttcgaagcttgctgtactgatagctgttgcaggccacggacgcatcagcattgaagcaagtactgattcctataccagataaaaataagaatggctttgttgtgatagtcgatcacgctggaattctggcctcaaggcaatggttgttggaggatcatctgctcctgcaccaagtgtcaactcaatctcgttctcgggcaaagtcggtaacccctgttacatgttgatatgagaaggatgtaacaatcatacatcgtattataaaagaagattaattatagtagattcaccacgagctaacgcaacttcgtatgattgtttcagagtttccatgctcatatgtgttattacatttttcttctataataaaagccttaaggtttgcccctatatgtatatgtttgtttgatgtgtactctatatttttttatcatttgctaggagggtctatgtggtttaaaaagatggcaaacaaattcttcaaaaacattacatcgttcttatcttcatcggcttgaaatccaaacggcagcattgtggcggccacgaaaaatgcttgaccgatcctgtcaacaaattcatgcattgcatggatcacactcagccctccagcgccatgtccgatcagaatcacctagaacaagaccggagaatgggttagcatacatatggacagcaccaggcactggagtctggaagaacacaagcgattact

SEQ ID NO: 45045 - DNA, 1075 bp, Zea Mays
ctatagaccctgtgcaccttttagagatgcggcgttgaagggttttatggtccgtcgactccaaaacttctgcatgtgaacccagatggcagatgcttattctggaactattgggatggattttatcatgaaccatagtgcactgggaattgatttagcttctgttcatatttgttctgacagttgataagtccccatattgtcatgagagaagaaggggctgtgatctgtatctatgaccaaaacctcactgggtggccactttttgatcatggagtcttgctgttgaggatccagcatgtggtcgcgctccatctttatgaaagttcgtttgattcggttcaatctctcatcatctccttcgaagcttgctgtactgatagctgttgcaggccacggacgcatcagcattgaagcaagtactgattcctataccagataaaaataagaatggctttgttgtgatagtcgatcacgctggaattctggcctcaaggcaatggttgttggaggatcatctgctcctgcaccaagtgtcaactcaatctcgttctcgggcaaagtcggtaacccctgttacatgttgatatgagaaggatgtaacaatcatacatcgtattataaaagaagattaattatagtagattcaccacgagctaacgcaacttcgtatgattgtttcagagtttccatgctcatatgtgttattacatttttcttctataataaaagccttaaggtttgcccctatatgtatatgtttgtttgatgtgtactctatatttttttatcatttgctaggagggtctatgtggtttaaaaagatggcaaacaaattcttcaaaaacattacatcgttcttatcttcatcggcttgaaatccaaacggcagcattgtggcggccacgaaaaatgcttgaccgatcctgtcaacaaattcatgcattgcatggatcacactcagccctccagcgccatgtccgatcagaatcacctagaacaagaccggagaatgggttagcatacatatggacagcaccaggcactggagtctggaagaacacaagcgattact

SEQ ID NO: 45046 - DNA, 610 bp, Zea Mays
cgaagagatggcgtcttatgtgaaatctatagaccctgtgcaccttttagagatgcggcgttgaagggttttatggtccgtcgactccaaaacttctgcatgtgaacccagatggcagatgcttattctggaactattgggatggattttatcatgaaccatagtgcactgggaattgatttagcttctgttcatatttgttctgacagttgataagtccccatattgtcatgagagaagaaggggctgtgatctgtatctatgaccaaaacctcactgggtggccactttttgatcatggagtcttgctgttgaggatccagcatgtggtcgcgctccatctttatgaaagttcgtttgattcggttcaatctctcatcatctccttcgaagcttgctgtactgatagctgttgcaggccacggacgcatcagcattgaagcaagtactgattcctataccagataaaaataagaatggctttgttgtgatagtcgatcacgctggaattctggcctcaaggcaatggttgttggaggatcatctgctcctgcaccaagtgtcaactcaatctcgttctcgggcaaagtcggagggtctatgtggttta

SEQ ID NO: 45047 - DNA, 2787 bp, Zea Mays
cagtcacgcacgccgccccgaatctctcccctccacctccaaacaaaaatctctcctcttcctcctcctcctctcccacgatccccactcccaccccaccccctcgatcccaactccacccagccgaggccagcccagcaaatcatggcgacggtcacgcagggggtgctgctgcggctgctgcaggcgatgcacacggaggagcgcgtggcgggggagcaccgttcgccggtgctgcaggtcacgggcgtggtgccggcgctgacagcgtccacctccgacgcgccgctgctcgccgcgccgccgtccaacggcgtgctcctcaacctctccgacggcctccactccacctacgtgcaggtcccgcccgccgacgccgacgcgctgctggccgccgcgcgcccgcacctcgtgggccacctcgtccacctcgaccgcctccgcctcgcgcgccccgtgccgcgcgcgctcggcctccgcaccgtcccgtcctcccgctccctgccctgcgctggcgcgccccagccgctcgtcgtgcgccccgccgcctgcgcccgcggctacgtcatccagcccgccgcgtccgccgccgacgccgcgccgccgctcatgccctcctgccccacctcctcctccgacgacaacgacgccaagcggaccgtcctcgggcccaagaacgccgtcgccgaccccgcgccgccgccgcagcagcccgtcaagcgccggttctcgtcgccggcgccgccgtccaagcagcgagacccgtcgcccgccgccaagcccgcggtctcgcgggcgtcgtctccctccgtcggcaaaagcgcgtcgcggccgtcctcgcccgcgctcaggtccacgcccagggcgacgtcgccggcgccgtccaagtgcgtcgtgcccagcctggtcgccgccagggaggagaaccggagggcggccagggagccggcgatcatcgtgccgtcgaggtaccgccagccgtcgccggcgggcgggaggaggggcgccgcatctccggccgtcgccggtgggaggcgggcgtccctgtcgcctagctcgcgccggctgtccggggaagggaccggcaagaagaaggttggggtgctggtggctgggatctccaagatgacggatctggggagcgggtcggctgccaagcccgggaggaagagctgggacgatcccacgcgcactgtggctgcaacgtccgtcatgaagtctaaggccaaggtggacaaggataccatcctcaggactcaggaagcaatgtcgaggcggctaagtgatgctacgacggaacaatccagtaacgatgattcatctgttgacgagaagcccaagcagcctcgtaagaagatagacgcccctacctcagtgaaggcaaagaccgcagctccgaaaattacacttcacgaccctaaatggactgacggcagcattcctttggacgcacttcctgataaactctcaaaaataggaaaggaagcttttgagcggagagattcagcagcaactgctgcagctagcgccctgcaagaggcattgatctctgaatctgtgatcaggaacataagcaagttctctgaaatctgcgcgtccgcaagggtctccaatccgttcccaacagtagatctcttccttgtcgtctgtgaggatgctctcaagtggaagaccatcgctgccgagtctgtggtgaccaacggggctgaagaggaggaactgctggagaagaaatcgacttggcactgggtcggcgctgcgttagccactgatctcgaggtcctcaagcttctgaacggtgccactgggcccttctcccggacgcggagcagcggcactaccaacaagccaaatgcatcttcggtggaaccgccgaggacagcaagcatgtcgtcgaagaagcaagcgcatggagcttcagccaaggcgcagtctaaggcggcggcggtgtcaccaagctccccgccgaggtgcagcacgtggaacatgggcgagacagctgagctcgccaaggccctgtggcgcgagatgcgcgcgtggttcctgaccttcgtggacgaggcactggacgtggggttccacctgttcgaagatcaacagaacgtcgctggcaaggggaggcagcacggcggcggacacataacgatggtcctctcgcagttcaagaagatcagcgactggctggaccaggtagggaagatcgcggcggcggaggaggaggagcagaggaccaaggaaaagatcgagctcttgaagcgcaagatctacgggtttgtcattagccacatggggtctgcgttggagagcccagcatccgtctcggtttcttcgaggagctgagggctgttagtggatgcttcatgctctgaagctcgctctctctctctgctcgcagtttctgttcgtactggttcttcaactcgtttaagattgaaaaggccacacagtcatgtagcctgttgttggcgcggttcttttgtgttttctttttgggatgcctaatttatgttgtgaataaattaccgtactgtcattttggatacgtgtctgtttgtcgggtaggattatgaatgaaaagttacttggttcagtttgcatatgcaacttaggtgcttatttcatcaggtctgcgtggcgataactaactacaccacgcagcaccgaaattttcagtaatttctgtggtggccaaaagaaagaaacgatattttgtaatgctgtacatgtgctatataattctagactcatatccttttactataaaaacataaagtaaattcatttcat

SEQ ID NO: 45048 - DNA, 1521 bp, Zea Mays
attactattaccatttgcgttacatttcttgaaccaaacagagattaggagagatcacacgtcaaatagtggccgacaagccagtagccattcagttacgccctcgtcgccgtcgccgaccactcctcccgccgcgtcaccgagaatataactttgttggcccacccaactcaagcaaattgacctggacggacgaactgatgaagagagtcgatgtgggcggtgaggaatcagttcaaaattggaagacaggaaaatatgggaaggaaatatgcgccgccgccaacttccctttcggtgctcgccgtccggctccggccagggatggatgctgaggtcagcgagatggtcacttgtcacccagagagcagagcgccatcttctccgcgcggccgggtaggtaggtagctagccgccatagcaagctaggccgaagcagaggagtgatggccaaggtccaccccaacgccgcggagtccgtccaggcagaggccgagggagagctgcccacggtgctgacggtgtggcgcaagtcgctgctcttcaactgcgacggcttcaccgtctacgacgcccgcggcgacctggccttccgcgtggactgctacgccggctcgttccgccgccggcgccgcgccgacgtcgtgctcatggacgccacggggaagccgctgctcaccgtgcgccgcaagacgcggttcggcttagcggagcgctgggtcatctacgacggcgacgccgacgacggcacgacggccggggccacgccgctgctgtccgtccgccgccgccgcataggcgcgtgctgcaagacgctggcgctcgcccgcccccgcccccgctccgccgccgcgggaaccgacgcaccgtcgtacgtggtggagggttcctacggtcggcgcgcctgcgcggtgcgcgacgcccgcgggggcgccgtcgtcgcggaggtgcagaggaaggaggccgtcggcgacgacgtgttccgcctcgtcgtggccgggccacgcctcggcgcgccgctgtccatggcgctcgtcatcgccctcgacgacatgttccgcggcggctggtcggcgcggtcgctgctgcgcatgagctcgccggcgtagtactttcactagctatagaagccacgagatggagtggagcccatataccagggactctccctgttacacgtgtaccgttacagtgaccccgggcccagttgtcagcgtcagcagagtttataatgcaggctgcagcaggggcagggctaacccaagcaatatttagatactagaattttcagttcgaatgcgtaaaacagtcggttctctgccaaatcaatcaaatatgaaaaaactatatatttgcaagatcctgaaaggaataatcaggggaagatacgatgaagggttcgggggtttttttagataggaatagtaatacacctactaaaatattagttacacatctagaaaaagtatttattacataaattttgtaactagataaaaattagaggtagaagtgtttttt

SEQ ID NO: 45049 - DNA, 1607 bp, Zea Mays
cattactattaccatttgcgttacatttcttgaaccaaacagagattaggagagatcacacgtcaaatagtggccgacaagccagtagccattcagttacgccctcgtcgccgtcgccgaccactcctcccgccgcgtcaccgagaatataactttgttggcccacccaactcaagcaaattgacctggacggacgaactgatgaagagagtcgatgtgggcgttcaaaattggaagacaggaaaatatgggaaggaaatatgcgccgccgccaacttccctttcggtgctcgccgtccggctccggccagggatggatgctgaggtcagcgagatggtcacttgtcacccagagagcagagcgccatcttctccgcgcggccgggtataaatcccctccgcttctcctccaactcctctccacccgctcgactccaagcgcaatggctcatccttgcttaattaccaaggtacctttgcaggtaggtaggtagctagccgccatagcaagctaggccgaagcagaggagtgatggccaaggtccaccccaacgccgcggagtccgtccaggcagaggccgagggagagctgcccacggtgctgacggtgtggcgcaagtcgctgctcttcaactgcgacggcttcaccgtctacgacgcccgcggcgacctggccttccgcgtggactgctacgccggctcgttccgccgccggcgccgcgccgacgtcgtgctcatggacgccacggggaagccgctgctcaccgtgcgccgcaagacgcggttcggcttagcggagcgctgggtcatctacgacggcgacgccgacgacggcacgacggccggggccacgccgctgctgtccgtccgccgccgccgcataggcgcgtgctgcaagacgctggcgctcgcccgcccccgcccccgctccgccgccgcgggaaccgacgcaccgtcgtacgtggtggagggttcctacggtcggcgcgcctgcgcggtgcgcgacgcccgcgggggcgccgtcgtcgcggaggtgcagaggaaggaggccgtcggcgacgacgtgttccgcctcgtcgtggccgggccacgcctcggcgcgccgctgtccatggcgctcgtcatcgccctcgacgacatgttccgcggcggctggtcggcgcggtcgctgctgcgcatgagctcgccggcgtagtactttcactagctatagaagccacgagatggagtggagcccatataccagggactctccctgttacacgtgtaccgttacagtgaccccgggcccagttgtcagcgtcagcagagtttataatgcaggctgcagcaggggcagggctaacccaagcaatatttagatactagaattttcagttcgaatgcgtaaaacagtcggttctctgccaaatcaatcaaatatgaaaaaactatatatttgcaagatcctgaaaggaataatcaggggaagatacgatgaagggttcgggggtttttttagataggaatagtaatacacctactaaaatattagttacacatctagaaaaagtatttattacataaattttgtaactagataaaaattagaggtagaagtgtttttt

SEQ ID NO: 45050 - DNA, 1807 bp, Zea Mays
accgttccttttctccaccattgaaacactctctgaccctcactcgctccctgtcacacacactacactcgcaattcatccgcagtcacaagctcggctgctgctcccgctaacggttgaggcgttgctggtgcacacaggaagggaagggaagggagagctgcacacagctttgctctggctcttggctcccctgtccagctgtcctgtccgtccatcatggaggaaacgcccagcccgcagctctagccgccgtcaatctcgtctcgtatcggagtcgaaggaagtaagaggcgggatggcatgaagcgacctaccaagaatgagaggctgggcaacccccggcacaagtaggaggaagaacccgagcaaccgagccacagggaggaggaggagatgggcaactgcggcacacgggaggagaatgccgtcgtcgctgcgcacgcgcaagcaactccacttgttacaacagccttccaagaacgccaatgcagataggaagcacacctgcatgtcatcagatataagtgacccttccacacctaggaaagttgaagatgccaagaacatttccatatacaacgatgtgattgccttcacattgtttgagctagagacaatcacaaagagcttccgtgttgattatgttcttggcgaaggaggatttgggaccgtttacaagggttacatagatgaaaatgtcagggttgggctgaagtcactgcctgttgcagtcaaggtgctcaacaaagatggacatcaagggcacagagaatggcttaccgaggttaactgcctggggcagttgaggcatccaaatttggtgaagttgatcggatattgctgcgaagatgaccatcggctgcttgtctacgagttcatgtttcgaggaagtctagaaaaccacttattccgaaagacagctacgccattgccctggggtactaggatgtcaatcgcgctgggagccgctaaagggctcgcttgcctccacaacgctcaaaggcccgtcatctacagagatttcaagacatcaaacattctgctggactccgattatactgccaaactgtctgactttggcctcgcaaaagatggccctgaaggtgatcagacgcatgtgtcgacacgggtgatgggaacctacggttatgctgcccctgaatatgtgatgaccggtcacttgactgctcggagtgacgtgtacagcttcggcgtggtcctgctggagctcctgacggggcgcaagtcgatcgacaagtcgcggcccagcagggagcagagcctggtggactgggcgctcccgaagctcaacgacaagaggaggctcctccagatcatcgacccgaggctggaggggcagtactcggccagagccgctcacaagtcctgcagcctcgcgttctactgcctgagccagaaccccaaggccaggccgctcatgagcgacgtcgtcgagaccctcgcgccgttgcagcagggcggcggcggcggcagcgacgcgtcctccggccttcctgactgcagaggccgccgcaggctgaccggcaacagcgtcgtccacttcagggccatccccaaccccaagtgcacgcctgttgtcccggcttgcagagtgcggtgatgttgctgcgcttcggttgaagctgctgggataggttcaggtgtgtactgtgaccatgggtggtggtgcgttttgatgatctgcatgctgctgctgctatgtaatgccctcagattttcgctggggtcttgtgtagagatggcaatgggtacccgaaacccgaaacccgatgggtttttaccc

SEQ ID NO: 45051 - DNA, 1873 bp, Zea Mays
ccaatatcgagtgtcttcttcttgaaggcagctgccgtgtagtgaaatgggagcactgcactttttaagggatccaccacccctctcccctaccgttccttttctccaccattgaaacactctctgaccctcactcgctccctgtcacacacactacactcgcaattcatccgcagtcacaagctcggctgctgctcccgctaacggttgaggcgttgctgctgcacacagctttgctctggctcttggctcccctgtccagctgtcctgtccgtccatcatggaggaaacgcccagcccgcagctctagccgccgtcaatctcgtctcgtatcggagtcgaaggaagtaagaggcgggatggcatgaagcgacctaccaagaatgagaggctgggcaacccccggcacaagtaggaggaagaacccgagcaaccgagccacagggaggaggaggagatgggcaactgcggcacacgggaggagaatgccgtcgtcgctgcgcacgcgcaagttcagcaactccacttgttacaacagccttccaagaacgccaatgcagataggaagcacacctgcatgtcatcagatataagtgacccttccacacctaggaaagttgaagatgccaagaacatttccatatacaacgatgtgattgccttcacattgtttgagctagagacaatcacaaagagcttccgtgttgattatgttcttggcgaaggaggatttgggaccgtttacaagggttacatagatgaaaatgtcagggttgggctgaagtcactgcctgttgcagtcaaggtgctcaacaaagatggacatcaagggcacagagaatggcttaccgaggttaactgcctggggcagttgaggcatccaaatttggtgaagttgatcggatattgctgcgaagatgaccatcggctgcttgtctacgagttcatgtttcgaggaagtctagaaaaccacttattccgaaagacagctacgccattgccctggggtactaggatgtcaatcgcgctgggagccgctaaagggctcgcttgcctccacaacgctcaaaggcccgtcatctacagagatttcaagacatcaaacattctgctggactccgattatactgccaaactgtctgactttggcctcgcaaaagatggccctgaaggtgatcagacgcatgtgtcgacacgggtgatgggaacctacggttatgctgcccctgaatatgtgatgaccggtcacttgactgctcggagtgacgtgtacagcttcggcgtggtcctgctggagctcctgacggggcgcaagtcgatcgacaagtcgcggcccagcagggagcagagcctggtggactgggcgctcccgaagctcaacgacaagaggaggctcctccagatcatcgacccgaggctggaggggcagtactcggccagagccgctcacaagtcctgcagcctcgcgttctactgcctgagccagaaccccaaggccaggccgctcatgagcgacgtcgtcgagaccctcgcgccgttgcagcagggcggcggcggcggcagcgacgcgtcctccggccttcctgactgcagaggccgccgcaggctgaccggcaacagcgtcgtccacttcagggccatccccaaccccaagtgcacgcctgttgtcccggcttgcagagtgcggtgatgttgctgcgcttcggttgaagctgctgggataggttcaggtgtgtactgtgaccatgggtggtggtgcgttttgatgatctgcatgctgctgctgctatgtaatgccctcagattttcgctggggtcttgtgtagagatggcaatgggtacccgaaacccgaaacccgatgggtttttaccc

SEQ ID NO: 45052 - DNA, 1277 bp, Zea Mays
accgttccttttctccaccattgaaacactctctgaccctcactcgctccctgtcacacacactacactcgcaattcatccgcagtcacaagctcggctgctgctcccgctaacggttgaggcgttgctggtgcacacaggaagggaagggaagggagagctgcacacagctttgctctggctcttggctcccctgtccagctgtcctgtccgtccatcatggaggaaacgcccagcccgcagctctagccgccgtcaatctcgtctcgtatcggagtcgaaggaagtaagaggcgggatggcatgaagcgacctaccaagaatgagaggctgggcaacccccggcacaagtaggaggaagaacccgagcaaccgagccacagggaggaggaggagatgggcaactgcggcacacgggaggagaatgccgtcgtcgctgcgcacgcgcaagccttccaagaacgccaatgcagataggaagcacacctgcatgtcatcagatataagtgacccttccacacctaggaaagttgaagatgccaagaacatttccatatacaacgatgtgattgccttcacattgtttgagctagagacaatcacaaagagcttccgtgttgattatgttcttggcgaaggaggatttgggaccgtttacaagggttacatagatgaaaatgtcagggttgggctgaagtcactgcctgttgcagtcaaggtgctcaacaaagatggacatcaagggcacagagaatggcttaccgaggttaactgcctggggcagttgaggcatccaaatttggtgaagttgatcggatattgctgcgaagatgaccatcggctgcttgtctacgagttcatgtttcgaggaagtctagaaaaccacttattccgaaagacagctacgccattgccctggggtactaggatgtcaatcgcgctgggagccgctaaagggctcgcttgcctccacaacgctcaaaggcccgtcatctacagagatttcaagacatcaaacattctgctggactccgattatactgccaaactgtctgactttggccatccccaaccccaagtgcacgcctgttgtcccggcttgcagagtgcggtgatgttgctgcgcttcggttgaagctgctgggataggttcaggtgtgtactgtgaccatgggtggtggtgcgttttgatgatctgcatgttggattaatgtgggcttggcccaaattaatattcaataatagtcaatgctaatggcccactttaatgctatggt

SEQ ID NO: 45053 - DNA, 1955 bp, Zea Mays
aacccaattatcacatgcgtgtgcggctgtgcgccgccgctacactcgccggcgacgagccttcgtttcggctcagagaaacagacagacatgcagagtccagaaatccaacagagaaacagggctccgacccactcgcgcgctggttcgctggcaccgcgcgtccctcgccacctccgcaccgccgccgcgctcgcggccgcggtgcagggcctcatcgacgcgtcccctgcgcggggcgagtcgcagaccatccacgcgcagctcctagcgtcgggactcgtcggcagtgccgacctctctgtcaagctcctcgttctgcacatacggtgcggctccctgcacaatgcccgcgccgtgttcgacggaatgccgagccggagccgcgccgcgcacaactacctcatcgcgggatacttccggcggggccgccccgcagaggcgctggggatcttgcggcggctcgcggcgtccacggggcggctggacgtcttcgcgctgtccatggcgctgaagctgtctgcggcgctggctctgcccggcgtcgtcgccagggaggcccacgcgcgcgcgctgaggtccgtcgaacagtccgacgatatcctgttcgcggccctggtggatgcctacgtgaagagcgggttgcttggctacgcgcggcgggtgcacggcgcaatgcccgtgcggagcgtcgtgtgctccacggcactgctcgtcgggtgcatgcaggaagggctgttcgaggacgctgaggcgatattcaacgagatggaggggaaggacgtcgtggcgtacaacgccatggtggaggggtacagcaagacggaagagacggcggagggctcgctcgaggtgttgaaggcgatgcagcgagcggggcttcgtcccacggtatcgacattcgtgagcgtgctcggggcctgctcactcttgtcgtcgccagagctcggcgagcaggtgcattgccaggggacgaaaagcggcctagtcttggacatcaaagttggaagcgctctggtcgacatgtatgccaagtgtggacgggtggaagacggccgtaggatcttcaaccagatggcagagagaaacgtgattacctggacttcgatgatcgacgggtatgggaagaacggcctctctgacgaggccctccagctgtttggcgaaatgcgggagcggcgagacgtgaggccgaaccatgccaccttcttgagcattctgtcggcgtgcgcacacgctgggctgctgtcccagggccaggaggctttccagagcatggagagtgagtacttgctgcagccacggatggaacactacgcatgcatggtggacttgctgggtagattcggaggcgtgcggcaggcctatgatttcgtccgaggtatgccggtgaggccaaactctgatgtgtgggctgcgctgctcggggcggctacactgcacggggatatggacatctgcaaagttgcatcgagggaggtcttcgagctgagccgcaaggggagaccgggcgcctacatggcattctccaacacacttgcggcagctggggagtgggacggcgtgcacgacgttagggagatgatgaaacagcgaggcgtgctgaaagacactgcttgcagttgggtcggttctgagaacccgccactcgtcgactgatgtacaggtgttatttagaatggtggacccatgctgtctaattgtttccttcctcgtagaggataatgcaaatatgctgatcgcaatggtggatgcagtgacaaattttatcttctgctgaccgagaaacattccatgttttgcatttggaatgaacaaatgtggaggtttggaagtgcaaaatatctgaacactagaaagcaaactgaatgcagtgatatattttctttccgtggattattttaatcatgaataaacgacatttttgtctcttctggaaaaattctcacatggca

SEQ ID NO: 45054 - DNA, 2291 bp, Zea Mays
atagatcctatgatcaaacaatatagttaacatttttttgtttcaaattctttttagtaataatacgtagtacatcgacctacactatacacctacgtggccggcggctcaacccaattatcacatgcgtgtgcggctgtgcgccgccgctacactcgccggcgacgagccttcgtttcggctcagagaaacagacagacatgcagagtccagaaatccaacagagaaacagggctccgacccactcgcgcgctggttcgctggcaccgcgcgtccctcgccacctccgcaccgccgccgcgctcgcggccgcggtgcagggcctcatcgacgcgtcccctgcgcggggcgagtcgcagaccatccacgcgcagctcctagcgtcgggactcgtcggcagtgccgacctctctgtcaagctcctcgttctgcacatacggtgcggctccctgcacaatgcccgcgccgtgttcgacggaatgccgagccggagccgcgccgcgcacaactacctcatcgcgggatacttccggcggggccgccccgcagaggcgctggggatcttgcggcggctcgcggcgtccacggggcggctggacgtcttcgcgctgtccatggcgctgaagctgtctgcggcgctggctctgcccggcgtcgtcgccagggaggcccacgcgcgcgcgctgaggtccgtcgaacagtccgacgatatcctgttcgcggccctggtggatgcctacgtgaagagcgggttgcttggctacgcgcggcgggtgcacggcgcaatgcccgtgcggagcgtcgtgtgctccacggcactgctcgtcgggtgcatgcaggaagggctgttcgaggacgctgaggcgatattcaacgagatggaggggaaggacgtcgtggcgtacaacgccatggtggaggggtacagcaagacggaagagacggcggagggctcgctcgaggtgttgaaggcgatgcagcgagcggggcttcgtcccacggtatcgacattcgtgagcgtgctcggggcctgctcactcttgtcgtcgccagagctcggcgagcaggtgcattgccaggggacgaaaagcggcctagtcttggacatcaaagttggaagcgctctggtcgacatgtatgccaagtgtggacgggtggaagacggccgtaggatcttcaaccagatggcagagagaaacgtgattacctggacttcgatgatcgacgggtatgggaagaacggcctctctgacgaggccctccagctgtttggcgaaatgcgggagcggcgagacgtgaggccgaaccatgccaccttcttgagcattctgtcggcgtgcgcacacgctgggctgctgtcccagggccaggaggctttccagagcatggagagtgagtacttgctgcagccacggatggaacactacgcatgcatggtggacttgctgggtagattcggaggcgtgcggcaggcctatgatttcgtccgaggtatgccggtgaggccaaactctgatgtgtgggctgcgctgctcggggcggctacactgcacggggatatggacatctgcaaagttgcatcgagggaggtcttcgagctgagccgcaaggggagaccgggcgcctacatggcattctccaacacacttgcggcagctggggagtgggacggcgtgcacgacgttagggagatgatgaaacagcgaggcgtgctgaaagacactgcttgcagttgggtcggttctgagaacccgccactcgtcgactgatgtacaggaacgtttacggttgataagagtgaacgcagacacaaggcaccagagagaaccagaacagttatgaagcatggacaagttgtcttgttctaattattggaatatatgtagttttccatttatcaaacgcttcaatcgagtggcgcaccgacaatcaaggccagtgagatgtcttttctggattacaaaagtcgataagcaggtcagcatatgtactaggcaacaaagtgttatttagaatggtggacccatgctgtctaattgtttccttcctcgtagaggataatgcaaatatgctgatcgcaatggtggatgcagtgacaaattttatcttctgctgaccgagaaacattccatgttttgcatttggaatgaacaaatgtggaggtttggaagtgcaaaatatctgaacactagaaagcaaactgaatgcagtgatatattttctttccgtggattattttaatcatgaataaacgacatttttgtctcttctggaaaaattctcacatggca

SEQ ID NO: 45055 - DNA, 1951 bp, Zea Mays
ggcagccagagaccgaacggtgtagaattccgctacgcatattcgccccctcttctctcgttttcttcttttgccccggaggcgcggacaggtaccagcaccaccagagcattccgtcccgcccccgcctccacctcgccgcgaccacacctcctctcctccccgccggctcctcctcctcgcatggcgacagcctctcgtccctagcccccccagatccagcggcacgcacctacacacgcgcaaggaaccgtagacgcgcccccgcgcctcccctctctcccgtcctccgccacccatggacgcggggaatggctgcagcgcgcgggcgctggcggcgtgcgtcgtcggcggcatcgtgctgggcgcgtcggtgctcgcgctccacctcgcgggcgggcccgccgccatcccgcccctgcccctgccgccgcccatcggcgcgcttctccgtcgccgccgccgccccgtgcgcgtctacatggacggctgcttcgacatgatgcactacggccactgcaacgcgctgcgccaggcgcgcgcgctcggggacgagctcgtcgtcggcgtcatcagcgacgacgagatcaaggccaacaagggaccccccgtcacgccgctccacgagagaatggtaatggtccgtgctgtgaaatgggtggatgatatcattccagatgcaccttatgccataactgaagaattcatgaacaagctattcaatgagtacaacatagactacattatccatggagacgatccttgtttgctacctgatggtactgatgcctatgctcttgccaaaaaggctggtcgatacaagcagattaagagaaccgagggagtgtcgacaacagacattgttggacggatgcttctttgtgttagagagagatcatctgatgcacataaccactcgtcactacaaaggcagttcagtagtggacatggtcagaaagttgatgatactggatctggaactggaacaagagtatctcattttcttcccacatctaggcgaatagttcaattctcaaatagcaagggtccaggtccagattctcggatagtttacatagatggtgcttttgatctgttccatgctggacatgtcgagttccttccatgtagatcttacgacttgctcgagaacttggagattttttgcttgtggggattcacacagatcagaccataagtgcaacacgaggacggcatcgcccaatcatgaatctccatgagcgaagtttgagtgttttggcttgtcgttatgttgatgaggtgatcattggtgctccatgggatgtttcaaaagacatgattaccacgttcaatatctctttagtcgttcatggaacaattgctgagaacatggacttcacagaggacgatttacacccatatgctgttccaatggctatgggcatctaccgccgactggagagccccctggatatcacaacaagtacaatcatcaggaggattgttgcgaaccatgaagcttaccagaagcggaatgagaagaaggaagccagcgagaagaagtactacgagggtaaaagctttgtgaacggggagtgaaggtcggagtagcagcagggactggcatggggattgctgcctcgttcaatttaggtctcccaggcttttagcagaggcaacagttggtcgatctacagttgtaccctttcttttttcttttttcatcttcttcagtaatctttgatgatcttgctgacatagcttaggaagcataggagcatttctcccccgtgtctgcagccaattttcctcactgtgttgtatatgcgccttccagctgttgtttccagctgctgagctgcatttgagatctataggcttttccacacacacacacagagacattttgaaattgtgcgctgcagtatgaagaagatcatgaatgttagcgtgattaactatttgctgc

SEQ ID NO: 45056 - DNA, 1141 bp, Zea Mays
aaagccacagatgataaggaatggcagctcagctacttgtcctgagaggaaaaggagatggctacttggactaactcactttaccctcgctagtttgtgacatggtgtaagattcacagtttgttccaagtaagaagacgccaaatcatatactagccatcatcagacgagagggagaaccagcgaggactgccaagaagatgctgaagagactgctgacgaagactaagagcaagaagaagaaggaggctgcctcctctgccataccgacgttggatcggctccatgagactctagagatgctggagaagaaggagcgtttcctccagaagaaatgttccgcggaaatagagaaggcgaaggattacacaaaagcgaagaacaagaacgccgcaatccagtgcctaaagaagaagaaactgtacgagacacagatcgagcagctatcgaatttccagctgcgagtccatgaccagatcataatgctcgaaagcgccaaggcgaccacggacactgtcgacgctctgcgctcggggtcatctgctgtcaaggcgatgcagcaatcagtcaacgtggacgacatcgagaaggcgatcgaggaggcgaacgagcagacggagagcatgcgggagatgcagcaggcacttgcgacgccgattggcgcttccgctgacttcgacgaggacgagctagaagcggagctggaagagctggaggaggaggaggaggaggagggggagatcgaggacgagctgcctgagccgccggcgaggcggtccgtggaaccatcggcgaaagcggcggcggcgtcttctagacagggcagtgatgtgagcgagctgaccaggcttcaggcagagatggccctctagctgtctagcagtgatgtgatgtgagcgagctcgtcgttgcgcctgtattgtacacacgtgttttgctgtaaattcatcttgttctagaagacaagacacggcatagatgagagaatctagtcggtgtccggcggacgatgccagccggcagaagcagtttgactttgacggtctcggattgcggtccattgttccaacagatacgatgcgatatcattattcttatactctatcatgtaaaatgcaagaattgccaagatgttctaaga

SEQ ID NO: 45057 - DNA, 957 bp, Zea Mays
ctcaggtcctgctccaccattgtcaccaccttgggggccagcctgcaggtgtgtgggggatggaatcaatgaccaatgtagtttattaatccccgtgcgatttgtcaccagctagccattcgattccgaatccctgtctgtctgacgatatggcattgcccttgccaggaccggcatcgcttagcgtttcttctaataatggttgcatcaaatcaaggacattgcagttcaggccttcatctcatgcttgagacgagatggttcaccgaaaaagtacaatggccaggcatgtaccactggcatatggcagccatttgagaaagattgcacttttgattagcctttctgagtttaggctccggatgatgatttatgtattaataaatgatggttagtggtagaagatgacagttactccattcagtcactcagtaatcatcgtcctgccacttggaactagaaaccttttgccatggaaagttggtcatgatgataggaactttcagctccatcctccaagtgatgatcagaacacctccactaaccaaatgcgagcgaaatactatcttttgtggttctgggatcaacaaaggccatggaggatactctctctaccagtacttcagtacagcatcgtctcaaaagcattgccaagattcaacctttttaagcctagaaagttggttggtcataatgacaagctttttgagctccaaaaacgcggtttttttactaggaaacctctgaagattatttttttagattagttgtactggatgtcgcattggctaaactaaagtgttagtagctgaaaagtggccatgattgcatcaagatttgacatggtagcaaggaagtcaggatcgagagatggtgtactccttcctacctttggatgagccagagcgtgttggagtcggagccagtgacgtcgtagagcgagtggtgcagccagtg

SEQ ID NO: 45058 - DNA, 3065 bp, Zea Mays
ttcattttcaccttcccttcctcccttcgcttccccttgagtgcagcaggacccccacctgataagagcggactgctccgctcttgtcctgccacccacgcacgccatggacgcctgggaggccaccaaggtggtgttcgaccgggtgcgggcgctggacccggagaacgcctccaagatgatgggcctgctgctcattcaggacaacagcgacaaggagctgatccgcctcgccttcggcccggagcacctgctccactccttcgtcgccaccgcgcgcgccgagctcgccgccaagcccgcgtccccgccgtcgcccgtgctcggcccgctgcagtccggcgcgccctggggcctcccgagccccggctctggagccggcggcggcggcggcggcgaccaccaccaccactcgcccttcgccgccgctgaccagctcgggtacgacggcggcgccgacgcgttctacgccgacgagtacgactgctggtcccccgcgggcgccgccggcgcccaccgccggagcttctcgctcagcgacgccgaggcggccgcttcgtggaggccctgcatgtactacgcgcgcgggtactgcaagaacggctcctcctgccgcttcctccacggcgtgcccgaagacgacgccgcggagcgggagatggccgtcatgcgcgccaaggccctggccgccgcgccgccgacgcagcagcagcagctcatggcgtccgcgtaccccttctcgccgtcgcccaagggaggcgtgagcctcagcttcctgctccagcagcagcagcagagcgagacccaaagggcggcggcgggcatgctgctcggcggcgaggacatgcacaggttcccggtgcgctccccgcggatggaccgcggcgacctcatcggcagccccgccgcgcggcagatctacctgacgttcccggccgactccaccttcagcgaggaggacgtgtccaactacttcagcatgtttgggccggtgcaggatgtgcgcatcccgtaccagcagaagcgcatgttcgggttcgtcaccttcgtgtacgccgagacggtgaaggccatcctgagcaagggcaacccgcacttcgtgtgcgacgcccgcgtgctcgtcaagccctacaaggagaagggcaaggtccccgacaggttcaggaagctgcagcacacgcaccatggcggagccgagttcgtcggttgtgcgtcgcccaccggattgctggattccagggacccgtacgatctccagcagcctcagatcggatcaaggatgatgtacgggaacatagctaaccagcacgaggcgttcctgaggaggaagctggaggaggagcaggcagccgagctgcagcaagccatagagctggaggggcgccgcttcatggggctgcagctcctcgatctcaagagcaggggccaccaccatctcggttcaggcgcgcccatgcctctgcggcaagccaccgatggcaaaggcagcggcatcaacgggaacggcaacgcgtcccatttggaggatgccatctgcatccaagataagaggatgatgagcagccttgcaatgagtgctcctgctgctgctgatgcggaaggcgagcacgaggagcagcaggaagagggcggtggtggctgtgatggcagcagcagcagcagccccaagcaggcagtcaaccctggggaagaggaggtggtggaatctggtcctgtgacagcgacgcccaacgctgcttgtggattccaagaaagctatggcgtggtggaggtggagctcgtcttgcctgacagccccttcgcgtcccccaccaaggaggaggcctcatacgctgacgctgtcactactgcagccgctcggaacggtagcatcagcagcagccctcgccatgtggcccttttcgcacccgcgtcttccaccaccctcgagctgcccccctacagctcctcctccttctttcaggtgcccaggttttctcgtgggcatgaagccattgggctgtgatgtgaggtgcacagagcaaaaaagggggagggggccctccattcctctaatctgggaggactaatggctatgattggccccatcaaccaggcgtagagaagctttgacaaagaaaaaagaaatacctttggagaggtgtaatcttcttcagagagtgggaggagggaggggacagtgaagacagcaacagaagaagaaacaagtctaggttgtttttttagctcttaggcctatgataagtatatgatagtaagtgtgagtgagtgagtagtaggcataaataatagtagtagtagttaattagtcgtttattagcagctcctatgctcgtttgtggcatggatggatctcactgttgtgatgatacaggtgattaaactaaaccgtagtagaatggtgtaagctctgccagttgtagttgcgaggctgcatacatcagacatggcatccaaaagaaagaaaatactcactcctagatgagtggacaaaaggcagacagacggacgtagcaggagggaaaagtgatgagcactgagcactcacgggtgcgactgcagcccagcgcagacaagagagaagggagagcaatagtagctgcaatgcaagtcgcctggcgtcgagcaaattggtgaaggttttgtgctcccagttcgctgaattttgggccagccaaagccgaatctgcaggtgctgggagtggagtggagtgaggttgatgtggctgctgggaacggagggagggagacctgacgggaaaagggggaacagcacgcgcacctttccgctagtacgtcctgtcttgtatgggatgcccgatgggacggggcggggcgggttgaagcatcgtgcatgcacgtctcttgggtttccctctccctctgcctcgtcatccgcactacttgttcttgtgggcgatggtaccagcagcgttcgttcggccggagttcaaaatttgaagtggaatccaatatttccctctgttcttgacacctgactacgggccacgagcaccacagggaaaggagcaggcctgcagtcacactggaacagaacaggcaca

SEQ ID NO: 45059 - DNA, 3242 bp, Zea Mays
ccaactccgccgcttttcattttcaccttcccttcctcccttcgcttccccttgagtgcagcaggacccccacctgataagagcggactgctccgctcttgtcctgccacccacgcacgccatggacgcctgggaggccaccaaggtggtgttcgaccgggtgcgggcgctggacccggagaacgcctccaagatgatgggcctgctgctcattcaggacaacagcgacaaggagctgatccgcctcgccttcggcccggagcacctgctccactccttcgtcgccaccgcgcgcgccgagctcgccgccaagcccgcgtccccgccgtcgcccgtgctcggcccgctgcagtccggcgcgccctggggcctcccgagccccggctctggagccggcggcggcggcggcggcgaccaccaccaccactcgcccttcgccgccgctgaccagctcgggtacgacggcggcgccgacgcgttctacgccgacgagtacgactgctggtcccccgcgggcgccgccggcgcccaccgccggagcttctcgctcagcgacgccgaggcggccgcttcgtggaggccctgcatgtactacgcgcgcgggtactgcaagaacggctcctcctgccgcttcctccacggcgtgcccgaagacgacgccgcggagcgggagatggccgtcatgcgcgccaaggccctggccgccgcgccgccgacgcagcagcagcagctcatggcgtccgcgtaccccttctcgccgtcgcccaagggaggcgtgagcctcagcttcctgctccagcagcagcagcagagcgagacccaaagggcggcggcgggcatgctgctcggcggcgaggacatgcacaggttcccggtgcgctccccgcggatggaccgcggcgacctcatcggcagccccgccgcgcggcagatctacctgacgttcccggccgactccaccttcagcgaggaggacgtgtccaactacttcagcatgtttgggccggtgcaggatgtgcgcatcccgtaccagcagaagcgcatgttcgggttcgtcaccttcgtgtacgccgagacggtgaaggccatcctgagcaagggcaacccgcacttcgtgtgcgacgcccgcgtgctcgtcaagccctacaaggagaagggcaaggtccccgacaggttcaggtccgttctcccttcttctccgttgcatattgcattgccattgcctgcctgcgcatgcatcgcattctcatcgttctctcttcagtcacattgcaatgcactgcacgttgcgttgcttgtttgtttcgatagcttccgttgccacctaaaaaaagcttcttttttcggttttatcgttttgtctggttgcaggaagctgcagcacacgcaccatggcggagccgagttcgtcggttgtgcgtcgcccaccggattgctggattccagggacccgtacgatctccagcagcctcagatcggatcaaggatgatgtacgggaacatagctaaccagcacgaggcgttcctgaggaggaagctggaggaggagcaggcagccgagctgcagcaagccatagagctggaggggcgccgcttcatggggctgcagctcctcgatctcaagagcaggggccaccaccatctcggttcaggcgcgcccatgcctctgcggcaagccaccgatggcaaaggcagcggcatcaacgggaacggcaacgcgtcccatttggaggatgccatctgcatccaagataagaggatgatgagcagccttgcaatgagtgctcctgctgctgctgatgcggaaggcgagcacgaggagcagcaggaagagggcggtggtggctgtgatggcagcagcagcagcagccccaagcaggcagtcaaccctggggaagaggaggtggtggaatctggtcctgtgacagcgacgcccaacgctgcttgtggattccaagaaagcagctatggcgtggtggaggtggagctcgtcttgcctgacagccccttcgcgtcccccaccaaggaggaggcctcatacgctgacgctgtcactactgcagccgctcggaacggtagcatcagcagcagccctcgccatgtggcccttttcgcacccgcgtcttccaccaccctcgagctgcccccctacagctcctcctccttctttcaggtgcccaggttttctcgtgggcatgaagccattgggctgtgatgtgaggtgcacagagcaaaaaagggggagggggccctccattcctctaatctgggagcgtagagaagctttgacaaagaaaaaagaaatacctttggagaggtgtaatcttcttcagagagtgggaggagggaggggacagtgaagacagcaacagaagaagaaacaagtctaggttgtttttttagctcttaggcctatgataagtatatgatagtaagtgtgagtgagtgagtagtaggcataaataatagtagtagtagttaattagtcgtttattagcagctcctatgctcgtttgtggcatggatggatctcactgttgtgatgatacaggtgattaaactaaaccgtagtagaatggtgtaagctctgccagttgtagttgcgaggctgcatacatcagacatggcatccaaaagaaagaaaatactcactcctagatgagtggacaaaaggcagacagacggacgtagcaggagggaaaagtgatgagcactgagcactcacgggtgcgactgcagcccagcgcagacaagagagaagggagagcaatagtagctgcaatgcaagtcgcctggcgtcgagcaaattggtgaaggttttgtgctcccagttcgctgaattttgggccagccaaagccgaatctgcaggtgctgggagtggagtggagtgaggttgatgtggctgctgggaacggagggagggagacctgacgggaaaagggggaacagcacgcgcacctttccgctagtacgtcctgtcttgtatgggatgcccgatgggacggggcggggcgggttgaagcatcgtgcatgcacgtctcttgggtttccctctccctctgcctcgtcatccgcactacttgttcttgtgggcgatggtaccagcagcgttcgttcggccggagttcaaaatttgaagtggaatccaatatttccctctgttcttgacacctgactacgggccacgagcaccacagggaaaggagcaggcctgcagtcacactggaacagaacaggcaca

SEQ ID NO: 45060 - DNA, 435 bp, Zea Mays
aaagtaatccggccgtctgcgactcgcaagccgccgccccccggcgcggcgctctctgtctatcgttctccttcctcctcttggctcctggtcgtactgcttcgaaccctgcagcaccgcaggccgctggagcatcttatcaagaagggacctggcagtggagcatcagattggagcatgttgtcgtcctcttgcccatggcagcgctactgttggaggtggacaatcgagctcccgggcatggcgtgggagcggccgcaaggtccggtcggcactcggcacacgcacacagaacagaagcaagttaaagctcggcggccgtcagccagcatgcagtacacggccaagacaggtccactttaagccagatccaactccaatctctagcaaggcagcaacagaaggactgatgaatagccaagatgtgtggcagag

SEQ ID NO: 45061 - DNA, 1549 bp, Zea Mays
gaagtaagcgtggaggttgcccacgtgtcccccggttcctccagaagtagccatacggattcagatcgcggccgcggcgactccccgagcagaagaacccgatcgaacgcggccgcggcggcgactccccgatctcagatccctgctgcgagcgaagagatggcggcggcatgggaggtgctggctgtgttgctcgtcgcggcgcaggtggcgtcagcggcgcaggtcacggcgccagcgttcctgtgggcgcccaaaaactacggattcagctctgatgatgctaaggaggtagtccattaccaaacaatctcaccaaagagcttagctaaatctgttctcgaggaaggtggctggtcaaacttcatgtgctcaagggaggatactcagaataatgttgatgttgccattgtttttattggctcaaagctgcaatcgtcagacatatctaaagataagcaagttgatccagctttagcagacacactgaagctctccttcacacgctcagagttttccatggcattcccctacgtttccacgacagtcgacgagagactagaggactcgttgctatccagctttgccgagaactgcaacaatggtttcggaagaaaccgcatcacctacacagacacgtgtaccggtcaagatctgaagaaataccacaacatggatgccatcaatgacctggtagtgtcaggggtagcgtcaaggagagccaaccacccaagtggacagaccgatgtaatcgtcttctgtagcggcgggttcgagaatccaggcactgcgaaatcagaaggagagctgctttcccagcttgtggactcgctggacttgtcgggagccaaatacacggtcctctatgcgtcccaaccgtctggtttgctggagagcccttccggcctgccgctgggtaggcatctcgcggagaagaagactaacggcacgaaagctgtccagggcgaaaaatgcgatggcgagtgcctcgtcaagtcgagtctcctcgaaggaactttcgttgggatagtgcttctcatcatcctgatatcaggactcatgtgcatgatgggcatcgatactccctcgaggtttgaagctccccaggagtcttgatctctcccttggactgcagaatccgcgggggggttgtgacgagggcacgcggcggcgttgaggggggccggtgttctgttggtgtgcactgtggatatatattgtttagcttcccatttggaagggagtacgccttgtgtattttttttaccgagccaactgtcactcacgatgtgctagaattttttggtgtaatatttgcgtttcgcgcctatggacaactaataagctgaggcattgcagcagataaattcatgtgctgcgtgaggcaggcttgtgttgtgtaccagacgcacagcattgttgcctccagctagtgctttctgtgtgaaataaacctgaaacccagtcccaggccaccgcaccaataaagatgggtactatgcatcaatcaattagaatgaggtcttgcttttgtttgatcagaatcaga

SEQ ID NO: 45062 - DNA, 1551 bp, Zea Mays
gaagtaagcgtggaggttgcccacgtgtcccccggttcctccagaagtagccatacggattcagatcgcggccgcggcgactccccgagcagaagaacccgatcgaacgcggccgcggcggcgactccccgatctcagatccctgctgcgagcgaagggttccattcgagcagagatggcggcggcatgggaggtgctggctgtgttgctcgtcgcggcgcaggtggcgtcagcggcgcaggtcacggcgccagcgttcctgtgggcgcccaaaaactacggctctgatgatgctaaggaggtagtccattaccaaacaatctcaccaaagagcttagctaaatctgttctcgaggaaggtggctggtcaaacttcatgggaggatactcagaataatgttgatgttgccattgtttttattggctcaaagctgcaatcgtcagacatatctaaagataagcaagttgatccagctttagcagacacactgaagctctccttcacacgctcagagttttccatggcattcccctacgtttccacgacagtcgacgagagactagaggactcgttgctatccagctttgccgagaactgcaacaatggtttcggaagaaaccgcatcacctacacagacacgtgtaccggtcaagatctgaagaaataccacaacatggatgccatcaatgacctggtagtgtcaggggtagcgtcaaggagagccaaccacccaagtggacagaccgatgtaatcgtcttctgtagcggcgggttcgagaatccaggcactgcgaaatcagaaggagagctgctttcccagcttgtggactcgctggacttgtcgggagccaaatacacggtcctctatgcgtcccaaccgtctggtttgctggagagcccttccggcctgccgctgggtaggcatctcgcggagaagaagactaacggcacgaaagctgtccagggcgaaaaatgcgatggcgagtgcctcgtcaagtcgagtctcctcgaaggaactttcgttgggatagtgcttctcatcatcctgatatcaggactcatgtgcatgatgggcatcgatactccctcgaggtttgaagctccccaggagtcttgatctctcccttggactgcagaatccgcgggggggttgtgacgagggcacgcggcggcgttgaggggggccggtgttctgttggtgtgcactgtggatatatattgtttagcttcccatttggaagggagtacgccttgtgtattttttttaccgagccaactgtcactcacgatgtgctagaattttttggtgtaatatttgcgtttcgcgcctatggacaactaataagctgaggcattgcagcagataaattcatgtgctgcgtgaggcaggcttgtgttgtgtaccagacgcacagcattgttgcctccagctagtgctttctgtgtgaaataaacctgaaacccagtcccaggccaccgcaccaataaagatgggtactatgcatcaatcaattagaatgaggtcttgcttttgtttgatcagaatcaga

SEQ ID NO: 45063 - DNA, 1400 bp, Zea Mays
agacagtttggttgtgagagagagggcgcgatggacgtcccggccgtggcggaccctggaacggagcgaggcgaaggcgcgctgatccagtgcccgtactgcgactcggaggcgatgcacaagctggcgcagatcctcctcccgggcctcgccgccgtctgcgtggacggcaccacgggggacccgttccgcagcccgtccgcggtggccgtggacctccgcaaggagatggtggactacatcacgcagcggagcgacagcttcatcgcggacgcgctgatcgagtcggaggcgaaccaggacgcgcccggggccgaggtgcccgacgaccccttcgagaccgtgtccgtcttcatggacgacttcgccagcaccaagcgcaacatcatcggccacgtctcagggtggctgctcaccgacagccgcgacgacaagatcgacgacttcgtgcaggagatggaggccaccaagttctggccgctggagcgccgggaggccgtcgccgagctcctgctcaagaacgtcgacctcaagaccaggttccactgccccgagaagtacgagaacgaggagcgcctcgaggaccacaaggcgcagtgcagcttccgccccgtcgcctgcgccaacgacggctgccgcgccaaggtctccgtccgctgcgtcaaggaccacgacgccgcctgcgtgtacaagctgctccagtgcgagcagggctgcgacaagcgcctgctcaggcgcgacatggaccgccactgcgtcaccgtctgccccatgaggcccatgaagtgccccttcggctgtgattcctcattccctgaccgtgacctcgagaggcactgcgccgagttccttcagccgcatctgctcatggtccttaaggccatccataagaaaggccggtcggaacaagacctcaaggaccttgctcaaaagctggaaaagtttgatggagatggtaaactggctaaggctctagatgcaagacctcttactaatgttgtcaaggacctcgaagccaagatgaaaggtggacagtcaagttaaaagggctgggtctttcatgcagacagacttcacagaatggataatggcattgtttagtcccacgcgcagcatacatacagagaagaatatgagttttgttttattcttatctcctttacgattttttttcacatttctccctgtctgtcagagttttgttttattcttatctcctttacgatttttttttcttcacatttctccctgtctgtcacaaacaaaccaattgtcagtcagtatgcatagtcgtccgctattgctctgtatcttcagcttttgtatgaggatattatatcatttgttttggtatataaatcaaagaacgggccatgtttccagcaggcttgttctgtacc

SEQ ID NO: 45064 - DNA, 3008 bp, Zea Mays
atgaaatttcacttgttgtgccgaaggagggaaccagtttgacagagagctacagatacttttctctaactaagcagtcaagaattgttccatccaaacgtccttttggaaaggcacgtgctatctatgttagcaacagtgatgacacaatatttggaagcacaatgcagaatgcgagacatctgcgtagtatcaccatggaatccatgtttgtggcaacaattcccaatgccatattccaggcgaaacatttgaaatatcttgagatttcgaggctaagatgtgaagtactcccggaagccatttcaaatttctggaccctacaagctcttcacctggcatccagtgatctccttgatttgcctgaaagctttggtaagctaactaggttaagaacattgaacctatccaagtctgagaagttcaagcgtttaccagactccatcggcgactgtcaaatgatgtcaaccattgatctttgcggttgtaacagtcttacagtgttgccagacactattggcagaattgaaaggctaagagttttgagattaagttacacaaagatcgagaggcttccatcaaacatcataacattgagaaatcttgagtgtttggatctctgcacgtgtcaagagctggtagagttgcccgaaggcattgggaatctagataggcttcaagtcttgaacctcaaaggttgtaaatcattgggaggcatgcctgtaggtgttgggcggctcagtcggctccaaaagctgggcttgtttgttgtaggtgacagtgaaaagtttgcaggaatctcagagcttgcaaatgtacctcggattagtgaggaactgagtattagaggtattccacatggtatggacccagacgatgcacagatggcatgcttgcaacaaaaaacaagcttacagagcttggacctagaatggatggcacataaggcatgtgaggtggacctggaatggatggcacatgaggcaggtgaggcgaacatggacttggaacggatggcacacgatgcaggtgaggtggacctggacctggaaaggatggcacttgaagcaggtgaggtggacttggactctgagtggatgccacttgaggcaggtgaggtggacactgagttggagcaggctgtacttgatggtctagagccaccgtcacagattaaagagttgaaaattaatgggtattctggaagccaacacgcatgctggatgcagaatcaagtgagtggcagaagaggaccacaagagcttgttcacttcccatttctgagggtggtgaagctatctgatttccctaacttgaagcatctagatgggcttgtggagctgccttgtttggaagaccttgagctgcgagcgatgccttgtctcgagagcatgagtggaggcccatttccttccttgtcgaggttagaactggacacgctgcctagtctaggagaggtgtggctggtagccgagacaacaatcctacctagtggtgaaggagcaggccacaacgtccatgacactggcacgcctggctctggacgacaggtccgtgttggtggtcgcttgtcatatctgtttatacaagactgtcccaggttgaggctcaggccgcacatgccttcgtcgttggagagcctgcacttgtccgagagcagcgagcaactgctgcaactgcctgcagaccaatgcctggggtcttcctcttcctactccaatttcagccacctgaagaagcttgggctatgggggatgacaggactaggatctggacgccggtgggagcttctgcaacacatgacggcgctcgagtcattggagatcaactcctctctggtgctaagagagctgccagaggggttgcggagcctcacgtgcctccagtcactaatcgtgttcgcgtgctcagatcttctcgtgctgcccgagtggataggggagcttgcgtccctgcagcagctgtgcatctggacctgcgatgtcttaagcagccttccccagtcactggggcagctcacatccctccagatgctctccatagaagcatgctacgagcttcaccggctgcctgaacgcataggggagctctgctctctacgcaagctcaggatcagggattgcccgaggctggcttgccttccgcaaatgtccggcctcacctcccttcaagaactcctgatcagcgactgcccaggcctcacatccttaccgcaggggatgatgagcggcctcgcttcccttgaaaagctgattgtcagtgactgcccggggatcaaattcttgcctcaagacataaaaggcctcaccactctgatggaattgcggatccgtaggtgccctgatctggagaggcgttgtgagacaggaaaaggggaggactggcacctcatctcccacatccctaatttgaggatttggtgatcagcagccagcctgccatggcatcatcatctgctgcatatacatcaatgttccagcttcaggcactcctggatggagtgcaatgcaaccttttcatcaagataaaatttgcttcatgtccagcgaatttgatggagatggtaaactggctaaggctctagatgcaagacctcttactaatgttgtcaaggacctcgaagccaagatgaaaggtggacagtcaagttaaaagggctgggtctttcatgcagacagacttcacagaatggataatggcattgtttagtcccacgcgcagcatacatacagagaagaatatgagttttgttttattcttatctcctttacgattttttttcacatttctccctgtctgtcagagttttgttttattcttatctcctttacgatttttttttcttcacatttctccctgtctgtcacaaacaaaccaattgtcagtcagtatgcatagtcgtccgctattgctctgtatcttcagcttttgtatgaggatattatatcatttgttttggtatataaatcaaagaacgggccatgtttccagcaggcttgttctgtacc

SEQ ID NO: 45065 - DNA, 3926 bp, Zea Mays
atgaaatttcacttgttgtgccgaaggagggaaccagtttgacagagagctacagatacttttctctaactaagcagtcaagaattgttccatccaaacgtccttttggaaaggcacgtgctatctatgttagcaacagtgatgacacaatatttggaagcacaatgcagaatgcgagacatctgcgtagtatcaccatggaatccatgtttgtggcaacaattcccaatgccatattccaggcgaaacatttgaaatatcttgagatttcgaggctaagatgtgaagtactcccggaagccatttcaaatttctggaccctacaagctcttcacctggcatccagtgatctccttgatttgcctgaaagctttggtaagctaactaggttaagaacattgaacctatccaagtctgagaagttcaagcgtttaccagactccatcggcgactgtcaaatgatgtcaaccattgatctttgcggttgtaacagtcttacagtgttgccagacactattggcagaattgaaaggctaagagttttgagattaagttacacaaagatcgagaggcttccatcaaacatcataacattgagaaatcttgagtgtttggatctctgcacgtgtcaagagctggtagagttgcccgaaggcattgggaatctagataggcttcaagtcttgaacctcaaaggttgtaaatcattgggaggcatgcctgtaggtgttgggcggctcagtcggctccaaaagctgggcttgtttgttgtaggtgacagtgaaaagtttgcaggaatctcagagcttgcaaatgtacctcggattagtgaggaactgagtattagaggtattccacatggtatggacccagacgatgcacagatggcatgcttgcaacaaaaaacaagcttacagagcttggacctagaatggatggcacataaggcatgtgaggtggacctggaatggatggcacatgaggcaggtgaggcgaacatggacttggaacggatggcacacgatgcaggtgaggtggacctggacctggaaaggatggcacttgaagcaggtgaggtggacttggactctgagtggatgccacttgaggcaggtgaggtggacactgagttggagcaggctgtacttgatggtctagagccaccgtcacagattaaagagttgaaaattaatgggtattctggaagccaacacgcatgctggatgcagaatcaagtgagtggcagaagaggaccacaagagcttgttcacttcccatttctgagggtggtgaagctatctgatttccctaacttgaagcatctagatgggcttgtggagctgccttgtttggaagaccttgagctgcgagcgatgccttgtctcgagagcatgagtggaggcccatttccttccttgtcgaggttagaactggacacgctgcctagtctaggagaggtgtggctggtagccgagacaacaatcctacctagtggtgaaggagcaggccacaacgtccatgacactggcacgcctggctctggacgacaggtccgtgttggtggtcgcttgtcatatctgtttatacaagactgtcccaggttgaggctcaggccgcacatgccttcgtcgttggagagcctgcacttgtccgagagcagcgagcaactgctgcaactgcctgcagaccaatgcctggggtcttcctcttcctactccaatttcagccacctgaagaagcttgggctatgggggatgacaggactaggatctggacgccggtgggagcttctgcaacacatgacggcgctcgagtcattggagatcaactcctctctggtgctaagagagctgccagaggggttgcggagcctcacgtgcctccagtcactaatcgtgttcgcgtgctcagatcttctcgtgctgcccgagtggataggggagcttgcgtccctgcagcagctgtgcatctggacctgcgatgtcttaagcagccttccccagtcactggggcagctcacatccctccagatgctctccatagaagcatgctacgagcttcaccggctgcctgaacgcataggggagctctgctctctacgcaagctcaggatcagggattgcccgaggctggcttgccttccgcaaatgtccggcctcacctcccttcaagaactcctgatcagcgactgcccaggcctcacatccttaccgcaggggatgatgagcggcctcgcttcccttgaaaagctgattgtcagtgactgcccggggatcaaattcttgcctcaagacataaaaggcctcaccactctgatggaattgcggatccgtaggtgccctgatctggagaggcgttgtgagacaggaaaaggggaggactggcacctcatctcccacatccctaatttgaggatttggtgatcagcagccagcctgccatggcatcatcatctgctgcatatacatcaatgttccagcttcaggcactcctggatggagtgcaatgcaaccttttcatcaagataaaatttgcttcatgtccagcgaaggcgcgatggacgtcccggccgtggcggaccctggaacggagcgaggcgaaggcgcgctgatccagtgcccgtactgcgactcggaggcgatgcacaagctggcgcagatcctcctcccgggcctcgccgccgtctgcgtggacggcaccacgggggacccgttccgcagcccgtccgcggtggccgtggacctccgcaaggagatggtggactacatcacgcagcggagcgacagcttcatcgcggacgcgctgatcgagtcggaggcgaaccaggacgcgcccggggccgaggtgcccgacgaccccttcgagaccgtgtccgtcttcatggacgacttcgccagcaccaagcgcaacatcatcggccacgtctcagggtggctgctcaccgacagccgcgacgacaagatcgacgacttcgtgcaggagatggaggccaccaagttctggccgctggagcgccgggaggccgtcgccgagctcctgctcaagaacgtcgacctcaagaccaggttccactgccccgagaagtacgagaacgaggagcgcctcgaggaccacaaggcgcagtgcagcttccgccccgtcgcctgcgccaacgacggctgccgcgccaaggtctccgtccgctgcgtcaaggaccacgacgccgcctgcgtgtacaagctgctccagtgcgagcagggctgcgacaagcgcctgctcaggcgcgacatggaccgccactgcgtcaccgtctgccccatgaggcccatgaagtgccccttcggctgtgattcctcattccctgaccgtgacctcgagaggcactgcgccgagttccttcagccgcatctgctcatggtccttaaggccatccataagaaaggccggtcggaacaagacctcaaggaccttgctcaaaagctggaaaagtttgatggagatggtaaactggctaaggctctagatgcaagacctcttactaatgttgtcaaggacctcgaagccaagatgaaaggtggacagtcaagttaaaagggctgggtctttcatgcagacagacttcacagaatggataatggcattgtttagtcccacgcgcagcatacatacagagaagaatatgagttttgttttattcttatctcctttacgattttttttcacatttctccctgtctgtcagagttttgttttattcttatctcctttacgatttttttttcttcacatttctccctgtctgtcacaaacaaaccaattgtcagtcagtatgcatagtcgtccgctattgctctgtatcttcagcttttgtatgaggatattatatcatttgttttggtatataaatcaaagaacgggccatgtttccagcaggcttgttctgtacc

SEQ ID NO: 45066 - DNA, 3897 bp, Zea Mays
atgaaatttcacttgttgtgccgaaggagggaaccagtttgacagagagctacagatacttttctctaactaagcagtcaagaattgttccatccaaacgtccttttggaaaggcacgtgctatctatgttagcaacagtgatgacacaatatttggaagcacaatgcagaatgcgagacatctgcgtagtatcaccatggaatccatgtttgtggcaacaattcccaatgccatattccaggcgaaacatttgaaatatcttgagatttcgaggctaagatgtgaagtactcccggaagccatttcaaatttctggaccctacaagctcttcacctggcatccagtgatctccttgatttgcctgaaagctttggtaagctaactaggttaagaacattgaacctatccaagtctgagaagttcaagcgtttaccagactccatcggcgactgtcaaatgatgtcaaccattgatctttgcggttgtaacagtcttacagtgttgccagacactattggcagaattgaaaggctaagagttttgagattaagttacacaaagatcgagaggcttccatcaaacatcataacattgagaaatcttgagtgtttggatctctgcacgtgtcaagagctggtagagttgcccgaaggcattgggaatctagataggcttcaagtcttgaacctcaaaggttgtaaatcattgggaggcatgcctgtaggtgttgggcggctcagtcggctccaaaagctgggcttgtttgttgtaggtgacagtgaaaagtttgcaggaatctcagagcttgcaaatgtacctcggattagtgaggaactgagtattagaggtattccacatggtatggacccagacgatgcacagatggcatgcttgcaacaaaaaacaagcttacagagcttggacctagaatggatggcacataaggcatgtgaggtggacctggaatggatggcacacgatgcaggtgaggtggacctggacctggaaaggatggcacttgaagcaggtgaggtggacttggactctgagtggatgccacttgaggcaggtgaggtggacactgagttggagcaggctgtacttgatggtctagagccaccgtcacagattaaagagttgaaaattaatgggtattctggaagccaacacgcatgctggatgcagaatcaagtgagtggcagaagaggaccacaagagcttgttcacttcccatttctgagggtggtgaagctatctgatttccctaacttgaagcatctagatgggcttgtggagctgccttgtttggaagaccttgagctgcgagcgatgccttgtctcgagagcatgagtggaggcccatttccttccttgtcgaggttagaactggacacgctgcctagtctaggagaggtgtggctggtagccgagacaacaatcctacctagtggtgaaggagcaggccacaacgtccatgacactggcacgcctggctctggacgacaggtccgtgttggtggtcgcttgtcatatctgtttatacaagactgtcccaggttgaggctcaggccgcacatgccttcgtcgttggagagcctgcacttgtccgagagcagcgagcaactgctgcaactgcctgcagaccaatgcctggggtcttcctcttcctactccaatttcagccacctgaagaagcttgggctatgggggatgacaggactaggatctggacgccggtgggagcttctgcaacacatgacggcgctcgagtcattggagatcaactcctctctggtgctaagagagctgccagaggggttgcggagcctcacgtgcctccagtcactaatcgtgttcgcgtgctcagatcttctcgtgctgcccgagtggataggggagcttgcgtccctgcagcagctgtgcatctggacctgcgatgtcttaagcagccttccccagtcactggggcagctcacatccctccagatgctctccatagaagcatgctacgagcttcaccggctgcctgaacgcataggggagctctgctctctacgcaagctcaggatcagggattgcccgaggctggcttgccttccgcaaatgtccggcctcacctcccttcaagaactcctgatcagcgactgcccaggcctcacatccttaccgcaggggatgatgagcggcctcgcttcccttgaaaagctgattgtcagtgactgcccggggatcaaattcttgcctcaagacataaaaggcctcaccactctgatggaattgcggatccgtaggtgccctgatctggagaggcgttgtgagacaggaaaaggggaggactggcacctcatctcccacatccctaatttgaggatttggtgatcagcagccagcctgccatggcatcatcatctgctgcatatacatcaatgttccagcttcaggcactcctggatggagtgcaatgcaaccttttcatcaagataaaatttgcttcatgtccagcgaattcctgaccacagggcgcgatggacgtcccggccgtggcggaccctggaacggagcgaggcgaaggcgcgctgatccagtgcccgtactgcgactcggaggcgatgcacaagctggcgcagatcctcctcccgggcctcgccgccgtctgcgtggacggcaccacgggggacccgttccgcagcccgtccgcggtggccgtggacctccgcaaggagatggtggactacatcacgcagcggagcgacagcttcatcgcggacgcgctgatcgagtcggaggcgaaccaggacgcgcccggggccgaggtgcccgacgaccccttcgagaccgtgtccgtcttcatggacgacttcgccagcaccaagcgcaacatcatcggccacgtctcagggtggctgctcaccgacagccgcgacgacaagatcgacgacttcgtgcaggagatggaggccaccaagttctggccgctggagcgccgggaggccgtcgccgagctcctgctcaagaacgtcgacctcaagaccaggttccactgccccgagaagtacgagaacgaggagcgcctcgaggaccacaaggcgcagtgcagcttccgccccgtcgcctgcgccaacgacggctgccgcgccaaggtctccgtccgctgcgtcaaggaccacgacgccgcctgcgtgtacaagctgctccagtgcgagcagggctgcgacaagcgcctgctcaggcgcgacatggaccgccactgcgtcaccgtctgccccatgaggcccatgaagtgccccttcggctgtgattcctcattccctgaccgtgacctcgagaggcactgcgccgagttccttcagccgcatctgctcatggtccttaaggccatccataagaaaggccggtcggaacaagacctcaaggaccttgctcaaaagctggaaaagtttgatggagatggtaaactggctaaggctctagatgcaagacctcttactaatgttgtcaaggacctcgaagccaagatgaaaggtggacagtcaagttaaaagggctgggtctttcatgcagacagacttcacagaatggataatggcattgtttagtcccacgcgcagcatacatacagagaagaatatgagttttgttttattcttatctcctttacgattttttttcacatttctccctgtctgtcagagttttgttttattcttatctcctttacgatttttttttcttcacatttctccctgtctgtcacaaacaaaccaattgtcagtcagtatgcatagtcgtccgctattgctctgtatcttcagcttttgtatgaggatattatatcatttgttttggtatataaatcaaagaacgggccatgtttccagcaggcttgttctgtacc

SEQ ID NO: 45067 - DNA, 2493 bp, Zea Mays
ctcagtgtttgtcttcgtttgcaacaggcaaaacatttctttggatctagaagtcatggctaactgttggcagcagcgagcggctaagccccgcgaccgcgagcgtgcaatggcgatggcggattgtcacgatgccggaagagcaagactcggcgcgagggaaagcccagttacatttaggaagggggatgacttgggtaaggtggtagcctcatccttgcattcaccaattcctgtaaactcccgaacttcgtgagaggagtgagctccggcagcggtggtggtgctcgtcatcaatccaaacagatcgatttcggttggaggagtgcgcgccacccgttcgacgaaagtcgtcatcggaagagcaacgtgcgcgcgtacgtcaacggctcaaaagcgcgtgagtcgccttcccattcgtttgtcaaagcccacagtttgtcaagagagagagagagagagagagagagagagagagagagagagagagagagagagagaagttgctgtccgcgagagacacgtttccagctcagcagtcagcatgctcgagcaaagaaaagattctcaagggtggggcggtgggcacaaacaccctctgcctgcctgcagcctgctcatatcatctcatctgacatctccatgtttatcccctctctccagttctccagctcacaagtttcctggcctcgcttgtatctttgagcgcctcaactctgcagcacatatatcctgtaataagctctgtcttgcatacactagctctagagtctttcaagatgagcaaacagatctgagctccagggacttgtggtacaggatctctctacagcctcttcggtgctcgaagcggtggaacttctggcacaagggacactttacagaaagatgactggtgtcgaagctgccgccatatctgctgtagcatctggaatattaaagattgtgggcaacaagttggcaccactggttataagaaagtatagctcaatcgtgggtgtggaaaaagatctccagaagctccaggtcctagttgaggatataaactcttggctagaaagcgcgggatatcaagcttttggtgatgatgcatcacttagttggttcaaacttcaaacagttgaaagatgttgcttatgctgttgacgatgttgtcgatgagtaccagctgaaggccgagagaaatgatgcttctggtgatggtgattttgtatccagatatatgcgtagaaaaccagaatcgttcatatttcagtgtaaggcagctaagaagatcaaggcaatcaagaagagatttgctgcaatcgtgaagcaaagagccgacatcaatataatagctactagtttaactggtagtggtcattctatttcccatatgaaaaagacagctgtggggctgccatcagtgcctaccatggatgcaacattaatactcggaagagaaatggagaagcaccagctaatatctaaattaactgaaaccaatgaccaacaaaaaaccatgatagtttccatcgttggacttggtggatctggcaaaactaccttggctaaacttgtttttaacgatggtaccactatagcaaagcattttaaagttagactatgggttcatgtgtcacaagagtttggttttgaaagtattgttgggaagctgtttgaagctattgcccatggcaagtctgaaagccataacttgcagcacatggtcagaagaatatcagacgagttgactgaaaaggtgttcttgcttgtactggatgatgtctggactaaggaccgaatggagttggaacaatttatggtacttgtgaggagcggtgcatctggaagcaggattttactaactactcgcaatagcgatgttgctgaagcggtggaatcttcatatctgatcaacctgccactcttgtctttgtctgacagctggcaactatttattcaaagctttggtacgacggtggaaggtttggacagagaattcctagatgttgggaatgccattgtaaacaaatgtggtggggtgccactagcaattaaagtaattgcaggtgtcctccatgacaagaaacggatacaagagtggcaggccattagagacagtaatctattcgatgctgagggcaaagagcgtagagtatctgcatgtttgaggttgagctatctgaacttgccctctcatctgaagcagtgcttcacgatttgttcactgtttcctaaaggtcacaagattgacaaggaacgtttgattgaccaatggattgctcacgacatgttcgctagtgcggatgctgttgattacttggagtacactggatatgagtgttttagttctcttgtgcaaatgtcttttttgtaggatgtggaagaaaattattatgggagagtgacatgcaagatgcacgatttggttcatgatctagcccactccatacttaaagatgaaatcttagtgacaaggttcccggaacgttgggaacgaggaacgggaac

SEQ ID NO: 45068 - DNA, 2756 bp, Zea Mays
cttcagttaacaagtcaaggtcgctaaaaagaaaaggaactgttgcagaaatctgccaccaaaagagaaacagaaaaaacaataccaccacaacagtgcagggtatgaaatagaatacaacagaacatcttgcagcttccactacagagttcggatgattttcggtggactcctggccgctaaaaataataagtaaatttcggcagttcgtactggccaatgaaaataaagcaaattccttgcactattgaaatatcgattcagaagaatgtctcagaaacgcaacctttggacaaagctttggcttgtccgtgtcttattttcttaacattatcacatcacagtcatgacagagttagtagcaacgtgacaacatcccactcttaagtaggagtactaaccagagtagcaccaatgcaaggaccaccccaacggctcagccagccaatccctgtgtggttgtgtaaggacaccacagccattgccttcaaaaaggactgactagtctatcacaaccaacttattgtcatgagaataccacgtataaccataggctttcttgcacaaaagattcagcagggggaacactgtcacttcgctttcaaaacctatccttgttcacttcttgttgtccatgtcgattttgctatacttttccatggtttctcattgtccctaactaaaatcgttgggtaaagcggcagctgcacttgaacttgggatgcgggcagagcacttgctgtaatcctcaaggaacagtctgtcgcgacgacgcgagaggaagagattccgacaacgaaggaattgggaagacttggtgtgatcttcaggctagagcaccccacaggcttccacaatctgtacacgacatcgacacccagattgaagtcagtacagcatgaaattgcatgcatagatatgcacagtggaattagagaacacatgtaatccatacctttcttgtgtagtcgtcataccactttggcccctacagttaatttgtgtctgcatccaactaactagttggcattctcttacattgtgccccaacgatgcatcagaggattttggttgctcgttgaggggaaatcctcgttggaatggaagtgtgatcataggttcaattccaataggtgctcctagttcggttgcttctttaactaaatccatgctaacattgagtcaagatgacaccgatagtgcatcttcctgctcgctgaaattctttgatcttctctgatttggtctctcggttggtgctgctaccatattctgtgacagttgatcttgagaattggtattcagttcaaggtcaagcagtgggctgaatgactcgctcatcagatttgaaaaataaccattgccttccacagtctctgcccatgcaagagatattaccaatcgatgtactgcgcaagagatgttttgcaaataagatgacaggcaccaggatgttcattttctaatttgttcatgatcgtggagaataaggtgacagacagttcatgatgaccttacaatacaaatgcaatattctgttctatctacatatgtctctccacatgagcatttgtgtacagacaagtgcttttttttgtatataagcagcctaggtcagaaatagagtacaaatggaaccaacaatggactaaaaggataaatggaagtacagttcaaggtaaaccatgaataaccagatcttctctactggttctcttctaaagatctagtgtcaaaagataaagagcatgctccaactcaactctcaaggaaaacttagtattccaaaaaaaaaatcataaagcattgctttcaaggtactcttagcatggcaggttcagaacacatatataaacataacatgtgaagtataattgtcaattgaaaacatacaggtatgatcaaaattatcttgctatttgagcaaagatgtacattatactgattttgttgattgaaattttcatctcacatgaaaatcacaattaacttgatgtcatcaaaagcaattggttttattttctcaaagttcatcacagtaagcaatctaataaattattgtttctatttctaaagaaaactaaatggcaattccgaggtcaagtctccaaatttgttcagacactgatattatgtcactgaaatgtggctcagagttatatagcagggcaaaaagaactttgcccaagccagcaagtttctcagatgggcaatcatgtgttagtaaaacaatttctaaacggataaatgagagtcaacctattgcagtaagcaatccttcttgtatgcgtgtttctggcccccgtaaggggtcttttgtatcgggccttctttagaccctggttacttttcttcttaatacaatgagacgcaattctcctgcacgttttcgagaaaaaaaatatactgattgaaggatgctctgcgaagtggagagcaaaaaaaatgttggatagcacaatactacataatgaataaaaactggtaagacctgcattcacactatgcaatccagaaagccagaaaggagtagcaattctcaaacaaattggttactctttggcaatatgtggtatcccctaccttaaatcacttggcaggaaaaaaaacaagtttcccactatgcagcaaaacatattctctcatatcctcaacatccatgcatctttaattcacaactttttgaaggaagatcttgccactttctggatgtttttcacctccagctgcaaactcatgaaaaggctcattcagtt

SEQ ID NO: 45069 - DNA, 3581 bp, Zea Mays
agtccactccaccaccgttcatgcatgaccatggagagatctcaaccgcagcaccagcagtctcctccgtcgccgtcgtcctcctcgtcctgcgtctccgcggacaccgtcctcgtccctccgggaaagaggcggcggagggcggcgacagccaaggccaataagagggcccgcaaggacccctctgatcctcctcccgccgccgggaagaggagctccgtatacagaggagtcaccaggcacaggtggacgggcaggttcgaggcgcatctctgggacaagcactgcctcgccgcgctccacaacaagaagaaaggcaggcaaggtgtgtgtgtatgcactgtgagctgctgttcctttctgactgtcatccagaatccatccccacactttttttatcgtaattacctttgaagcaacatggttttttctttctttcaaaagtgcaccgaaattcttaaggctgacattctgatcaggctttgtatatctctctcttcttcttcttttttatcttctgccgccatctctgtgggggtccccttgcgtcgcgacggtgatctggcgatctattgctgctggctgcatcgtccatcaacagtctatctgggggcgtacgacggcgaggaggcagcggctcgtgcctatgaccttgcagctctcaagtactggggtcctgaggctctgctcaacttccctgtggaggattactccagcgagatgccggagatggaggcagcgtcccgggaggagtacctggcctccctccgccgcaggagcagcggcttctccaggggggtctccaagtacagaggcgtcgccaggtggttactgctcattaatctactcattatactaaaaccttgatttgaacacctacgcctcgatctgatcacctaatgttagtttaaaccctctcactagtcactagaatttacttacaagtaggatctgtcattcatgtagaattgtactagtactactgtgctagctctgactcggaccaatgctctctagttgggtgattgtgaaatgggggtccaggcttcacactgactcggaccaatgttctctagttgggtgacacggtgcaagatgaggcccacctgtaacgtcagatcaggcatgcatcacctgggcctgtgacacgtcacacacgccacgccagccattgtgctgtgcatgactcatcaccaggcactgtgcttgtgcacctagaaaatgccagctctgaactgcaagcaccacagactactttgaaaccagtgcatgattttcagctcatttcggtctgaaaccagctaaaaaggacgaaacttttgatgttcttgttgcttccatggtctaggcatcaccacaacgggagatgggaggcacggatcgggcgagttttagggaacaagtacctctacttgggaacattcggtatggatggacaagcgtaccagatccctcaatatgatatctattacgaactactagtttcgtgctctttgcgcttctttgaacgagtcagtttatgccggcatttaagcgcaactcttgtttgttgtggagctgtcctacttactgcaagggccacctaactttaaccggttttttatggaggttgatcaacctaactcctatacagtacacgattgaatggctcatgtttcttagtttcccttcaatgcagggctggcaattcccttgctatattgtccctgttcagacttggtgatcctaactgcagtgtttctttttttttaagaaaaaaagaaaacggatctgaccatccatcaaatcatatcatgccacaggagcataattacactttccctgcccaaaaatattgtccctttcttgactgccaagatcaagatcttgagaccatgatactactgtcctgtgagagcagtccccagacagactgatcctcaaacagaacaacttgccccaaaaaatattggcataaaactgtcaaactgttggctaattaccagccgaaactacatgaccctccaagctcatgtgataagcacgtggtgatgggagtagtcaccactcactcacctgccagccgctgctagtggcagtaataataagatggtgcctagggatcttcagctcctcagcactgccgacctttttcttttctttgtttctttttcacttgtctgcgttgctcagctgcaacatatattaggcggccacctattaacctgcttatggattatcataatctaggtatctaaattatataatccacctaatagtctgtgttgtttgttacctctcaacttaacttatttaagctggattatataatctagaagataaacaaacggctttctagaggcactgctgtgctctgagaacagtggctcttgaacagattttttgcattgtggagtatctcaagatattagccaagcagcatgtctaaacttccatttttatccgctcattcagacaagagttctgtttctgcagacactcaagaagaggcagccaaggcctatgatcttgcggccatcgaataccgaggtgccaatgctgtaaccaacttcgacatcagctgctacctggaccacccactgttcctggcgcagctccagcaggagcagccacaggtggtgccagcgctcgaccaagaacctcaggctgatcagagagaacctgaaaccacagcccaagagcctgtgtcaagccaagccaagacaccggcggatgacaatgcagagcctgatgacatcgcggagcccctcatcacggtcgacaacagcgtcgaggagagcttatggagtccttgcatggattatgagctagacaccatgtcgagatctaactttggcagctcgatcaacctgagcgagtggttcactgacgcagacttcgacagcgacttgggatgcctgttcgacgggcgctctgcagttgatggaggaagcaagggtggcgtaggtgtggcggatttcagtttgtttgaagcaggtgatggtcagctgaaggatgttctttcggatatggaagaggggatacaacctccaacgataatcagtgtgtgcaattgattctgagacctatgcgtggcgtgcgacaagtgtcctgtctttgggtatacttggtttgtccaatgccacggtgccactgctgcgagtcagctgaacttcttgtagaaagcacatggcagcttggcattagacaagtgtgttggtgttccttaattctttggatatgctttaggcattgactaaccttaagggttcgtcactgtctcgcttagcttagattagactaatcacatccttgaatctgaagtagttgtgcagtatcacagtttcacatggcaattctgccaatgcagcatagatttgttcgtttgaacagctgtaactgtaaccctatagctccagattaaggaacagtttgtttttcatccatacatataacacgctttcagaagcagacaatttactctgagacacttagaaataatttgtcacgtattgtccagggaataaaaatgtctggaagtcgtagtttttcttttcaagatatcatatcatatattatgatctgtagctttaagctgcgac

SEQ ID NO: 45070 - DNA, 2007 bp, Zea Mays
agtccactccaccaccgttcatgcatgaccatggagagatctcaaccgcagcaccagcagtctcctccgtcgccgtcgtcctcctcgtcctgcgtctccgcggacaccgtcctcgtccctccgggaaagaggcggcggagggcggcgacagccaaggccaataagagggcccgcaaggacccctctgatcctcctcccgccgccgggaagaggagctccgtatacagaggagtcaccaggcacaggtggacgggcaggttcgaggcgcatctctgggacaagcactgcctcgccgcgctccacaacaagaagaaaggcaggcaaggtgtgtgtgtatgcactgtgagctgctgttcctttctgactgtcatccagaatccatccccacactttttttatcgtaattacctttgaagcaacatggttttttctttctttcaaaagtgcaccgaaattcttaaggctgacattctgatcaggctttgtatatctctctcttcttcttcttttttatcttctgccgccatctctgtgggggtccccttgcgtcgcgacggtgatctggcgatctattgctgctggctgcatcgtccatcaacagtctatctgggggcgtacgacggcgaggaggcagcggctcgtgcctatgaccttgcagctctcaagtactggggtcctgaggctctgctcaacttccctgtggaggattactccagcgagatgccggagatggaggcagcgtcccgggaggagtacctggcctccctccgccgcaggagcagcggcttctccaggggggtctccaagtacagaggcgtcgccaggcatcaccacaacgggagatgggaggcacggatcgggcgagttttagggaacaagtacctctacttgggaacattcgacactcaagaagaggcagccaaggcctatgatcttgcggccatcgaataccgaggtgccaatgctgtaaccaacttcgacatcagctgctacctggaccacccactgttcctggcgcagctccagcaggagcagccacaggtggtgccagcgctcgaccaagaacctcaggctgatcagagagaacctgaaaccacagcccaagagcctgtgtcaagccaagccaagacaccggcggatgacaatgcagagcctgatgacatcgcggagcccctcatcacggtcgacaacagcgtcgaggagagcttatggagtccttgcatggattatgagctagacaccatgtcgagatctaactttggcagctcgatcaacctgagcgagtggttcactgacgcagacttcgacagcgacttgggatgcctgttcgacgggcgctctgcagttgatggaggaagcaagggtggcgtaggtgtggcggatttcagtttgtttgaagcaggtgatggtcagctgaaggatgttctttcggatatggaagaggggatacaacctccaacgataatcagtgtgtgcaattgattctgagacctatgcgtggcgtgcgacaagtgtcctgtctttgggtatacttggtttgtccaatgccacggtgccactgctgcgagtcagctgaacttcttgtagaaagcacatggcagcttggcattagacaagtgtgttggtgttccttaattctttggatatgctttaggcattgactaaccttaagggttcgtcactgtctcgcttagcttagattagactaatcacatccttgaatctgaagtagttgtgcagtatcacagtttcacatggcaattctgccaatgcagcatagatttgttcgtttgaacagctgtaactgtaaccctatagctccagattaaggaacagtttgtttttcatccatacatataacacgctttcagaagcagacaatttactctgagacacttagaaataatttgtcacgtattgtccagggaataaaaatgtctggaagtcgtagtttttcttttcaagatatcatatcatatattatgatctgtagctttaagctgcgac

SEQ ID NO: 45071 - DNA, 2241 bp, Zea Mays
agtccactccaccaccgttcatgcatgaccatggagagatctcaaccgcagcaccagcagtctcctccgtcgccgtcgtcctcctcgtcctgcgtctccgcggacaccgtcctcgtccctccgggaaagaggcggcggagggcggcgacagccaaggccaataagagggcccgcaaggacccctctgatcctcctcccgccgccgggaagaggagctccgtatacagaggagtcaccaggcacaggtggacgggcaggttcgaggcgcatctctgggacaagcactgcctcgccgcgctccacaacaagaagaaaggcaggggcgtacgacggcgaggaggcagcggctcgtgcctatgaccttgcagctctcaagtactggggtcctgaggctctgctcaacttccctgtggaggattactccagcgagatgccggagatggaggcagcgtcccgggaggagtacctggcctccctccgccgcaggagcagcggcttctccaggggggtctccaagtacagaggcgtcgccaggtggttactgctcattaatctactcattatactaaaaccttgatttgaacacctacgcctcgatctgatcacctaatgttagtttaaaccctctcactagtcactagaatttacttacaagtaggatctgtcattcatgtagaattgtactagtactactgtgctagctctgactcggaccaatgctctctagttgggtgattgtgaaatgggggtccaggcttcacactgactcggaccaatgttctctagttgggtgacacggtgcaagatgaggcccacctgtaacgtcagatcaggcatgcatcacctgggcctgtgacacgtcacacacgccacgccagccattgtgctgtgcatgactcatcaccaggcactgtgcttgtgcacctagaaaatgccagctctgaactgcaagcaccacagactactttgaaaccagtgcatgattttcagctcatttcggtctgaaaccagctaaaaaggacgaaacttttgatgttcttgttgcttccatggtctaggcatcaccacaacgggagatgggaggcacggatcgggcgagttttagggaacaagtacctctacttgggaacattcgacactcaagaagaggcagccaaggcctatgatcttgcggccatcgaataccgaggtgccaatgctgtaaccaacttcgacatcagctgctacctggaccacccactgttcctggcgcagctccagcaggagcagccacaggtggtgccagcgctcgaccaagaacctcaggctgatcagagagaacctgaaaccacagcccaagagcctgtgtcaagccaagccaagacaccggcggatgacaatgcagagcctgatgacatcgcggagcccctcatcacggtcgacaacagcgtcgaggagagcttatggagtccttgcatggattatgagctagacaccatgtcgagatctaactttggcagctcgatcaacctgagcgagtggttcactgacgcagacttcgacagcgacttgggatgcctgttcgacgggcgctctgcagttgatggaggaagcaagggtggcgtaggtgtggcggatttcagtttgtttgaagcaggtgatggtcagctgaaggatgttctttcggatatggaagaggggatacaacctccaacgataatcagtgtgtgcaattgattctgagacctatgcgtggcgtgcgacaagtgtcctgtctttgggtatacttggtttgtccaatgccacggtgccactgctgcgagtcagctgaacttcttgtagaaagcacatggcagcttggcattagacaagtgtgttggtgttccttaattctttggatatgctttaggcattgactaaccttaagggttcgtcactgtctcgcttagcttagattagactaatcacatccttgaatctgaagtagttgtgcagtatcacagtttcacatggcaattctgccaatgcagcatagatttgttcgtttgaacagctgtaactgtaaccctatagctccagattaaggaacagtttgtttttcatccatacatataacacgctttcagaagcagacaatttactctgagacacttagaaataatttgtcacgtattgtccagggaataaaaatgtctggaagtcgtagtttttcttttcaagatatcatatcatatattatgatctgtagctttaagctgcgac

SEQ ID NO: 45072 - DNA, 1654 bp, Zea Mays
agtccactccaccaccgttcatgcatgaccatggagagatctcaaccgcagcaccagcagtctcctccgtcgccgtcgtcctcctcgtcctgcgtctccgcggacaccgtcctcgtccctccgggaaagaggcggcggagggcggcgacagccaaggccaataagagggcccgcaaggacccctctgatcctcctcccgccgccgggaagaggagctccgtatacagaggagtcaccaggcacaggtggacgggcaggttcgaggcgcatctctgggacaagcactgcctcgccgcgctccacaacaagaagaaaggcaggcaagtctatctgggggcgtacgacggcgaggaggcagcggctcgtgcctatgaccttgcagctctcaagtactggggtcctgaggctctgctcaacttccctgtggaggattactccagcgagatgccggagatggaggcagcgtcccgggaggagtacctggcctccctccgccgcaggagcagcggcttctccaggggggtctccaagtacagaggcgtcgccagacactcaagaagaggcagccaaggcctatgatcttgcggccatcgaataccgaggtgccaatgctgtaaccaacttcgacatcagctgctacctggaccacccactgttcctggcgcagctccagcaggagcagccacaggtggtgccagcgctcgaccaagaacctcaggctgatcagagagaacctgaaaccacagcccaagagcctgtgtcaagccaagccaagacaccggcggatgacaatgcagagcctgatgacatcgcggagcccctcatcacggtcgacaacagcgtcgaggagagcttatggagtccttgcatggattatgagctagacaccatgtcgagatctaactttggcagctcgatcaacctgagcgagtggttcactgacgcagacttcgacagcgacttgggatgcctgttcgacgggcgctctgcagttgatggaggaagcaagggtggcgtaggtgtggcggatttcagtttgtttgaagcaggtgatggtcagctgaaggatgttctttcggatatggaagaggggatacaacctccaacgataatcagtgtgtgcaattgattctgagacctatgcgtggcgtgcgacaagtgtcctgtctttgggtatacttggtttgtccaatgccacggtgccactgctgcgagtcagctgaacttcttgtagaaagcacatggcagcttggcattagacaagtgtgttggtgttccttaattctttggatatgctttaggcattgactaaccttaagggttcgtcactgtctcgcttagcttagattagactaatcacatccttgaatctgaagtagttgtgcagtatcacagtttcacatggcaattctgccaatgcagcatagatttgttcgtttgaacagctgtaactgtaaccctatagctccagattaaggaacagtttgtttttcatccatacatataacacgctttcagaagcagacaatttactctgagacacttagaaataatttgtcacgtattgtccagggaataaaaatgtctggaagtcgtagtttttcttttcaagatatcatatcatatattatgatctgtagctttaagctgcgac

SEQ ID NO: 45073 - DNA, 3332 bp, Zea Mays
accccctcctccctcccctgcaccgccagtccactccaccaccgttcatgcatgaccatggagagatctcaaccgcagcaccagcagtctcctccgtcgccgtcgtcctcctcgtcctgcgtctccgcggacaccgtcctcgtccctccgggaaagaggcggcggagggcggcgacagccaaggccaataagagggcccgcaaggacccctctgatcctcctcccgccgccgggaagaggagctccgtatacagaggagtcaccaggcacaggtggacgggcaggttcgaggcgcatctctgggacaagcactgcctcgccgcgctccacaacaagaagaaaggcaggcaagtctatctgggggcgtacgacggcgaggaggcagcggctcgtgcctatgaccttgcagctctcaagtactggggtcctgaggctctgctcaacttccctgtggaggattactccagcgagatgccggagatggaggcagcgtcccgggaggagtacctggcctccctccgccgcaggagcagcggcttctccaggggggtctccaagtacagaggcgtcgccaggtggttactgctcattaatctactcattatactaaaaccttgatttgaacacctacgcctcgatctgatcacctaatgttagtttaaaccctctcactagtcactagaatttacttacaagtaggatctgtcattcatgtagaattgtactagtactactgtgctagctctgactcggaccaatgctctctagttgggtgattgtgaaatgggggtccaggcttcacactgactcggaccaatgttctctagttgggtgacacggtgcaagatgaggcccacctgtaacgtcagatcaggcatgcatcacctgggcctgtgacacgtcacacacgccacgccagccattgtgctgtgcatgactcatcaccaggcactgtgcttgtgcacctagaaaatgccagctctgaactgcaagcaccacagactactttgaaaccagtgcatgattttcagctcatttcggtctgaaaccagctaaaaaggacgaaacttttgatgttcttgttgcttccatggtctaggcatcaccacaacgggagatgggaggcacggatcgggcgagttttagggaacaagtacctctacttgggaacattcggtatggatggacaagcgtaccagatccctcaatatgatatctattacgaactactagtttcgtgctctttgcgcttctttgaacgagtcagtttatgccggcatttaagcgcaactcttgtttgttgtggagctgtcctacttactgcaagggccacctaactttaaccggttttttatggaggttgatcaacctaactcctatacagtacacgattgaatggctcatgtttcttagtttcccttcaatgcagggctggcaattcccttgctatattgtccctgttcagacttggtgatcctaactgcagtgtttctttttttttaagaaaaaaagaaaacggatctgaccatccatcaaatcatatcatgccacaggagcataattacactttccctgcccaaaaatattgtccctttcttgactgccaagatcaagatcttgagaccatgatactactgtcctgtgagagcagtccccagacagactgatcctcaaacagaacaacttgccccaaaaaatattggcataaaactgtcaaactgttggctaattaccagccgaaactacatgaccctccaagctcatgtgataagcacgtggtgatgggagtagtcaccactcactcacctgccagccgctgctagtggcagtaataataagatggtgcctagggatcttcagctcctcagcactgccgacctttttcttttctttgtttctttttcacttgtctgcgttgctcagctgcaacatatattaggcggccacctattaacctgcttatggattatcataatctaggtatctaaattatataatccacctaatagtctgtgttgtttgttacctctcaacttaacttatttaagctggattatataatctagaagataaacaaacggctttctagaggcactgctgtgctctgagaacagtggctcttgaacagattttttgcattgtggagtatctcaagatattagccaagcagcatgtctaaacttccatttttatccgctcattcagacaagagttctgtttctgcagacactcaagaagaggcagccaaggcctatgatcttgcggccatcgaataccgaggtgccaatgctgtaaccaacttcgacatcagctgctacctggaccacccactgttcctggcgcagctccagcaggagcagccacaggtggtgccagcgctcgaccaagaacctcaggctgatcagagagaacctgaaaccacagcccaagagcctgtgtcaagccaagccaagacaccggcggatgacaatgcagagcctgatgacatcgcggagcccctcatcacggtcgacaacagcgtcgaggagagcttatggagtccttgcatggattatgagctagacaccatgtcgagatctaactttggcagctcgatcaacctgagcgagtggttcactgacgcagacttcgacagcgacttgggatgcctgttcgacgggcgctctgcagttgatggaggaagcaagggtggcgtaggtgtggcggatttcagtttgtttgaagcaggtgatggtcagctgaaggatgttctttcggatatggaagaggggatacaacctccaacgataatcagtgtgtgcaattgattctgagacctatgcgtggcgtgcgacaagtgtcctgtctttgggtatacttggtttgtccaatgccacggtgccactgctgcgagtcagctgaacttcttgtagaaagcacatggcagcttggcattagacaagtgtgttggtgttccttaattctttggatatgctttaggcattgactaaccttaagggttcgtcactgtctcgcttagcttagattagactaatcacatccttgaatctgaagtagttgtgcagtatcacagtttcacatggcaattctgccaatgcagcatagatttgttcgtttgaacagctgtaactgtaaccctatagctccagattaaggaacagtttgtttttcatccatacatataacacgctttcagaagcagacaatttactctgagacacttagaaataatttgtcacgtattgtccagggaataaaaatgtctggaagtcgtagtttttcttttcaagatatcatatcatatattatgatctgtagctttaagctgcgac

SEQ ID NO: 45074 - DNA, 3402 bp, Zea Mays
ggaagcagcaccgcacgcgccacgcaacagcaatgcagttggcagagcgcggggagcaaaaaccccaccgccagccactataaaaccccctcctccctcccctgcaccgccagtccactccaccaccgttcatgcatgaccatggagagatctcaaccgcagcaccagcagtctcctccgtcgccgtcgtcctcctcgtcctgcgtctccgcggacaccgtcctcgtccctccgggaaagaggcggcggagggcggcgacagccaaggccaataagagggcccgcaaggacccctctgatcctcctcccgccgccgggaagaggagctccgtatacagaggagtcaccaggcacaggtggacgggcaggttcgaggcgcatctctgggacaagcactgcctcgccgcgctccacaacaagaagaaaggcaggggcgtacgacggcgaggaggcagcggctcgtgcctatgaccttgcagctctcaagtactggggtcctgaggctctgctcaacttccctgtggaggattactccagcgagatgccggagatggaggcagcgtcccgggaggagtacctggcctccctccgccgcaggagcagcggcttctccaggggggtctccaagtacagaggcgtcgccaggtggttactgctcattaatctactcattatactaaaaccttgatttgaacacctacgcctcgatctgatcacctaatgttagtttaaaccctctcactagtcactagaatttacttacaagtaggatctgtcattcatgtagaattgtactagtactactgtgctagctctgactcggaccaatgctctctagttgggtgattgtgaaatgggggtccaggcttcacactgactcggaccaatgttctctagttgggtgacacggtgcaagatgaggcccacctgtaacgtcagatcaggcatgcatcacctgggcctgtgacacgtcacacacgccacgccagccattgtgctgtgcatgactcatcaccaggcactgtgcttgtgcacctagaaaatgccagctctgaactgcaagcaccacagactactttgaaaccagtgcatgattttcagctcatttcggtctgaaaccagctaaaaaggacgaaacttttgatgttcttgttgcttccatggtctaggcatcaccacaacgggagatgggaggcacggatcgggcgagttttagggaacaagtacctctacttgggaacattcggtatggatggacaagcgtaccagatccctcaatatgatatctattacgaactactagtttcgtgctctttgcgcttctttgaacgagtcagtttatgccggcatttaagcgcaactcttgtttgttgtggagctgtcctacttactgcaagggccacctaactttaaccggttttttatggaggttgatcaacctaactcctatacagtacacgattgaatggctcatgtttcttagtttcccttcaatgcagggctggcaattcccttgctatattgtccctgttcagacttggtgatcctaactgcagtgtttctttttttttaagaaaaaaagaaaacggatctgaccatccatcaaatcatatcatgccacaggagcataattacactttccctgcccaaaaatattgtccctttcttgactgccaagatcaagatcttgagaccatgatactactgtcctgtgagagcagtccccagacagactgatcctcaaacagaacaacttgccccaaaaaatattggcataaaactgtcaaactgttggctaattaccagccgaaactacatgaccctccaagctcatgtgataagcacgtggtgatgggagtagtcaccactcactcacctgccagccgctgctagtggcagtaataataagatggtgcctagggatcttcagctcctcagcactgccgacctttttcttttctttgtttctttttcacttgtctgcgttgctcagctgcaacatatattaggcggccacctattaacctgcttatggattatcataatctaggtatctaaattatataatccacctaatagtctgtgttgtttgttacctctcaacttaacttatttaagctggattatataatctagaagataaacaaacggctttctagaggcactgctgtgctctgagaacagtggctcttgaacagattttttgcattgtggagtatctcaagatattagccaagcagcatgtctaaacttccatttttatccgctcattcagacaagagttctgtttctgcagacactcaagaagaggcagccaaggcctatgatcttgcggccatcgaataccgaggtgccaatgctgtaaccaacttcgacatcagctgctacctggaccacccactgttcctggcgcagctccagcaggagcagccacaggtggtgccagcgctcgaccaagaacctcaggctgatcagagagaacctgaaaccacagcccaagagcctgtgtcaagccaagccaagacaccggcggatgacaatgcagagcctgatgacatcgcggagcccctcatcacggtcgacaacagcgtcgaggagagcttatggagtccttgcatggattatgagctagacaccatgtcgagatctaactttggcagctcgatcaacctgagcgagtggttcactgacgcagacttcgacagcgacttgggatgcctgttcgacgggcgctctgcagttgatggaggaagcaagggtggcgtaggtgtggcggatttcagtttgtttgaagcaggtgatggtcagctgaaggatgttctttcggatatggaagaggggatacaacctccaacgataatcagtgtgtgcaattgattctgagacctatgcgtggcgtgcgacaagtgtcctgtctttgggtatacttggtttgtccaatgccacggtgccactgctgcgagtcagctgaacttcttgtagaaagcacatggcagcttggcattagacaagtgtgttggtgttccttaattctttggatatgctttaggcattgactaaccttaagggttcgtcactgtctcgcttagcttagattagactaatcacatccttgaatctgaagtagttgtgcagtatcacagtttcacatggcaattctgccaatgcagcatagatttgttcgtttgaacagctgtaactgtaaccctatagctccagattaaggaacagtttgtttttcatccatacatataacacgctttcagaagcagacaatttactctgagacacttagaaataatttgtcacgtattgtccagggaataaaaatgtctggaagtcgtagtttttcttttcaagatatcatatcatatattatgatctgtagctttaagctgcgac

SEQ ID NO: 45075 - DNA, 1349 bp, Zea Mays
caagaatccaggacgataagtgttgctcaaacagaggctcaacgtgtcatccaacttaggaaacaactggggggtgcccttgtcacgagcgtcacacattctacttctagtccgctcatgattactccaccagaacaaacttcggctataatgcagggttcagaagtaagatcgacacatccccagtcacaaccactgaatcctgcagcttcgcttccccctacagtcagtgcagtgggtgatgagtccaagagaacggcggcagctatggcggataagcttgcatctttgtcagcacctgtgcaggtgctgacctccattctctcatcttttgctgctgagcaagctgcttccataaatggtggatcatcttctggggaattctctggaggaccaccaggtttccacattgataagaggcctaggcttgagaaaacaggtcaggcctctgacatgggtgctcctcctcccttttttgggcaagcggcacaggtgcaacaacagattggaggcacgcatccaccagctccagctccaggctcattcccaccacctccaccgccattgccgtctctactgccaccgctcctgcaacagttcggtcaaaatactggagggatgattggaatgggaggacctttcgggatgatggctggatctatgccacctccgcctccattgtccaacattctgccggcaggttttccgcgaccaagtgggccacctcctccacctccacttccaccagctcagagccagccccagcagcagtctcctcaggcggcacagcaatcaccaacatcaactggattctttcagtcatcgggcatggggttctttccgcctgcgcaggtgcagcaatctccatctgcccaacgccagtgactcaacggtggctctggcattcatgggcgtaaaggcagcggcgcccttgtgtgttaactttgtacactgaacaatatttcactctgtgtcgagcttaaacgtggctggctggtcctgcaagcgaggcagggccaatggccacgaattagagagattgtagaataggcatgcgtcctctgctatgtataactattcacttttttttgttttgttttgtttgtctgagtagttttaacttttcctttttcccgtttgcattgatcccccgaggcagaagaaagtgactttggaaagaaaaaaaaaactggtgtttgcccaactgatggaaacagttttaggactgaaacagctgtggaactaccggtcatagtctcagatatgataatgaactgcaaatatttcccatgctgtttaaatatgttgattcttattattgaagctacgcactatagctaggaaggaag

SEQ ID NO: 45076 - DNA, 2246 bp, Zea Mays
ctttattaacctacgaactgtgttcccctttttcttcatggctgtgctctcaattctgtagtttatatatcttgtgtgctttaagtatgcctttctagtatagtttgaagtttgatttagtccaggttcctcgagtattaaatgtctgcctatttatttccatctctttcgcgttggtgcatttttcaccgcaagaaggccaaaagggttgtagacacatgggaaaaacagtttactagtgcaagggaggataagaaaatatcattcctatatctatcaaatgatatcctgcaaaacagtaaacgcaagggagcagactatgtggatgagttctggagggttctacctagatccctgaagcatgtctatgaaaaaggaggaggagaagggaagaatcaggtggcgagattgatatcaatctgggatgaccgtaaagtttttgggacccgtattgaaagtatgaaaaatggcattcttggtgacaaccctcctatattggataacaatgggaatagtttaaatcctagctctaatcccacttcaaattctaaagctgcacggaaggattctggtacaatagtaaaaaaactcactgttggtggtatgcctgaaaagatcgtgtctgcataccaattagtgcttgatcagcattttgatgaagacactgctttaaacaaatgtaagactactttgggccttttggagaggataaataaagatattaatgattctatcatcaacggtaatcagccagcattgtcattgatctctgaccttcaagaacaggaaatgacccttaaacattgtatcaaacaactcgaaagtgtagatatggcgaggatatccctggtcaatcaattgaaagaagctctcaacgaacaggagtcgaaatcattagttcttcgcgatcaattgcaagttgctcaaacagaggctcaacgtgtcatccaacttaggaaacaactggggggtgcccttgtcacgagcgtcacacattctacttctagtccgctcatgattactccaccagaacaaacttcggctataatgcagggttcagaagtaagatcgacacatccccagtcacaaccactgaatcctgcagcttcgcttccccctacagtcagtgcagtgggtgatgagtccaagagaacggcggcagctatggcggataagcttgcatctttgtcagcacctgtgcaggtgctgacctccattctctcatcttttgctgctgagcaagctgcttccataaatggtggatcatcttctggggaattctctggaggaccaccaggtttccacattgataagaggcctaggcttgagaaaacaggtcaggcctctgacatgggtgctcctcctcccttttttgggcaagcggcacaggtgcaacaacagattggaggcacgcatccaccagctccagctccaggctcattcccaccacctccaccgccattgccgtctctactgccaccgctcctgcaacagttcggtcaaaatactggagggatgattggaatgggaggacctttcgggatgatggctggatctatgccacctccgcctccattgtccaacattctgccggcaggttttccgcgaccaagtgggccacctcctccacctccacttccaccagctcagagccagccccagcagcagtctcctcaggcggcacagcaatcaccaacatcaactggattctttcagtcatcgggcatggggttctttccgcctgcgcaggtgcagcaatctccatctgcccaacgccagtgactcaacggtggctctggcattcatgggcgtaaaggcagcggcgcccttgtgtgttaactttgtacactgaacaatatttcactctgtgtcgagcttaaacgtggctggctggtcctgcaagcgaggcagggccaatggccacgaattagagagattgtagaataggcatgcgtcctctgctatgtataactattcacttttttttgttttgttttgtttgtctgagtagttttaacttttcctttttcccgtttgcattgatcccccgaggcagaagaaagtgactttggaaagaaaaaaaaaactggtgtttgcccaactgatggaaacagttttaggactgaaacagctgtggaactaccggtcatagtctcagatatgataatgaactgcaaatatttcccatgctgtttaaatatgttgattcttattattgaagctacgcactatagctaggaaggaag

SEQ ID NO: 45077 - DNA, 2562 bp, Zea Mays
aacagcataacatagaggaaaacatccacctcccacgaaaaccaccagcacgctgcacgctgcacgccgccgcgccgcacttctccccatccggcgccttctctatcctcgccgctgaagacgtcgtgccgtgcgtagctagcagtgctgacgcgcgctcgtcgaataaggattggatttggcttttcgtccccccaccgcctcctccggtccttcccctgccactccctattctcctcgtccgaagcggcaagctcaagctcaggagctcgcaaccgagatctatcttgctttcgcaggagtaccaatttctctagggatttggcgtatccaccagggagcaggaatagggtgaggcttcctgatggcgggggcgaaagcggatgtagacgcggaaacaggagacggcggctccttcagcgagcagaggctgattgataagctcaaaaggctcaacaactcagccgctagcatccagactctttcgcgttggtgcatttttcaccgcaagaaggccaaaagggttgtagacacatgggaaaaacagtttactagtgcaagggaggataagaaaatatcattcctatatctatcaaatgatatcctgcaaaacagtaaacgcaagggagcagactatgtggatgagttctggagggttctacctagatccctgaagcatgtctatgaaaaaggaggaggagaagggaagaatcaggtggcgagattgatatcaatctgggatgaccgtaaagtttttgggacccgtattgaaagtatgaaaaatggcattcttggtgacaaccctcctatattggataacaatgggaatagtttaaatcctagctctaatcccacttcaaattctaaagctgcacggaaggattctggtacaatagtaaaaaaactcactgttggtggtatgcctgaaaagatcgtgtctgcataccaattagtgcttgatcagcattttgatgaagacactgctttaaacaaatgtaagactactttgggccttttggagaggataaataaagatattaatgattctatcatcaacggtaatcagccagcattgtcattgatctctgaccttcaagaacaggaaatgacccttaaacattgtatcaaacaactcgaaagtgtagatatggcgaggatatccctggtcaatcaattgaaagaagctctcaacgaacaggagtcgaaatcattagttcttcgcgatcaattgcaagttgctcaaacagaggctcaacgtgtcatccaacttaggaaacaactggggggtgcccttgtcacgagcgtcacacattctacttctagtccgctcatgattactccaccagaacaaacttcggctataatgcagggttcagaagtaagatcgacacatccccagtcacaaccactgaatcctgcagcttcgcttccccctacagtcagtgcagtgggtgatgagtccaagagaacggcggcagctatggcggataagcttgcatctttgtcagcacctgtgcaggtgctgacctccattctctcatcttttgctgctgagcaagctgcttccataaatggtggatcatcttctggggaattctctggaggaccaccaggtttccacattgataagaggcctaggcttgagaaaacaggtcaggcctctgacatgggtgctcctcctcccttttttgggcaagcggcacaggtgcaacaacagattggaggcacgcatccaccagctccagctccaggctcattcccaccacctccaccgccattgccgtctctactgccaccgctcctgcaacagttcggtcaaaatactggagggatgattggaatgggaggacctttcgggatgatggctggatctatgccacctccgcctccattgtccaacattctgccggcaggttttccgcgaccaagtgggccacctcctccacctccacttccaccagctcagagccagccccagcagcagtctcctcaggcggcacagcaatcaccaacatcaactggattctttcagtcatcgggcatggggttctttccgcctgcgcaggtgcagcaatctccatctgcccaacgccagtgactcaacggtggctctggcattcatgggcgtaaaggcagcggcgcccttgtgtgttaactttgtacactgaacaatatttcactctgtgtcgagcttaaacgtggctggctggtcctgcaagcgaggcagggccaatggccacgaattagagagattgtagaataggcatgcgtcctctgctatgtataactattcacttttttttgttttgttttgtttgtctgagtagttttaacttttcctttttcccgtttgcattgatcccccgaggcagaagaaagtgactttggaaagaaaaaaaaaactggtgtttgcccaactgatggaaacagttttaggactgaaacagctgtggaactaccggtcatagtctcagatatgataatgaactgcaaatatttcccatgctgtttaaatatgttgattcttattattgaagctacgcactatagctaggaaggaag

SEQ ID NO: 45078 - DNA, 2537 bp, Zea Mays
aacagcataacatagaggaaaacatccacctcccacgaaaaccaccagcacgctgcacgctgcacgccgccgcgccgcacttctccccatccggcgccttctctatcctcgccgctgaagacgtcgtgccgtgcgtagctagcagtgctgacgcgcgctcgtcgaataaggattggatttggcttttcgtccccccaccgcctcctccggtccttcccctgccactccctattctcctcgtccgaagcggcaagctcaagctcaggagctcgcaaccgaggagtaccaatttctctagggatttggcgtatccaccagggagcaggaatagggtgaggcttcctgatggcgggggcgaaagcggatgtagacgcggaaacaggagacggcggctccttcagcgagcagaggctgattgataagctcaaaaggctcaacaactcagccgctagcatccagactctttcgcgttggtgcatttttcaccgcaagaaggccaaaagggttgtagacacatgggaaaaacagtttactagtgcaagggaggataagaaaatatcattcctatatctatcaaatgatatcctgcaaaacagtaaacgcaagggagcagactatgtggatgagttctggagggttctacctagatccctgaagcatgtctatgaaaaaggaggaggagaagggaagaatcaggtggcgagattgatatcaatctgggatgaccgtaaagtttttgggacccgtattgaaagtatgaaaaatggcattcttggtgacaaccctcctatattggataacaatgggaatagtttaaatcctagctctaatcccacttcaaattctaaagctgcacggaaggattctggtacaatagtaaaaaaactcactgttggtggtatgcctgaaaagatcgtgtctgcataccaattagtgcttgatcagcattttgatgaagacactgctttaaacaaatgtaagactactttgggccttttggagaggataaataaagatattaatgattctatcatcaacgagccagcattgtcattgatctctgaccttcaagaacaggaaatgacccttaaacattgtatcaaacaactcgaaagtgtagatatggcgaggatatccctggtcaatcaattgaaagaagctctcaacgaacaggagtcgaaatcattagttcttcgcgatcaattgcaagttgctcaaacagaggctcaacgtgtcatccaacttaggaaacaactggggggtgcccttgtcacgagcgtcacacattctacttctagtccgctcatgattactccaccagaacaaacttcggctataatgcagggttcagaagtaagatcgacacatccccagtcacaaccactgaatcctgcagcttcgcttccccctacagtcagtgcagtgggtgatgagtccaagagaacggcggcagctatggcggataagcttgcatctttgtcagcacctgtgcaggtgctgacctccattctctcatcttttgctgctgagcaagctgcttccataaatggtggatcatcttctggggaattctctggaggaccaccaggtttccacattgataagaggcctaggcttgagaaaacaggtcaggcctctgacatgggtgctcctcctcccttttttgggcaagcggcacaggtgcaacaacagattggaggcacgcatccaccagctccagctccaggctcattcccaccacctccaccgccattgccgtctctactgccaccgctcctgcaacagttcggtcaaaatactggagggatgattggaatgggaggacctttcgggatgatggctggatctatgccacctccgcctccattgtccaacattctgccggcaggttttccgcgaccaagtgggccacctcctccacctccacttccaccagctcagagccagccccagcagcagtctcctcaggcggcacagcaatcaccaacatcaactggattctttcagtcatcgggcatggggttctttccgcctgcgcaggtgcagcaatctccatctgcccaacgccagtgactcaacggtggctctggcattcatgggcgtaaaggcagcggcgcccttgtgtgttaactttgtacactgaacaatatttcactctgtgtcgagcttaaacgtggctggctggtcctgcaagcgaggcagggccaatggccacgaattagagagattgtagaataggcatgcgtcctctgctatgtataactattcacttttttttgttttgttttgtttgtctgagtagttttaacttttcctttttcccgtttgcattgatcccccgaggcagaagaaagtgactttggaaagaaaaaaaaaactggtgtttgcccaactgatggaaacagttttaggactgaaacagctgtggaactaccggtcatagtctcagatatgataatgaactgcaaatatttcccatgctgtttaaatatgttgattcttattattgaagctacgcactatagctaggaaggaag

SEQ ID NO: 45079 - DNA, 2295 bp, Zea Mays
aacagcataacatagaggaaaacatccacctcccacgaaaaccaccagcacgctgcacgctgcacgccgccgcgccgcacttctccccatccggcgccttctctatcctcgccgctgaagacgtcgtgccgtgcgtagctagcagtgctgacgcgcgctcgtcgaataaggattggatttggcttttcgtccccccaccgcctcctccggtccttcccctgccactccctattctcctcgtccgaagcggcaagctcaagctcaggagctcgcaaccgaggagtaccaatttctctagggatttggcgtatccaccagggagcaggaatagggtgaggcttcctgatggcgggggcgaaagcggatgtagacgcggaaacaggagacggcggctccttcagcgagcagaggctgattgataagctcaaaaggctcaacaactcagccgctagcatccagaatatcaatctgggatgaccgtaaagtttttgggacccgtattgaaagtatgaaaaatggcattcttggtgacaaccctcctatattggataacaatgggaatagtttaaatcctagctctaatcccacttcaaattctaaagctgcacggaaggattctggtacaatagtaaaaaaactcactgttggtggtatgcctgaaaagatcgtgtctgcataccaattagtgcttgatcagcattttgatgaagacactgctttaaacaaatgtaagactactttgggccttttggagaggataaataaagatattaatgattctatcatcaacggtaatcagccagcattgtcattgatctctgaccttcaagaacaggaaatgacccttaaacattgtatcaaacaactcgaaagtgtagatatggcgaggatatccctggtcaatcaattgaaagaagctctcaacgaacaggagtcgaaatcattagttcttcgcgatcaattgcaagttgctcaaacagaggctcaacgtgtcatccaacttaggaaacaactggggggtgcccttgtcacgagcgtcacacattctacttctagtccgctcatgattactccaccagaacaaacttcggctataatgcagggttcagaagtaagatcgacacatccccagtcacaaccactgaatcctgcagcttcgcttccccctacagtcagtgcagtgggtgatgagtccaagagaacggcggcagctatggcggataagcttgcatctttgtcagcacctgtgcaggtgctgacctccattctctcatcttttgctgctgagcaagctgcttccataaatggtggatcatcttctggggaattctctggaggaccaccaggtttccacattgataagaggcctaggcttgagaaaacaggtcaggcctctgacatgggtgctcctcctcccttttttgggcaagcggcacaggtgcaacaacagattggaggcacgcatccaccagctccagctccaggctcattcccaccacctccaccgccattgccgtctctactgccaccgctcctgcaacagttcggtcaaaatactggagggatgattggaatgggaggacctttcgggatgatggctggatctatgccacctccgcctccattgtccaacattctgccggcaggttttccgcgaccaagtgggccacctcctccacctccacttccaccagctcagagccagccccagcagcagtctcctcaggcggcacagcaatcaccaacatcaactggattctttcagtcatcgggcatggggttctttccgcctgcgcaggtgcagcaatctccatctgcccaacgccagtgactcaacggtggctctggcattcatgggcgtaaaggcagcggcgcccttgtgtgttaactttgtacactgaacaatatttcactctgtgtcgagcttaaacgtggctggctggtcctgcaagcgaggcagggccaatggccacgaattagagagattgtagaataggcatgcgtcctctgctatgtataactattcacttttttttgttttgttttgtttgtctgagtagttttaacttttcctttttcccgtttgcattgatcccccgaggcagaagaaagtgactttggaaagaaaaaaaaaactggtgtttgcccaactgatggaaacagttttaggactgaaacagctgtggaactaccggtcatagtctcagatatgataatgaactgcaaatatttcccatgctgtttaaatatgttgattcttattattgaagctacgcactatagctaggaaggaag

SEQ ID NO: 45080 - DNA, 2357 bp, Zea Mays
aacagcataacatagaggaaaacatccacctcccacgaaaaccaccagcacgctgcacgctgcacgccgccgcgccgcacttctccccatccggcgccttctctatcctcgccgctgaagacgtcgtgccgtgcgtagctagcagtgctgacgcgcgctcgtcgaataaggattggatttggcttttcgtccccccaccgcctcctccggtccttcccctgccactccctattctcctcgtccgaagcggcaagctcaagctcaggagctcgcaaccgaggagtaccaatttctctagggatttggcgtatccaccagggagcaggaatagggtgaggcttcctgatggcgggggcgaaagcggatgtagacgcggaaacaggagacggcggctccttcagcgagcagaggctgattgataagctcaaaaggctcaacaactcagccgctagcatccagactctttcgcgttggtgcatttttcaccgcaagaaggccaaaagggttgtagacacatgggaaaaacagtttactagtgcaagggaggataagaaaatatcattcctatatctatcaaatgatatcctgcaaaacagtaaacgcaagggagcagactatgtggatgagttctggagggttctacctagatccctgaagcatgtctatgaaaaaggaggaggagaagggaagaatcaggtggcgagattgatatcaatctgggatgaccgtaaagtttttgggacccgtattgaaagtatgaaaaatggcattcttggtgacaaccctcctatattggataacaatgggaatagtttaaatcctagctctaatcccacttcaaattctaaagctgcacggaaggattctggtacaatagtaaaaaaactcactgttggtggtatgcctgaaaagatcgtgtctgcataccaattagtgcttgatcagcattttgatgaagacactgctttaaacaaatgtaagactactttgggccttttggagaggataaataaagatattaatgattctatcatcaacggtaatcagccagcattgtcattgatctctgaccttcaagaacaggaaatgacccttaaacattgtatcaaacaactcgaaagtgtagatatggcgaggatatccctggtcaatcaattgaaagaagctctcaacgaacaggagtcgaaatcattagttcttcgcgatcaattgcaagttgctcaaacagaggctcaacgtgtcatccaacttaggaaacaactggggggtgcccttgtcacgagcgtcacacattctacttctagtccgctcatgattactccaccagaacaaacttcggctataatgcagggttcagaagtaagatcgacacatccccagtcacaaccactgaatcctgcagcttcgcttccccctacagtcagtgcagtgggtgatgagtccaagagaacggcggcagctatggcggataagcttgcatctttgtcagcacctgtgcaggtgcaacaacagattggaggcacgcatccaccagctccagctccaggctcattcccaccacctccaccgccattgccgtctctactgccaccgctcctgcaacagttcggtcaaaatactggagggatgattggaatgggaggacctttcgggatgatggctggatctatgccacctccgcctccattgtccaacattctgccggcaggttttccgcgaccaagtgggccacctcctccacctccacttccaccagctcagagccagccccagcagcagtctcctcaggcggcacagcaatcaccaacatcaactggattctttcagtcatcgggcatggggttctttccgcctgcgcaggtgcagcaatctccatctgcccaacgccagtgactcaacggtggctctggcattcatgggcgtaaaggcagcggcgcccttgtgtgttaactttgtacactgaacaatatttcactctgtgtcgagcttaaacgtggctggctggtcctgcaagcgaggcagggccaatggccacgaattagagagattgtagaataggcatgcgtcctctgctatgtataactattcacttttttttgttttgttttgtttgtctgagtagttttaacttttcctttttcccgtttgcattgatcccccgaggcagaagaaagtgactttggaaagaaaaaaaaaactggtgtttgcccaactgatggaaacagttttaggactgaaacagctgtggaactaccggtcatagtctcagatatgataatgaactgcaaatatttcccatgctgtttaaatatgttgattcttattattgaagctacgcactatagctaggaaggaag

SEQ ID NO: 45081 - DNA, 2535 bp, Zea Mays
cgaaaacagcataacatagaggaaaacatccacctcccacgaaaaccaccagcacgctgcacgctgcacgccgccgcgccgcacttctccccatccggcgccttctctatcctcgccgctgaagacgtcgtgccgtgcgtagctagcagtgctgacgcgcgctcgtcgaataaggattggatttggcttttcgtccccccaccgcctcctccggtccttcccctgccactccctattctcctcgtccgaagcggcaagctcaagctcaggagctcgcaaccgaggagtaccaatttctctagggatttggcgtatccaccagggagcaggaatagggtgaggcttcctgatggcgggggcgaaagcggatgtagacgcggaaacaggagacggcggctccttcagcgagcagaggctgattgataagctcaaaaggctcaacaactcagccgctagcatccagactctttcgcgttggtgcatttttcaccgcaagaaggccaaaagggttgtagacacatgggaaaaacagtttactagtgcaagggaggataagaaaatatcattcctatatctatcaaatgatatcctgcaaaacagtaaacgcaagggagcagactatgtggatgagttctggagggttctacctagatccctgaagcatgtctatgaaaaaggaggaggagaagggaagaatcagatatcaatctgggatgaccgtaaagtttttgggacccgtattgaaagtatgaaaaatggcattcttggtgacaaccctcctatattggataacaatgggaatagtttaaatcctagctctaatcccacttcaaattctaaagctgcacggaaggattctggtacaatagtaaaaaaactcactgttggtggtatgcctgaaaagatcgtgtctgcataccaattagtgcttgatcagcattttgatgaagacactgctttaaacaaatgtaagactactttgggccttttggagaggataaataaagatattaatgattctatcatcaacggtaatcagccagcattgtcattgatctctgaccttcaagaacaggaaatgacccttaaacattgtatcaaacaactcgaaagtgtagatatggcgaggatatccctggtcaatcaattgaaagaagctctcaacgaacaggagtcgaaatcattagttcttcgcgatcaattgcaagttgctcaaacagaggctcaacgtgtcatccaacttaggaaacaactggggggtgcccttgtcacgagcgtcacacattctacttctagtccgctcatgattactccaccagaacaaacttcggctataatgcagggttcagaagtaagatcgacacatccccagtcacaaccactgaatcctgcagcttcgcttccccctacagtcagtgcagtgggtgatgagtccaagagaacggcggcagctatggcggataagcttgcatctttgtcagcacctgtgcaggtgctgacctccattctctcatcttttgctgctgagcaagctgcttccataaatggtggatcatcttctggggaattctctggaggaccaccaggtttccacattgataagaggcctaggcttgagaaaacaggtcaggcctctgacatgggtgctcctcctcccttttttgggcaagcggcacaggtgcaacaacagattggaggcacgcatccaccagctccagctccaggctcattcccaccacctccaccgccattgccgtctctactgccaccgctcctgcaacagttcggtcaaaatactggagggatgattggaatgggaggacctttcgggatgatggctggatctatgccacctccgcctccattgtccaacattctgccggcaggttttccgcgaccaagtgggccacctcctccacctccacttccaccagctcagagccagccccagcagcagtctcctcaggcggcacagcaatcaccaacatcaactggattctttcagtcatcgggcatggggttctttccgcctgcgcaggtgcagcaatctccatctgcccaacgccagtgactcaacggtggctctggcattcatgggcgtaaaggcagcggcgcccttgtgtgttaactttgtacactgaacaatatttcactctgtgtcgagcttaaacgtggctggctggtcctgcaagcgaggcagggccaatggccacgaattagagagattgtagaataggcatgcgtcctctgctatgtataactattcacttttttttgttttgttttgtttgtctgagtagttttaacttttcctttttcccgtttgcattgatcccccgaggcagaagaaagtgactttggaaagaaaaaaaaaactggtgtttgcccaactgatggaaacagttttaggactgaaacagctgtggaactaccggtcatagtctcagatatgataatgaactgcaaatatttcccatgctgtttaaatatgttgattcttattattgaagctacgcactatagctaggaaggaag

SEQ ID NO: 45082 - DNA, 2547 bp, Zea Mays
gcgaaaacagcataacatagaggaaaacatccacctcccacgaaaaccaccagcacgctgcacgctgcacgccgccgcgccgcacttctccccatccggcgccttctctatcctcgccgctgaagacgtcgtgccgtgcgtagctagcagtgctgacgcgcgctcgtcgaataaggattggatttggcttttcgtccccccaccgcctcctccggtccttcccctgccactccctattctcctcgtccgaagcggcaagctcaagctcaggagctcgcaaccgaggagtaccaatttctctagggatttggcgtatccaccagggagcaggaatagggtgaggcttcctgatggcgggggcgaaagcggatgtagacgcggaaacaggagacggcggctccttcagcgagcagaggctgattgataagctcaaaaggctcaacaactcagccgctagcatccagctctttcgcgttggtgcatttttcaccgcaagaaggccaaaagggttgtagacacatgggaaaaacagtttactagtgcaagggaggataagaaaatatcattcctatatctatcaaatgatatcctgcaaaacagtaaacgcaagggagcagactatgtggatgagttctggagggttctacctagatccctgaagcatgtctatgaaaaaggaggaggagaagggaagaatcaggtggcgagattgatatcaatctgggatgaccgtaaagtttttgggacccgtattgaaagtatgaaaaatggcattcttggtgacaaccctcctatattggataacaatgggaatagtttaaatcctagctctaatcccacttcaaattctaaagctgcacggaaggattctggtacaatagtaaaaaaactcactgttggtggtatgcctgaaaagatcgtgtctgcataccaattagtgcttgatcagcattttgatgaagacactgctttaaacaaatgtaagactactttgggccttttggagaggataaataaagatattaatgattctatcatcaacggtaatcagccagcattgtcattgatctctgaccttcaagaacaggaaatgacccttaaacattgtatcaaacaactcgaaagtgtagatatggcgaggatatccctggtcaatcaattgaaagaagctctcaacgaacaggagtcgaaatcattagttcttcgcgatcaattgcaagttgctcaaacagaggctcaacgtgtcatccaacttaggaaacaactggggggtgcccttgtcacgagcgtcacacattctacttctagtccgctcatgattactccaccagaacaaacttcggctataatgcagggttcagaagtaagatcgacacatccccagtcacaaccactgaatcctgcagcttcgcttccccctacagtcagtgcagtgggtgatgagtccaagagaacggcggcagctatggcggataagcttgcatctttgtcagcacctgtgcaggtgctgacctccattctctcatcttttgctgctgagcaagctgcttccataaatggtggatcatcttctggggaattctctggaggaccaccaggtttccacattgataagaggcctaggcttgagaaaacaggtcaggcctctgacatgggtgctcctcctcccttttttgggcaagcggcacaggtgcaacaacagattggaggcacgcatccaccagctccagctccaggctcattcccaccacctccaccgccattgccgtctctactgccaccgctcctgcaacagttcggtcaaaatactggagggatgattggaatgggaggacctttcgggatgatggctggatctatgccacctccgcctccattgtccaacattctgccggcaggttttccgcgaccaagtgggccacctcctccacctccacttccaccagctcagagccagccccagcagcagtctcctcaggcggcacagcaatcaccaacatcaactggattctttcagtcatcgggcatggggttctttccgcctgcgcaggtgcagcaatctccatctgcccaacgccagtgactcaacggtggctctggcattcatgggcgtaaaggcagcggcgcccttgtgtgttaactttgtacactgaacaatatttcactctgtgtcgagcttaaacgtggctggctggtcctgcaagcgaggcagggccaatggccacgaattagagagattgtagaataggcatgcgtcctctgctatgtataactattcacttttttttgttttgttttgtttgtctgagtagttttaacttttcctttttcccgtttgcattgatcccccgaggcagaagaaagtgactttggaaagaaaaaaaaaactggtgtttgcccaactgatggaaacagttttaggactgaaacagctgtggaactaccggtcatagtctcagatatgataatgaactgcaaatatttcccatgctgtttaaatatgttgattcttattattgaagctacgcactatagctaggaaggaag

SEQ ID NO: 45083 - DNA, 3153 bp, Zea Mays
agttaggcctcccatgttttcttcacaaaacctgtcgaggaaacgccttcgcaaaacccccaaaccccagcaggcatcctctcttcctctcctctccaatctccattgcagcagcactgcagcggcgggtgcgggtggcatggctatggcgtccgcgctgccgctcctcctcgcgccgcgcgccgtctttgcgtccgcggggccgtcttcgcctcatctccgctcccgccgcctcgcgctgcgtcttcctccccctccccgacccgccgccctctccgcgccaccagccgccgtgcagccgcgcgaggcccggcgcgtccagccgccccgcgccgcctcctgctgccaagatcccgctccggccgcgggaggaggcgccagggactggcggatgttcttagcatggtacctgatggctctggacaagaacccgattgtgactaaggcggtcacttccgctgccctaactctggccggggacctcatctgtcagcttgttatcgatcgagttccagaacttgatttgaggagaacatttgtattcacatttttgggccttgcccttgtggggccaactttacatgtctggtacttgtatttgagcaaattagtgacaatcagtggggcatcaggtgccattgctcgccttatacttgatcagttcattttctctcccattttcattggcgtctttatgagcttactagtcaccttggagggaaagccctctcttgtggtgccaaagcttaagcaggaatggttatcatcagtgttggcgaattggcaattatggataccatttcagtttttgaatttttacttcgttcctcagaagtttcaggtccttggtgctaattttgtagcccttgcatggaatgtgattttatcatttaaagctcacaaggaagttatcgcgaaataggtgttttctctcaaacatattgaaactgatgcgcattgtatgatgctacattgctacacaccatggaagtagttgcgatagtggactggcattcaaagggttttgtaggttaagggatttgttgtacttgcatcctgcacagctgcactataataagatgtgtttgtactgcaaacagtttgtactaatttgtagttcaactttttttctatcaagtctaatggagagataagattcgccttaacctccttgtccactggctaatgtttctaggctttaccttatcttttctgccaccccttaaagcaaccttgtggacctgttctagaagtcagacccttaaagcagcgcgcgtgcaatggccaccactatctgaatttggcgctcaaccatgctgttctgttgaggcgattaaggagcggagaagtgccgctgaatacctttgtcagagcagtaggtggtgaactccatggcgatgaactctccacggttgtcagtgtgaagcacctggaggttgtggccgctctccttctctgcagctgcctggacttgcttgatggcatccgctgctgtccctttgcttggaagtgcccacatgaatcaggaggtatcgtccactaggagcaagaagtagcatcacttgcctggagtcgctggtgtcatggggccgcacaaatcactgtggatgagcttgagctgttcttgtgtgcggtatagggcttggcaagggaatgaacgcctcctctgctttgtggccacacaagtgtcacacagctgtttaacgtgaccgaccagtggaagctcacacaccatcttctctttccacaacttttgcagatcctagaaatggagatagctgaacagctcatgccaacgctaggcttcatcatctcgacgtgtggcgaggtagagtggccgaaccacctctagctctaggtggagtacatagagacggttgaggccttggctggccttggcgagtagactcccgcgtcggtcccaaattcagagaatttcacggtcgatctccacccttgagccaccattgtccagttttttaggctaatgatggaatttcgcagcgccatgatttagtagacgttgtggagcaccctttgctcgtcggtcttggtcgcgaacacaggctgcttgtagttccataactaggcaatgacattacttgatacagcagcataaagcataacaaactcaacaactaaagagcatattctaaccagtaaccactgaagtgcctagaagataagaagctggaatcagctttgacaaagtaaagataactagagagaagcactttagataactattgccggacttgttgtaacccaacaaagtcaaaccttttgcagtttaacatgatcctgattgatgccaaagatacttgttttgcgacaaggtctaaaggggacggatccggtcaaaaaaatacattgttcattctggattatatttttgggatggctcccagcactgtcatgcagtgtggaactgaacttaattccccccccccccccctgaagtgtttaatgaagactttgtttttgaacttttcagagtatgggcaatgtttgtttgggattacaatctagccggattatataatctaacttattttgaacaaattaacacttcgttcaaaaataagttgattatataatctgggcaaattataatccgaaacaaacacccccttagtagctgtagctcagtcatcaacaagcagttactgatctcttggttctttcgaactgtcttattaggtatgaaggagcgcagtgaactcccccggtcggtccaggatagggataggatagtggcagctgaagctgtagggcttgtaaattgtcgccatgtgggactggagtggatcattctgatcagtagtcaacacaacactgaatggatgattgtgatggacatgcctgtgtgatctcttttgtgcatgctacaccaatacgtgtttggccagcatgtatgcctggacatgtgtgttactatttgtgctgtgatgggttgttcgagatctaggaaacacattgggttgttgatatctttaggccctgtgtggaagcgtctattttttttaagaaactggtttatagaaattgtggtggttctaaacataatagtttataactcagttcacttaaactactaaactttagtcacttttgtttcatgtctcactctttatttcaaacagtgcaaagcag

SEQ ID NO: 45084 - DNA, 1966 bp, Zea Mays
aaacgaaaacgagccagccgggcaaacaacactcacatcttacaccagccgcactcccgtgtcctcctctccgagacgagacggacgggacggcaggcaccaccgcaccggcgccaccccacccgccggctcagagcgggggcccggccacccgaatcacacagatcggaacgccggaggaggagcaacgcgggcgcggagaggcccgccagcgaaggcgcagtgcaagctctgggttcccggatccgataccaccggcctctcggcgagtgtgtaatccagcgagcgagcgctcggttttagccgtgagagcgggagatgagtgctctgaagaaatccgacaagaaagccgccctcgacttcgcggcatggagcttcaatgtcaccacgtcggtcggactcatcatggtcaacaaggcgttgatggctacgtatggattcagttttgccacgacattaactgggcttcattttgtgaccactaccttgatgactattgtatttcgatggttaggcctgagccagccatcccacttacccctagcagatctagttaaatttgtgatattttcgaacttgtcaattgttgggatgaatgtgagcttgatgtggaactctgtgggcttttatcagatagcaaagctgtgcatgatacctgcatcatgtcttctggaggttgtctttgatcatgtacattattcccgggacacaaagctgagcataatggttgtgcttataggagttgcagtctgcacagttactgatgtcagtgtgaatgcaagaggtctaatcgcggctgttatagctgtttggagcacagctttgcaacaatattatgtccactttctccaacgcaagtactctctgaactcattcaacctgctgggccacactgctccagcccaagctgggtcactcctgctagtgggaccatttgcagattacttgttgacaggcaaaagggtggatcacttcagtttctcatcgcttgctctggtacctgatggctctggacaagaacccgattgtgactaaggcggtcacttccgctgccctaactctggccggggacctcatctgtcagcttgttatcgatcgagttccagaacttgatttgaggagaacatttgtattcacatttttgggccttgcccttgtggggccaactttacatgtctggtacttgtatttgagcaaattagtgacaatcagtggggcatcaggtgccattgctcgccttatacttgatcagttcattttctctcccattttcattggcgtctttatgagcttactagtcaccttggagggaaagccctctcttgtggtgccaaagcttaagcaggaatggttatcatcagtgttggcgaattggcaattatggataccatttcagtttttgaatttttacttcgttcctcagaagtttcaggtccttggtgctaattttgtagcccttgcatggaatgtgattttatcatttaaagctcacaaggaagttatcgcgaaataggtatgaaggagcgcagtgaactcccccggtcggtccaggatagggataggatagtggcagctgaagctgtagggcttgtaaattgtcgccatgtgggactggagtggatcattctgatcagtagtcaacacaacactgaatggatgattgtgatggacatgcctgtgtgatctcttttgtgcatgctacaccaatacgtgtttggccagcatgtatgcctggacatgtgtgttactatttgtgctgtgatgggttgttcgagatctaggaaacacattgggttgttgatatctttaggccctgtgtggaagcgtctattttttttaagaaactggtttatagaaattgtggtggttctaaacataatagtttataactcagttcacttaaactactaaactttagtcacttttgtttcatgtctcactctttatttcaaacagtgcaaagcag

SEQ ID NO: 45085 - DNA, 1463 bp, Zea Mays
aaacgaaaacgagccagccgggcaaacaacactcacatcttacaccagccgcactcccgtgtcctcctctccgagacgagacggacgggacggcaggcaccaccgcaccggcgccaccccacccgccggctcagagcgggggcccggccacccgaatcacacagatcggaacgccggaggaggagcaacgcgggcgcggagaggcccgccagcgaaggcgcaggtaaccgcaaccctcctcctcctcctcctcctcctccgtgcaagctctgggttcccggatccgataccaccggcctctcggcgagtgtgtaatccagcgagcgagcgctcggttttagccgtgagagcgggagatgagtgctctgaagaaatccgacaagaaagccgccctcgacttcgcggcatggagcttcaatgtcaccacgtcggtcggactcatcatggtcaacaaggcgttgatggctacgtatggattcagttttggagttgcagtctgcacagttactgatgtcagtgtgaatgcaagaggtctaatcgcggctgttatagctgtttggagcacagctttgcaacaatattatgtccactttctccaacgcaagtactctctgaactcattcaacctgctgggccacactgctccagcccaagctgggtcactcctgctagtgggaccatttgcagattacttgttgacaggcaaaagggtggatcacttcagtttctcatcgcttgctctgtttttcctggcactctcatgcttcatcgccattggtgttaatctgagccaattcatctgtattgggcgcttctctgctgtatccttccaagtcctaggccacatgaagaccgtacttgttctgtcccttgggttcctattctttggcaaggagggcctgaatcttcaggtagtccttgggatggttctggccgttcttggaatgatatggtacgggaacgcatctgccaaaccaggcggcaaagagcggcgcagcgtcctaccgctgaggtctgcaagtctcaagggaagttcagaagaaaagggtggtgccgagaaatagtcttgctctctctgactgccaacttgaatggggagttttccgttccaaggttgaatttctggtgaggtgacgtgaagtaccacatattgggaactcttgcctaatgtttgacgcagaggacaaactcgttccatctagaaactcaggatcgttatagttacaggtatactgtaaaggttcatttttttttggcgctctgaatcatttgcagtgaggggaaagacagacatggttgttacgagtcttcaagacagtttttttatcgaatatataatgcagttgtttgaggaacatgctcctatatttttcgtggtgatgtactgtaggatgttttgatttgcagtaagatattaatgaaagtataggactgggtttcctgaaatgaatttgatttaaatc

SEQ ID NO: 45086 - DNA, 2090 bp, Zea Mays
aaaatgcttggctggcagcttgtccatttcccgtcagcctgcctgtgcagtgcagtccatgtggtggatgcagttggaaatccattcattccttcgtcccccacctctcgcttcatctccatctcctcctcatgctgctgctgccactgccactataatagcccagctagctagaggtcacccatcaagctgcccattccctcgtgacagcagctgcctgcctgctccgaggcgccacccagctcttcctcgccccagcagccgcttcccgagatccttttcactttcaccaccagggtacatagaccgcatctgcggtgctctgcgctcctcggactcgatttgttggttcatccatccagctgccgccggacgtcgatcagctacctatcttgaaaccacaggaccgagcgtggaaactcccggaccggacattccattttccattccgaagggggggtgagaaggcggggaatgagtacaaccaaggtgaagagacgtgtgggcaagtatgagctcggccggaccataggcgagggcaccttcgcgaaggtcaggttcgcgagggacacggtcaccggcgaggccgtggccattaagatcctggacaaggagaaggtcctcaggcacaagatggttgagcagatcaagcgggagatctcgacgatgaagctgatcaagcaccctaacgtcgtccgcatatacgaggtgatgggaagtaaaacaaagatctacattgtgttagaattcgctaccggtggcgagctctttgatacaattgttaaccatggtcgaatgagggaagacgaggcaaggaggtacttccaacagttaatcaatgcagttgattattgtcatagcaggggtgtgtaccaccgggatttaaaagtctctgactttgggctcagcgcgctatctcagcaaatcaaggatgatggactgctgcacacaacttgtgggactccaaactatgttgcaccagaggtccttgaagatcaaggctacgatggagcaatggctgatctgtggtcatgtggagttatcctgtttgttctgctagcagggtatttgccgtttgaggattctaatctcatgactttgtataagaaaatatcaaatgcagaatttacatttccaccatggacatcttttcctgccaagaggttgttaacaagaatccttgatccaaatccaatgacgagaataacaatcccagaaatattagaggatgagtggttcaaaaagggctacaagcgcccagaatttgatgaacaatatgacaccacattggatgatgtggatgccgtcttcaatgattcagaagagcaccatgtgacagaaaagaaagaagaagaaccagtagctctgaacgcattcgaactgatttcgatgtcagcgggcctaaaccttggaaacttatttgactcagagcaggagttcaaaagagaaacaaggtttacatcaaaatgtccccccaaagaaattgtccgcaagatcgaggaagctgcaaaacctctaggatttgatgttcagaagaaaaattacaagttgaggctcgaaaaggtaaaggcagggaggaagggaaacctcaacgttgctactgagatactgcaagttgcgccctctctccacatggtagaagtccgaaaagcaaagggtgacactctggaatttcataagttctacaagaacctttccaagaccttgaaggacgtcgtctggaaatccgacgatcttcaaacgcaacatgcttcttagcagaacctcagagaggaggaatggcaaactattttgtgcaccatcctttcaagcaaactattctgcatgtaacggtgggtgcccaggaaattgcgctggtgctccaccatcgttgtatatgctgcgtcttgagttgcttgctgtagctgaagggaagttcattcagtaggttttgagtatgagttttgtatatccgtatatgcctatgactatgagccgtgctggaacactatgatcagaaactgcgaaatggagcccagaatgttcttgccatcttgctccagttctcagcaccgggcttaacttgccttgcattttttgaagaagaaaaa

SEQ ID NO: 45087 - DNA, 2092 bp, Zea Mays
aaaatgcttggctggcagcttgtccatttcccgtcagcctgcctgtgcagtgcagtccatgtggtggatgcagttggaaatccattcattccttcgtcccccacctctcgcttcatctccatctcctcctcatgctgctgctgccactgccactataatagcccagctagctagaggtcacccatcaagctgcccattccctcgtgacagcagctgcctgcctgctccgaggcgccacccagctcttcctcgccccagcagccgcttcccgagatccttttcactttcaccaccagggtacatagaccgcatctgcggtgctctgcgctcctcggactcgatttgttggttcatccatccagctgccgccggacgtcgatcagctacctatcttgaaaccacaggaccgagcgtggaaactcccggaccggacattccattttccattccgaagggggggtgagaaggcggggaatgagtacaaccaaggtgaagagacgtgtgggcaagtatgagctcggccggaccataggcgagggcaccttcgcgaaggtcaggttcgcgagggacacggtcaccggcgaggccgtggccattaagatcctggacaaggagaaggtcctcaggcacaagatggttgagcagatcaagcgggagatctcgacgatgaagctgatcaagcaccctaacgtcgtccgcatatacgaggtgatgggaagtaaaacaaagatctacattgtgttagaattcgctaccggtggcgagctctttgatacaattgttaaccatggtcgaatgagggaagacgaggcaaggaggtacttccaacagttaatcaatgcagttgattattgtcatagcaggggtgtgtaccaccgggatttaaaacctgaaaatttgctgcttgattcatatggtaacctgaaggtctctgactttgggctcagcgcgctatctcagcaaatcaaggatgatggactgctgcacacaacttgtgggactccaaactatgttgcaccagaggtccttgaagatcaaggctacgatggagcaatggctgatctgtggtcatgtggagttatcctgtttgttctgctagcagggtatttgccgtttgaggattctaatctcatgactttgtataagaaaatatcaaatgcagaatttacatttccaccatggacatcttttcctgccaagagagaataacaatcccagaaatattagaggatgagtggttcaaaaagggctacaagcgcccagaatttgatgaacaatatgacaccacattggatgatgtggatgccgtcttcaatgattcagaagagcaccatgtgacagaaaagaaagaagaagaaccagtagctctgaacgcattcgaactgatttcgatgtcagcgggcctaaaccttggaaacttatttgactcagagcaggagttcaaaagagaaacaaggtttacatcaaaatgtccccccaaagaaattgtccgcaagatcgaggaagctgcaaaacctctaggatttgatgttcagaagaaaaattacaagttgaggctcgaaaaggtaaaggcagggaggaagggaaacctcaacgttgctactgagatactgcaagttgcgccctctctccacatggtagaagtccgaaaagcaaagggtgacactctggaatttcataagttctacaagaacctttccaagaccttgaaggacgtcgtctggaaatccgacgatcttcaaacgcaacatgcttcttagcagaacctcagagaggaggaatggcaaactattttgtgcaccatcctttcaagcaaactattctgcatgtaacggtgggtgcccaggaaattgcgctggtgctccaccatcgttgtatatgctgcgtcttgagttgcttgctgtagctgaagggaagttcattcagtaggttttgagtatgagttttgtatatccgtatatgcctatgactatgagccgtgctggaacactatgatcagaaactgcgaaatggagcccagaatgttcttgccatcttgctccagttctcagcaccgggcttaacttgccttgcattttttgaagaagaaaaa

SEQ ID NO: 45088 - DNA, 1938 bp, Zea Mays
ccccggtgaactggcaacgtcgtcgactcgactcggcgagcaaacctgcgtgcgcagactctcctccgtatagcatacgtgcgtgcatcagctgcctgcctgctccgaggcgccacccagctcttcctcgccccagcagccgcttcccgagatccttttcactttcaccaccagggtacatagaccgcatctgcggtgctctgcgctcctcggactcgatttgttggttcatccatccatgaaaccacaggaccgagcgtggaaactcccggaccggacattccattttccattccgaagggggggtgagaaggcggggaatgagtacaaccaaggtgaagagacgtgtgggcaagtatgagctcggccggaccataggcgagggcaccttcgcgaaggtcaggttcgcgagggacacggtcaccggcgaggccgtggccattaagatcctggacaaggagaaggtcctcaggcacaagatggttgagcagatcaagcgggagatctcgacgatgaagctgatcaagcaccctaacgtcgtccgcatatacgaggtgatgggaagtaaaacaaagatctacattgtgttagaattcgctaccggtggcgagctctttgatacaattgttaaccatggtcgaatgagggaagacgaggcaaggaggtacttccaacagttaatcaatgcagttgattattgtcatagcaggggtgtgtaccaccgggatttaaaacctgaaaatttgctgcttgattcatatggtaacctgaaggtctctgactttgggctcagcgcgctatctcagcaaatcaaggatgatggactgctgcacacaacttgtgggactccaaactatgttgcaccagaggtccttgaagatcaaggctacgatggagcaatggctgatctgtggtcatgtggagttatcctgtttgttctgctagcagggtatttgccgtttgaggattctaatctcatgactttgtataagaaaatatcaaatgcagaatttacatttccaccatggacatcttttcctgccaagagagaataacaatcccagaaatattagaggatgagtggttcaaaaagggctacaagcgcccagaatttgatgaacaatatgacaccacattggatgatgtggatgccgtcttcaatgattcagaagagcaccatgtgacagaaaagaaagaagaagaaccagtagctctgaacgcattcgaactgatttcgatgtcagcgggcctaaaccttggaaacttatttgactcagagcaggagttcaaaagagaaacaaggtttacatcaaaatgtccccccaaagaaattgtccgcaagatcgaggaagctgcaaaacctctaggatttgatgttcagaagaaaaattacaagttgaggctcgaaaaggtaaaggcagggaggaagggaaacctcaacgttgctactgagatactgcaagttgcgccctctctccacatggtagaagtccgaaaagcaaagggtgacactctggaatttcataagttctacaagaacctttccaagaccttgaaggacgtcgtctggaaatccgacgatcttcaaacgcaacatgcttcttagcagaacctcagagaggaggaatggcaaactattttgtgcaccatcctttcaagcaaactattctgcatgtaacggtgggtgcccaggaaattgcgctggtgctccaccatcgttgtatatgctgcgtcttgagttgcttgctgtagctgaagggaagttcattcagtaggttttgagtatgagttttgtatatccgtatatgcctatgactatgagccgtgctggaacactatgatcagaaactgcgaaatggagcccagaatgttcttgccatcttgctccagttctcagcaccgggcttaacttgccttgcattttttgaagaagaaaaa

SEQ ID NO: 45089 - DNA, 1970 bp, Zea Mays
ccccggtgaactggcaacgtcgtcgactcgactcggcgagcaaacctgcgtgcgcagactctcctccgtatagcatacgtgcgtgcatcagctgcctgcctgctccgaggcgccacccagctcttcctcgccccagcagccgcttcccgagatccttttcactttcaccaccagggtacatagaccgcatctgcggtgctctgcgctcctcggactcgatttgttggttcatccatccagctgccgccggacgtcgatcagctacctatcttgaaaccacaggaccgagcgtggaaactcccggaccggacattccattttccattccgaagggggggtgagaaggcggggaatgagtacaaccaaggtgaagagacgtgtgggcaagtatgagctcggccggaccataggcgagggcaccttcgcgaaggtcaggttcgcgagggacacggtcaccggcgaggccgtggccattaagatcctggacaaggagaaggtcctcaggcacaagatggttgagcagatcaagcgggagatctcgacgatgaagctgatcaagcaccctaacgtcgtccgcatatacgaggtgatgggaagtaaaacaaagatctacattgtgttagaattcgctaccggtggcgagctctttgatacaattgttaaccatggtcgaatgagggaagacgaggcaaggaggtacttccaacagttaatcaatgcagttgattattgtcatagcaggggtgtgtaccaccgggatttaaaacctgaaaatttgctgcttgattcatatggtaacctgaaggtctctgactttgggctcagcgcgctatctcagcaaatcaaggatgatggactgctgcacacaacttgtgggactccaaactatgttgcaccagaggtccttgaagatcaaggctacgatggagcaatggctgatctgtggtcatgtggagttatcctgtttgttctgctagcagggtatttgccgtttgaggattctaatctcatgactttgtataagaaaatatcaaatgcagaatttacatttccaccatggacatcttttcctgccaagagagaataacaatcccagaaatattagaggatgagtggttcaaaaagggctacaagcgcccagaatttgatgaacaatatgacaccacattggatgatgtggatgccgtcttcaatgattcagaagagcaccatgtgacagaaaagaaagaagaagaaccagtagctctgaacgcattcgaactgatttcgatgtcagcgggcctaaaccttggaaacttatttgactcagagcaggagttcaaaagagaaacaaggtttacatcaaaatgtccccccaaagaaattgtccgcaagatcgaggaagctgcaaaacctctaggatttgatgttcagaagaaaaattacaagttgaggctcgaaaaggtaaaggcagggaggaagggaaacctcaacgttgctactgagatactgcaagttgcgccctctctccacatggtagaagtccgaaaagcaaagggtgacactctggaatttcataagttctacaagaacctttccaagaccttgaaggacgtcgtctggaaatccgacgatcttcaaacgcaacatgcttcttagcagaacctcagagaggaggaatggcaaactattttgtgcaccatcctttcaagcaaactattctgcatgtaacggtgggtgcccaggaaattgcgctggtgctccaccatcgttgtatatgctgcgtcttgagttgcttgctgtagctgaagggaagttcattcagtaggttttgagtatgagttttgtatatccgtatatgcctatgactatgagccgtgctggaacactatgatcagaaactgcgaaatggagcccagaatgttcttgccatcttgctccagttctcagcaccgggcttaacttgccttgcattttttgaagaagaaaaa

SEQ ID NO: 45090 - DNA, 2787 bp, Zea Mays
ttttctttccctccacctcatccgaacgagttctcatcttcgattcctcttcgccgctgcagctccagaatggctgctaaacccttcctctcaatccctgccgcggcggtggctcgccttccctttcgcctcctctgctcggcagctccacctccccgcctcctccctttcttcccccagccattcctgctccaaagacgcagcctttccgcctccaccgtacccgccggcaggcgtagcagtcctccggccccggtcatcagcgagggcagggatgacgaggacgccgccgtcggccggcctgtatgtcctggatgcggggtctttatgcaggatgaggatcccaacctccctggcttcttcaagaacccctcccgcagctcccaggacgagacgggaggaagtggagaagtgctcctggccgccgatacggatgcgtttcttgaagaagaagatgataatgatgatcggagggtggcggatgacgcgtcggatgctgaactggagggtctggacagcgatatcgatgagttccttgaagaattcgataagggggacgaagatgacgggttaccggtgaaaagcgccactgataccgatgctttcgccagcgattgggactctgattgggaggagatggaagaagacgaggatgagaaatggaggaaagaactggatggtttcaccctgccgggtgtcgggtacgggaacatcactgaggaaacgatcgagaggatgaagaaagagaagctgtccaagtcccagaggaagcgccaggcgagggaggccaaaagggctgaggccgaggaggattcagccctcgtctgtagccggtgccactcgctgaggaactatgggcttgtgaagaatgacaaggctgagaacctgatcccggactttgatttcgatcggttcatctcgtctcggctcatgaagcggtcagctggtaccccggtcatcgtcatggtggtggactgcgcagacttcgatgggtcgtttcctaagcgagctgccaagtcattgttcgaggcacttgaaggaaggagaaattcaaaggcgagtgaaacgccgagacttgttcttgttggtacaaaggtggatttgcttccatggcagcaaatgggagtgcggttggataagtgggtccgtggccgtgctaaggctttgggagcacccaagctagatggtgtgttcttgatcagcgtccacagagatttggctgttagaaacctaattacatacatcaaggagtcagcaggacctcgtagcaatgtttgggtgattggtgcacagaatgctgggaaatctacgctgatcaatgcttttgcaaagaaacagggtgttaagatcacaagattgactgaagctgctgtcccgggaacaacattaggcatattgagggtaacaggtgttttacctgcaaaggcaaagatgtatgacactcctggcctgttgcatccttacataatggcaatgagattaaataatgaggaacggaagatggttgaaataaggaaagaaatgcggccacgatccttcagggtgaaagtaggacaatccgtacatattggaggcttggcacggctggatgtgctaaaatcatcagtgcaaactatctatataactgtttgggcatcttccaatgttcccctccatcttggaaagactgaaaattctgatgaattgcgagacaaacattttggcatcagacttcagccaccaattggcccagagcgagtcgatgaattgggtcactggacaggaagatctattgaggtgtctggggcaagctgggatgtcaacagtatggacattgctgtttctggccttggatggtactccttgggccttaaaggcactgccactgtttccttatggacatttgagggcattggtgtgacagaacgtgatgcaatgattctgcaccgagcccagtttctcgaaaggcctggattttggttacctattgccattgctaatgctataggtgaggagacaagaaagaagaacgaaaagagaaaggctgagcaaagaagaagagaggaagaagagctccttttggaagaaatggtttagtgatgattctgtagcccagcccacaaagttaggattctgtttctcttgtcaacacgggcttttgtttatcctagttcttgatgtcttttgacataggctgcatcctgtgattttttttcttagcttatgtatatctcaaattttctgtgtatttgttttccatgtgttttacaaccagttttgtcagttctgcttgcatcttacagattcaattcctgcaacttgaggaaaattgatatcctagattacctattcagctgtgtgcaaaatgggactgtttagacatgcagagcagccaatttattatgtactattttttgaattgaaaacaatttattatgcactaaatgttttgccttcttatttgaactccaaaggaaggtctctctttacatggttgcagcagcaagcgctcacatgttagcatctgttttcaggttgcaatggagatgtttccatggagcattattaaaaaaagtagtgtgtagagtgttgaaatacttatagcactttgttgatggaatgaagatcaagatggaagcataaatgataaggcaggggctgtagggagccgaaatgtcctgagtgattttctggtttgatatgatagcatgagggtttgtgcagattatatgacaccataaggatgtaaagtgctgtattgctgattttttaggctgtaatctttgtccacttactttcatagtgcta

SEQ ID NO: 45091 - DNA, 2434 bp, Zea Mays
cgtagtttggatcgaatcgctaggaaatactgtagccggcagacaatttcacatgtattttctttccctccacctcatccgaacgagttctcatcttcgattcctcttcgccgctgcagctccagaatggctgctaaacccttcctctcaatccctgccgcggcggtggctcgccttccctttcgcctcctctgctcggcagctccacctccccgcctcctccctttcttcccccagccattcctgctccaaagacgcagcctttccgcctccaccgtacccgccggcaggcgtagcagtcctccggccccggtcatcagcgagggcagggatgacgaggacgccgccgtcggccggcctgtatgtcctggatgcggggtctttatgcaggatgaggatcccaacctccctggcttcttcaagaacccctcccgcagctcccaggacgagacgggaggaagtggagaagtgctcctggccgccgatacggatgcgtttcttgaagaagaagatgataatgatgatcggagggtggcggatgacgcgtcggatgctgaactggagggtctggacagcgatatcgatgagttccttgaagaattcgataagggggacgaagatgacgggttaccggtgaaaagcgccactgataccgatgctttcgccagcgattgggactctgattgggaggagatggaagaagacgaggatgagaaatggaggaaagaactggatggtttcaccctgccgggtgtcgggtacgggaacatcactgaggaaacgatcgagaggatgaagaaagagaagctgtccaagtcccagaggaagcgccaggcgagggaggccaaaagggctgaggccgaggaggattcagccctcgtctgtagccggtgccactcgctgaggaactatgggcttgtgaagaatgacaaggctgagaacctgatcccggactttgatttcgatcggttcatctcgtctcggctcatgaagcggtcagctggtaccccggtcatcgtcatggtggtggactgcgcagacttcgatgggtcgtttcctaagcgagctgccaagtcattgttcgaggcacttgaaggaaggagaaattcaaaggcgagtgaaacgccgagacttgttcttgttggtacaaaggtggatttgcttccatggcagcaaatgggagtgcggttggataagtgggtccgtggccgtgctaaggctttgggagcacccaagctagatggtgtgttcttgatcagcgtccacagagatttggctgttagaaacctaattacatacatcaaggagtcagcaggacctcgtagcaatgtttgggtgattggtgcacagaatgctgggaaatctacgctgatcaatgcttttgcaaagaaacagggtgttaagatcacaagattgactgaagctgctgtcccgggaacaacattaggcatattgagggtaacaggtgttttacctgcaaaggcaaagatgtatgacactcctggcctgttgcatccttacataatggcaatgagattaaataatgaggaacggaagatggttgaaataaggaaagaaatgcggccacgatccttcagggtgaaagtaggacaatccgtacatattggaggcttggcacggctggatgtgctaaaatcatcagtgcaaactatctatataactgtttgggcatcttccaatgttcccctccatcttggaaagactgaaaattctgatgaattgcgagacaaacattttggcatcagacttcagccaccaattggcccagagcgagtcgatgaattgggtcactggacaggaagatctattgaggtgtctggggcaagctgggatgtcaacagtatggacattgctgtttctggccttggatggtactccttgggccttaaaggcactgccactgtttccttatggacatttgagggcattggtgtgacagaacgtgatgcaatgattctgcaccgagcccagtttctcgaaaggcctggattttggttacctattgccattgctaatgctataggtgaggagacaagaaagaagaacgaaaagagaaaggctgagcaaagaagaagagaggaagaagagctccttttggaagaaatggtttagtgatgattctgtagcccagcccacaaagttgcaatggagatgtttccatggagcattattaaaaaaagtagtgtgtagagtgttgaaatacttatagcactttgttgatggaatgaagatcaagatggaagcataaatgataaggcaggggctgtagggagccgaaatgtcctgagtgattttctggtttgatatgatagcatgagggtttgtgcagattatatgacaccataaggatgtaaagtgctgtattgctgattttttaggctgtaatctttgtccacttactttcatagtgcta

SEQ ID NO: 45092 - DNA, 2158 bp, Zea Mays
ttttctttccctccacctcatccgaacgagttctcatcttcgattcctcttcgccgctgcagctccagaatggctgctaaacccttcctctcaatccctgccgcggcggtggctcgccttccctttcgcctcctctgctcggcagctccacctccccgcctcctccctttcttcccccagccattcctgctccaaagacgcagcctttccgcctccaccgtacccgccggcaggcgtagcagtcctccggccccggtcatcagcgagggcagggatgacgaggacgccgccgtcggccggcctgtatgtcctggatgcggggtctttatgcaggatgaggatcccaacctccctggcttcttcaagaacccctcccgcagctcccaggacgagacgggaggaagtggagaagtgctcctggccgccgatacggatgcgtttcttgaagaagaagatgataatgatgatcggagggtggcggatgacgcgtcggatgctgaactggagggtctggacagcgatatcgatgagttccttgaagaattcgataagggggacgaagatgacgggttaccggtgaaaagcgccactgataccgatgctttcgccagcgattgggactctgattgggaggagatggaagaagacgaggatgagaaatggaggaaagaactggatggtttcaccctgccgggtgtcgggtacgggaacatcactgaggaaacgatcgagaggatgaagaaagagaagctgtccaagtcccagaggaagcgccaggcgagggaggccaaaagggctgaggccgaggaggattcagccctcgtctgtagccggtgccactcgctgaggaactatgggcttgtgaagaatgacaaggctgagaacctgatcccggactttgatttcgatcggttcatctcgtctcggctcatgaagcggtcagctggtaccccggtcatcgtcatggtggtggactgcgcagacttcgatgggtcgtttcctaagcgagctgccaagtcattgttcgaggcacttgaaggaaggagaaattcaaaggcgagtgaaacgccgagacttgttcttgttggtacaaaggtggatttgcttccatggcagcaaatgggagtgcggttggataagtgggtccgtggccgtgctaaggctttgggagcacccaagctagatggtgtgttcttgatcagcgtccacagagatttggctgttagaaacctaattacatacatcaaggagtcagcaggacctcgtagcaatgtttgggtgattggtgcacagaatgctgggaaatctacgctgatcaatgcttttgcaaagaaacagggtgttaagatcacaagattgactgaagctgctgtcccgggaacaacattaggcatattgagggtaacaggtgttttacctgcaaaggcaaagatgtatgacactcctggcctgttgcatccttacataatggcaatgagattaaataatgaggaacggaagatggttgaaataaggaaagaaatgcggccacgatccttcagggtgaaagtaggacaatccgtacatattggaggcttggcacggctggatgtgctaaaatcatcagtgcaaactatctatataactgtttgggcatcttccaatgttcccctccatcttggaaagactgaaaattctgatgaattgcgagacaaacattttggcatcagacttcagccaccaattggcccagagcgagtcgatgaattgggtcactggacaggaagatctattgaggtgtctggggcaagctgggatgtcaacagtatggacattgctgtttctggccttggatggtactccttgggccttaaaggcactgccactgtttccttatggacatttgagggcattggtgtgacagaacgtgatgcaatgattctgcaccgagcccagtttctcgaaaggcctggattttggttacctattgccattgctaatgctataggtgaggagacaagaaagaagaacgaaaagagaaaggctgagcaaagaagaagagaggaagaagagctccttttggaagaaatggtttagtgatgattctgtagcccagcccacaaaatagcactttgttgatggaatgaagatcaagatggaagcataaatgataaggcag

SEQ ID NO: 45093 - DNA, 2268 bp, Zea Mays
ttttctttccctccacctcatccgaacgagttctcatcttcgattcctcttcgccgctgcagctccagaatggctgctaaacccttcctctcaatccctgccgcggcggtggctcgccttccctttcgcctcctctgctcggcagctccacctccccgcctcctccctttcttcccccagccattcctgctccaaagacgcagcctttccgcctccaccgtacccgccggcaggcgtagcagtcctccggccccggtcatcagcgagggcagggatgacgaggacgccgccgtcggccggcctgtatgtcctggatgcggggtctttatgcaggatgaggatcccaacctccctggcttcttcaagaacccctcccgcagctcccaggacgagacgggaggaagtggagaagtgctcctggccgccgatacggatgcgtttcttgaagaagaagatgataatgatgatcggagggtggcggatgacgcgtcggatgctgaactggagggtctggacagcgatatcgatgagttccttgaagaattcgataagggggacgaagatgacgggttaccggtgaaaagcgccactgataccgatgctttcgccagcgattgggactctgattgggaggagatggaagaagacgaggatgagaaatggaggaaagaactggatggtttcaccctgccgggtgtcgggtacgggaacatcactgaggaaacgatcgagaggatgaagaaagagaagctgtccaagtcccagaggaagcgccaggcgagggaggccaaaagggctgaggccgaggaggattcagccctcgtctgtagccggtgccactcgctgaggaactatgggcttgtgaagaatgacaaggctgagaacctgatcccggactttgatttcgatcggttcatctcgtctcggctcatgaagcggtcagctggtaccccggtcatcgtcatggtggtggactgcgcagacttcgatgggtcgtttcctaagcgagctgccaagtcattgttcgaggcacttgaaggaaggagaaattcaaaggcgagtgaaacgccgagacttgttcttgttggtacaaaggtggatttgcttccatggcagcaaatgggagtgcggttggataagtgggtccgtggccgtgctaaggctttgggagcacccaagctagatggtgtgttcttgatcagcgtccacagagatttggctgttagaaacctaattacatacatcaaggagtcagcaggacctcgtagcaatgtttgggtgattggtgcacagaatgctgggaaatctacgctgatcaatgcttttgcaaagaaacagggtgttaagatcacaagattgactgaagctgctgtcccgggaacaacattaggcatattgagggtaacaggtgttttacctgcaaaggcaaagatgtatgacactcctggcctgttgcatccttacataatggcaatgagattaaataatgaggaacggaagatggttgaaataaggaaagaaatgcggccacgatccttcagggtgaaagtaggacaatccgtacatattggaggcttggcacggctggatgtgctaaaatcatcagtgcaaactatctatataactgtttgggcatcttccaatgttcccctccatcttggaaagactgaaaattctgatgaattgcgagacaaacattttggcatcagacttcagccaccaattggcccagagcgagtcgatgaattgggtcactggacaggaagatctattgaggtgtctggggcaagctgggatgtcaacagtatggacattgctgtttctggccttggatggtactccttgggccttaaaggcactgccactgtttccttatggacatttgagggcattggtgtgacagaacgtgatgcaatgattctgcaccgagcccagtttctcgaaaggcctggattttggttacctattgccattgctaatgctataggtgaggagacaagaaagaagaacgaaaagagaaaggctgagcaaagaagaagagaggaagaagagctccttttggaagaaatggtttagtgatgattctgtagcccagcccacaaagttgcaatggagatgtttccatggagcattattaaaaaaagtagtgtgtagagtgttgaaatacttgtaagttggaacctgcattgctactggctaatgattttgcactgatagcactttgttgatggaatgaagatcaagatggaagcataaatgataaggcag

SEQ ID NO: 45094 - DNA, 727 bp, Zea Mays
ctctagtgtcactacgaagataatcttaaatgtggaacccagacgcaatcgtcttcaactcctggcagcattacggcactcccagttactggatgcagacgcttttccgcgagtctagtggtgctatgttccatccaacgacaatcagctccagctactcaggttcacttgcagcgtctgcgattacctggcaggactccgagaacagcttcctaagagtaaaggtcataaacttcgggtcagatgctgtgaccctgacaatctccacaagtgggctccaggccagtatcaacgctctgggatcaaccgccactgttctcacatcagcagatgtgatggatgaaaactccttcagcaacccaaccaaggttgtgccggtaaagagcgatctgagcaatgctgcagagcagatgcaggtcacgctggctcctcgctccttcagctcgttcgatctcgccctggctcagtccaagcttgtagcggagatgtgagctaggctggtacactagtatacaatacaacgtgtgaagtgtggtacacaaataccagcaaccacaggggttgccaagctgttgttagcatcttgaacacatggctttgtattgtgtataatgacatgatgctgatactaatctctattatataaagcactagtttctatgttgtcgtgctcccacgtatttaaatgataaaaaagctaaaattatacacaaatggatattcaaac

SEQ ID NO: 45095 - DNA, 1138 bp, Zea Mays
caacttcacatgcagagatgatgcttggctttagttttacattcacatttacctggacacttcggggatgcttggcttttatagatttaggtaactacctcaagttctacaatgctataagacaggcctatccagacattcaaatgatttcaaactgcgatggttcatctacaccacttgatcatcctgctgatttatacgacttccatgtctataatgattctaagactttgttcaacatgaagagcacatttgacagaacatctcgtagtggacccaaggcttttgtaagtgagtacgctgtttggagaggtgatgcaggtagaggaagtcttcttgcttcattggcagaagctgctttccttactggactggagaagaatagtgacattgtttccatggcaagttacgcgccactattcgtaaacgacaatgaccagacgtggaacccagacgcaatcgtcttcaactcctggcagcattacggcactcccagttactggatgcagacgcttttccgcgagtctagtggtgctatgttccatccaacgacaatcagctccagctactcaggttcacttgcagcgtctgcgattacctggcaggactccgagaacagcttcctaagagtaaaggtcataaacttcgggtcagatgctgtgaccctgacaatctccacaagtgggctccaggccagtatcaacgctctgggatcaaccgccactgttctcacatcagcagatgtgatggatgaaaactccttcagcaacccaaccaaggttgtgccggtaaagagcgatctgagcaatgctgcagagcagatgcaggtcacgctggctcctcgctccttcagctcgttcgatctcgccctggctcagtccaagcttgtagcggagatgtgagctaggctggtacactagtatacaatacaacgtgtgaagtgtggtacacaaataccagcaaccacaggggttgccaagctgttgttagcatcttgaacacatggctttgtattgtgtataatgacatgatgctgatactaatctctattatataaagcactagtttctatgttgtcgtgctcccacgtatttaaatgataaaaaagctaaaattatacacaaatggatattcaaac

SEQ ID NO: 45096 - DNA, 1218 bp, Zea Mays
cttgatcctctactttttgattcaggatgtattggacagtatagaatttgcaagggggagtgcaaattcaacatggggctctgttagggctgcaatgggccaccctgaaccattcccagtgaaatatgttgcaataggaaatgaagattgtgggaaaaaattttaccgcggtaactacctcaagttctacaatgctataagacaggcctatccagacattcaaatgatttcaaactgcgatggttcatctacaccacttgatcatcctgctgatttatacgacttccatgtctataatgattctaagactttgttcaacatgaagagcacatttgacagaacatctcgtagtggacccaaggcttttgtaagtgagtacgctgtttggagaggtgatgcaggtagaggaagtcttcttgcttcattggcagaagctgctttccttactggactggagaagaatagtgacattgtttccatggcaagttacgcgccactattcgtaaacgacaatgaccagacgtggaacccagacgcaatcgtcttcaactcctggcagcattacggcactcccagttactggatgcagacgcttttccgcgagtctagtggtgctatgttccatccaacgacaatcagctccagctactcaggttcacttgcagcgtctgcgattacctggcaggactccgagaacagcttcctaagagtaaaggtcataaacttcgggtcagatgctgtgaccctgacaatctccacaagtgggctccaggccagtatcaacgctctgggatcaaccgccactgttctcacatcagcagatgtgatggatgaaaactccttcagcaacccaaccaaggttgtgccggtaaagagcgatctgagcaatgctgcagagcagatgcaggtcacgctggctcctcgctccttcagctcgttcgatctcgccctggctcagtccaagcttgtagcggagatgtgagctaggctggtacactagtatacaatacaacgtgtgaagtgtggtacacaaataccagcaaccacaggggttgccaagctgttgttagcatcttgaacacatggctttgtattgtgtataatgacatgatgctgatactaatctctattatataaagcactagtttctatgttgtcgtgctcccacgtatttaaatgataaaaaagctaaaattatacacaaatggatattcaaac

SEQ ID NO: 45097 - DNA, 1830 bp, Zea Mays
attttcaaaagcagagtagcaatagctgtagaggtcgaattaggaattactacagttgatggttttctttggattgttctggtagtgtcacttttcaggttctgatattagccatgtttaagtttcactaacaagctctaacgggttgcaaaatctggcttcagctacagtaacagtttccggcgaatcaaactggataaaagtggagcaaaagttggttgctaaaggaaccaatagaacctcaaggcttcaaataacaactaacaagaaaggagttgtctggtttgatcaagtatcactcatgcctgaagacacatacaagggacatggctttcgcacagaacttatatccatgattttggatttaaaaccacgattcttgagatttcctggaggctgctttgtagaaggtggctggttaagaaatgcctttaggtggagagaatctattggtccatgggaagagagacctggacacttcggggatgtttggcattactggactgatgatggccttggatactatgaatttcttcagcttgcggaggacctgggtactgaaccaatctgggtattcaacaatggagtcagccacaatgatgaagttgatactgttgctattgctccttttgtaaaggatgtattggacagtatagaatttgcaagggggagtgcaaattcaacatggggctctgttagggctgcaatgggccaccctgaaccattcccagtgaaatatgttgcaataggaaatgaagattgtgggaaaaaattttaccgcggtaactacctcaagttctacaatgctataagacaggcctatccagacattcaaatgatttcaaactgcgatggttcatctacaccacttgatcatcctgctgatttatacgacttccatgtctataatgattctaagactttgttcaacatgaagagcacatttgacagaacatctcgtagtggacccaaggcttttgtaagtgagtacgctgtttggagaggtgatgcaggtagaggaagtcttcttgcttcattggcagaagctgctttccttactggactggagaagaatagtgacattgtttccatggcaagttacgcgccactattcgtaaacgacaatgaccagacgtggaacccagacgcaatcgtcttcaactcctggcagcattacggcactcccagttactggatgcagacgcttttccgcgagtctagtggtgctatgttccatccaacgacaatcagctccagctactcaggttcacttgcagcgtctgcgattacctggcaggactccgagaacagcttcctaagagtaaaggtcataaacttcgggtcagatgctgtgaccctgacaatctccacaagtgggctccaggccagtatcaacgctctgggatcaaccgccactgttctcacatcagcagatgtgatggatgaaaactccttcagcaacccaaccaaggttgtgccggtaaagagcgatctgagcaatgctgcagagcagatgcaggtcacgctggctcctcgctccttcagctcgttcgatctcgccctggctcagtccaagcttgtagcggagatgtgagctaggctggtacactagtatacaatacaacgtgtgaagtgtggtacacaaataccagcaaccacaggggttgccaagctgttgttagcatcttgaacacatggctttgtattgtgtataatgacatgatgctgatactaatctctattatataaagcactagtttctatgttgtcgtgctcccacgtatttaaatgataaaaaagctaaaattatacacaaatggatattcaaac

SEQ ID NO: 45098 - DNA, 1912 bp, Zea Mays
ctagcaatgccaattttcaaaagcagagtagcaatagctgtagaggtcgaattaggaattactacagttgatggttttctttggattgttctggtagtgtcacttttcaggttctgatattagccatgtttaagaacatagaagaaggaaaggtctacaatcttgttatgtttgttaagtcaccagaaacaactgacttgacagtttcactaacaagctctaacgggttgcaaaatctggcttcagctacagtaacagtttccggcgaatcaaactggataaaagtggagcaaaagttggttgctaaaggaaccaatagaacctcaaggcttcaaataacaactaacaagaaaggagttgtctggtttgatcaagtatcactcatgcctgaagacacatacaagggacatggctttcgcacagaacttatatccatgattttggatttaaaaccacgattcttgagatttcctggaggctgctttgtagaaggtggctggttaagaaatgcctttaggtggagagaatctattggtccatgggaagagagacctggacacttcggggatgtttggcattactggactgatgatggccttggatactatgaatttcttcagcttgcggaggacctgggtactgaaccaatctgggtattcaacaatggagtcagccacaatgatgaagttgatactgttgctattgctccttttgtaaaggatgtattggacagtatagaatttgcaagggggagtgcaaattcaacatggggctctgttagggctgcaatgggccaccctgaaccattcccagtgaaatatgttgcaataggaaatgaagattgtgggaaaaaattttaccgcggtaactacctcaagttctacaatgctataagacaggcctatccagacattcaaatgatttcaaactgcgatggttcatctacaccacttgatcatcctgctgatttatacgacttccatgtctataatgattctaagactttgttcaacatgaagagcacatttgacagaacatctcgtagtggacccaaggcttttgtaagtgagtacgctgtttggagaggtgatgcaggtagaggaagtcttcttgcttcattggcagaagctgctttccttactggactggagaagaatagtgacattgtttccatggcaagttacgcgccactattcgtaaacgacaatgaccagacgtggaacccagacgcaatcgtcttcaactcctggcagcattacggcactcccagttactggatgcagacgcttttccgcgagtctagtggtgctatgttccatccaacgacaatcagctccagctactcaggttcacttgcagcgtctgcgattacctggcaggactccgagaacagcttcctaagagtaaaggtcataaacttcgggtcagatgctgtgaccctgacaatctccacaagtgggctccaggccagtatcaacgctctgggatcaaccgccactgttctcacatcagcagatgtgatggatgaaaactccttcagcaacccaaccaaggttgtgccggtaaagagcgatctgagcaatgctgcagagcagatgcaggtcacgctggctcctcgctccttcagctcgttcgatctcgccctggctcagtccaagcttgtagcggagatgtgagctaggctggtacactagtatacaatacaacgtgtgaagtgtggtacacaaataccagcaaccacaggggttgccaagctgttgttagcatcttgaacacatggctttgtattgtgtataatgacatgatgctgatactaatctctattatataaagcactagtttctatgttgtcgtgctcccacgtatttaaatgataaaaaagctaaaattatacacaaatggatattcaaac

SEQ ID NO: 45099 - DNA, 2299 bp, Zea Mays
atcctgccttcggaagccactgctaaccgctttctctgcccttctctacctacataagcgcgagggagcacgcctcccggcctctcctcatccaattcctatgccctgcacccgcagacggggagctcgcgtcttccttcggatggtggatgcatgcatgcatggtagacacgccggcccaaccagaattgacaagtggaagcgtatgggtattaccagcaacgacgcggcccctcgtgccgtcctcctccgcttcttgtttctgctctgcataggctgcaaatgcctggcatcagaggtagaggccacccagacggcgaccctcgcggtggacgcctcgccgcagcttgctcggaagatccctgatacactgttcgggatcttctttgaggagatcaaccatgcaggggctggtggcatatgggctgaacttgttagtaacagagggtttgaagctggaggcctccatactccatcaaacattgacccatggtccatcattggagacgactcctctgtatttgtggagaccgatcgcacatcatgtttcagtcgaaacatcgttgctctcaggatggaggtcctttgcgataactgtcctactggtggtgttggtgtttacaacccagggttctggggcatgagtttccggcgaatcaaactggataaaagtggagcaaaagttggttgctaaaggaaccaatagaacctcaaggcttcaaataacaactaacaagaaaggagttgtctggtttgatcaagtatcactcatgcctgaagacacatacaagggacatggctttcgcacagaacttatatccatgattttggatttaaaaccacgattcttgagatttcctggaggctgctttgtagaaggtggctggttaagaaatgcctttaggtggagagaatctattggtccatgggaagagagacctggacacttcggggatgtttggcattactggactgatgatggccttggatactatgaatttcttcagcttgcggaggacctgggtactgaaccaatctgggtattcaacaatggagtcagccacaatgatgaagttgatactgttgctattgctccttttgtaaaggatgtattggacagtatagaatttgcaagggggagtgcaaattcaacatggggctctgttagggctgcaatgggccaccctgaaccattcccagtgaaatatgttgcaataggaaatgaagattgtgggaaaaaattttaccgcggtaactacctcaagttctacaatgctataagacaggcctatccagacattcaaatgatttcaaactgcgatggttcatctacaccacttgatcatcctgctgatttatacgacttccatgtctataatgattctaagactttgttcaacatgaagagcacatttgacagaacatctcgtagtggacccaaggcttttgtaagtgagtacgctgtttggagaggtgatgcaggtagaggaagtcttcttgcttcattggcagaagctgctttccttactggactggagaagaatagtgacattgtttccatggcaagttacgcgccactattcgtaaacgacaatgaccagacgtggaacccagacgcaatcgtcttcaactcctggcagcattacggcactcccagttactggatgcagacgcttttccgcgagtctagtggtgctatgttccatccaacgacaatcagctccagctactcaggttcacttgcagcgtctgcgattacctggcaggactccgagaacagcttcctaagagtaaaggtcataaacttcgggtcagatgctgtgaccctgacaatctccacaagtgggctccaggccagtatcaacgctctgggatcaaccgccactgttctcacatcagcagatgtgatggatgaaaactccttcagcaacccaaccaaggttgtgccggtaaagagcgatctgagcaatgctgcagagcagatgcaggtcacgctggctcctcgctccttcagctcgttcgatctcgccctggctcagtccaagcttgtagcggagatgtgagctaggctggtacactagtatacaatacaacgtgtgaagtgtggtacacaaataccagcaaccacaggggttgccaagctgttgttagcatcttgaacacatggctttgtattgtgtataatgacatgatgctgatactaatctctattatataaagcactagtttctatgttgtcgtgctcccacgtatttaaatgataaaaaagctaaaattatacacaaatggatattcaaac

SEQ ID NO: 45100 - DNA, 2554 bp, Zea Mays
gcgcgctccggcaagcaactgcggccgtgccgtgccgcgccgcgacatgggcgctggccgtcccgtcccgtgccggttcgtcatcctgccttcggaagccactgctaaccgctttctctgcccttctctacctacataagcgcgagggagcacgcctcccggcctctcctcatccaattcctatgccctgcacccgcagacggggagctcgcgtcttccttcggatggtggatgcatgcatgcatgacacgccggcccaaccagaattgacaagtggaagcgtatgggtattaccagcaacgacgcggcccctcgtgccgtcctcctccgcttcttgtttctgctctgcataggctgcaaatgcctggcatcagaggtagaggccacccagacggcgaccctcgcggtggacgcctcgccgcagcttgctcggaagatccctgatacactgttcgggatcttctttgagatcaaccatgcaggggctggtggcatatgggctgaacttgttagtaacagagggtttgaagctggaggcctccatactccatcaaacattgacccatggtccatcattggagacgactcctctgtatttgtggagaccgatcgcacatcatgtttcagtcgaaacatcgttgctctcaggatggaggtcctttgcgataactgtcctactggtggtgttggtgtttacaacccagggttctggggcatgaacatagaagaaggaaaggtctacaatcttgttatgtttgttaagtcaccagaaacaactgacttgacagtttcactaacaagctctaacgggttgcaaaatctggcttcagctacagtaacagtttccggcgaatcaaactggataaaagtggagcaaaagttggttgctaaaggaaccaatagaacctcaaggcttcaaataacaactaacaagaaaggagttgtctggtttgatcaagtatcactcatgcctgaagacacatacaagggacatggctttcgcacagaacttatatccatgattttggatttaaaaccacgattcttgagatttcctggaggctgctttgtagaaggtggctggttaagaaatgcctttaggtggagagaatctattggtccatgggaagagagacctggacacttcggggatgtttggcattactggactgatgatggccttggatactatgaatttcttcagcttgcggaggacctgggtactgaaccaatctgggtattcaacaatggagtcagccacaatgatgaagttgatactgttgctattgctccttttgtaaagcttcttcactatgttgtctttctacaggatgtattggacagtatagaatttgcaagggggagtgcaaattcaacatggggctctgttagggctgcaatgggccaccctgaaccattcccagtgaaatatgttgcaataggaaatgaagattgtgggaaaaaattttaccgcggtaactacctcaagttctacaatgctataagacaggcctatccagacattcaaatgatttcaaactgcgatggttcatctacaccacttgatcatcctgctgatttatacgacttccatgtctataatgattctaagactttgttcaacatgaagagcacatttgacagaacatctcgtagtggacccaaggcttttgtaagtgagtacgctgtttggagaggtgatgcaggtagaggaagtcttcttgcttcattggcagaagctgctttccttactggactggagaagaataggtgatctctcgtttgaaatcattggttctagtgacattgtttccatggcaagttacgcgccactattcgtaaacgacaatgaccagacgtggaacccagacgcaatcgtcttcaactcctggcagcattacggcactcccagttactggatgcagacgcttttccgcgagtctagtggtgctatgttccatccaacgacaatcagctccagctactcaggttcacttgcagcgtctgcgattacctggcaggactccgagaacagcttcctaagagtaaaggtcataaacttcgggtcagatgctgtgaccctgacaatctccacaagtgggctccaggccagtatcaacgctctgggatcaaccgccactgttctcacatcagcagatgtgatggatgaaaactccttcagcaacccaaccaaggttgtgccggtaaagagcgatctgagcaatgctgcagagcagatgcaggtcacgctggctcctcgctccttcagctcgttcgatctcgccctggctcagtccaagcttgtagcggagatgtgagctaggctggtacactagtatacaatacaacgtgtgaagtgtggtacacaaataccagcaaccacaggggttgccaagctgttgttagcatcttgaacacatggctttgtattgtgtataatgacatgatgctgatactaatctctattatataaagcactagtttctatgttgtcgtgctcccacgtatttaaatgataaaaaagctaaaattatacacaaatggatattcaaac

SEQ ID NO: 45101 - DNA, 2450 bp, Zea Mays
cgggccccacgttcccgtgcgccgtggccctgcgcgggcggtaggcaggacagccaccgccgaacgaagtggcgcgctccggcaagcaactgcggccgtgccgtgccgcgccgcgacatgggcgctggccgtcccgtcccgtgccgacggggagctcgcgtcttccttcggatggtggatgcatgcatgcatggtagacacgccggcccaaccagaattgacaagtggaagcgtatgggtattaccagcaacgacgcggcccctcgtgccgtcctcctccgcttcttgtttctgctctgcataggctgcaaatgcctggcatcagaggtagaggccacccagacggcgaccctcgcggtggacgcctcgccgcagcttgctcggaagatccctgatacactgttcgggatcttctttgaggagatcaaccatgcaggggctggtggcatatgggctgaacttgttagtaacagagggtttgaagctggaggcctccatactccatcaaacattgacccatggtccatcattggagacgactcctctgtatttgtggagaccgatcgcacatcatgtttcagtcgaaacatcgttgctctcaggatggaggtcctttgcgataactgtcctactggtggtgttggtgtttacaacccagggttctggggcatgaacatagaagaaggaaaggtctacaatcttgttatgtttgttaagtcaccagaaacaactgacttgacagtttcactaacaagctctaacgggttgcaaaatctggcttcagctacagtaacagtttccggcgaatcaaactggataaaagtggagcaaaagttggttgctaaaggaaccaatagaacctcaaggcttcaaataacaactaacaagaaaggagttgtctggtttgatcaagtatcactcatgcctgaagacacatacaagggacatggctttcgcacagaacttatatccatgattttggatttaaaaccacgattcttgagatttcctggaggctgctttgtagaaggtggctggttaagaaatgcctttaggtggagagaatctattggtccatgggaagagagacctggacacttcggggatgtttggcattactggactgatgatggccttggatactatgaatttcttcagcttgcggaggacctgggtactgaaccaatctgggtattcaacaatggagtcagccacaatgatgaagttgatactgttgctattgctccttttgtaaaggatgtattggacagtatagaatttgcaagggggagtgcaaattcaacatggggctctgttagggctgcaatgggccaccctgaaccattcccagtgaaatatgttgcaataggaaatgaagattgtgggaaaaaattttaccgcggtaactacctcaagttctacaatgctataagacaggcctatccagacattcaaatgatttcaaactgcgatggttcatctacaccacttgatcatcctgctgatttatacgacttccatgtctataatgattctaagactttgttcaacatgaagagcacatttgacagaacatctcgtagtggacccaaggcttttgtaagtgagtacgctgtttggagaggtgatgcaggtagaggaagtcttcttgcttcattggcagaagctgctttccttactggactggagaagaatagtgacattgtttccatggcaagttacgcgccactattcgtaaacgacaatgaccagacgtggaacccagacgcaatcgtcttcaactcctggcagcattacggcactcccagttactggatgcagacgcttttccgcgagtctagtggtgctatgttccatccaacgacaatcagctccagctactcaggttcacttgcagcgtctgcgattacctggcaggactccgagaacagcttcctaagagtaaaggtcataaacttcgggtcagatgctgtgaccctgacaatctccacaagtgggctccaggccagtatcaacgctctgggatcaaccgccactgttctcacatcagcagatgtgatggatgaaaactccttcagcaacccaaccaaggttgtgccggtaaagagcgatctgagcaatgctgcagagcagatgcaggtcacgctggctcctcgctccttcagctcgttcgatctcgccctggctcagtccaagcttgtagcggagatgtgagctaggctggtacactagtatacaatacaacgtgtgaagtgtggtacacaaataccagcaaccacaggggttgccaagctgttgttagcatcttgaacacatggctttgtattgtgtataatgacatgatgctgatactaatctctattatataaagcactagtttctatgttgtcgtgctcccacgtatttaaatgataaaaaagctaaaattatacacaaatggatattcaaac

SEQ ID NO: 45102 - DNA, 2513 bp, Zea Mays
ggacgggccccacgttcccgtgcgccgtggccctgcgcgggcggtaggcaggacagccaccgccgaacgaagtggcgcgctccggcaagcaactgcggccgtgccgtgccgcgccgcgacatgggcgctggccgtcccgtcccgtgccggttcgtcatcctgccttcggaagccactgctaaccgctttctctgcccttctctacctacataagcgcgagggagcacgcctcccggcctctcctcatccaattcctatgccctgcacccgcagacggggagctcgcgtcttccttcggatggtggatgcatgcatgcatgacacgccggcccaaccagaattgacaagtggaagcgtatgggtattaccagcaacgacgcggcccctcgtgccgtcctcctccgcttcttgtttctgctctgcataggctgcaaatgcctggcatcagaggtagaggccacccagacggcgaccctcgcggtggacgcctcgccgcagcttgctcggaagatccctgatacactgttcgggatcttctttgagatcaaccatgcaggggctggtggcatatgggctgaacttgttagtaacagagggtttgaagctggaggcctccatactccatcaaacattgacccatggtccatcattggagacgactcctctgtatttgtggagaccgatcgcacatcatgtttcagtcgaaacatcgttgctctcaggatggaggtcctttgcgataactgtcctactggtggtgttggtgtttacaacccagggttctggggcatgaacatagaagaaggaaaggtctacaatcttgttatgtttgttaagtcaccagaaacaactgacttgacagtttcactaacaagctctaacgggttgcaaaatctggcttcagctacagtaacagtttccggcgaatcaaactggataaaagtggagcaaaagttggttgctaaaggaaccaatagaacctcaaggcttcaaataacaactaacaagaaaggagttgtctggtttgatcaagtatcactcatgcctgaagacacatacaagggacatggctttcgcacagaacttatatccatgattttggatttaaaaccacgattcttgagatttcctggaggctgctttgtagaaggtggctggttaagaaatgcctttaggtggagagaatctattggtccatgggaagagagacctggacacttcggggatgtttggcattactggactgatgatggccttggatactatgaatttcttcagcttgcggaggacctgggtactgaaccaatctgggtattcaacaatggagtcagccacaatgatgaagttgatactgttgctattgctccttttgtaaaggatgtattggacagtatagaatttgcaagggggagtgcaaattcaacatggggctctgttagggctgcaatgggccaccctgaaccattcccagtgaaatatgttgcaataggaaatgaagattgtgggaaaaaattttaccgcggtaactacctcaagttctacaatgctataagacaggcctatccagacattcaaatgatttcaaactgcgatggttcatctacaccacttgatcatcctgctgatttatacgacttccatgtctataatgattctaagactttgttcaacatgaagagcacatttgacagaacatctcgtagtggacccaaggcttttgtaagtgagtacgctgtttggagaggtgatgcaggtagaggaagtcttcttgcttcattggcagaagctgctttccttactggactggagaagaataggtggaacccagacgcaatcgtcttcaactcctggcagcattacggcactcccagttactggatgcagacgcttttccgcgagtctagtggtgctatgttccatccaacgacaatcagctccagctactcaggttcacttgcagcgtctgcgattacctggcaggactccgagaacagcttcctaagagtaaaggtcataaacttcgggtcagatgctgtgaccctgacaatctccacaagtgggctccaggccagtatcaacgctctgggatcaaccgccactgttctcacatcagcagatgtgatggatgaaaactccttcagcaacccaaccaaggttgtgccggtaaagagcgatctgagcaatgctgcagagcagatgcaggtcacgctggctcctcgctccttcagctcgttcgatctcgccctggctcagtccaagcttgtagcggagatgtgagctaggctggtacactagtatacaatacaacgtgtgaagtgtggtacacaaataccagcaaccacaggggttgccaagctgttgttagcatcttgaacacatggctttgtattgtgtataatgacatgatgctgatactaatctctattatataaagcactagtttctatgttgtcgtgctcccacgtatttaaatgataaaaaagctaaaattatacacaaatggatattcaaac

SEQ ID NO: 45103 - DNA, 2577 bp, Zea Mays
cgggggacgggccccacgttcccgtgcgccgtggccctgcgcgggcggtaggcaggacagccaccgccgaacgaagtggcgcgctccggcaagcaactgcggccgtgccgtgccgcgccgcgacatgggcgctggccgtcccgtcccgtgccggttcgtcatcctgccttcggaagccactgctaaccgctttctctgcccttctctacctacataagcgcgagggagcacgcctcccggcctctcctcatccaattcctatgccctgcacccgcagacggggagctcgcgtcttccttcggatggtggatgcatgcatgcatgacacgccggcccaaccagaattgacaagtggaagcgtatgggtattaccagcaacgacgcggcccctcgtgccgtcctcctccgcttcttgtttctgctctgcataggctgcaaatgcctggcatcagaggtagaggccacccagacggcgaccctcgcggtggacgcctcgccgcagcttgctcggaagatccctgatacactgttcgggatcttctttgaggagatcaaccatgcaggggctggtggcatatgggctgaacttgttagtaacagagggtttgaagctggaggcctccatactccatcaaacattgacccatggtccatcattggagacgactcctctgtatttgtggagaccgatcgcacatcatgtttcagtcgaaacatcgttgctctcaggatggaggtcctttgcgataactgtcctactggtggtgttggtgtttacaacccagggttctggggcatgaacatagaagaaggaaaggtctacaatcttgttatgtttgttaagtcaccagaaacaactgacttgacagtttcactaacaagctctaacgggttgcaaaatctggcttcagctacagtaacagtttccggcgaatcaaactggataaaagtggagcaaaagttggttgctaaaggaaccaatagaacctcaaggcttcaaataacaactaacaagaaaggagttgtctggtttgatcaagtatcactcatgcctgaagacacatacaagggacatggctttcgcacagaacttatatccatgattttggatttaaaaccacgattcttgagatttcctggaggctgctttgtagaaggtggctggttaagaaatgcctttaggtggagagaatctattggtccatgggaagagagacctggacacttcggggatgtttggcattactggactgatgatggccttggatactatgaatttcttcagcttgcggaggacctgggtactgaaccaatctgggtattcaacaatggagtcagccacaatgatgaagttgatactgttgctattgctccttttgtaaaggatgtattggacagtatagaatttgcaagggggagtgcaaattcaacatggggctctgttagggctgcaatgggccaccctgaaccattcccagtgaaatatgttgcaataggaaatgaagattgtgggaaaaaattttaccgcggtaactacctcaagttctacaatgctataagacaggcctatccagacattcaaatgatttcaaactgcgatggttcatctacaccacttgatcatcctgctgatttatacgacttccatgtctataatgattctaagactttgttcaacatgaagagcacatttgacagaacatctcgtagtggacccaaggcttttgtaagtgagtacgctgtttggagaggtgatgcaggtagaggaagtcttcttgcttcattggcagaagctgctttccttactggactggagaagaatagtgacattgtttccatggcaagttacgcgccactattcgtaaacgacaatgaccagacgtggaacccagacgcaatcgtcttcaactcctggcagcattacggcactcccagttactggatgcagacgcttttccgcgagtctagtggtgctatgttccatccaacgacaatcagctccagctactcaggttcacttgcagcgtctgcgattacctggcaggactccgagaacagcttcctaagagtaaaggtcataaacttcgggtcagatgctgtgaccctgacaatctccacaagtgggctccaggccagtatcaacgctctgggatcaaccgccactgttctcacatcagcagatgtgatggatgaaaactccttcagcaacccaaccaaggttgtgccggtaaagagcgatctgagcaatgctgcagagcagatgcaggtcacgctggctcctcgctccttcagctcgttcgatctcgccctggctcagtccaagcttgtagcggagatgtgagctaggctggtacactagtatacaatacaacgtgtgaagtgtggtacacaaataccagcaaccacaggggttgccaagctgttgttagcatcttgaacacatggctttgtattgtgtataatgacatgatgctgatactaatctctattatataaagcactagtttctatgttgtcgtgctcccacgtatttaaatgataaaaaagctaaaattatacacaaatggatattcaaac

SEQ ID NO: 45104 - DNA, 639 bp, Zea Mays
atctcttctctcacctttctcactcccgtctctctcgcgtctctctctccctcagtcccgtccgccaccggccgcccccgccatgcccgcccacgccaccggccgcccccgccacggccacccccgccaccggccgccccgccgagcccacccccggccccagccccgtccaccgcggccgccccacccacgcccccgttcgctgcggccgcagcgccccggcccgcctctggccccgcttctgtctggtgcaggacagtacaggaacttccagcaccccgatccctacattgttccatgggcaccaggcggcactaaattcacaagaaacccccctccacctcaaggggtgaagcagttcactaagggacttgcgaagagagcgtcctatgtcatgagaaaggagaacttagtgtttaagggcactagtttcagcttgagtaggcgtgagcttccatgtggaggtatcgaccatcactcgtcactgtaacccgatggtgatcgacgaccgtgagcttccatgttattgtgttctaatactaactggataatgagatgtgtcttattatgactatgcatgagacttttgtgatgtaattgatgagactatggatttaaatattgctatgtgattgtgtg

SEQ ID NO: 45105 - DNA, 1980 bp, Zea Mays
actctcgcctcgccgtcgccgtcgtcatctcagctttaattcgcagcaggcgggcagtggcaggccaggccacggcgtccagcaccagctacgcctgtgcgcgcgcttgtgcagtacctacgttggtgggtgggtaggtagctagtgcggcggagcatcgatcgcgcggtactctcagttccatccgtcgagagatcgaccggtcgtcgatcgacatggcgggccggggaggagcctcggcggcggcgccgttgctggagaagacagcggcggcggcggagtcgggcggcgggtgctgctacgtggacgggtgccccgggtgcgccgtggaccggcacaaggcggcgaacccgggcattccctacggcaacttcatctacgtctggatcgtcaccctctgcacagccttaccgatatcgtcgctcttccccttcttgtatttcatgataagagacctgaatgtcgctaaaagaacagaagacatcgggttctacgctggttttgtaggtgcctcattcatgtttggtagatgcttgacttcaacagtatggggcatagcggcagaccgcgttgggaggaaacctgttgtcgtgttcggcatttcctctgtagttgtgttcaacacattgtttggtctgagtgtcaactactggatggcaatagctacccggtttctgcttggtgccttgaatggtttgcttggaccgataaaggcttatgccattgaagtttgccgacctgaacatgaagccctagcactatcacttgtcagcacagcatggggaataggtctcattattggtcctgctcttggaggctaccttgcactgcctgcagaaaattttccaactgtcttttcacctgactcaatctttggaaggttcccatatttcttaccatgcttatgcacgtcaatcttcgctgcggttgttctcataagctgcatatggatgccggagactttgcacaagcacaaagtccatgaaaatagaagtcggaacattgaagctttggaggcccgtctgattgattcaaatgaaaaggttgaagaaagtggtagtttagatagtaagaagagcctattcaggaattggccattgatgtcatcaataattgtctattgtgtcttctccttccatgacatggcttacacagaggtgttctctctatgggctgaaagcgacaagaagtatggtgggctgagtttatcatctgaggatgttggtcaagtgcttgcagtcacaggtgccagtcttcttgtataccaactctttctataccccagtatcaataaggttcttgggcctatcaaatcttctcgagttgcagctatcctgtgcatacccatcctctttgcctacccctacatgacgtacctgtcggaacctggattatcaatcgttttgaatattgcgtcagtgataaagaataatctcggtgtcaccatcattacaggcactttcatccttcaaaacaatgccgtgcctcaggaccagcgaggcgctgcgaatggactgtccatgactgggatgtcctttttcaaggcacttgctccagcaggagcaggcattgtgttctcatgggcgcagaaacgccagcatgcgtttttcttcccaggtgaccagatggtattcttcctcctgaacgccgtcgagctggtcgggcttctcctcacgttcaagcccttcctggcagtaccagagcagtacgatacgagatagttagacgatctatctatctatacaagttctggaacgttcaagacgattcatcgtgtgcggctgtaccagtgaaggagaagcgccaaagcgtgtgccctttacgccgcggaaggtctacaaacagggacatactcctatataggaagatgcaatgcaagagctgtggtgtacttttaattgaacacgatgaagagactgggagagggcattatgactcctgaaaatgcaatgctttttaattacaccccttccgaggtcc

SEQ ID NO: 45106 - DNA, 2362 bp, Zea Mays
actctcgcctcgccgtcgccgtcgtcatctcagctttaattcgcagcaggcgggcagtggcaggccaggccacggcgtccagcaccagctacgcctgtgcgcgcgcttgtgcagtacctacgttggtgggtgggtaggtagctagtgcggcggagcatcgatcgcgcggtactctcagttccatccgtcgagagatcgaccggtcgtcgatcgacatggcgggccggggaggagcctcggcggcggcgccgttgctggagaagacagcggcggcggcggagtcgggcggcgggtgctgctacgtggacgggtgccccgggtgcgccgtggaccggcacaaggcggcgaacccgggcattccctacggcaacttcatctacgtctggatcgtcaccctctgcacagccttaccgatatcgtcgctcttccccttcttgtatttcatgataagagacctgaatgtcgctaaaagaacagaagacatcgggttctacgctggttttgtaggtgcctcattcatgtttggtagatgcttgacttcaacagtatggggcatagcggcagaccgcgttgggaggaaacctgttgtcgtgttcggcatttcctctgtgttagtgacatcttacctccgtcctaccctatgcaaacagaactaagtgttgactaacagtgcatctgcttctgtttgctcccgcccttctcttattattcaaacgtttaagtctctgagctcattctttgtaatgtcccagagttgtgttcaacacattgtttggtctgagtgtcaactactggatggcaatagctacccggtttctgcttggtgccttgaatggtttgcttggaccgataaaggcttatgccattgaagtttgccgacctgaacatgaagccctagcactatcacttgtcagcacagcatggggaataggtctcattattggtcctgctcttggaggctaccttgcactgaaaattttccaactgtcttttcacctgactcaatctttggaaggttcccatatttcttaccatgcttatgcacgtcaatcttcgctgcggttgttctcataagctgcatatggatgccggagactttgcacaagcacaaagtccatgaaaatagaagtcggaacattgaagctttggaggcccgtctgattgattcaaatgaaaaggttgaagaaagtggtagtttagatagtaagaagagcctattcaggaattggccattgatgtcatcaataattgtctattgtgtcttctccttccatgacatggcttacacagaggtgttctctctatgggctgaaagcgacaagaagtatggtgggctgagtttatcatctgaggatgttggtcaagtgcttgcagtcacaggtgccagtcttcttgtataccaactctttctataccccagtatcaataaggttcttgggcctatcaaatcttctcgagttgcagctatcctgtgcatacccatcctctttgcctacccctacatgacgtacctgtcggaacctggattatcaatcgttttgaatattgcgtcagtgataaagaataatctcggtgtcaccatcattacaggcactttcatccttcaaaacaatgccgtgcctcaggaccagcgaggcgctgcgaatggactgtccatgactgggatgtcctttttcaaggcacttgctccagcaggagcaggcattgtgttctcatgggcgcagaaacgccagcatgcgtttttcttcccaggtgaccagatggtattcttcctcctgaacgccgtcgagctggtcgggcttctcctcacgttcaagcccttcctggcagtaccagagcagtacgatacgagatagttagacgatctatctatctatacaagttctggaacgttcaagacgattcatcgtgtgcggctgtaccagtgaaggagaagcgccaaagcgtgtgccctttacgccgcggaaggtctacaaacagggacatactcctatataggaagatgcaatgcaagagctgtggtgtacttttaattgtaggtgatgtagtagtgtatggtagtatcagcattttctgcattcatgaaatgcacacgcaggtggtgggaaatgtgggcatggatcgagagtcgctgcgctgttaagtagcaataaatgttaaggttcagtgactcgctgttatttgttgggaatgaaattactgggcatctgtaccctcgttgttttatatctggctgttggattctattatttcttcagagtaatctttttgcatcatgtcaggaacacgatgaagagactgggagagggcattatgactcctgaaaatgcaatgctttttaattacaccccttccgaggtcc

SEQ ID NO: 45107 - DNA, 2022 bp, Zea Mays
actctcgcctcgccgtcgccgtcgtcatctcagctttaattcgcagcaggcgggcagtggcaggccaggccacggcgtccagcaccagctacgcctgtgcgcgcgcttgtgcagtacctacgttggtgggtgggtaggtagctagtgcggcggagcatcgatcgcgcggtactctcagttccatccgtcgagagatcgaccggtcgtcgatcgacatggcgggccggggaggagcctcggcggcggcgccgttgctggagaagacagcggcggcggcggagtcgggcggcgggtgctgctacgtggacgggtgccccgggtgcgccgtggaccggcacaaggcggcgaacccgggcattccctacggcaacttcatctacgtctggatcgtcaccctctgcacagagttgtgttcaacacattgtttggtctgagtgtcaactactggatggcaatagctacccggtttctgcttggtgccttgaatggtttgcttggaccgataaaggcttatgccattgaagtttgccgacctgaacatgaagccctagcactatcacttgtcagcacagcatggggaataggtctcattattggtcctgctcttggaggctaccttgcactgcctgcagaaaattttccaactgtcttttcacctgactcaatctttggaaggttcccatatttcttaccatgcttatgcacgtcaatcttcgctgcggttgttctcataagctgcatatggatgccggagactttgcacaagcacaaagtccatgaaaatagaagtcggaacattgaagctttggaggcccgtctgattgattcaaatgaaaaggttgaagaaagtggtagtttagatagtaagaagagcctattcaggaattggccattgatgtcatcaataattgtctattgtgtcttctccttccatgacatggcttacacagaggtgttctctctatgggctgaaagcgacaagaagtatggtgggctgagtttatcatctgaggatgttggtcaagtgcttgcagtcacaggtgccagtcttcttgtataccaactctttctataccccagtatcaataaggttcttgggcctatcaaatcttctcgagttgcagctatcctgtgcatacccatcctctttgcctacccctacatgacgtacctgtcggaacctggattatcaatcgttttgaatattgcgtcagtgataaagaataatctcggtgtcaccatcattacaggcactttcatccttcaaaacaatgccgtgcctcaggaccagcgaggcgctgcgaatggactgtccatgactgggatgtcctttttcaaggcacttgctccagcaggagcaggcattgtgttctcatgggcgcagaaacgccagcatgcgtttttcttcccaggtgaccagatggtattcttcctcctgaacgccgtcgagctggtcgggcttctcctcacgttcaagcccttcctggcagtaccagagcagtacgatacgagatagttagacgatctatctatctatacaagttctggaacgttcaagacgattcatcgtgtgcggctgtaccagtgaaggagaagcgccaaagcgtgtgccctttacgccgcggaaggtctacaaacagggacatactcctatataggaagatgcaatgcaagagctgtggtgtacttttaattgtaggtgatgtagtagtgtatggtagtatcagcattttctgcattcatgaaatgcacacgcaggtggtgggaaatgtgggcatggatcgagagtcgctgcgctgttaagtagcaataaatgttaaggttcagtgactcgctgttatttgttgggaatgaaattactgggcatctgtaccctcgttgttttatatctggctgttggattctattatttcttcagagtaatctttttgcatcatgtcaggaacacgatgaagagactgggagagggcattatgactcctgaaaatgcaatgctttttaattacaccccttccgaggtcc

SEQ ID NO: 45108 - DNA, 2133 bp, Zea Mays
ttaattgtagcggcagcggcctcttccactctcgcctcgccgtcgccgtcgtcatctcagctttaattcgcagcaggcgggcagtggcaggccaggccacggcgtccagcaccagctacgcctgtgcgcgcgcttgtgcagtacctacgttggtgggtgggtaggtagctagtgcggcggagcatcgatcgcgcggtactctcagttccatccgtcgagagatcgaccggtcgtcgatcgacatggcgggccggggaggagcctcggcggcggcgccgttgctggagaagacagcggcggcggcggagtcgggcggcgggtgctgctacgtggacgggtgccccgggtgcgccgtggaccggcacaaggcggcgaacccgggcattccctacggcaacttcatctacgtctggatcgtcaccctctgcacagccttaccgatatcgtcgctcttccccttcttgtatttcatgataagagacctgaatgtcgctaaaagaacagaagacatcgggttctacgctggttttgtaggtgcctcattcatgtttggtagatgcttgacttcaacagtatggggcatagcggcagaccgcgttgggaggaaacctgttgtcgtgttcggcatttcctctgtagttgtgttcaacacattgtttggtctgagtgtcaactactggatggcaatagctacccggtttctgcttggtgccttgaatggtttgcttggaccgataaaggcttatgccattgaagtttgccgacctgaacatgaagccctagcactatcacttgtcagcacagcatggggaataggtctcattattggtcctgctcttggaggctaccttgcactgcctgcagaaaattttccaactgtcttttcacctgactcaatctttggaaggttcccatatttcttaccatgcttatgcacgtcaatcttcgctgcggttgttctcataagctgcatatggatgccggagactttgcacaagcacaaagtccatgaaaatagaagtcggaacattgaagctttggaggcccgtctgattgattcaaatgaaaaggttgaagaaagtggtagtttagatagtaagaagagcctattcaggaattggccattgatgtcatcaataattgtctattgtgtcttctccttccatgacatggcttacacagaggtgttctctctatgggctgaaagcgacaagaagtatggtgggctgagtttatcatctgaggatgttggtcaagtgcttgcagtcacaggtgccagtcttcttgtataccaactctttctataccccagtatcaataaggttcttgggcctatcaaatcttctcgagttgcagctatcctgtgcatacccatcctctttgcctacccctacatgacgtacctgtcggaacctggattatcaatcgttttgaatattgcgtcagtgataaagaataatctcggtgtcaccatcattacaggcactttcatccttcaaaacaatgccgtgcctcaggaccagcgaggcgctgcgaatggactgtccatgactgggatgtcctttttcaaggcacttgctccagcaggagcaggcattgtgttctcatgggcgcagaaacgccagcatgcgtttttcttcccaggtgaccagatggtattcttcctcctgaacgccgtcgagctggtcgggcttctcctcacgttcaagcccttcctggcagtaccagagcagtacgatacgagatagttagacgatctatctatctatacaagttctggaacgttcaagacgattcatcgtgtgcggctgtaccagtgaaggagaagcgccaaagcgtgtgccctttacgccgcggaaggtctacaaacagggacatactcctatataggaagatgcaatgcaagagctgtggtgtacttttaattgtaggtgatgtagtagtgtatggtagtatcagcattttctgcattcatgaaatgcacacgcaggtggtgggaaatgtgggcatggatcgagagtcgctgcgctgttaagtagcaataaatgttaaggaacacgatgaagagactgggagagggcattatgactcctgaaaatgcaatgctttttaattacaccccttccgaggtcc

SEQ ID NO: 45109 - DNA, 396 bp, Zea Mays
acatttgaggaatccgcctttgatataaagaagacgctcccgaatccgtctccgcctcctgtcgctcgctctccctgtctcccgcacgccgacccgcagccgccgccgttcgccatgggtttcctcgacgcgctctaccgtgtggtgatgcgccgcaacgccgtctacgttaccttcgtcgtcgccggcgctttcgcgggcgagcgggcggtggactacggcgttcacaagatctgggagatgaacaacctcgggaaaaggtacgaagacatatcggttttggggcagaggccagctgaggaatgataaattttggtcaccagtttgcttcggtttgaccgtttcattttggcacagtaataaacgatgagggctttgtctatctttgttggtcct

SEQ ID NO: 45110 - DNA, 951 bp, Zea Mays
aaattacatttgaggaatccgcctttgatataaagaagacgctcccgaatccgtctccgcctcctgtcgctcgctctccctgtctcccgcacgccgacccgcagccgccgccgttcgccatgggtttcctcgacgcgctctaccgtgtggtgatgcgccgcaacgccgtctacgttaccttcgtcgtcgccggcgctttcgcgggcgagcgggcggtggactacggcgttcacaagatctgggagatgaacaacctcgggaaaaggtacgaagacatatcggttttggggcagaggccagctgaggaatgataaattttggtcaccagtttgcttcggtttgaccgtttcattttggcacagtaataaacgatgtaaacttacgctgctcctatgacctccttctcattcgtttactctgaaaatgcttttgtggggatttcgtggtgcatgattgaaacctgttagggcttgttcggttagctctcaatccacatccatgtggattgagtgggattggatagttttgaatcccaaacaagcccttatatagaacatgcaaatactaaaataccttggaggattcctttgttaccttttccccgttctagtttttgtcatgacccggagcatgtactctgcccttccaaagttcggtggtcgtcgacgttcctccgcatccaaagaggaagtagtgttatagaatgatgtaagcaaactaattggtttgccacattagtgttataggatgatgtaagtaggctaattggtttgccacattagattttcattaagttggatgagagaaagaagagaagtagactgctaagagcaagtttaacctccgtcttaaattaaaattcgttttagataattaatagattcgtacaaaaattcgttttagataattaacagattcatacaaatacttgatgtatgtgttttatttatg

SEQ ID NO: 45111 - DNA, 682 bp, Zea Mays
cccagccgtgcgacggtcggtgcccagccccagcatcaggaccgtccgctccgccgccgtcgccttttcatgcctcgtgtcgtctgcgggtccggtcccggtggtctcggtccgaccccaacgaagggcgaggagagaggaagaggcgagatgccgcaccgagcgcggccgatgacggggctgctggtgttcatgggcgtcaacctcgcgctcttcaacaccatcactcccgtctacgacttcgtctgcttcctcccccactgggaacgaaggagagaacaccgccgaagggaacttgaaggtctgcaagcgaagggttctgtagaaactactaactgaactctctcctagtcttgtagcaaacccaaggatgcaaggagggccatcgttggattcgaacacgtgcgctgatgttgcagccccctccttcgacattcgccatggcaaaaatgtgcgcgtgatgcaaatagacgcgagaaacaaatgggatgggcgccaacgagaggattagggggatttcagctcgcgcaaatatgcgggagggatcatcacggatgcgcggcgacaaaaagattggggaagcttgcagaagctgttggagtggaagaaaactattttttctccgaaaaacactttttcaggtccttttatcatccttttgaagatgctataagataatcat

SEQ ID NO: 45112 - DNA, 638 bp, Zea Mays
cccagccgtgcgacggtcggtgcccagccccagcatcaggaccgtccgctccgccgccgtcgccttttcatgcctcgtgtcgtctgcgggtccggtcccggtggtctcggtccgaccccaacgaagggcgaggagagaggaagaggcgagatgccgcaccgagcgcggccgatgacggggctgctggtgttcatgggcgtcaacctcgcgctcttcaacaccatcactcccgtctacgacttcgtctgcttcctcccccactgggaacgaaggagagaacaccgccgaagggaacttgaaggtctgcaagcgaagggttctgtagaaactactaactgaactctctcctagaccattcttttttgccgctagttgtctcaagtatcaagatgttcgcaatagctactctttttttttatgtagagaaacatccccttgtaccttgtgatgatttgagatatgttttgaccatttctattttctcatttttattgataaattgacaccattgtgtgttctgtcatatggttaccttatcagttgatcttgttgcatgttgttccttcattcaaataatcaaatgtgtcatctgcttttgtgcaaggacaatgagagtaataaatgccaactgtagtctt

SEQ ID NO: 45113 - DNA, 1737 bp, Zea Mays
gtttaattgccggctaggttatctcgccgagaagaacatttcgcaaacggttatttcaatgagagcacaatgctctgggcagaagggaggaaggaatggatgccactctcgtccatctctgagctacactccgcagtcgcagcgaaggatcaatctgaacaagatgctccagatgttgatgatgattttgagaaatttcagaaggaggttatcgaagccgagacagaggtgaaggccttgaaaggcaatgatgtggaccagcaagatgatgagcggccagcaaccccccctgatggagaggaagaatttactgatgatgatggcaccatttacaaatgggaccgtactttgagggcatgggttcctcaaaatgatgcatctggtagcaaggaagattacgctgttgaagagatgacttttgcagttgaggaggaaatatttcaggcacccgatatcctgggtcctgcattagaagaaatcaacaatctacctgaaagcaaaaataaaggatcagataaagcagaaatgagaggagacaaaaagcggaaatcttatgagaatccagctgagaaaaaggtatagtttccaagtcattcttggagttatttgtaagtttgcgcattttaattctagtcttcaataaactagtaacctattgaacttctgtggtaggaagctaacaaacctccggacagttggtttgatctcaaagtaaacacacatgtctatgtaactggtttgcctgatgatgtcacagtggaggagattgtggaggtattttccaagtgcggaataataaaggaggacccagagactaaaaagccacgagtgaagatttatactgatagagaaaccggcaggaagaagggtgatgccttggtgacatatttcaaggagccttctgtagctttagcggttcaattgttggatgggacaccattccgtcctggtggtaagactcatatgtctgtgatgttttcgtttcaaagaaaactgacaagcaaaagaagaggaagataaagaaggttgaggacaaaatgcttggatggggtgggcatgacgataagaagctgatgattcctgctacagtaattttaaggcacatgttcactcctgctgagctgagagctgatgaagagcttcttcctgagcttgaggctgatgttagagaggaatgcatcaagtttggtccggtggataatgtcaaggtttgtgaaaatcatccacaaggtgtcatattggtgagattcaaagacaggaaagatggtgccaaatgcatagagaagatgaacggcagatggtttgctggacggcaaatccatgcgagcgaagacgatggctctgttaaccatgctcttatccgtgattacgacgcggaggtgtcaaggctggatcgatttggacaagagctagaagagtccacatagagtgtatatatacacacacacaccagggattagagtaggtgtgttacctcattcataggtaggttcgcctgattgaacatgagaaagaagttattggatacacctgctaataagagtagtgaccggcttgcagagctggtgatatcatcactagcgaagtagcagcacactgctttctcaaatgtgttgtttaatgaatgagaagctcatatcgatactattaacctcggctccctatgaaagtacagtgggcatttctatctgaaatgtgggaatttttatatgcattactggcttgttcgtactggtt

SEQ ID NO: 45114 - DNA, 1895 bp, Zea Mays
actataataggttctctcgagccttcgccgccaagagcccgatacccgccgtcctccctgctcctgctgccgcgtgcccctctccggccacccgccgccggcgcagtgtccatgaactagcacctctttcttcgcccggtacccattcagttcgtccgcctccttctcttcgagtttgggtgcccatggagaccagcagtgcgcccgccgccgccaccgaggccggctggtacgtgcttggaccgaaccaggagggcgtcggaccctacgcgcttgctgagcttcgagaacatttcgcaaacggttatttcaatgagagcacaatgctctgggcagaagggaggaaggaatggatgccactctcgtccatctctgagctacactccgcagtcgcagcgaaggatcaatctgaacaagatgctccagatgttgatgatgattttgagaaatttcagaaggaggttatcgaagccgagacagaggtgaaggccttgaaaggcaatgatgtggaccagcaagatgatgagcggccagcaaccccccctgatggagaggaagaatttactgatgatgatggcaccatttacaaatgggaccgtactttgagggcatgggttcctcaaaatgatgcatctggtagcaaggaagattacgctgttgaagagatgacttttgcagttgaggaggaaatatttcaggcacccgatatcctgggtcctgcattagaagaaatcaacaatctacctgaaagcaaaaataaaggatcagataaagcagaaatgagaggagacaaaaagcggaaatcttatgagaatccagctgagaaaaaggaagctaacaaacctccggacagttggtttgatctcaaagtaaacacacatgtctatgtaactggtttgcctgatgatgtcacagtggaggagattgtggaggtattttccaagtgcggaataataaaggaggacccagagactaaaaagccacgagtgaagatttatactgatagagaaaccggcaggaagaagggtgatgccttggtgacatatttcaaggagccttctgtagctttagcggttcaattgttggatgggacaccattccgtcctggtggtaagactcatatgtctgtaagtccagccaaatttgagcagaaaggtgatgttttcgtttcaaagaaaactgacaagcaaaagaagaggaagataaagaaggttgaggacaaaatgcttggatggggtgggcatgacgataagaagctgatgattcctgctacagtaattttaaggctgatgaagagcttcttcctgagcttgaggctgatgttagagaggaatgcatcaagtttggtccggtggataatgtcaaggtttgtgaaaatcatccacaaggtgtcatattggtgagattcaaagacaggaaagatggtgccaaatgcatagagaagatgaacggcagatggtttgctggacggcaaatccatgcgagcgaagacgatggctctgttaaccatgctcttatccgtgattacgacgcggaggtgtcaaggctggatcgatttggacaagagctagaagagtccacatagagtgtatatatacacacacacaccagggattagagtaggtgtgttacctcattcataggtaggttcgcctgattgaacatgagaaagaagttattggatacacctgctaataagagtagtgaccggcttgcagagctggtgatatcatcactagcgaagtagcagcacactgctttctcaaatgtgttgtttaatgaatgagaagctcatatcgatactattaacctcggctccctatgaaagtacagtgggcatttctatctgaaatgtgggaatttttatatgcattactggcttgttcgtactggtt

SEQ ID NO: 45115 - DNA, 1871 bp, Zea Mays
actataataggttctctcgagccttcgccgccaagagcccgatacccgccgtcctccctgctcctgctgccgcgtgcccctctccggccacccgccgccggcgcagtgtccatgaactagcacctctttcttcgcccggtacccattcagttcgtccgcctccttctcttcgagtttgggtgcccatggagaccagcagtgcgcccgccgccgccaccgaggccggctggtacgtgcttggaccgaaccaggagggcgtcggaccctacgcgcttgctgagcttcgagaacatttcgcaaacggttatttcaatgagagcacaatgctctgggcagaagggaggaaggaatggatgccactctcgtccatctctgagctacactccgcagtcgcagcgaaggatcaatctgaacaagagatgttgatgatgattttgagaaatttcagaaggaggttatcgaagccgagacagaggtgaaggccttgaaaggcaatgatgtggaccagcaagatgatgagcggccagcaaccccccctgatggagaggaagaatttactgatgatgatggcaccatttacaaatgggaccgtactttgagggcatgggttcctcaaaatgatgcatctggtagcaaggaagattacgctgttgaagagatgacttttgcagttgaggaggaaatatttcaggcacccgatatcctgggtcctgcattagaagaaatcaacaatctacctgaaagcaaaaataaaggatcagataaagcagaaatgagaggagacaaaaagcggaaatcttatgagaatccagctgagaaaaaggaagctaacaaacctccggacagttggtttgatctcaaagtaaacacacatgtctatgtaactggtttgcctgatgatgtcacagtggaggagattgtggaggtattttccaagtgcggaataataaaggaggacccagagactaaaaagccacgagtgaagatttatactgatagagaaaccggcaggaagaagggtgatgccttggtgacatatttcaaggagccttctgtagctttagcggttcaattgttggatgggacaccattccgtcctggtggtgatgttttcgtttcaaagaaaactgacaagcaaaagaagaggaagataaagaaggttgaggacaaaatgcttggatggggtgggcatgacgataagaagctgatgattcctgctacagtaattttaaggcacatgttcactcctgctgagctgagagctgatgaagagcttcttcctgagcttgaggctgatgttagagaggaatgcatcaagtttggtccggtggataatgtcaaggtttgtgaaaatcatccacaaggtgtcatattggtgagattcaaagacaggaaagatggtgccaaatgcatagagaagatgaacggcagatggtttgctggacggcaaatccatgcgagcgaagacgatggctctgttaaccatgctcttatccgtgattacgacgcggaggtgtcaaggctggatcgatttggacaagagctagaagagtccacatagagtgtatatatacacacacacaccagggattagagtaggtgtgttacctcattcataggtaggttcgcctgattgaacatgagaaagaagttattggatacacctgctaataagagtagtgaccggcttgcagagctggtgatatcatcactagcgaagtagcagcacactgctttctcaaatgtgttgtttaatgaatgagaagctcatatcgatactattaacctcggctccctatgaaagtacagtgggcatttctatctgaaatgtgggaatttttatatgcattactggcttgttcgtactggtt

SEQ ID NO: 45116 - DNA, 1860 bp, Zea Mays
actataataggttctctcgagccttcgccgccaagagcccgatacccgccgtcctccctgctcctgctgccgcgtgcccctctccggccacccgccgccggcgcagtgtccatgaactagcacctctttcttcgcccggtacccattcagttcgtccgcctccttctcttcgagtttgggtgcccatggagaccagcagtgcgcccgccgccgccaccgaggccggctgaacatttcgcaaacggttatttcaatgagagcacaatgctctgggcagaagggaggaaggaatggatgccactctcgtccatctctgagctacactccgcagtcgcagcgaaggatcaatctgaacaagatgctccagatgttgatgatgattttgagaaatttcagaaggaggttatcgaagccgagacagaggtgaaggccttgaaaggcaatgatgtggaccagcaagatgatgagcggccagcaaccccccctgatggagaggaagaatttactgatgatgatggcaccatttacaaatgggaccgtactttgagggcatgggttcctcaaaatgatgcatctggtagcaaggaagattacgctgttgaagagatgacttttgcagttgaggaggaaatatttcaggcacccgatatcctgggtcctgcattagaagaaatcaacaatctacctgaaagcaaaaataaaggatcagataaagcagaaatgagaggagacaaaaagcggaaatcttatgagaatccagctgagaaaaagctaacaaacctccggacagttggtttgatctcaaagtaaacacacatgtctatgtaactggtttgcctgatgatgtcacagtggaggagattgtggaggtattttccaagtgcggaataataaaggaggacccagagactaaaaagccacgagtgaagatttatactgatagagaaaccggcaggaagaagggtgatgccttggtgacatatttcaaggagccttctgtagctttagcggttcaattgttggatgggacaccattccgtcctggtggtaagactcatatgtctgtaagtccagccaaatttgagcagaaaggtgatgttttcgtttcaaagaaaactgacaagcaaaagaagaggaagataaagaaggttgaggacaaaatgcttggatggggtgggcatgacgataagaagctgatgattcctgctacagtaattttaaggcacatgttcactcctgctgagctgagagctgatgaagagcttcttcctgagcttgaggctgatgttagagaggaatgcatcaagtttggtccggtggataatgtcaaggtttgtgaaaatcatccacaaggtgtcatattggtgagattcaaagacaggaaagatggtgccaaatgcatagagaagatgaacggcagatggtttgctggacggcaaatccatgcgagcgaagacgatggctctgttaaccatgctcttatccgtgattacgacgcggaggtgtcaaggctggatcgatttggacaagagctagaagagtccacatagagtgtatatatacacacacacaccagggattagagtaggtgtgttacctcattcataggtaggttcgcctgattgaacatgagaaagaagttattggatacacctgctaataagagtagtgaccggcttgcagagctggtgatatcatcactagcgaagtagcagcacactgctttctcaaatgtgttgtttaatgaatgagaagctcatatcgatactattaacctcggctccctatgaaagtacagtgggcatttctatctgaaatgtgggaatttttatatgcattactggcttgttcgtactggtt
